United States Patent Application Publication US 2012/0159672 A1 - sequence listing, part 16

SEQ ID NO: 36075 - protein, 371 aa, Zea mays subsp. mays
  peptide (1)..(371): Ceres Seq. ID no. 13586375
  misc_feature (137)..(364): Pfam Name: Pfam Description:  Papain family cysteine protease
  misc_feature (1)..(371): NCBI GI NO: 1706260 NR Description: Cysteine proteinase 1 precursor
  misc_feature (6)..(369): NCBI GI NO: 15705865 NR Description: cysteine proteinase precursor
  misc_feature (6)..(369): NCBI GI NO: 5051468 NR Description: putative preprocysteine proteinase
  misc_feature (6)..(369): NCBI GI NO: 4757570 NR Description: cysteine proteinase precursor [Solanum melongena]
  misc_feature (6)..(369): NCBI GI NO: 28192375 NR Description: CPR2-like cysteine proteinase [Nicotiana tabacum]
  misc_feature (6)..(371): NCBI GI NO: 7435795 NR Description: cysteine proteinase (EC 3
  misc_feature (6)..(369): NCBI GI NO: 419782 NR Description: cysteine proteinase (EC 3
  misc_feature (4)..(369): NCBI GI NO: 100203 NR Description: cysteine proteinase (EC 3
  misc_feature (6)..(369): NCBI GI NO: 419781 NR Description: cysteine proteinase (EC 3
  misc_feature (1)..(366): NCBI GI NO: 7381219 NR Description: papain-like cysteine proteinase isoform I
MAHRVLLLLSLASAAAVAAAVDAEDPLIRQVVPGGDDNDLELNAESHFLSFVQRFGKSYKDADEHAYRLSVFKDNLRRARRHQLLDPSAEHGVTKFSDLTPAEFRRTYLGLRKSRRALLRELGESAHEAPVLPTDGLPDDFDWRDHGAVGPVKNQGSCGSCWSFSASGALEGAHYLATGKLEVLSEQQFVDCDHECDSSEPDSCDSGCNGGLMTTAFSYLQKAGGLESEKDYPYTGSDGKCKFDKSKIVASVQNFSVVSVDEAQISANLIKHGPLAIGINAAYMQTYIGGVSCPYICGRHLDHGVLLVGYGASGFAPIRLKDKPYWIIKNSWGENWGENGYYKICRGSNVRNKCGVDSMVSTVSAVHASKE

SEQ ID NO: 36076 - DNA, 520 bp, Zea mays subsp. mays
  misc_feature (1)..(520): Ceres Seq. ID no. 3604118
gtgttcatgcaatggaagcagkcatggcttgttgggagctcsaacaaactttacaaagccttacaggtgcatctcctggtgagggcactggggcaactatgtctgacgatgaagacaatcaggtggacagtgagagcaacatgtttgatggaaatgaggggtcagatggaatgggatttggcccattaatgttgactgagggtgagagatccttagttgagcgtgtccggcaggagctaaagcatgagcttaagcaggggtacagagacaaacttgtggatattcgggaagagatattgcggaagcgaagagctgggaaactccctggcgacactgcttctaccttaaaagcctggtggcaagctcattctaagtggccgtacccaaccgaggaagacaaggctcgactggtgcaggaaacagggctacaactgaagcagatcaataactggtttatcaaccagcgtaagcggaactggcacaacaattcggcgtcatcctygtcggacaaaagcaagag

SEQ ID NO: 36077 - protein, 172 aa, Zea mays subsp. mays
  peptide (1)..(172): Ceres Seq. ID no. 3604119
  misc_feature (126)..(155): Pfam Name: Pfam Description:  Homeobox domain
  misc_feature (1)..(171): NCBI GI NO: 14149139 NR Description: KNOX family class 2 homeodomain protein
  misc_feature (4)..(171): NCBI GI NO: 14090235 NR Description: homeobox gene
  misc_feature (1)..(171): NCBI GI NO: 33333542 NR Description: knotted 7 [Hordeum vulgare]
  misc_feature (1)..(171): NCBI GI NO: 14149137 NR Description: KNOX family class 2 homeodomain protein
  misc_feature (4)..(171): NCBI GI NO: 14090233 NR Description: homeobox gene
  misc_feature (1)..(171): NCBI GI NO: 3023961 NR Description: Homeobox protein knotted-1 like 3 (KNAP3)
  misc_feature (1)..(171): NCBI GI NO: 6016226 NR Description: Homeobox protein knotted-1 like LET12
  misc_feature (1)..(171): NCBI GI NO: 4098244 NR Description: homeobox 1 protein [Lycopersicon esculentum]
  misc_feature (1)..(171): NCBI GI NO: 7446245 NR Description: homeobox protein NTH23 - common tobacco
  misc_feature (1)..(171): NCBI GI NO: 7446252 NR Description: probable homeobox protein OSH45, splice form OSH45
  misc_feature (7)..(7): Xaa is any aa, unknown or other
  misc_feature (14)..(14): Xaa is any aa, unknown or other
  misc_feature (167)..(167): Xaa is any aa, unknown or other
VHAMEAXMACWELXQTLQSLTGASPGEGTGATMSDDEDNQVDSESNMFDGNEGSDGMGFGPLMLTEGERSLVERVRQELKHELKQGYRDKLVDIREEILRKRRAGKLPGDTASTLKAWWQAHSKWPYPTEEDKARLVQETGLQLKQINNWFINQRKRNWHNNSASSXSDKSK

SEQ ID NO: 36078 - protein, 169 aa, Zea mays subsp. mays
  peptide (1)..(169): Ceres Seq. ID no. 3604120
  misc_feature (123)..(152): Pfam Name: Pfam Description:  Homeobox domain
  misc_feature (1)..(168): NCBI GI NO: 14149139 NR Description: KNOX family class 2 homeodomain protein
  misc_feature (1)..(168): NCBI GI NO: 14090235 NR Description: homeobox gene
  misc_feature (1)..(168): NCBI GI NO: 33333542 NR Description: knotted 7 [Hordeum vulgare]
  misc_feature (1)..(168): NCBI GI NO: 14149137 NR Description: KNOX family class 2 homeodomain protein
  misc_feature (1)..(168): NCBI GI NO: 14090233 NR Description: homeobox gene
  misc_feature (1)..(168): NCBI GI NO: 3023961 NR Description: Homeobox protein knotted-1 like 3 (KNAP3)
  misc_feature (1)..(168): NCBI GI NO: 6016226 NR Description: Homeobox protein knotted-1 like LET12
  misc_feature (1)..(168): NCBI GI NO: 4098244 NR Description: homeobox 1 protein [Lycopersicon esculentum]
  misc_feature (1)..(168): NCBI GI NO: 7446245 NR Description: homeobox protein NTH23 - common tobacco
  misc_feature (1)..(168): NCBI GI NO: 7446252 NR Description: probable homeobox protein OSH45, splice form OSH45
  misc_feature (4)..(4): Xaa is any aa, unknown or other
  misc_feature (11)..(11): Xaa is any aa, unknown or other
  misc_feature (164)..(164): Xaa is any aa, unknown or other
MEAXMACWELXQTLQSLTGASPGEGTGATMSDDEDNQVDSESNMFDGNEGSDGMGFGPLMLTEGERSLVERVRQELKHELKQGYRDKLVDIREEILRKRRAGKLPGDTASTLKAWWQAHSKWPYPTEEDKARLVQETGLQLKQINNWFINQRKRNWHNNSASSXSDKSK

SEQ ID NO: 36079 - protein, 165 aa, Zea mays subsp. mays
  peptide (1)..(165): Ceres Seq. ID no. 3604121
  misc_feature (119)..(148): Pfam Name: Pfam Description:  Homeobox domain
  misc_feature (1)..(164): NCBI GI NO: 14149139 NR Description: KNOX family class 2 homeodomain protein
  misc_feature (1)..(164): NCBI GI NO: 14090235 NR Description: homeobox gene
  misc_feature (1)..(164): NCBI GI NO: 33333542 NR Description: knotted 7 [Hordeum vulgare]
  misc_feature (1)..(164): NCBI GI NO: 14149137 NR Description: KNOX family class 2 homeodomain protein
  misc_feature (1)..(164): NCBI GI NO: 14090233 NR Description: homeobox gene
  misc_feature (1)..(164): NCBI GI NO: 3023961 NR Description: Homeobox protein knotted-1 like 3 (KNAP3)
  misc_feature (1)..(164): NCBI GI NO: 6016226 NR Description: Homeobox protein knotted-1 like LET12
  misc_feature (1)..(164): NCBI GI NO: 4098244 NR Description: homeobox 1 protein [Lycopersicon esculentum]
  misc_feature (1)..(164): NCBI GI NO: 7446245 NR Description: homeobox protein NTH23 - common tobacco
  misc_feature (1)..(164): NCBI GI NO: 7446252 NR Description: probable homeobox protein OSH45, splice form OSH45
  misc_feature (7)..(7): Xaa is any aa, unknown or other
  misc_feature (160)..(160): Xaa is any aa, unknown or other
MACWELXQTLQSLTGASPGEGTGATMSDDEDNQVDSESNMFDGNEGSDGMGFGPLMLTEGERSLVERVRQELKHELKQGYRDKLVDIREEILRKRRAGKLPGDTASTLKAWWQAHSKWPYPTEEDKARLVQETGLQLKQINNWFINQRKRNWHNNSASSXSDKSK

SEQ ID NO: 36080 - DNA, 717 bp, Zea mays subsp. mays
  misc_feature (1)..(717): Ceres Seq. ID no. 12469010
gaagctagccggcgattgaaaactgagctattaatacagatggatgggttgactaagacagatgagcttgtttttgttctagcagcaacaaatttaccatgggagttggatgcagcaatgctgcgtcggctggagaagcgtattcttgttccattgccagagccggatgctagacatgctatgtttgaagagctcctgccatatacacctggcacaatggagattccctatgatgttcttgtggagaaaactgaagggtattctggctctgatattcgcctggtatgcaaggaagcagcaatgcagcccctaagacgggtaatggcagttcttgaaggcaggaaagaagaggtccctgagagtgagttgcctgaagttggcccagtaactacagaagatattgaacttgctttgaggaatacaagaccgtctgctcatcttcacgcacatagatacgaaaagttcaaccaagattatggcagtcatgtacatggctaaaggggagaagcttgttgtagggtttaatttgtatgctcatgcgtgggccattaggtgactactgaattcatcgacatgctgaggtatccttgtaaacactatgcttatccttgtatgctatacactatcattcatttgatgagcaataagctgtttggtaactcagtctcacctggataaggagaaactacgattttccctgcatttggctcgatttat

SEQ ID NO: 36081 - protein, 165 aa, Zea mays subsp. mays
  peptide (1)..(165): Ceres Seq. ID no. 12469011
  misc_feature (1)..(105): Pfam Name: AAA Pfam Description: ATPase family associated with various cellular activities
  misc_feature (1)..(163): NCBI GI NO: 34911050 NR Description: putative katanin
  misc_feature (1)..(163): NCBI GI NO: 34909678 NR Description: katanin p60 subunit A 1-like
  misc_feature (1)..(163): NCBI GI NO: 18403587 NR Description: putative katanin; protein id: At2g34560
  misc_feature (1)..(163): NCBI GI NO: 25408335 NR Description: probable katanin [imported] - Arabidopsis thaliana
  misc_feature (1)..(161): NCBI GI NO: 34190544 NR Description: Unknown (protein for MGC:33211) [Homo sapiens]
  misc_feature (1)..(161): NCBI GI NO: 11071772 NR Description: probable AAA ATPase [Leishmania major]
  misc_feature (1)..(145): NCBI GI NO: 17508421 NR Description: Katanin, defective MEIosis MEI-1 (51.7 kD) (mei-1)
  misc_feature (1)..(139): NCBI GI NO: 39595436 NR Description: Hypothetical protein CBG04086
  misc_feature (1)..(145): NCBI GI NO: 32563584 NR Description: AAA ATPase
  misc_feature (1)..(161): NCBI GI NO: 5901990 NR Description: katanin p60 subunit A 1 [Homo sapiens]
EASRRLKTELLIQMDGLTKTDELVFVLAATNLPWELDAAMLRRLEKRILVPLPEPDARHAMFEELLPYTPGTMEIPYDVLVEKTEGYSGSDIRLVCKEAAMQPLRRVMAVLEGRKEEVPESELPEVGPVTTEDIELALRNTRPSAHLHAHRYEKFNQDYGSHVHG

SEQ ID NO: 36082 - protein, 152 aa, Zea mays subsp. mays
  peptide (1)..(152): Ceres Seq. ID no. 12469012
  misc_feature (1)..(92): Pfam Name: AAA Pfam Description: ATPase family associated with various cellular activities
  misc_feature (1)..(150): NCBI GI NO: 34911050 NR Description: putative katanin
  misc_feature (1)..(150): NCBI GI NO: 34909678 NR Description: katanin p60 subunit A 1-like
  misc_feature (1)..(150): NCBI GI NO: 18403587 NR Description: putative katanin; protein id: At2g34560
  misc_feature (1)..(150): NCBI GI NO: 25408335 NR Description: probable katanin [imported] - Arabidopsis thaliana
  misc_feature (1)..(148): NCBI GI NO: 34190544 NR Description: Unknown (protein for MGC:33211) [Homo sapiens]
  misc_feature (1)..(148): NCBI GI NO: 11071772 NR Description: probable AAA ATPase [Leishmania major]
  misc_feature (1)..(132): NCBI GI NO: 17508421 NR Description: Katanin, defective MEIosis MEI-1 (51.7 kD) (mei-1)
  misc_feature (1)..(126): NCBI GI NO: 39595436 NR Description: Hypothetical protein CBG04086
  misc_feature (1)..(132): NCBI GI NO: 32563584 NR Description: AAA ATPase
  misc_feature (1)..(148): NCBI GI NO: 5901990 NR Description: katanin p60 subunit A 1 [Homo sapiens]
MDGLTKTDELVFVLAATNLPWELDAAMLRRLEKRILVPLPEPDARHAMFEELLPYTPGTMEIPYDVLVEKTEGYSGSDIRLVCKEAAMQPLRRVMAVLEGRKEEVPESELPEVGPVTTEDIELALRNTRPSAHLHAHRYEKFNQDYGSHVHG

SEQ ID NO: 36083 - protein, 126 aa, Zea mays subsp. mays
  peptide (1)..(126): Ceres Seq. ID no. 12469013
  misc_feature (1)..(66): Pfam Name: AAA Pfam Description: ATPase family associated with various cellular activities
  misc_feature (1)..(124): NCBI GI NO: 34911050 NR Description: putative katanin
  misc_feature (1)..(124): NCBI GI NO: 34909678 NR Description: katanin p60 subunit A 1-like
  misc_feature (1)..(124): NCBI GI NO: 18403587 NR Description: putative katanin; protein id: At2g34560
  misc_feature (1)..(124): NCBI GI NO: 25408335 NR Description: probable katanin [imported] - Arabidopsis thaliana
  misc_feature (1)..(122): NCBI GI NO: 34190544 NR Description: Unknown (protein for MGC:33211) [Homo sapiens]
  misc_feature (1)..(122): NCBI GI NO: 11071772 NR Description: probable AAA ATPase [Leishmania major]
  misc_feature (1)..(106): NCBI GI NO: 17508421 NR Description: Katanin, defective MEIosis MEI-1 (51.7 kD) (mei-1)
  misc_feature (1)..(100): NCBI GI NO: 39595436 NR Description: Hypothetical protein CBG04086
  misc_feature (1)..(106): NCBI GI NO: 32563584 NR Description: AAA ATPase
  misc_feature (1)..(122): NCBI GI NO: 5901990 NR Description: katanin p60 subunit A 1 [Homo sapiens]
MLRRLEKRILVPLPEPDARHAMFEELLPYTPGTMEIPYDVLVEKTEGYSGSDIRLVCKEAAMQPLRRVMAVLEGRKEEVPESELPEVGPVTTEDIELALRNTRPSAHLHAHRYEKFNQDYGSHVHG

SEQ ID NO: 36084 - DNA, 651 bp, Zea mays subsp. mays
  misc_feature (1)..(651): Ceres Seq. ID no. 13501289
  misc_feature (384)..(384): n is a, c, t, g, unknown, or other
  misc_feature (318)..(318): n is a, c, t, g, unknown, or other
tgccaagtcccaacatcttgagctcgatcgcaaaccctcagacacttcttcccccagccgacgtacatgaagcacccgagagacgccggcgccatgccgctctccctcgcgctgtccctcggcgccggcgtggcccccgggcacggcagcagcaagcggccccggcgcgcggcgggcggcggggacggcgagttggtctgcaagacgtgcagccgcgccttcgtctcgttccaggcgctgggcgggcaccggacaagccacctgagggccggccggcacggccttgcgctcgggatgcccgcgccggcgccggcgaangaggcgccgccgcccgcgacgacccacctgtgccacgtctgcgggctcggcttccagatgggccangcgctaggcggccacatgcggcgccaccgcgaggaggctgccgccaccaccgcgcaggcgccgcccgtcctcctccagctcttcgtgtagagttttgcccgtccacggagtctagctagtagaggaattcttcgcgttcctgtcgtcactcgtgagtctgctgcgcatcgtagattcacagtacagttgttggcgtcaattcattcattcattcatttagttgtatacatgtaaataactgattagttattttattgttcctaatct

SEQ ID NO: 36085 - protein, 166 aa, Zea mays subsp. mays
  peptide (1)..(166): Ceres Seq. ID no. 13501290
  misc_feature (106)..(106): Xaa is any aa, unknown or other
  misc_feature (128)..(128): Xaa is any aa, unknown or other
PSPNILSSIANPQTLLPPADVHEAPERRRRHAALPRAVPRRRRGPRARQQQAAPARGGRRGRRVGLQDVQPRLRLVPGAGRAPDKPPEGRPARPCARDARAGAGEXGAAARDDPPVPRLRARLPDGPXARRPHAAPPRGGCRHHRAGAARPPPALRVEFCPSTESS

SEQ ID NO: 36086 - protein, 135 aa, Zea mays subsp. mays
  peptide (1)..(135): Ceres Seq. ID no. 13501291
  misc_feature (45)..(65): Pfam Name: Pfam Description:  Zinc finger, C2H2 type
  misc_feature (2)..(135): NCBI GI NO: 29124117 NR Description: putative Cys2/His2 zinc-finger protein
  misc_feature (1)..(121): NCBI GI NO: 29124140 NR Description: putative Cys2/His2 zinc-finger protein
  misc_feature (13)..(123): NCBI GI NO: 18652814 NR Description: C2H2 zinc finger protein [Oryza sativa]
  misc_feature (13)..(123): NCBI GI NO: 34908122 NR Description: P0031D11.19
  misc_feature (18)..(123): NCBI GI NO: 30420734 NR Description: zinc finger transcription factor ZFP19
  misc_feature (18)..(123): NCBI GI NO: 34908110 NR Description: P0031D11.12
  misc_feature (45)..(130): NCBI GI NO: 2346978 NR Description: ZPT2-14 [Petunia x hybrida]
  misc_feature (38)..(121): NCBI GI NO: 15238538 NR Description: zinc finger protein Zat12 [Arabidopsis thaliana]
  misc_feature (31)..(121): NCBI GI NO: 15231334 NR Description: zinc finger -related protein
  misc_feature (45)..(118): NCBI GI NO: 15231333 NR Description: zinc finger -related protein
  misc_feature (84)..(84): Xaa is any aa, unknown or other
  misc_feature (106)..(106): Xaa is any aa, unknown or other
MKHPRDAGAMPLSLALSLGAGVAPGHGSSKRPRRAAGGGDGELVCKTCSRAFVSFQALGGHRTSHLRAGRHGLALGMPAPAPAXEAPPPATTHLCHVCGLGFQMGXALGGHMRRHREEAAATTAQAPPVLLQLFV

SEQ ID NO: 36087 - protein, 126 aa, Zea mays subsp. mays
  peptide (1)..(126): Ceres Seq. ID no. 13501292
  misc_feature (36)..(56): Pfam Name: Pfam Description:  Zinc finger, C2H2 type
  misc_feature (1)..(126): NCBI GI NO: 29124117 NR Description: putative Cys2/His2 zinc-finger protein
  misc_feature (1)..(112): NCBI GI NO: 29124140 NR Description: putative Cys2/His2 zinc-finger protein
  misc_feature (4)..(114): NCBI GI NO: 18652814 NR Description: C2H2 zinc finger protein [Oryza sativa]
  misc_feature (4)..(114): NCBI GI NO: 34908122 NR Description: P0031D11.19
  misc_feature (9)..(114): NCBI GI NO: 30420734 NR Description: zinc finger transcription factor ZFP19
  misc_feature (9)..(114): NCBI GI NO: 34908110 NR Description: P0031D11.12
  misc_feature (36)..(121): NCBI GI NO: 2346978 NR Description: ZPT2-14 [Petunia x hybrida]
  misc_feature (29)..(112): NCBI GI NO: 15238538 NR Description: zinc finger protein Zat12 [Arabidopsis thaliana]
  misc_feature (22)..(112): NCBI GI NO: 15231334 NR Description: zinc finger -related protein
  misc_feature (36)..(109): NCBI GI NO: 15231333 NR Description: zinc finger -related protein
  misc_feature (75)..(75): Xaa is any aa, unknown or other
  misc_feature (97)..(97): Xaa is any aa, unknown or other
MPLSLALSLGAGVAPGHGSSKRPRRAAGGGDGELVCKTCSRAFVSFQALGGHRTSHLRAGRHGLALGMPAPAPAXEAPPPATTHLCHVCGLGFQMGXALGGHMRRHREEAAATTAQAPPVLLQLFV

SEQ ID NO: 36088 - DNA, 497 bp, Zea mays subsp. mays
  misc_feature (1)..(497): Ceres Seq. ID no. 6405274
tttctgtgcaagcaaccttcccttataaattcgttgtgagcaagttcttgcagcctggagcttatgatctggttggttacatagtgtatgagatcgaccagcacccttaccagaatgtattctacaatggcactattgaggtcgttgaggctggaggcttactcagtgttgagtctgtgttcctcatcacccttggaatcgctctttttggtctctttggattatgggcatatggccaggttcagcagctctcgaagaaaacgaagaaggcccccaaggtggagctcggaactggaacaactgatgccaacatcgatgagtggctggagggcacttcgtttgtgcagagaagcaaatccaagaagaagcagacctgaagctagctctccagagtagttaatccttggaggatctagaatgaggcatttgagggtagcccttcacaagtgacttctgcagaaagataratgcctaaggaggkgctgaaaaatgtagtt

SEQ ID NO: 36089 - protein, 124 aa, Zea mays subsp. mays
  peptide (1)..(124): Ceres Seq. ID no. 6405275
  misc_feature (1)..(122): NCBI GI NO: 21555380 NR Description: putative signal sequence receptor, alpha subunit
  misc_feature (1)..(122): NCBI GI NO: 547391 NR Description: alpha-subunit; putative
  misc_feature (1)..(122): NCBI GI NO: 18399609 NR Description: putative signal sequence receptor, alpha subunit
  misc_feature (1)..(122): NCBI GI NO: 25335776 NR Description: hypothetical protein At2g21160
  misc_feature (1)..(123): NCBI GI NO: 15227250 NR Description: putative TRAP protein; protein id: At2g16595.1
SVQATFPYKFVVSKFLQPGAYDLVGYIVYEIDQHPYQNVFYNGTIEVVEAGGLLSVESVFLITLGIALFGLFGLWAYGQVQQLSKKTKKAPKVELGTGTTDANIDEWLEGTSFVQRSKSKKKQT

SEQ ID NO: 36090 - protein, 102 aa, Zea mays subsp. mays
  peptide (1)..(102): Ceres Seq. ID no. 6405276
MRSTSTLTRMYSTMALLRSLRLEAYSVLSLCSSSPLESLFLVSLDYGHMARFSSSRRKRRRPPRWSSELEQLMPTSMSGWRALRLCREANPRRSRPEASSPE

SEQ ID NO: 36091 - protein, 93 aa, Zea mays subsp. mays
  peptide (1)..(93): Ceres Seq. ID no. 6405277
MYSTMALLRSLRLEAYSVLSLCSSSPLESLFLVSLDYGHMARFSSSRRKRRRPPRWSSELEQLMPTSMSGWRALRLCREANPRRSRPEASSPE

SEQ ID NO: 36092 - DNA, 1222 bp, Zea mays subsp. mays
  misc_feature (1)..(1222): Ceres Seq. ID no. 13623625
actaccgctgcgagtggccgctcccgcaggttctgctctccgccttctccatccacaacgagaccctcaacgtctggacgcatcttataggatttttcatctttctcgctctgaccatatacacagcaacacaagttccaaatgcagtagatatccggagcttgcagcatttgccagatgtactgagaaaggctgatattcataagattcaggcagagcttgtgtcatgtcttccgtcgttacctcacctttcagatctacaaaagctgaaggatgagctgaagacctcttggaattctatggaggttcttccatctctgtcccgttggcatctcttggagttactcgcaaattgtctgccacacagatttacccatcccaatgaaacaagtttgtctgttcttcaaagcatgaaggaggatctagcaagcctgattgcaccgcaactgatcagaccaattgcgcggtggccattctatgccttcttgggaggagccatgttctgcctccttgccagcagcacttgccaccttctctcctgccattctcgccgcctagcatacattatgcttcggcttgattacgcaggcatcgcagctctaatcgccacgtccttctaccctccagtatactattctttcatgtgctaccccttcttttgcaacctgtacctcagtttcataaccatcctaggagtggcaactatcgcgttctctctacttccggtcttccagaatccggagttcagaaccatcagagcatgcctcttctttggcatgggtgcatctggcgtgatacctgttcttcacaagctggtcctcttctggcaccaaccggaggcattgcacacgaccggatacgaaattctgatggggctcttctacgggctgggagcattggtatatgcggcacgggtacctgagcgctggatgcctgggaagtttgacatcgccgggcacagccaccagctgttccacgtcttggttgttgccggagcctacacacactaccacgcagggcttgtgtacctcaagtggagagacctgcaaggctgctgaaaggtgctgcatcgttgaggatgtggatagattgtagattccgtgaattcaggctgaaggtcatggtctgttgtaaattgtaacagtaatcatgaaacaattgctacaagtctaccaggtagtcgggcttccattaataatcaattgaagactagtatttatgc

SEQ ID NO: 36093 - protein, 351 aa, Zea mays subsp. mays
  peptide (1)..(351): Ceres Seq. ID no. 13623626
  misc_feature (15)..(300): Pfam Name: Hly-III / UPF0073 Pfam Description: Uncharacterised protein family
  misc_feature (1)..(300): NCBI GI NO: 20330770 NR Description: Hypothetical protein
  misc_feature (48)..(351): NCBI GI NO: 15235657 NR Description: expressed protein [Arabidopsis thaliana]
  misc_feature (48)..(340): NCBI GI NO: 15233813 NR Description: expressed protein [Arabidopsis thaliana]
  misc_feature (153)..(335): NCBI GI NO: 13272399 NR Description: hypothetical protein [Arabidopsis thaliana]
  misc_feature (153)..(335): NCBI GI NO: 18400468 NR Description: expressed protein [Arabidopsis thaliana]
  misc_feature (1)..(44): NCBI GI NO: 13272399 NR Description: hypothetical protein [Arabidopsis thaliana]
  misc_feature (1)..(44): NCBI GI NO: 18400468 NR Description: expressed protein [Arabidopsis thaliana]
  misc_feature (153)..(346): NCBI GI NO: 18377749 NR Description: unknown protein [Arabidopsis thaliana]
  misc_feature (153)..(346): NCBI GI NO: 30688829 NR Description: expressed protein [Arabidopsis thaliana]
  misc_feature (1)..(44): NCBI GI NO: 18377749 NR Description: unknown protein [Arabidopsis thaliana]
YRCEWPLPQVLLSAFSIHNETLNVWTHLIGFFIFLALTIYTATQVPNAVDIRSLQHLPDVLRKADIHKIQAELVSCLPSLPHLSDLQKLKDELKTSWNSMEVLPSLSRWHLLELLANCLPHRFTHPNETSLSVLQSMKEDLASLIAPQLIRPIARWPFYAFLGGAMFCLLASSTCHLLSCHSRRLAYIMLRLDYAGIAALIATSFYPPVYYSFMCYPFFCNLYLSFITILGVATIAFSLLPVFQNPEFRTIRACLFFGMGASGVIPVLHKLVLFWHQPEALHTTGYEILMGLFYGLGALVYAARVPERWMPGKFDIAGHSHQLFHVLVVAGAYTHYHAGLVYLKWRDLQGC

SEQ ID NO: 36094 - protein, 252 aa, Zea mays subsp. mays
  peptide (1)..(252): Ceres Seq. ID no. 13623627
  misc_feature (1)..(201): Pfam Name: Hly-III / UPF0073 Pfam Description: Uncharacterised protein family
  misc_feature (1)..(201): NCBI GI NO: 20330770 NR Description: Hypothetical protein
  misc_feature (1)..(252): NCBI GI NO: 15235657 NR Description: expressed protein [Arabidopsis thaliana]
  misc_feature (1)..(241): NCBI GI NO: 15233813 NR Description: expressed protein [Arabidopsis thaliana]
  misc_feature (54)..(236): NCBI GI NO: 13272399 NR Description: hypothetical protein [Arabidopsis thaliana]
  misc_feature (54)..(236): NCBI GI NO: 18400468 NR Description: expressed protein [Arabidopsis thaliana]
  misc_feature (54)..(247): NCBI GI NO: 18377749 NR Description: unknown protein [Arabidopsis thaliana]
  misc_feature (54)..(247): NCBI GI NO: 30688829 NR Description: expressed protein [Arabidopsis thaliana]
  misc_feature (1)..(252): NCBI GI NO: 15241302 NR Description: expressed protein [Arabidopsis thaliana]
  misc_feature (41)..(247): NCBI GI NO: 25407688 NR Description: hypothetical protein AT4g30850
  misc_feature (73)..(236): NCBI GI NO: 25309925 NR Description: hypothetical protein At2g24150
MEVLPSLSRWHLLELLANCLPHRFTHPNETSLSVLQSMKEDLASLIAPQLIRPIARWPFYAFLGGAMFCLLASSTCHLLSCHSRRLAYIMLRLDYAGIAALIATSFYPPVYYSFMCYPFFCNLYLSFITILGVATIAFSLLPVFQNPEFRTIRACLFFGMGASGVIPVLHKLVLFWHQPEALHTTGYEILMGLFYGLGALVYAARVPERWMPGKFDIAGHSHQLFHVLVVAGAYTHYHAGLVYLKWRDLQGC

SEQ ID NO: 36095 - protein, 215 aa, Zea mays subsp. mays
  peptide (1)..(215): Ceres Seq. ID no. 13623628
  misc_feature (1)..(164): Pfam Name: Hly-III / UPF0073 Pfam Description: Uncharacterised protein family
  misc_feature (1)..(164): NCBI GI NO: 20330770 NR Description: Hypothetical protein
  misc_feature (1)..(215): NCBI GI NO: 15235657 NR Description: expressed protein [Arabidopsis thaliana]
  misc_feature (1)..(204): NCBI GI NO: 15233813 NR Description: expressed protein [Arabidopsis thaliana]
  misc_feature (17)..(199): NCBI GI NO: 13272399 NR Description: hypothetical protein [Arabidopsis thaliana]
  misc_feature (17)..(199): NCBI GI NO: 18400468 NR Description: expressed protein [Arabidopsis thaliana]
  misc_feature (17)..(210): NCBI GI NO: 18377749 NR Description: unknown protein [Arabidopsis thaliana]
  misc_feature (17)..(210): NCBI GI NO: 30688829 NR Description: expressed protein [Arabidopsis thaliana]
  misc_feature (1)..(215): NCBI GI NO: 15241302 NR Description: expressed protein [Arabidopsis thaliana]
  misc_feature (4)..(210): NCBI GI NO: 25407688 NR Description: hypothetical protein AT4g30850
  misc_feature (36)..(199): NCBI GI NO: 25309925 NR Description: hypothetical protein At2g24150
MKEDLASLIAPQLIRPIARWPFYAFLGGAMFCLLASSTCHLLSCHSRRLAYIMLRLDYAGIAALIATSFYPPVYYSFMCYPFFCNLYLSFITILGVATIAFSLLPVFQNPEFRTIRACLFFGMGASGVIPVLHKLVLFWHQPEALHTTGYEILMGLFYGLGALVYAARVPERWMPGKFDIAGHSHQLFHVLVVAGAYTHYHAGLVYLKWRDLQGC

SEQ ID NO: 36096 - DNA, 454 bp, Zea mays subsp. mays
  misc_feature (1)..(454): Ceres Seq. ID no. 3603843
agagagtcttactttagaarkgaaactgacagctggaccmcmbaaagcagcactagagcatctgaggaagaagattgaaatatcaacagagaaaatacgtttagctaaggtgaaagaggaacatgcaaaaaagacttgggaagttgctgcmcaakttgttaargacgaakaggatgctaagcagaaattatgtgatgacctaaaccatstaktccaggagagtgctgctycccaatatgcawgattkgaggagctgaagaaacgttkagaatctctaaatcccataagggattctgttattgtgtcaggkgtttatactgcacarcatgctactctgaattcagtacctcascaaccaactgcacaaaatcctgcagatgtaactggccgtcagaatattgccacaaagcctgcttctatgcaacagcagcctatacctgcggaggcagaaaag

SEQ ID NO: 36097 - protein, 151 aa, Zea mays subsp. mays
  peptide (1)..(151): Ceres Seq. ID no. 3603844
  misc_feature (16)..(150): NCBI GI NO: 37531870 NR Description: hypothetical protein
  misc_feature (2)..(150): NCBI GI NO: 18423326 NR Description: expressed protein; protein id: At5g51840
  misc_feature (2)..(150): NCBI GI NO: 21593113 NR Description: unknown [Arabidopsis thaliana]
  misc_feature (2)..(44): NCBI GI NO: 10177883 NR Description: gene_id:MIO24.2~unknown protein
  misc_feature (7)..(7): Xaa is any aa, unknown or other
  misc_feature (13)..(13): Xaa is any aa, unknown or other
  misc_feature (14)..(14): Xaa is any aa, unknown or other
  misc_feature (50)..(50): Xaa is any aa, unknown or other
  misc_feature (52)..(52): Xaa is any aa, unknown or other
  misc_feature (54)..(54): Xaa is any aa, unknown or other
  misc_feature (57)..(57): Xaa is any aa, unknown or other
  misc_feature (70)..(70): Xaa is any aa, unknown or other
  misc_feature (71)..(71): Xaa is any aa, unknown or other
  misc_feature (77)..(77): Xaa is any aa, unknown or other
  misc_feature (81)..(81): Xaa is any aa, unknown or other
  misc_feature (82)..(82): Xaa is any aa, unknown or other
  misc_feature (89)..(89): Xaa is any aa, unknown or other
  misc_feature (103)..(103): Xaa is any aa, unknown or other
  misc_feature (108)..(108): Xaa is any aa, unknown or other
  misc_feature (117)..(117): Xaa is any aa, unknown or other
ESLTLEXKLTAGXXKAALEHLRKKIEISTEKIRLAKVKEEHAKKTWEVAXQXVXDEXDAKQKLCDDLNHXXQESAAXQYAXXEELKKRXESLNPIRDSVIVSXVYTAXHATLNSVPXQPTAQNPADVTGRQNIATKPASMQQQPIPAEAEK

SEQ ID NO: 36098 - DNA, 665 bp, Zea mays subsp. mays
  misc_feature (1)..(665): Ceres Seq. ID no. 12420368
ttggtactatgtgggagcgttgcgctgcgagtggcggcttcttatcatgttgggcttgggtggtttctcaaggcccatctgtactgtaacggctcattgttaggtgagaagtaaggaagagtaacagacctacgcgcttcgcacgagacgctcgacgcacgaaactggtgctttaatagagtagagattaaaagatttcatgcaaagttttgatttactgattctgttcaataagcttttctatttttccaacagattgtgagtaggattaagaaagagtgccctaatgtaccccttgtgttgtatataaatggaaatggaggtttacttgagcgcatgaagaacacaggagctgatgttattgggcttgactggacagtggacatgactgatggaaggaggcgccttggtaatggcattagtgtacaagggaatgtggatccagcatttttgttctcaccattaccagtactgactgatgaaattcataggttagtaaaggctcaaagatttccatttaatttacgttattttgtgtttttgcttaatgctcatgtgcaattcattaatgagatcacctaaagtgttgcttgagcagtgtactatacatcttcatgtcaggtatgattggttgcctgcactatgataaacctgcattacacccc

SEQ ID NO: 36099 - protein, 81 aa, Zea mays subsp. mays
  peptide (1)..(81): Ceres Seq. ID no. 12420369
  misc_feature (1)..(56): Pfam Name: URO-D Pfam Description: Uroporphyrinogen decarboxylase
  misc_feature (1)..(56): NCBI GI NO: 34912796 NR Description: putative uroporphyrinogen decarboxylase
  misc_feature (1)..(55): NCBI GI NO: 8777476 NR Description: uroporphyrinogen decarboxylase
  misc_feature (1)..(55): NCBI GI NO: 16323119 NR Description: AT3g14930/K15M2_7 [Arabidopsis thaliana]
  misc_feature (1)..(55): NCBI GI NO: 18400577 NR Description: uroporphyrinogen decarboxylase, putative
  misc_feature (1)..(55): NCBI GI NO: 14334768 NR Description: putative uroporphyrinogen decarboxylase
  misc_feature (1)..(55): NCBI GI NO: 15226690 NR Description: putative uroporphyrinogen decarboxylase
  misc_feature (1)..(55): NCBI GI NO: 16975230 NR Description: Chain A
  misc_feature (1)..(55): NCBI GI NO: 2501647 NR Description: Uroporphyrinogen decarboxylase
  misc_feature (1)..(55): NCBI GI NO: 2501646 NR Description: Uroporphyrinogen decarboxylase (UPD)
  misc_feature (1)..(55): NCBI GI NO: 6014938 NR Description: Uroporphyrinogen decarboxylase
MKNTGADVIGLDWTVDMTDGRRRLGNGISVQGNVDPAFLFSPLPVLTDEIHRLVKAQRFPFNLRYFVFLLNAHVQFINEIT

SEQ ID NO: 36100 - protein, 65 aa, Zea mays subsp. mays
  peptide (1)..(65): Ceres Seq. ID no. 12420370
  misc_feature (1)..(40): NCBI GI NO: 34912796 NR Description: putative uroporphyrinogen decarboxylase
  misc_feature (1)..(39): NCBI GI NO: 8777476 NR Description: uroporphyrinogen decarboxylase
  misc_feature (1)..(39): NCBI GI NO: 18400577 NR Description: uroporphyrinogen decarboxylase, putative
  misc_feature (1)..(39): NCBI GI NO: 16323119 NR Description: AT3g14930/K15M2_7 [Arabidopsis thaliana]
  misc_feature (1)..(39): NCBI GI NO: 14334768 NR Description: putative uroporphyrinogen decarboxylase
  misc_feature (1)..(39): NCBI GI NO: 15226690 NR Description: putative uroporphyrinogen decarboxylase
  misc_feature (1)..(39): NCBI GI NO: 16975230 NR Description: Chain A
  misc_feature (1)..(39): NCBI GI NO: 2501647 NR Description: Uroporphyrinogen decarboxylase
  misc_feature (1)..(39): NCBI GI NO: 2501646 NR Description: Uroporphyrinogen decarboxylase (UPD)
  misc_feature (1)..(39): NCBI GI NO: 6014938 NR Description: Uroporphyrinogen decarboxylase
MTDGRRRLGNGISVQGNVDPAFLFSPLPVLTDEIHRLVKAQRFPFNLRYFVFLLNAHVQFINEIT

SEQ ID NO: 36101 - DNA, 578 bp, Zea mays subsp. mays
  misc_feature (1)..(578): Ceres Seq. ID no. 12361361
catgtcccaatgcacaaggttccagtcggacagttcaaagtccccaagttcaagatatcctttggatttgaggcatctgagttgctcaaaggtctcgggctccagcttccgtttagtgctgaagcggacctgtcggggttagttgattcaccagagggacggaacttgtctgtttcgtccgtattccacaagtcatttgtcgaagtgaacgaggaaggaacggaggccgctgccgcatctgctgcaacagttgtgctccggtcgttcacgatgcctcaggatttcgtcgcagatcaccctttcatgttcctgattcgcgaagacttgactggtgtggtgttgtttgtcggccacgtggtgaatcccctccttgctccatagtgtgttgttcagaagtgtggccttggtgcggttccatccccttacagatgtgtggctttgacagctgatcaagctttatgtgtaatctgccatgttttgtttttgaataaatagatgcttgatcgatgtatgtaaggctgcgagatgatagttcagaattggtatgtgtggtcatggactcatggtacttactgtgt

SEQ ID NO: 36102 - protein, 126 aa, Zea mays subsp. mays
  peptide (1)..(126): Ceres Seq. ID no. 12361362
  misc_feature (1)..(122): Pfam Name: serine protease inhibitor Pfam Description: Serpin
  misc_feature (1)..(125): NCBI GI NO: 40539102 NR Description: putative serine protease inhibitor
  misc_feature (1)..(125): NCBI GI NO: 421989 NR Description: serpin - barley
  misc_feature (1)..(125): NCBI GI NO: 4868129 NR Description: barley protein Z homolog [Avena fatua]
  misc_feature (1)..(125): NCBI GI NO: 7438222 NR Description: serpin homolog WZS3 - wheat
  misc_feature (1)..(123): NCBI GI NO: 5734506 NR Description: serpin [Triticum aestivum]
  misc_feature (1)..(123): NCBI GI NO: 26224736 NR Description: serpin-like protein [Citrus x paradisi]
  misc_feature (1)..(125): NCBI GI NO: 40539102 NR Description: putative serine protease inhibitor
  misc_feature (1)..(125): NCBI GI NO: 7438221 NR Description: serpin WZS2 - wheat
  misc_feature (1)..(125): NCBI GI NO: 2130110 NR Description: serpin - wheat
  misc_feature (1)..(125): NCBI GI NO: 5734504 NR Description: serpin [Triticum aestivum]
HVPMHKVPVGQFKVPKFKISFGFEASELLKGLGLQLPFSAEADLSGLVDSPEGRNLSVSSVFHKSFVEVNEEGTEAAAASAATVVLRSFTMPQDFVADHPFMFLIREDLTGVVLFVGHVVNPLLAP

SEQ ID NO: 36103 - protein, 123 aa, Zea mays subsp. mays
  peptide (1)..(123): Ceres Seq. ID no. 12361363
  misc_feature (1)..(119): Pfam Name: serine protease inhibitor Pfam Description: Serpin
  misc_feature (1)..(122): NCBI GI NO: 40539102 NR Description: putative serine protease inhibitor
  misc_feature (1)..(122): NCBI GI NO: 421989 NR Description: serpin - barley
  misc_feature (1)..(122): NCBI GI NO: 4868129 NR Description: barley protein Z homolog [Avena fatua]
  misc_feature (1)..(122): NCBI GI NO: 7438222 NR Description: serpin homolog WZS3 - wheat
  misc_feature (1)..(120): NCBI GI NO: 5734506 NR Description: serpin [Triticum aestivum]
  misc_feature (1)..(120): NCBI GI NO: 26224736 NR Description: serpin-like protein [Citrus x paradisi]
  misc_feature (1)..(122): NCBI GI NO: 40539102 NR Description: putative serine protease inhibitor
  misc_feature (1)..(122): NCBI GI NO: 7438221 NR Description: serpin WZS2 - wheat
  misc_feature (1)..(122): NCBI GI NO: 2130110 NR Description: serpin - wheat
  misc_feature (1)..(122): NCBI GI NO: 5734504 NR Description: serpin [Triticum aestivum]
MHKVPVGQFKVPKFKISFGFEASELLKGLGLQLPFSAEADLSGLVDSPEGRNLSVSSVFHKSFVEVNEEGTEAAAASAATVVLRSFTMPQDFVADHPFMFLIREDLTGVVLFVGHVVNPLLAP

SEQ ID NO: 36104 - DNA, 610 bp, Zea mays subsp. mays
  misc_feature (1)..(610): Ceres Seq. ID no. 3609410
  misc_feature (555)..(555): n is a, c, t, g, unknown, or other
ttgacgtggttacgttgtgtgcgtgcgttcagaggtgtggctgtgccggaccagtcaagcccatatggtgtccgactgctgatcaaggactacccctatgccgttgacgggctcgtcatctggtgggcgatcgagcggtgggtcaaggagtacctggacatctactaccctaacgacggcgagctccagcgtgacgtggagctgcaggcgtggtggaaggaggtgcgtgaggaggcgcacggcgacctcaaggaccgagactggtggcccaggatggacaccgtccagcagctggctagggcgtgcacgaccatcatctgggtggcatccgcgctgcacgcggctgtcaactttgggcagtacccatacgccgggtacctcccgaaccggccgacggtcagccggcgcccgatgccggagccaggcagccacgactacaagaagctgggagcggggcaraaggaggcggacatggtgttcatccgcaccatcaccagccagttccagaccatcctgggcatctcgctcatcgaagatcctctccaagcactcctncgacgaggtgtacctcggccagcgtgacgagcctgagcgctggacgtcaracgcc

SEQ ID NO: 36105 - protein, 193 aa, Zea mays subsp. mays
  peptide (1)..(193): Ceres Seq. ID no. 3609411
  misc_feature (11)..(178): Pfam Name: Pfam Description:  Lipoxygenase
  misc_feature (11)..(178): NCBI GI NO: 19033554 NR Description: putative lipoxygenase
  misc_feature (11)..(178): NCBI GI NO: 7433147 NR Description: probable lipoxygenase (EC 1.13.11.12) - barley
  misc_feature (11)..(178): NCBI GI NO: 19033550 NR Description: putative lipoxygenase
  misc_feature (11)..(178): NCBI GI NO: 38636549 NR Description: 9-lipoxigenase
  misc_feature (11)..(178): NCBI GI NO: 4887227 NR Description: lipoxygenase [Zea mays]
  misc_feature (11)..(178): NCBI GI NO: 31126788 NR Description: lipoxygenase L-2; lipoxygenase
  misc_feature (11)..(178): NCBI GI NO: 12620877 NR Description: lipoxygenase [Zea mays]
  misc_feature (11)..(178): NCBI GI NO: 18481649 NR Description: lipoxygenase [Zea mays]
  misc_feature (11)..(178): NCBI GI NO: 8515851 NR Description: lipoxygenase [Zea mays]
  misc_feature (11)..(178): NCBI GI NO: 19033549 NR Description: putative lipoxygenase
  misc_feature (153)..(153): Xaa is any aa, unknown or other
  misc_feature (185)..(185): Xaa is any aa, unknown or other
LTWLRCVRAFRGVAVPDQSSPYGVRLLIKDYPYAVDGLVIWWAIERWVKEYLDIYYPNDGELQRDVELQAWWKEVREEAHGDLKDRDWWPRMDTVQQLARACTTIIWVASALHAAVNFGQYPYAGYLPNRPTVSRRPMPEPGSHDYKKLGAGXKEADMVFIRTITSQFQTILGISLIEDPLQALXRRGVPRPA

SEQ ID NO: 36106 - protein, 171 aa, Zea mays subsp. mays
  peptide (1)..(171): Ceres Seq. ID no. 3609412
  misc_feature (146)..(170): NCBI GI NO: 19033554 NR Description: putative lipoxygenase
  misc_feature (146)..(170): NCBI GI NO: 7433147 NR Description: probable lipoxygenase (EC 1.13.11.12) - barley
  misc_feature (146)..(169): NCBI GI NO: 19033550 NR Description: putative lipoxygenase
  misc_feature (146)..(169): NCBI GI NO: 38636549 NR Description: 9-lipoxigenase
  misc_feature (146)..(170): NCBI GI NO: 4887227 NR Description: lipoxygenase [Zea mays]
  misc_feature (146)..(170): NCBI GI NO: 31126788 NR Description: lipoxygenase L-2; lipoxygenase
  misc_feature (146)..(170): NCBI GI NO: 12620877 NR Description: lipoxygenase [Zea mays]
  misc_feature (146)..(170): NCBI GI NO: 18481649 NR Description: lipoxygenase [Zea mays]
  misc_feature (146)..(170): NCBI GI NO: 8515851 NR Description: lipoxygenase [Zea mays]
  misc_feature (146)..(170): NCBI GI NO: 19033549 NR Description: putative lipoxygenase
  misc_feature (121)..(121): Xaa is any aa, unknown or other
  misc_feature (153)..(153): Xaa is any aa, unknown or other
  misc_feature (170)..(170): Xaa is any aa, unknown or other
MPLTGSSSGGRSSGGSRSTWTSTTLTTASSSVTWSCRRGGRRCVRRRTATSRTETGGPGWTPSSSWLGRARPSSGWHPRCTRLSTLGSTHTPGTSRTGRRSAGARCRSQAATTTRSWERGXRRRTWCSSAPSPASSRPSWASRSSKILSKHSXDEVYLGQRDEPERWTSXA

SEQ ID NO: 36107 - protein, 102 aa, Zea mays subsp. mays
  peptide (1)..(102): Ceres Seq. ID no. 3609413
  misc_feature (1)..(87): Pfam Name: Pfam Description:  Lipoxygenase
  misc_feature (1)..(87): NCBI GI NO: 19033554 NR Description: putative lipoxygenase
  misc_feature (1)..(87): NCBI GI NO: 7433147 NR Description: probable lipoxygenase (EC 1.13.11.12) - barley
  misc_feature (1)..(87): NCBI GI NO: 19033550 NR Description: putative lipoxygenase
  misc_feature (1)..(87): NCBI GI NO: 38636549 NR Description: 9-lipoxigenase
  misc_feature (1)..(87): NCBI GI NO: 4887227 NR Description: lipoxygenase [Zea mays]
  misc_feature (1)..(87): NCBI GI NO: 31126788 NR Description: lipoxygenase L-2; lipoxygenase
  misc_feature (1)..(87): NCBI GI NO: 12620877 NR Description: lipoxygenase [Zea mays]
  misc_feature (1)..(87): NCBI GI NO: 18481649 NR Description: lipoxygenase [Zea mays]
  misc_feature (1)..(87): NCBI GI NO: 8515851 NR Description: lipoxygenase [Zea mays]
  misc_feature (1)..(87): NCBI GI NO: 19033549 NR Description: putative lipoxygenase
  misc_feature (62)..(62): Xaa is any aa, unknown or other
  misc_feature (94)..(94): Xaa is any aa, unknown or other
MDTVQQLARACTTIIWVASALHAAVNFGQYPYAGYLPNRPTVSRRPMPEPGSHDYKKLGAGXKEADMVFIRTITSQFQTILGISLIEDPLQALXRRGVPRPA

SEQ ID NO: 36108 - DNA, 1621 bp, Zea mays subsp. mays
  misc_feature (1)..(1621): Ceres Seq. ID no. 13491087
gactctcctcagtaactatagtttttttgttccttgggaggatagaaaaaatatatccttggttttcttgaacagataacatttcaggtgtgcttctgaagggagatttcgttgaacaggatgaatgcattggcagcaaccagcaggaacttcaagcaggcagctaagctgctgggcctcgactccaagctggagaagagcttgctcattccattcagggagatcaaggttgaatgcacaatcccaaaagatgatggaactttggcatcctatgttggatttagggttcaacatgataatgctaggggacctatgaagggtggaatcagataccaccatgaggttgatcctgatgaagttaatgccttggcacaattgatgacttggaaaacagcagtagctaacataccatatggaggagccaaaggtggaattggatgtagccctggagacctgagcatctctgagcttgagaggcttacccgagtttttactcagaaaatccatgacttgattggcatccatactgacgttccagctccagatatgggcaccaactcacagacaatggcatggatacttgacgaatactcaaagttccatggttactcacctgctgttgtgacaggaaagcctgtggacctcggaggatcattgggaagagacgccgctactggaaggggagttctgtttgctactgaagctttgcttgcagagcatggcaaaggcattgcaggccagcgtttcgtcatacagggattcggtaacgttggttcctgggcagctcagctgataagtgaagccggtggcaaggtgattgctatcagtgacgtcacaggcgccgtcaaaaacgtcgatggcctcgacatcgcgcagctagtgaagcactcggcggagaacaaggggatcaagggcttcaaggggggagacgccatcgctccagactcgttgctcactgaagagtgcgacgtcctcatcccggcagcgcttgggggagtcataaacaaggataatgctaacgacataaaggcaaagtacatcatcgaggctgccaatcaccccacagatccagaggcagacgagatcctgtcaaagaaaggcgtcctcatcctccccgacatactggccaactctggcggcgtcacagtgagctacttcgagtgggtacaaaacatccaggggttcatgtgggacgaggagaaggtaaacgcggagctgcggacgtacatcacgcgcgcctttggaaacgtgaagcagatgtgccggagccacagctgcgacctccgcatgggcgccttcacgctgggcgtcaaccgcgtcgcgcgcgccaccgtcctcaggggatgggaagcatgacctccctccgtgtcgtccgtgtgcccctccctgttgtatcctcttggtcttggtcttgggcccttgtttttctttggttaattattatcgatcaacggagatccgagaaaaaacgggctcagttaataattccaagaagtgcgtcttcttggagataaatagcggaaggagagttataataagtctgtaactgtaacccatagctgagatgctgtctgcaagcaacaatggcaatggcaatggcaatgccatctggatttcgtgc

SEQ ID NO: 36109 - protein, 411 aa, Zea mays subsp. mays
  peptide (1)..(411): Ceres Seq. ID no. 13491088
  misc_feature (176)..(408): Pfam Name: Pfam Description:  Glutamate/ Leucine/Phenylalanine/Valine dehydrogenase
  misc_feature (1)..(411): NCBI GI NO: 12643763 NR Description: Glutamate dehydrogenase (GDH)
  misc_feature (1)..(411): NCBI GI NO: 7431775 NR Description: glutamate dehydrogenase (EC 1.4.1.2) - maize
  misc_feature (1)..(411): NCBI GI NO: 1931629 NR Description: glutamate dehydrogenase mutant [Zea mays]
  misc_feature (1)..(411): NCBI GI NO: 28269441 NR Description: glutamate dehydrogenase
  misc_feature (1)..(411): NCBI GI NO: 4150965 NR Description: glutamate dehydrogenase [Asparagus officinalis]
  misc_feature (1)..(411): NCBI GI NO: 20873461 NR Description: glutamate dehydrogenase [Nicotiana tabacum]
  misc_feature (1)..(411): NCBI GI NO: 12643806 NR Description: Glutamate dehydrogenase B (GDH B)
  misc_feature (1)..(411): NCBI GI NO: 21314959 NR Description: NADH-glutamate dehydrogenase
  misc_feature (1)..(411): NCBI GI NO: 7431768 NR Description: glutamate dehydrogenase (EC 1
  misc_feature (1)..(411): NCBI GI NO: 15238762 NR Description: glutamate dehydrogenase (EC 1
MNALAATSRNFKQAAKLLGLDSKLEKSLLIPFREIKVECTIPKDDGTLASYVGFRVQHDNARGPMKGGIRYHHEVDPDEVNALAQLMTWKTAVANIPYGGAKGGIGCSPGDLSISELERLTRVFTQKIHDLIGIHTDVPAPDMGTNSQTMAWILDEYSKFHGYSPAVVTGKPVDLGGSLGRDAATGRGVLFATEALLAEHGKGIAGQRFVIQGFGNVGSWAAQLISEAGGKVIAISDVTGAVKNVDGLDIAQLVKHSAENKGIKGFKGGDAIAPDSLLTEECDVLIPAALGGVINKDNANDIKAKYIIEAANHPTDPEADEILSKKGVLILPDILANSGGVTVSYFEWVQNIQGFMWDEEKVNAELRTYITRAFGNVKQMCRSHSCDLRMGAFTLGVNRVARATVLRGWEA

SEQ ID NO: 36110 - protein, 347 aa, Zea mays subsp. mays
  peptide (1)..(347): Ceres Seq. ID no. 13491089
  misc_feature (112)..(344): Pfam Name: Pfam Description:  Glutamate/ Leucine/Phenylalanine/Valine dehydrogenase
  misc_feature (1)..(347): NCBI GI NO: 12643763 NR Description: Glutamate dehydrogenase (GDH)
  misc_feature (1)..(347): NCBI GI NO: 7431775 NR Description: glutamate dehydrogenase (EC 1.4.1.2) - maize
  misc_feature (1)..(347): NCBI GI NO: 1931629 NR Description: glutamate dehydrogenase mutant [Zea mays]
  misc_feature (1)..(347): NCBI GI NO: 28269441 NR Description: glutamate dehydrogenase
  misc_feature (1)..(347): NCBI GI NO: 4150965 NR Description: glutamate dehydrogenase [Asparagus officinalis]
  misc_feature (1)..(347): NCBI GI NO: 20873461 NR Description: glutamate dehydrogenase [Nicotiana tabacum]
  misc_feature (1)..(347): NCBI GI NO: 12643806 NR Description: Glutamate dehydrogenase B (GDH B)
  misc_feature (1)..(347): NCBI GI NO: 21314959 NR Description: NADH-glutamate dehydrogenase
  misc_feature (1)..(347): NCBI GI NO: 7431768 NR Description: glutamate dehydrogenase (EC 1
  misc_feature (1)..(347): NCBI GI NO: 15238762 NR Description: glutamate dehydrogenase (EC 1
MKGGIRYHHEVDPDEVNALAQLMTWKTAVANIPYGGAKGGIGCSPGDLSISELERLTRVFTQKIHDLIGIHTDVPAPDMGTNSQTMAWILDEYSKFHGYSPAVVTGKPVDLGGSLGRDAATGRGVLFATEALLAEHGKGIAGQRFVIQGFGNVGSWAAQLISEAGGKVIAISDVTGAVKNVDGLDIAQLVKHSAENKGIKGFKGGDAIAPDSLLTEECDVLIPAALGGVINKDNANDIKAKYIIEAANHPTDPEADEILSKKGVLILPDILANSGGVTVSYFEWVQNIQGFMWDEEKVNAELRTYITRAFGNVKQMCRSHSCDLRMGAFTLGVNRVARATVLRGWEA

SEQ ID NO: 36111 - protein, 325 aa, Zea mays subsp. mays
  peptide (1)..(325): Ceres Seq. ID no. 13491090
  misc_feature (90)..(322): Pfam Name: Pfam Description:  Glutamate/ Leucine/Phenylalanine/Valine dehydrogenase
  misc_feature (1)..(325): NCBI GI NO: 12643763 NR Description: Glutamate dehydrogenase (GDH)
  misc_feature (1)..(325): NCBI GI NO: 7431775 NR Description: glutamate dehydrogenase (EC 1.4.1.2) - maize
  misc_feature (1)..(325): NCBI GI NO: 1931629 NR Description: glutamate dehydrogenase mutant [Zea mays]
  misc_feature (1)..(325): NCBI GI NO: 28269441 NR Description: glutamate dehydrogenase
  misc_feature (1)..(325): NCBI GI NO: 4150965 NR Description: glutamate dehydrogenase [Asparagus officinalis]
  misc_feature (1)..(325): NCBI GI NO: 20873461 NR Description: glutamate dehydrogenase [Nicotiana tabacum]
  misc_feature (1)..(325): NCBI GI NO: 12643806 NR Description: Glutamate dehydrogenase B (GDH B)
  misc_feature (1)..(325): NCBI GI NO: 21314959 NR Description: NADH-glutamate dehydrogenase
  misc_feature (1)..(325): NCBI GI NO: 7431768 NR Description: glutamate dehydrogenase (EC 1
  misc_feature (1)..(325): NCBI GI NO: 15238762 NR Description: glutamate dehydrogenase (EC 1
MTWKTAVANIPYGGAKGGIGCSPGDLSISELERLTRVFTQKIHDLIGIHTDVPAPDMGTNSQTMAWILDEYSKFHGYSPAVVTGKPVDLGGSLGRDAATGRGVLFATEALLAEHGKGIAGQRFVIQGFGNVGSWAAQLISEAGGKVIAISDVTGAVKNVDGLDIAQLVKHSAENKGIKGFKGGDAIAPDSLLTEECDVLIPAALGGVINKDNANDIKAKYIIEAANHPTDPEADEILSKKGVLILPDILANSGGVTVSYFEWVQNIQGFMWDEEKVNAELRTYITRAFGNVKQMCRSHSCDLRMGAFTLGVNRVARATVLRGWEA

SEQ ID NO: 36112 - DNA, 1113 bp, Zea mays subsp. mays
  misc_feature (1)..(1113): Ceres Seq. ID no. 13635288
atcaaccaaaccctctaatccatttcggcatttccaacgccttcgccctaccagccacgtcgcttcgaggccgatcgaccgagcagctggtggcaatggcggcggcggcggaggtcgtgctgctggacttctgggtgagccccttcgggcagcgctgccggatcgcgctggcggagaagggcgtggcctacgagtaccgcgagcaggacctcctggacaagggcgagctgctcctccgctccaaccccatccacaagaagatccccgtcctgctccacgccggcaggcccgtctgcgagtcgctcgtcatcctccagtacatcgacgaggcctggccggacgtcgcgccgctcctccccaaggacgacccctacgcccgcgcgcaggcgcgtttctgggccgattacatcgacaagaagatctatgacagccagactcggctgtggaagttcgagggcgaggcgcgggagcaggcgaagaaggacctggtggaggtcctggagaccctggagggggagctcgccgacaagcctttcttcggcggcggcgccctcggcttcgtggacgtggctctggtgcccttcacgtcctggttcctcgcctacgagaagctgggcgggttcagcgtccaggagcactgccccaggatcgtggcctgggccgcgcgctgcagggagcgggagagcgtggccaaggccatgtccgaccctgccaaggtgctcgagttcgtccagttcctccagagcaagttcggggccaagtgatcggaagcattgcgtgtgctgctagcctgatatgccctatgcaggccaggctggtgctttgatctgctcgatcagctctatgcccatgctagcgttgcatagcgcagttgatgtgtgatgtgtctggttggttgtagctgctctttgcctggtttcgtacgtcagtgtaaggtttcaggttttcagtgtctggggtagctctgcgttgcccttgcccctgccccctacctagcggctcttgagctcttcggctcgccagcaataaagttgcagaggctttagctaaaagtttctgtattttttagttgacgattattggtccaatgtattcgggaattttgttctctct

SEQ ID NO: 36113 - protein, 253 aa, Zea mays subsp. mays
  peptide (1)..(253): Ceres Seq. ID no. 13635289
  misc_feature (32)..(253): NCBI GI NO: 4468796 NR Description: GST6 protein [Zea mays]
  misc_feature (40)..(251): NCBI GI NO: 7447304 NR Description: glutathione transferase (EC 2.5.1.18) - maize
  misc_feature (35)..(253): NCBI GI NO: 11177831 NR Description: putative glutathione S-transferase OsGSTU5
  misc_feature (32)..(251): NCBI GI NO: 6683765 NR Description: glutathione-S-transferase [Hordeum vulgare]
  misc_feature (32)..(251): NCBI GI NO: 20067419 NR Description: glutathione transferase [Triticum aestivum]
  misc_feature (32)..(251): NCBI GI NO: 20067417 NR Description: glutathione transferase [Triticum aestivum]
  misc_feature (32)..(251): NCBI GI NO: 20067415 NR Description: glutathione transferase [Triticum aestivum]
  misc_feature (32)..(253): NCBI GI NO: 33357806 NR Description: Chain A, Crystal Structure Solution Of Rice Gst1
  misc_feature (34)..(251): NCBI GI NO: 416652 NR Description: PROBABLE GLUTATHIONE S-TRANSFERASE
  misc_feature (34)..(251): NCBI GI NO: 1346215 NR Description: PROBABLE GLUTATHIONE S-TRANSFERASE PARC
QPNPLIHFGISNAFALPATSLRGRSTEQLVAMAAAAEVVLLDFWVSPFGQRCRIALAEKGVAYEYREQDLLDKGELLLRSNPIHKKIPVLLHAGRPVCESLVILQYIDEAWPDVAPLLPKDDPYARAQARFWADYIDKKIYDSQTRLWKFEGEAREQAKKDLVEVLETLEGELADKPFFGGGALGFVDVALVPFTSWFLAYEKLGGFSVQEHCPRIVAWAARCRERESVAKAMSDPAKVLEFVQFLQSKFGAK

SEQ ID NO: 36114 - protein, 222 aa, Zea mays subsp. mays
  peptide (1)..(222): Ceres Seq. ID no. 13635290
  misc_feature (1)..(222): NCBI GI NO: 4468796 NR Description: GST6 protein [Zea mays]
  misc_feature (9)..(220): NCBI GI NO: 7447304 NR Description: glutathione transferase (EC 2.5.1.18) - maize
  misc_feature (4)..(222): NCBI GI NO: 11177831 NR Description: putative glutathione S-transferase OsGSTU5
  misc_feature (1)..(220): NCBI GI NO: 6683765 NR Description: glutathione-S-transferase [Hordeum vulgare]
  misc_feature (1)..(220): NCBI GI NO: 20067419 NR Description: glutathione transferase [Triticum aestivum]
  misc_feature (1)..(220): NCBI GI NO: 20067417 NR Description: glutathione transferase [Triticum aestivum]
  misc_feature (1)..(220): NCBI GI NO: 20067415 NR Description: glutathione transferase [Triticum aestivum]
  misc_feature (1)..(222): NCBI GI NO: 33357806 NR Description: Chain A, Crystal Structure Solution Of Rice Gst1
  misc_feature (3)..(220): NCBI GI NO: 416652 NR Description: PROBABLE GLUTATHIONE S-TRANSFERASE
  misc_feature (3)..(220): NCBI GI NO: 1346215 NR Description: PROBABLE GLUTATHIONE S-TRANSFERASE PARC
MAAAAEVVLLDFWVSPFGQRCRIALAEKGVAYEYREQDLLDKGELLLRSNPIHKKIPVLLHAGRPVCESLVILQYIDEAWPDVAPLLPKDDPYARAQARFWADYIDKKIYDSQTRLWKFEGEAREQAKKDLVEVLETLEGELADKPFFGGGALGFVDVALVPFTSWFLAYEKLGGFSVQEHCPRIVAWAARCRERESVAKAMSDPAKVLEFVQFLQSKFGAK

SEQ ID NO: 36115 - protein, 141 aa, Zea mays subsp. mays
  peptide (1)..(141): Ceres Seq. ID no. 13635291
STKPSNPFRHFQRLRPTSHVASRPIDRAAGGNGGGGGGRAAGLLGEPLRAALPDRAGGEGRGLRVPRAGPPGQGRAAPPLQPHPQEDPRPAPRRQARLRVARHPPVHRRGLAGRRAAPPQGRPLRPRAGAFLGRLHRQEDL

SEQ ID NO: 36116 - DNA, 626 bp, Zea mays subsp. mays
  misc_feature (1)..(626): Ceres Seq. ID no. 3609334
aagaactcgagaccgccaagagcagctcatcagttgagaagagctatgaactgcctgatggacaagtgatcacaataggcgcagagcgcttcagatgcccggaggttctcttccagccatccttcattggtatggaagctccaggaatccacgagacgacctacaactccatcatgaagtgtgacgttgatatcaggaaggacctgtatggcaacattgtcctcagtggtggatccaccatgttccctggcatcgccgaccgaatgagcaaggagatcactgcgctcgcgccaagcagcatgaagatcaaggtcgtcgctccaccagagaggaagtacagtgtctggatcggaggatcaatccttgcatccctgagcacatttcagcagatgtggatctcaagggctgagtatgaggagtctggtccagctattgtccacaggaagtgcttctagacgtcacctagccttaattctcctctggaaataccttcgtttgatgacatatctatgggtggttgctctgctatagctcgcagtttttgkgtttgccaatatatccggtaacattgkggagtcagccgtccactgtatgaagtatgtagtttgggttatatatatattgat

SEQ ID NO: 36117 - protein, 150 aa, Zea mays subsp. mays
  peptide (1)..(150): Ceres Seq. ID no. 3609335
  misc_feature (1)..(150): Pfam Name: Pfam Description:  Actin
  misc_feature (1)..(150): NCBI GI NO: 37535954 NR Description: actin [Oryza sativa (japonica cultivar-group)]
  misc_feature (1)..(150): NCBI GI NO: 9965319 NR Description: actin [Setaria italica]
  misc_feature (1)..(150): NCBI GI NO: 15242516 NR Description: ACTIN 2/7 (sp|P53492); protein id: At5g09810
  misc_feature (1)..(150): NCBI GI NO: 40714662 NR Description: actin [Oryza sativa (japonica cultivar-group)]
  misc_feature (1)..(150): NCBI GI NO: 11276972 NR Description: actin [imported] - rape
  misc_feature (1)..(150): NCBI GI NO: 2244734 NR Description: actin [Gossypium hirsutum]
  misc_feature (1)..(150): NCBI GI NO: 32186890 NR Description: actin [Gossypium hirsutum]
  misc_feature (1)..(150): NCBI GI NO: 32186904 NR Description: actin [Gossypium hirsutum]
  misc_feature (1)..(150): NCBI GI NO: 32186892 NR Description: actin [Gossypium hirsutum]
  misc_feature (1)..(150): NCBI GI NO: 32186896 NR Description: actin [Gossypium hirsutum]
ELETAKSSSSVEKSYELPDGQVITIGAERFRCPEVLFQPSFIGMEAPGIHETTYNSIMKCDVDIRKDLYGNIVLSGGSTMFPGIADRMSKEITALAPSSMKIKVVAPPERKYSVWIGGSILASLSTFQQMWISRAEYEESGPAIVHRKCF

SEQ ID NO: 36118 - protein, 107 aa, Zea mays subsp. mays
  peptide (1)..(107): Ceres Seq. ID no. 3609336
  misc_feature (1)..(107): Pfam Name: Pfam Description:  Actin
  misc_feature (1)..(107): NCBI GI NO: 37535954 NR Description: actin [Oryza sativa (japonica cultivar-group)]
  misc_feature (1)..(107): NCBI GI NO: 9965319 NR Description: actin [Setaria italica]
  misc_feature (1)..(107): NCBI GI NO: 15242516 NR Description: ACTIN 2/7 (sp|P53492); protein id: At5g09810
  misc_feature (1)..(107): NCBI GI NO: 40714662 NR Description: actin [Oryza sativa (japonica cultivar-group)]
  misc_feature (1)..(107): NCBI GI NO: 11276972 NR Description: actin [imported] - rape
  misc_feature (1)..(107): NCBI GI NO: 2244734 NR Description: actin [Gossypium hirsutum]
  misc_feature (1)..(107): NCBI GI NO: 32186890 NR Description: actin [Gossypium hirsutum]
  misc_feature (1)..(107): NCBI GI NO: 32186904 NR Description: actin [Gossypium hirsutum]
  misc_feature (1)..(107): NCBI GI NO: 32186892 NR Description: actin [Gossypium hirsutum]
  misc_feature (1)..(107): NCBI GI NO: 32186896 NR Description: actin [Gossypium hirsutum]
MEAPGIHETTYNSIMKCDVDIRKDLYGNIVLSGGSTMFPGIADRMSKEITALAPSSMKIKVVAPPERKYSVWIGGSILASLSTFQQMWISRAEYEESGPAIVHRKCF

SEQ ID NO: 36119 - protein, 93 aa, Zea mays subsp. mays
  peptide (1)..(93): Ceres Seq. ID no. 3609337
  misc_feature (1)..(93): Pfam Name: Pfam Description:  Actin
  misc_feature (1)..(93): NCBI GI NO: 37535954 NR Description: actin [Oryza sativa (japonica cultivar-group)]
  misc_feature (1)..(93): NCBI GI NO: 9965319 NR Description: actin [Setaria italica]
  misc_feature (1)..(93): NCBI GI NO: 15242516 NR Description: ACTIN 2/7 (sp|P53492); protein id: At5g09810
  misc_feature (1)..(93): NCBI GI NO: 40714662 NR Description: actin [Oryza sativa (japonica cultivar-group)]
  misc_feature (1)..(93): NCBI GI NO: 11276972 NR Description: actin [imported] - rape
  misc_feature (1)..(93): NCBI GI NO: 2244734 NR Description: actin [Gossypium hirsutum]
  misc_feature (1)..(93): NCBI GI NO: 32186890 NR Description: actin [Gossypium hirsutum]
  misc_feature (1)..(93): NCBI GI NO: 32186896 NR Description: actin [Gossypium hirsutum]
  misc_feature (1)..(93): NCBI GI NO: 32186904 NR Description: actin [Gossypium hirsutum]
  misc_feature (1)..(93): NCBI GI NO: 32186892 NR Description: actin [Gossypium hirsutum]
MKCDVDIRKDLYGNIVLSGGSTMFPGIADRMSKEITALAPSSMKIKVVAPPERKYSVWIGGSILASLSTFQQMWISRAEYEESGPAIVHRKCF

SEQ ID NO: 36120 - DNA, 1073 bp, Zea mays subsp. mays
  misc_feature (1)..(1073): Ceres Seq. ID no. 12595306
aacatatcaagctcagagcctcagagcgccagccaagtcttgcggtcgcgaagagcaacgcaacaagatggtgaagctcgcattcggaagcgtcggcgactccttcagcgtcacctccatcaaggcctacgtggcggagttcatcgccaccctcctcttcgtcttcgccggcgtgggttccgccatcgccttcgggcaactgacgaatggcggcgcgctggaccctgcgggactggtggcgatcgcggtggcgcacgcgctggccctcttcgtgggcgtctccgtggccgcgaacacctccggcggccacctgaaccccgccgtgacgttcggcctggccgtgggcggccacatcaccgtcctcaccggcctcttctactgggtggcccagctgctgggcgcgtccgtggcgtgcctgctcctcaggttcgtgacccacggcaaggccatcccgacccacggcgtctccggcggcaccaccgagctggagggcgtcgtgttcgagatcgtcatcaccttcgcgctcgtctacaccgtgtacgccaccgccgccgaccccaagaagggctccctcggcaccatcgcgcccatcgccatcggcttcatcgtcggcgccaacatcctcgccgcggggcccttcagcggcggctccatgaaccccgcccgctccttcggccccgccgtcgccgcggccgacttcgccggcaactgggtctactgggtcggcccgctcatcggcggcggactcgctggcctcgtctacggcgacgtcttcatcggcggctcctaccagcaggtcgccgaccaggactacgcctaagtagtgtgctccgttcgtctggattcagctcatccaacgcaggcgcgcgtttcgatcggcgtcgtcatttgctttgctcttcatttcatcacgttatgtaacgtgccaatgatgtgtgtcgtcctggtctgttccattccgtccttgtattcatttcccttcttttttcggggtaaaatcgatgtaaagatctcatccgatctgccgttttcgatcgccttggagtgggaaaaaacaggtgattttcgtttcg

SEQ ID NO: 36121 - protein, 306 aa, Zea mays subsp. mays
  peptide (1)..(306): Ceres Seq. ID no. 12595307
  misc_feature (31)..(193): Pfam Name: Pfam Description:  Aminotransferase class-III
NISSSEPQSASQVLRSRRATQQDGEARIRKRRRLLQRHLHQGLRGGVHRHPPLRLRRRGFRHRLRATDEWRRAGPCGTGGDRGGARAGPLRGRLRGREHLRRPPEPRRDVRPGRGRPHHRPHRPLLLGGPAAGRVRGVPAPQVRDPRQGHPDPRRLRRHHRAGGRRVRDRHHLRARLHRVRHRRRPQEGLPRHHRAHRHRLHRRRQHPRRGALQRRLHEPRPLLRPRRRRGRLRRQLGLLGRPAHRRRTRWPRLRRRLHRRLLPAGRRPGLRLSSVLRSSGFSSSNAGARFDRRRHLLCSSFHHVM

SEQ ID NO: 36122 - protein, 272 aa, Zea mays subsp. mays
  peptide (1)..(272): Ceres Seq. ID no. 12595308
  misc_feature (33)..(254): Pfam Name: Pfam Description:  Major intrinsic protein
  misc_feature (23)..(272): NCBI GI NO: 13447823 NR Description: tonoplast membrane integral protein ZmTIP2-2
  misc_feature (23)..(272): NCBI GI NO: 13447821 NR Description: tonoplast membrane integral protein ZmTIP2-1
  misc_feature (23)..(272): NCBI GI NO: 14140156 NR Description: putative aquaporin [Oryza sativa]
  misc_feature (23)..(271): NCBI GI NO: 7441255 NR Description: probable tonoplast aquaporin - maize
  misc_feature (23)..(271): NCBI GI NO: 9623335 NR Description: tonoplast intrinsic protein 1 [Hordeum vulgare]
  misc_feature (23)..(271): NCBI GI NO: 29650739 NR Description: tonoplast water channel [Zea mays]
  misc_feature (23)..(272): NCBI GI NO: 7441268 NR Description: probable membrane protein - carrot
  misc_feature (23)..(272): NCBI GI NO: 2058706 NR Description: Rb7 [Lycopersicon esculentum]
  misc_feature (23)..(272): NCBI GI NO: 11276918 NR Description: membrane channel protein
  misc_feature (23)..(272): NCBI GI NO: 126959 NR Description: Tonoplast intrinsic protein, root-specific RB7-5A
TYQAQSLRAPAKSCGREEQRNKMVKLAFGSVGDSFSVTSIKAYVAEFIATLLFVFAGVGSAIAFGQLTNGGALDPAGLVAIAVAHALALFVGVSVAANTSGGHLNPAVTFGLAVGGHITVLTGLFYWVAQLLGASVACLLLRFVTHGKAIPTHGVSGGTTELEGVVFEIVITFALVYTVYATAADPKKGSLGTIAPIAIGFIVGANILAAGPFSGGSMNPARSFGPAVAAADFAGNWVYWVGPLIGGGLAGLVYGDVFIGGSYQQVADQDYA

SEQ ID NO: 36123 - protein, 250 aa, Zea mays subsp. mays
  peptide (1)..(250): Ceres Seq. ID no. 12595309
  misc_feature (11)..(232): Pfam Name: Pfam Description:  Major intrinsic protein
  misc_feature (1)..(250): NCBI GI NO: 13447823 NR Description: tonoplast membrane integral protein ZmTIP2-2
  misc_feature (1)..(250): NCBI GI NO: 13447821 NR Description: tonoplast membrane integral protein ZmTIP2-1
  misc_feature (1)..(250): NCBI GI NO: 14140156 NR Description: putative aquaporin [Oryza sativa]
  misc_feature (1)..(249): NCBI GI NO: 7441255 NR Description: probable tonoplast aquaporin - maize
  misc_feature (1)..(249): NCBI GI NO: 9623335 NR Description: tonoplast intrinsic protein 1 [Hordeum vulgare]
  misc_feature (1)..(249): NCBI GI NO: 29650739 NR Description: tonoplast water channel [Zea mays]
  misc_feature (1)..(250): NCBI GI NO: 7441268 NR Description: probable membrane protein - carrot
  misc_feature (1)..(250): NCBI GI NO: 2058706 NR Description: Rb7 [Lycopersicon esculentum]
  misc_feature (1)..(250): NCBI GI NO: 11276918 NR Description: membrane channel protein
  misc_feature (1)..(250): NCBI GI NO: 126959 NR Description: Tonoplast intrinsic protein, root-specific RB7-5A
MVKLAFGSVGDSFSVTSIKAYVAEFIATLLFVFAGVGSAIAFGQLTNGGALDPAGLVAIAVAHALALFVGVSVAANTSGGHLNPAVTFGLAVGGHITVLTGLFYWVAQLLGASVACLLLRFVTHGKAIPTHGVSGGTTELEGVVFEIVITFALVYTVYATAADPKKGSLGTIAPIAIGFIVGANILAAGPFSGGSMNPARSFGPAVAAADFAGNWVYWVGPLIGGGLAGLVYGDVFIGGSYQQVADQDYA

SEQ ID NO: 36124 - DNA, 542 bp, Zea mays subsp. mays
  misc_feature (1)..(542): Ceres Seq. ID no. 12468596
gctagtgtttgagggcataagcgtggatgaatctgggaagcagcatttccttgatgcgtcagttgcttacaagcgtgcagtcctgaacgccattgagtacattgctagatttgggtactcgaaggagcaggtgtatctcttactatcatgctgtccctgtgagggtaggatctctggaatagttgactctcctaatgcagtggcaactcttgccatccctacagcaatatttgatcaggatataaagccaaaacacctgagaggaagaccgggaccaaagttgataaggcttccagatctcctgagctgttcaaacaatgggcatattcctgtcacccaagaccaaagtggtacaagggcgtcctaggggcgtatatgatctggaagctgatgccgtatccttctacctatacacacaaataatcgtgttggtgtttccaacaatgtagatcttttatttgttgggcagtcatcatgtatgaggaatagagacacctgagtggtgccatattttcagtgcctgtattgctacaaagttgttc

SEQ ID NO: 36125 - protein, 121 aa, Zea mays subsp. mays
  peptide (1)..(121): Ceres Seq. ID no. 12468597
  misc_feature (1)..(80): Pfam Name: Pfam Description:  Acetamidase/Formamidase family
  misc_feature (1)..(120): NCBI GI NO: 34909818 NR Description: putative formamidase
  misc_feature (1)..(118): NCBI GI NO: 7488106 NR Description: probable formamidase (EC 3
  misc_feature (1)..(118): NCBI GI NO: 18420069 NR Description: formamidase - like protein; protein id:At4g37550
  misc_feature (1)..(118): NCBI GI NO: 21592429 NR Description: formamidase-like protein [Arabidopsis thaliana]
  misc_feature (1)..(118): NCBI GI NO: 18420071 NR Description: formamidase - like protein; protein id:At4g37560
  misc_feature (1)..(118): NCBI GI NO: 14334654 NR Description: putative formamidase [Arabidopsis thaliana]
  misc_feature (1)..(83): NCBI GI NO: 33592607 NR Description: formamidase [Bordetella pertussis]
  misc_feature (1)..(83): NCBI GI NO: 33595862 NR Description: formamidase [Bordetella parapertussis]
  misc_feature (1)..(83): NCBI GI NO: 33600391 NR Description: formamidase [Bordetella bronchiseptica]
  misc_feature (1)..(101): NCBI GI NO: 22984629 NR Description: hypothetical protein [Burkholderia fungorum]
LVFEGISVDESGKQHFLDASVAYKRAVLNAIEYIARFGYSKEQVYLLLSCCPCEGRISGIVDSPNAVATLAIPTAIFDQDIKPKHLRGRPGPKLIRLPDLLSCSNNGHIPVTQDQSGTRAS

SEQ ID NO: 36126 - DNA, 2328 bp, Zea mays subsp. mays
  misc_feature (1)..(2328): Ceres Seq. ID no. 13635296
  misc_feature (2299)..(2299): n is a, c, t, g, unknown, or other
aaaatcgacgacgacgtctaatctatttaaggctgaaatccaccttgcctgcgtggccctcctccccatcgcgtctgtccgctacccctccccgaccagatcgctacgagacgccgcgcgatccgacccaggccgacgccgacgacccctctcgccgccggcggccatggcgtacggcgaccgcgtcaccaccttcgaggactccgagaaggagagcgagtacggctatgtccgcaaggtctctggacctgtggttgtggctgatggaatgggtggtgctgccatgtatgaacttgttcgtgtcggacatgataacctcattggggaaattatccgtcttgagggcgattcgagctacaatccaagtttatgaggaaacagctggactgatggttaatgaccctgtattgagaacaagaaagcctctttcagttgaattgggacctggaattcttggaaacatttttgacggtatccagcgrcctctaaaaaccatcgctattaagtcaggagatgtgtatattcctcgtggtgtttcagttcctgcccttgacaaagatgtattgtgggaatttcagccaacgaagctaggtgttggagatgtcatcacaggtggagatctatacgctactgtttttgagaacacattgatgcagcaccatgttgctcttccaccgggttctatggggaaaataagttacattgcaccagctggccagtacaacctgcaggacacagtgctagaattggaatttcagggcataaaaaagaaatttaccatgcttcagacatggcctgtgcgttcaccaaggcctgttgcatcgaagcttgctgcggatacacctcttctgacagggcagcgtgtactggatgcactattcccctcggttctgggaggcacttgtgctattccaggagcatttggctgtggaaaaactgtcattagtcaggcactttccaagtactccaattccgaagctgtggtttatgtgggctgtggtgaacgaggaaatgagatggctgaggttctcatggactttccccagttgacgatgacattgcctgatggccgtgaggagtctgtcatgaagagaacaacactggtggctaacacatcaaacatgcctgtcgctgctcgtgaagcttccatttacactggaattacaattgctgagtatttccgtgatatgggctacaacgtcagtatgatggctgactccacctcccggtgggctgaggcattgcgtgagatctcagggcgtttggctgaaatgcctgctgatagtggttacccagcttacttggctgcrcgtttggcatccttttatgaacgtgctggtaaggtraaatgyctgggaagtccagacaggamtggcagtgtcacaattgttggagcygtctctcctccwggtggtgatttttcagaccctgttacctcygcaaccctcagtattgttcaggtcttctggggtttagataaaaagctcgctcaaaggaagcatttcccatctgtgaattggctcatttcctattcgaaatactccaaggcccttgagtcyttttaygagaarttygatccagatttcattgatattaggacaaaagcacgygaggtgttgcagagggaggacgatctraatgaaattgtgcagcttgttggtaaagaygcgctggcagaatctgacaagattacrctggagacagcaaagctwytgagagaagattatttggcacaaaatgcattyaccccatatgataagttctgcccattctacaaatccgtttggatgatgcgcaacattattcacttcaacacattggcaaatcaggctgtggagcgggcagctggtactgacggccataagataacatacagtgtcataaagcatcggttgggggatctattttatcgcctagtatcccaaaagttcgaggatcctgcagaaggygaagaagctttggtcggcaagtttaagaaactktaygaygaccttaccactgggttccgcaacctagaagatgaggcacrgtgaactgctgtagattttgtgtaagacaataatggctgccaaatgttttataaggtacggaagttgtagattgmgaccatgtatgagaattttccccaccgctactcatytctttgcccaccactattttagtcatcagtgctggatgggcayyytgtttatttcgacgtaccctttattgctatagcattgtaataagcgatgggcatgcttgtagttgaataagtacaatgtccatgtattcaaacatcagcgtcatgtttatttgnttgttgaaaaaactatgttgcctttttgg

SEQ ID NO: 36127 - protein, 676 aa, Zea mays subsp. mays
  peptide (1)..(676): Ceres Seq. ID no. 15220344
  misc_feature (324)..(517): Pfam Name: Pfam Description:  ATP synthase alpha/beta family
  misc_feature (107)..(674): NCBI GI NO: 137460 NR Description: Vacuolar ATP synthase catalytic subunit A
  misc_feature (107)..(675): NCBI GI NO: 11527563 NR Description: vacuolar proton-ATPase
  misc_feature (107)..(674): NCBI GI NO: 401322 NR Description: Vacuolar ATP synthase catalytic subunit A
  misc_feature (107)..(674): NCBI GI NO: 3169287 NR Description: vacuolar H+-ATPase catalytic subunit
  misc_feature (107)..(674): NCBI GI NO: 2506211 NR Description: Vacuolar ATP synthase catalytic subunit A
  misc_feature (107)..(674): NCBI GI NO: 2493122 NR Description: Vacuolar ATP synthase catalytic subunit A
  misc_feature (107)..(674): NCBI GI NO: 12585490 NR Description: Vacuolar ATP synthase catalytic subunit A
  misc_feature (107)..(674): NCBI GI NO: 15982954 NR Description: V-ATPase catalytic subunit A [Prunus persica]
  misc_feature (107)..(674): NCBI GI NO: 27883932 NR Description: vacuolar H+-ATPase A1 subunit isoform
  misc_feature (107)..(674): NCBI GI NO: 27884018 NR Description: vacuolar H+-ATPase A2 subunit isoform
  misc_feature (160)..(160): Xaa is any aa, unknown or other
  misc_feature (436)..(436): Xaa is any aa, unknown or other
  misc_feature (448)..(448): Xaa is any aa, unknown or other
  misc_feature (450)..(450): Xaa is any aa, unknown or other
  misc_feature (457)..(457): Xaa is any aa, unknown or other
  misc_feature (465)..(465): Xaa is any aa, unknown or other
  misc_feature (469)..(469): Xaa is any aa, unknown or other
  misc_feature (479)..(479): Xaa is any aa, unknown or other
  misc_feature (519)..(519): Xaa is any aa, unknown or other
  misc_feature (521)..(521): Xaa is any aa, unknown or other
  misc_feature (523)..(523): Xaa is any aa, unknown or other
  misc_feature (524)..(524): Xaa is any aa, unknown or other
  misc_feature (536)..(536): Xaa is any aa, unknown or other
  misc_feature (545)..(545): Xaa is any aa, unknown or other
  misc_feature (555)..(555): Xaa is any aa, unknown or other
  misc_feature (564)..(564): Xaa is any aa, unknown or other
  misc_feature (570)..(570): Xaa is any aa, unknown or other
  misc_feature (571)..(571): Xaa is any aa, unknown or other
  misc_feature (581)..(581): Xaa is any aa, unknown or other
  misc_feature (649)..(649): Xaa is any aa, unknown or other
  misc_feature (660)..(660): Xaa is any aa, unknown or other
  misc_feature (661)..(661): Xaa is any aa, unknown or other
  misc_feature (662)..(662): Xaa is any aa, unknown or other
  misc_feature (676)..(676): Xaa is any aa, unknown or other
NRRRRLIYLRLKSTLPAWPSSPSRLSATPPRPDRYETPRDPTQADADDPSRRRRPWRTATASPPSRTPRRRASTAMSARSLDLWLWLMEWVVLPCMNLFVSDMITSLGKLSVLRAIRATIQVYEETAGLMVNDPVLRTRKPLSVELGPGILGNIFDGIQXPLKTIAIKSGDVYIPRGVSVPALDKDVLWEFQPTKLGVGDVITGGDLYATVFENTLMQHHVALPPGSMGKISYIAPAGQYNLQDTVLELEFQGIKKKFTMLQTWPVRSPRPVASKLAADTPLLTGQRVLDALFPSVLGGTCAIPGAFGCGKTVISQALSKYSNSEAVVYVGCGERGNEMAEVLMDFPQLTMTLPDGREESVMKRTTLVANTSNMPVAAREASIYTGITIAEYFRDMGYNVSMMADSTSRWAEALREISGRLAEMPADSGYPAYLAXRLASFYERAGKXKXLGSPDRXGSVTIVGXVSPXGGDFSDPVTXATLSIVQVFWGLDKKLAQRKHFPSVNWLISYSKYSKALEXFXEXXDPDFIDIRTKAXEVLQREDDXNEIVQLVGKXALAESDKIXLETAKXXREDYLAQNAXTPYDKFCPFYKSVWMMRNIIHFNTLANQAVERAAGTDGHKITYSVIKHRLGDLFYRLVSQKFEDPAEXEEALVGKFKKXXXDLTTGFRNLEDEAX

SEQ ID NO: 36128 - protein, 601 aa, Zea mays subsp. mays
  peptide (1)..(601): Ceres Seq. ID no. 15220345
  misc_feature (249)..(442): Pfam Name: Pfam Description:  ATP synthase alpha/beta family
  misc_feature (32)..(599): NCBI GI NO: 137460 NR Description: Vacuolar ATP synthase catalytic subunit A
  misc_feature (32)..(600): NCBI GI NO: 11527563 NR Description: vacuolar proton-ATPase
  misc_feature (32)..(599): NCBI GI NO: 401322 NR Description: Vacuolar ATP synthase catalytic subunit A
  misc_feature (32)..(599): NCBI GI NO: 3169287 NR Description: vacuolar H+-ATPase catalytic subunit
  misc_feature (32)..(599): NCBI GI NO: 2506211 NR Description: Vacuolar ATP synthase catalytic subunit A
  misc_feature (32)..(599): NCBI GI NO: 2493122 NR Description: Vacuolar ATP synthase catalytic subunit A
  misc_feature (32)..(599): NCBI GI NO: 12585490 NR Description: Vacuolar ATP synthase catalytic subunit A
  misc_feature (32)..(599): NCBI GI NO: 15982954 NR Description: V-ATPase catalytic subunit A [Prunus persica]
  misc_feature (32)..(599): NCBI GI NO: 27883932 NR Description: vacuolar H+-ATPase A1 subunit isoform
  misc_feature (32)..(599): NCBI GI NO: 27884018 NR Description: vacuolar H+-ATPase A2 subunit isoform
  misc_feature (85)..(85): Xaa is any aa, unknown or other
  misc_feature (361)..(361): Xaa is any aa, unknown or other
  misc_feature (373)..(373): Xaa is any aa, unknown or other
  misc_feature (375)..(375): Xaa is any aa, unknown or other
  misc_feature (382)..(382): Xaa is any aa, unknown or other
  misc_feature (390)..(390): Xaa is any aa, unknown or other
  misc_feature (394)..(394): Xaa is any aa, unknown or other
  misc_feature (404)..(404): Xaa is any aa, unknown or other
  misc_feature (444)..(444): Xaa is any aa, unknown or other
  misc_feature (446)..(446): Xaa is any aa, unknown or other
  misc_feature (448)..(448): Xaa is any aa, unknown or other
  misc_feature (449)..(449): Xaa is any aa, unknown or other
  misc_feature (461)..(461): Xaa is any aa, unknown or other
  misc_feature (470)..(470): Xaa is any aa, unknown or other
  misc_feature (480)..(480): Xaa is any aa, unknown or other
  misc_feature (489)..(489): Xaa is any aa, unknown or other
  misc_feature (495)..(495): Xaa is any aa, unknown or other
  misc_feature (496)..(496): Xaa is any aa, unknown or other
  misc_feature (506)..(506): Xaa is any aa, unknown or other
  misc_feature (574)..(574): Xaa is any aa, unknown or other
  misc_feature (585)..(585): Xaa is any aa, unknown or other
  misc_feature (586)..(586): Xaa is any aa, unknown or other
  misc_feature (587)..(587): Xaa is any aa, unknown or other
  misc_feature (601)..(601): Xaa is any aa, unknown or other
MSARSLDLWLWLMEWVVLPCMNLFVSDMITSLGKLSVLRAIRATIQVYEETAGLMVNDPVLRTRKPLSVELGPGILGNIFDGIQXPLKTIAIKSGDVYIPRGVSVPALDKDVLWEFQPTKLGVGDVITGGDLYATVFENTLMQHHVALPPGSMGKISYIAPAGQYNLQDTVLELEFQGIKKKFTMLQTWPVRSPRPVASKLAADTPLLTGQRVLDALFPSVLGGTCAIPGAFGCGKTVISQALSKYSNSEAVVYVGCGERGNEMAEVLMDFPQLTMTLPDGREESVMKRTTLVANTSNMPVAAREASIYTGITIAEYFRDMGYNVSMMADSTSRWAEALREISGRLAEMPADSGYPAYLAXRLASFYERAGKXKXLGSPDRXGSVTIVGXVSPXGGDFSDPVTXATLSIVQVFWGLDKKLAQRKHFPSVNWLISYSKYSKALEXFXEXXDPDFIDIRTKAXEVLQREDDXNEIVQLVGKXALAESDKIXLETAKXXREDYLAQNAXTPYDKFCPFYKSVWMMRNIIHFNTLANQAVERAAGTDGHKITYSVIKHRLGDLFYRLVSQKFEDPAEXEEALVGKFKKXXXDLTTGFRNLEDEAX

SEQ ID NO: 36129 - protein, 589 aa, Zea mays subsp. mays
  peptide (1)..(589): Ceres Seq. ID no. 15220346
  misc_feature (237)..(430): Pfam Name: Pfam Description:  ATP synthase alpha/beta family
  misc_feature (20)..(587): NCBI GI NO: 137460 NR Description: Vacuolar ATP synthase catalytic subunit A
  misc_feature (20)..(588): NCBI GI NO: 11527563 NR Description: vacuolar proton-ATPase
  misc_feature (20)..(587): NCBI GI NO: 401322 NR Description: Vacuolar ATP synthase catalytic subunit A
  misc_feature (20)..(587): NCBI GI NO: 3169287 NR Description: vacuolar H+-ATPase catalytic subunit
  misc_feature (20)..(587): NCBI GI NO: 2506211 NR Description: Vacuolar ATP synthase catalytic subunit A
  misc_feature (20)..(587): NCBI GI NO: 2493122 NR Description: Vacuolar ATP synthase catalytic subunit A
  misc_feature (20)..(587): NCBI GI NO: 12585490 NR Description: Vacuolar ATP synthase catalytic subunit A
  misc_feature (20)..(587): NCBI GI NO: 15982954 NR Description: V-ATPase catalytic subunit A [Prunus persica]
  misc_feature (20)..(587): NCBI GI NO: 27883932 NR Description: vacuolar H+-ATPase A1 subunit isoform
  misc_feature (20)..(587): NCBI GI NO: 27884018 NR Description: vacuolar H+-ATPase A2 subunit isoform
  misc_feature (73)..(73): Xaa is any aa, unknown or other
  misc_feature (349)..(349): Xaa is any aa, unknown or other
  misc_feature (361)..(361): Xaa is any aa, unknown or other
  misc_feature (363)..(363): Xaa is any aa, unknown or other
  misc_feature (370)..(370): Xaa is any aa, unknown or other
  misc_feature (378)..(378): Xaa is any aa, unknown or other
  misc_feature (382)..(382): Xaa is any aa, unknown or other
  misc_feature (392)..(392): Xaa is any aa, unknown or other
  misc_feature (432)..(432): Xaa is any aa, unknown or other
  misc_feature (434)..(434): Xaa is any aa, unknown or other
  misc_feature (436)..(436): Xaa is any aa, unknown or other
  misc_feature (437)..(437): Xaa is any aa, unknown or other
  misc_feature (449)..(449): Xaa is any aa, unknown or other
  misc_feature (458)..(458): Xaa is any aa, unknown or other
  misc_feature (468)..(468): Xaa is any aa, unknown or other
  misc_feature (477)..(477): Xaa is any aa, unknown or other
  misc_feature (483)..(483): Xaa is any aa, unknown or other
  misc_feature (484)..(484): Xaa is any aa, unknown or other
  misc_feature (494)..(494): Xaa is any aa, unknown or other
  misc_feature (562)..(562): Xaa is any aa, unknown or other
  misc_feature (573)..(573): Xaa is any aa, unknown or other
  misc_feature (574)..(574): Xaa is any aa, unknown or other
  misc_feature (575)..(575): Xaa is any aa, unknown or other
  misc_feature (589)..(589): Xaa is any aa, unknown or other
MEWVVLPCMNLFVSDMITSLGKLSVLRAIRATIQVYEETAGLMVNDPVLRTRKPLSVELGPGILGNIFDGIQXPLKTIAIKSGDVYIPRGVSVPALDKDVLWEFQPTKLGVGDVITGGDLYATVFENTLMQHHVALPPGSMGKISYIAPAGQYNLQDTVLELEFQGIKKKFTMLQTWPVRSPRPVASKLAADTPLLTGQRVLDALFPSVLGGTCAIPGAFGCGKTVISQALSKYSNSEAVVYVGCGERGNEMAEVLMDFPQLTMTLPDGREESVMKRTTLVANTSNMPVAAREASIYTGITIAEYFRDMGYNVSMMADSTSRWAEALREISGRLAEMPADSGYPAYLAXRLASFYERAGKXKXLGSPDRXGSVTIVGXVSPXGGDFSDPVTXATLSIVQVFWGLDKKLAQRKHFPSVNWLISYSKYSKALEXFXEXXDPDFIDIRTKAXEVLQREDDXNEIVQLVGKXALAESDKIXLETAKXXREDYLAQNAXTPYDKFCPFYKSVWMMRNIIHFNTLANQAVERAAGTDGHKITYSVIKHRLGDLFYRLVSQKFEDPAEXEEALVGKFKKXXXDLTTGFRNLEDEAX

SEQ ID NO: 36130 - DNA, 1152 bp, Zea mays subsp. mays
  misc_feature (1)..(1152): Ceres Seq. ID no. 12436476
aggctccactgctaaacgccggtaatggcccaggctccggcgcgcgccgcttccgccgtacgtctcttcgacgcgcactgccacctgcaagacccccgcatcgcggccgtcgcccctgcccttatacgagccgccggcgcatccggcgtcgcacgcttcgctgtcaacggcacctccgagaaggactggcacctggtgaagcagatggccgaggatcacccagccgtcgtcccctgcttcggcctgcacccttggtgggtacccgagaggtcgccggattggatgaatttgctccggcggttcttcgccgaaaccccggaggcggctgttggggagattggtctggacaaaggttcacatggaaaaaccatcaacttcggagaacaggttgaagtgttccagcgacagctcgaactagctaaggaattggagagacctgtttctgttcattgtgtgcgggcatttggtgatcttctggaagtattgaagcaaactggacctttcccagcaggcgtgttgttacattcttatatgggatctgcagaaatggtgtctgcccttgcaaatttaggctgttacttttcactatctggcttcttgacaggcatgaaatccactaaagctaagcacatgctgaagtcgattcccctggataggattcttttagagacagatgcacctgatgcattaccaagattggacaatgtttctgtatcaccagtccatgttcacagttcagatgcagatactgaaaagcgtcacatggattcagagtcacaggctgctaatgcatcaaatgagtccttgaaccatccagaaaatatccatattgttttggagtatgtcgcatcactccttgaaatgacagagtcagaattggcggagttgagttacaagaatgctaccaagctgttttcttatcctggctccaaagttcaacatgaacctgaagacatctaaatcgggttcaacactaccttactcactggtcagcaaatctgaaacctgttctttttagttttgactcctggtttttctcctcttcttaatgctgtttgtgtaccggattgtagggtcctcccagacacaatgtttgagaaactgaaatggctgtacatcactgttaatattggtgaaataaaacagataccg

SEQ ID NO: 36131 - protein, 311 aa, Zea mays subsp. mays
  peptide (1)..(311): Ceres Seq. ID no. 12436477
  misc_feature (12)..(299): Pfam Name: Pfam Description:  TatD related DNase
  misc_feature (1)..(311): NCBI GI NO: 38345538 NR Description: OSJNBa0020J04.13
  misc_feature (12)..(304): NCBI GI NO: 18418353 NR Description: putative protein; protein id: At5g17570
  misc_feature (12)..(304): NCBI GI NO: 11357936 NR Description: hypothetical protein K10A8_50 - Arabidopsisthaliana
  misc_feature (12)..(261): NCBI GI NO: 15228573 NR Description: unknown protein; protein id: At3g03500.1
  misc_feature (14)..(223): NCBI GI NO: 23097502 NR Description: hypothetical protein
  misc_feature (248)..(298): NCBI GI NO: 23097502 NR Description: hypothetical protein
  misc_feature (16)..(224): NCBI GI NO: 15677535 NR Description: conserved hypothetical protein
  misc_feature (14)..(223): NCBI GI NO: 16077107 NR Description: similar to hypothetical proteins
  misc_feature (262)..(297): NCBI GI NO: 16077107 NR Description: similar to hypothetical proteins
  misc_feature (14)..(223): NCBI GI NO: 39998376 NR Description: hydrolase, TatD family
MAQAPARAASAVRLFDAHCHLQDPRIAAVAPALIRAAGASGVARFAVNGTSEKDWHLVKQMAEDHPAVVPCFGLHPWWVPERSPDWMNLLRRFFAETPEAAVGEIGLDKGSHGKTINFGEQVEVFQRQLELAKELERPVSVHCVRAFGDLLEVLKQTGPFPAGVLLHSYMGSAEMVSALANLGCYFSLSGFLTGMKSTKAKHMLKSIPLDRILLETDAPDALPRLDNVSVSPVHVHSSDADTEKRHMDSESQAANASNESLNHPENIHIVLEYVASLLEMTESELAELSYKNATKLFSYPGSKVQHEPEDI

SEQ ID NO: 36132 - protein, 251 aa, Zea mays subsp. mays
  peptide (1)..(251): Ceres Seq. ID no. 12436478
  misc_feature (1)..(239): Pfam Name: Pfam Description:  TatD related DNase
  misc_feature (1)..(251): NCBI GI NO: 38345538 NR Description: OSJNBa0020J04.13
  misc_feature (1)..(244): NCBI GI NO: 18418353 NR Description: putative protein; protein id: At5g17570
  misc_feature (1)..(244): NCBI GI NO: 11357936 NR Description: hypothetical protein K10A8_50 - Arabidopsisthaliana
  misc_feature (1)..(201): NCBI GI NO: 15228573 NR Description: unknown protein; protein id: At3g03500.1
  misc_feature (1)..(163): NCBI GI NO: 23097502 NR Description: hypothetical protein
  misc_feature (188)..(238): NCBI GI NO: 23097502 NR Description: hypothetical protein
  misc_feature (1)..(164): NCBI GI NO: 15677535 NR Description: conserved hypothetical protein
  misc_feature (1)..(163): NCBI GI NO: 16077107 NR Description: similar to hypothetical proteins
  misc_feature (202)..(237): NCBI GI NO: 16077107 NR Description: similar to hypothetical proteins
  misc_feature (1)..(163): NCBI GI NO: 39998376 NR Description: hydrolase, TatD family
MAEDHPAVVPCFGLHPWWVPERSPDWMNLLRRFFAETPEAAVGEIGLDKGSHGKTINFGEQVEVFQRQLELAKELERPVSVHCVRAFGDLLEVLKQTGPFPAGVLLHSYMGSAEMVSALANLGCYFSLSGFLTGMKSTKAKHMLKSIPLDRILLETDAPDALPRLDNVSVSPVHVHSSDADTEKRHMDSESQAANASNESLNHPENIHIVLEYVASLLEMTESELAELSYKNATKLFSYPGSKVQHEPEDI

SEQ ID NO: 36133 - protein, 225 aa, Zea mays subsp. mays
  peptide (1)..(225): Ceres Seq. ID no. 12436479
  misc_feature (1)..(213): Pfam Name: Pfam Description:  TatD related DNase
  misc_feature (1)..(225): NCBI GI NO: 38345538 NR Description: OSJNBa0020J04.13
  misc_feature (1)..(218): NCBI GI NO: 18418353 NR Description: putative protein; protein id: At5g17570
  misc_feature (1)..(218): NCBI GI NO: 11357936 NR Description: hypothetical protein K10A8_50 - Arabidopsisthaliana
  misc_feature (1)..(175): NCBI GI NO: 15228573 NR Description: unknown protein; protein id: At3g03500.1
  misc_feature (1)..(137): NCBI GI NO: 23097502 NR Description: hypothetical protein
  misc_feature (162)..(212): NCBI GI NO: 23097502 NR Description: hypothetical protein
  misc_feature (1)..(138): NCBI GI NO: 15677535 NR Description: conserved hypothetical protein
  misc_feature (1)..(137): NCBI GI NO: 16077107 NR Description: similar to hypothetical proteins
  misc_feature (176)..(211): NCBI GI NO: 16077107 NR Description: similar to hypothetical proteins
  misc_feature (1)..(137): NCBI GI NO: 39998376 NR Description: hydrolase, TatD family
MNLLRRFFAETPEAAVGEIGLDKGSHGKTINFGEQVEVFQRQLELAKELERPVSVHCVRAFGDLLEVLKQTGPFPAGVLLHSYMGSAEMVSALANLGCYFSLSGFLTGMKSTKAKHMLKSIPLDRILLETDAPDALPRLDNVSVSPVHVHSSDADTEKRHMDSESQAANASNESLNHPENIHIVLEYVASLLEMTESELAELSYKNATKLFSYPGSKVQHEPEDI

SEQ ID NO: 36134 - DNA, 1320 bp, Zea mays subsp. mays
  misc_feature (1)..(1320): Ceres Seq. ID no. 13505046
ggaactgaaaggaaacattagggttttttgtagagttcgaccacttcttcgatttgagggtgattccaatggtccggaaggtgcctctatctcttttccaacatctgtagagtctactggacgtagcattgatttgataaaccaagggcaaaagctctccttctcatatgacaaggtttttgaccatggtgcgtcacaggaagatgtgtttgtggaaatatcgcaactagtccaaagtgcccttgatgggtacaaggtatgcatatttgcatatggtcaaactggatctggtaaaacttatacaatgatgggtaaaccaggaaatgatcaaaaagggataatacctcgttctttggagcaaattttcaagaccagtcggtttctagaatctcaaggatggaattattccatgcaagcatcaatgttggaaatatacaatgagaccattcgtgatttgttagcacctggtcggtctaacagttttgagtctagtaaacaatgcactataaagcatgaccctcatgggaatattgtgtcggaccttacaattattgatgtctttggtattgctgatgtgactagtctactagagaaagcatcccagagtaggtctgtgggtaagactcagatgaatgaacagtcgtccagaagtcattttgtattcacattaaagatatctggatctaacgagaacacaggccaaaatgtccaaggagtccttaacttgattgatttagctgggagtgagcgtcttgctaaaagtggctccacaggtgatcgcttgaaggaaactcagtcaatcaataaaagcttgtcggctttgagcgatgtaatcttcgcgatcgcaaaaggagatgaccacgttccgttcagaaattcaaaacttacatacctattgcagccttgccttggaggtgactcgaaagctctcatgtttgtcaacatttcaccggaggcatcctccgttggtgagacgatatgctcgttgaggtttgcttcaagggtgaatgcttgtgagattggaataccaagacgtcacacataagcccgtcccttcgttctaggctgaattatgggtgaaggtagctgtagggatcatggtaatgtgatatataatgtgttggtttgtgccgcatttggccacaaaggtgatgcccaacagaattcttgtaacttgtacagtgtaggtgatggtgttttgctgagagcagcatatgtacgagtgctgacatcttgtcatgctttccttactttttggtgtagcagacttgggtcatgttaattgtgatcgtgggttcgaatgtgaaactaccttttctc

SEQ ID NO: 36135 - protein, 347 aa, Zea mays subsp. mays
  peptide (1)..(347): Ceres Seq. ID no. 13505047
  misc_feature (1)..(347): NCBI GI NO: 15208457 NR Description: kinesin heavy chain [Zea mays]
  misc_feature (1)..(346): NCBI GI NO: 39546247 NR Description: OSJNBa0089N06.17
  misc_feature (1)..(347): NCBI GI NO: 25295723 NR Description: kinesin-like protein
  misc_feature (1)..(347): NCBI GI NO: 30680014 NR Description: kinesin-like protein A, putative
  misc_feature (1)..(347): NCBI GI NO: 34849893 NR Description: At4g05190 [Arabidopsis thaliana]
  misc_feature (1)..(347): NCBI GI NO: 15233583 NR Description: kinesin-like protein A (katA)
  misc_feature (1)..(347): NCBI GI NO: 10176794 NR Description: kinesin-like protein [Arabidopsis thaliana]
  misc_feature (1)..(347): NCBI GI NO: 18423656 NR Description: kinesin-like protein C (katC)
  misc_feature (1)..(347): NCBI GI NO: 18416938 NR Description: kinesin-like protein B (katB)
  misc_feature (1)..(347): NCBI GI NO: 33354214 NR Description: kinesin-related protein KLPA-like protein
ELKGNIRVFCRVRPLLRFEGDSNGPEGASISFPTSVESTGRSIDLINQGQKLSFSYDKVFDHGASQEDVFVEISQLVQSALDGYKVCIFAYGQTGSGKTYTMMGKPGNDQKGIIPRSLEQIFKTSRFLESQGWNYSMQASMLEIYNETIRDLLAPGRSNSFESSKQCTIKHDPHGNIVSDLTIIDVFGIADVTSLLEKASQSRSVGKTQMNEQSSRSHFVFTLKISGSNENTGQNVQGVLNLIDLAGSERLAKSGSTGDRLKETQSINKSLSALSDVIFAIAKGDDHVPFRNSKLTYLLQPCLGGDSKALMFVNISPEASSVGETICSLRFASRVNACEIGIPRRHT

SEQ ID NO: 36136 - protein, 246 aa, Zea mays subsp. mays
  peptide (1)..(246): Ceres Seq. ID no. 13505048
  misc_feature (1)..(246): NCBI GI NO: 15208457 NR Description: kinesin heavy chain [Zea mays]
  misc_feature (1)..(245): NCBI GI NO: 39546247 NR Description: OSJNBa0089N06.17
  misc_feature (1)..(246): NCBI GI NO: 25295723 NR Description: kinesin-like protein
  misc_feature (1)..(246): NCBI GI NO: 30680014 NR Description: kinesin-like protein A, putative
  misc_feature (1)..(246): NCBI GI NO: 34849893 NR Description: At4g05190 [Arabidopsis thaliana]
  misc_feature (1)..(246): NCBI GI NO: 15233583 NR Description: kinesin-like protein A (katA)
  misc_feature (1)..(246): NCBI GI NO: 10176794 NR Description: kinesin-like protein [Arabidopsis thaliana]
  misc_feature (1)..(246): NCBI GI NO: 18423656 NR Description: kinesin-like protein C (katC)
  misc_feature (1)..(246): NCBI GI NO: 18416938 NR Description: kinesin-like protein B (katB)
  misc_feature (1)..(246): NCBI GI NO: 33354214 NR Description: kinesin-related protein KLPA-like protein
MMGKPGNDQKGIIPRSLEQIFKTSRFLESQGWNYSMQASMLEIYNETIRDLLAPGRSNSFESSKQCTIKHDPHGNIVSDLTIIDVFGIADVTSLLEKASQSRSVGKTQMNEQSSRSHFVFTLKISGSNENTGQNVQGVLNLIDLAGSERLAKSGSTGDRLKETQSINKSLSALSDVIFAIAKGDDHVPFRNSKLTYLLQPCLGGDSKALMFVNISPEASSVGETICSLRFASRVNACEIGIPRRHT

SEQ ID NO: 36137 - protein, 245 aa, Zea mays subsp. mays
  peptide (1)..(245): Ceres Seq. ID no. 13505049
  misc_feature (1)..(245): NCBI GI NO: 15208457 NR Description: kinesin heavy chain [Zea mays]
  misc_feature (1)..(244): NCBI GI NO: 39546247 NR Description: OSJNBa0089N06.17
  misc_feature (1)..(245): NCBI GI NO: 25295723 NR Description: kinesin-like protein
  misc_feature (1)..(245): NCBI GI NO: 30680014 NR Description: kinesin-like protein A, putative
  misc_feature (1)..(245): NCBI GI NO: 34849893 NR Description: At4g05190 [Arabidopsis thaliana]
  misc_feature (1)..(245): NCBI GI NO: 15233583 NR Description: kinesin-like protein A (katA)
  misc_feature (1)..(245): NCBI GI NO: 10176794 NR Description: kinesin-like protein [Arabidopsis thaliana]
  misc_feature (1)..(245): NCBI GI NO: 18423656 NR Description: kinesin-like protein C (katC)
  misc_feature (1)..(245): NCBI GI NO: 18416938 NR Description: kinesin-like protein B (katB)
  misc_feature (1)..(245): NCBI GI NO: 33354214 NR Description: kinesin-related protein KLPA-like protein
MGKPGNDQKGIIPRSLEQIFKTSRFLESQGWNYSMQASMLEIYNETIRDLLAPGRSNSFESSKQCTIKHDPHGNIVSDLTIIDVFGIADVTSLLEKASQSRSVGKTQMNEQSSRSHFVFTLKISGSNENTGQNVQGVLNLIDLAGSERLAKSGSTGDRLKETQSINKSLSALSDVIFAIAKGDDHVPFRNSKLTYLLQPCLGGDSKALMFVNISPEASSVGETICSLRFASRVNACEIGIPRRHT

SEQ ID NO: 36138 - DNA, 2294 bp, Zea mays subsp. mays
  misc_feature (1)..(2294): Ceres Seq. ID no. 13587778
ttgaccccaacgatcttaacgtcctcaacacgctcttcaccagtctgaattctcctgggcagctcacaggttggcaggcgaatgggggtgatccttgtggccagtcatggaagggcattacttgctcaggatcaggggtcactaaaatccaattacctaacttgtcactcactggaaatttggcctacaacatgaataacttgggttcattagttgagcttgacatgagccaaaataaccttggcggtggaggtcaagtacagtacaatcttcccaatatgaagcttgagaaactcaatcttgcaggaaatcaatttggtggaaatttaccctactcaatttcgacgatgcctaatcttaagtatttaaaccttaatcataaccaactacaaggaaacatcagtgatgtattttccaacctttacagtttgtcagaactggatctgtcctttaattcccttactggtgatctaccacaaagtttcactggattgtcaagcctgaaaaaagtgtatttgcagaacaaccaatttactggtaatatcaatgtcttagccaatctcccccttgaaactttgaatgttgcgaacaaccatttcactggttggattcctagtcagcttaagaagataaacagtctacagactgatggaaattcttggagcacaggaccagcgccacctccacctccatacacagcgccgcctcctcctccaaaccattggaatgctgatggttcatcaagttcatcaagttctggtggaagatctgggataggtggtggaggtgtagcaggaatcattatatcgttgctggttgttggatcagttgttgcatttcttgtgatcaaaagaagaaaacgcaaagctgctatgaaagaacattttgaacagcaccagccattcacttccttcccttcaaatgaagttaaagacatgaagcctgtctgcgaggccaccacagtagacatagagtctttggcttcacctgcttcagttaatctgaaaccacctccgaagatagaacgaaacaaatcatttgatgatgacgatgatttttcaaacaagcttgttgcaaagaaaagtaatataacacctataaatgcaactgtttattcagttgcagatctacagatggcaacagatagctttagcttcgacaaccttgttggagagggtacttttggacgtgtttacagggcacaattcaatgatggaaaggttctggcgatcaagaaattagatagtactgtgatgccatttcaatcatctgatgactttgctgaactggtctcgaacatttcaaaattgcaccatccgaatctgaatgagcttgtgggctattgcatggaacatggccagcacttgcttgtgtatgatttccacaggaatggatcacttcatgatctactccacctttcagatgagtacagcaagccacttagctggaacactcgtatcaagatcgcactcggctctgcccgtgcactggagtaccttcatgaaatatgttctccatccatcatccataagaatttcaagtcgtcaaacattttgctggactcagaattcaatccacacctttcagatgctggacttgcaagctttattcctgatgctgaattccaggcagcagaacaaagtgccggatacactgccccagaagtggacatgaccggtcagtacaccttcaagagtgatgtctacagctttggagttgtcatgcttgaactattgacaggacgtagaccatttgacagctctagacccaggtcagagcagtcacttgtgcggtgggcaacaccccagctgcatgacatcgacgcattggacaggatggtcgatcctgcactcaagggtctatacccagccaaatctctatcccgatttgctgatgtccttgccctgtgtgtccagcctgaaccagaattcaggccaccaatgtcagaggtggtgcaagcattggttcgacttgtgcagagggccaacatgacgaagaggatgcttgatggggatacttctcggcgaccagatgacctggaccaagatttcatatgacaagctgaactcttgtcagattgtatttatttcgttcgactagcggcccaagcaagagacataatcacacaagaggaagaaacagaactctgtcagcttcgccagtacataatcacaagtttttcctggtagcaaagttgtgctatatggttgtactgtgtctacaaaatagtaccttgatcttacgctaatggcatattgttataattctttggtaacttatatgcaaatccccag

SEQ ID NO: 36139 - protein, 684 aa, Zea mays subsp. mays
  peptide (1)..(684): Ceres Seq. ID no. 13587779
  misc_feature (1)..(684): NCBI GI NO: 29367551 NR Description: putative leucine-rich repeat transmembrane proteinkinase
  misc_feature (79)..(410): NCBI GI NO: 37533916 NR Description: putative leucine-rich repeat transmembrane proteinkinase 1
  misc_feature (406)..(684): NCBI GI NO: 37533916 NR Description: putative leucine-rich repeat transmembrane proteinkinase 1
  misc_feature (1)..(680): NCBI GI NO: 15220928 NR Description: leucine-rich repeat transmembrane protein kinase 1
  misc_feature (1)..(666): NCBI GI NO: 30683104 NR Description: leucine-rich repeat transmembrane protein kinase
  misc_feature (1)..(272): NCBI GI NO: 37533916 NR Description: putative leucine-rich repeat transmembrane proteinkinase 1
  misc_feature (24)..(378): NCBI GI NO: 7489785 NR Description: leucine-rich repeat transmembrane protein kinase 3
  misc_feature (1)..(683): NCBI GI NO: 15219262 NR Description: leucine-rich repeat transmembrane protein kinase
  misc_feature (332)..(658): NCBI GI NO: 1931637 NR Description: receptor-associated kinase isolog; 3024-808
  misc_feature (371)..(654): NCBI GI NO: 13897308 NR Description: SERK1 protein [Zea mays]
DPNDLNVLNTLFTSLNSPGQLTGWQANGGDPCGQSWKGITCSGSGVTKIQLPNLSLTGNLAYNMNNLGSLVELDMSQNNLGGGGQVQYNLPNMKLEKLNLAGNQFGGNLPYSISTMPNLKYLNLNHNQLQGNISDVFSNLYSLSELDLSFNSLTGDLPQSFTGLSSLKKVYLQNNQFTGNINVLANLPLETLNVANNHFTGWIPSQLKKINSLQTDGNSWSTGPAPPPPPYTAPPPPPNHWNADGSSSSSSSGGRSGIGGGGVAGIIISLLVVGSVVAFLVIKRRKRKAAMKEHFEQHQPFTSFPSNEVKDMKPVCEATTVDIESLASPASVNLKPPPKIERNKSFDDDDDFSNKLVAKKSNITPINATVYSVADLQMATDSFSFDNLVGEGTFGRVYRAQFNDGKVLAIKKLDSTVMPFQSSDDFAELVSNISKLHHPNLNELVGYCMEHGQHLLVYDFHRNGSLHDLLHLSDEYSKPLSWNTRIKIALGSARALEYLHEICSPSIIHKNFKSSNILLDSEFNPHLSDAGLASFIPDAEFQAAEQSAGYTAPEVDMTGQYTFKSDVYSFGVVMLELLTGRRPFDSSRPRSEQSLVRWATPQLHDIDALDRMVDPALKGLYPAKSLSRFADVLALCVQPEPEFRPPMSEVVQALVRLVQRANMTKRMLDGDTSRRPDDLDQDFI

SEQ ID NO: 36140 - protein, 621 aa, Zea mays subsp. mays
  peptide (1)..(621): Ceres Seq. ID no. 13587780
  misc_feature (1)..(621): NCBI GI NO: 29367551 NR Description: putative leucine-rich repeat transmembrane proteinkinase
  misc_feature (16)..(347): NCBI GI NO: 37533916 NR Description: putative leucine-rich repeat transmembrane proteinkinase 1
  misc_feature (343)..(621): NCBI GI NO: 37533916 NR Description: putative leucine-rich repeat transmembrane proteinkinase 1
  misc_feature (1)..(617): NCBI GI NO: 15220928 NR Description: leucine-rich repeat transmembrane protein kinase 1
  misc_feature (1)..(603): NCBI GI NO: 30683104 NR Description: leucine-rich repeat transmembrane protein kinase
  misc_feature (1)..(209): NCBI GI NO: 37533916 NR Description: putative leucine-rich repeat transmembrane proteinkinase 1
  misc_feature (1)..(315): NCBI GI NO: 7489785 NR Description: leucine-rich repeat transmembrane protein kinase 3
  misc_feature (1)..(620): NCBI GI NO: 15219262 NR Description: leucine-rich repeat transmembrane protein kinase
  misc_feature (269)..(595): NCBI GI NO: 1931637 NR Description: receptor-associated kinase isolog; 3024-808
  misc_feature (308)..(591): NCBI GI NO: 13897308 NR Description: SERK1 protein [Zea mays]
MNNLGSLVELDMSQNNLGGGGQVQYNLPNMKLEKLNLAGNQFGGNLPYSISTMPNLKYLNLNHNQLQGNISDVFSNLYSLSELDLSFNSLTGDLPQSFTGLSSLKKVYLQNNQFTGNINVLANLPLETLNVANNHFTGWIPSQLKKINSLQTDGNSWSTGPAPPPPPYTAPPPPPNHWNADGSSSSSSSGGRSGIGGGGVAGIIISLLVVGSVVAFLVIKRRKRKAAMKEHFEQHQPFTSFPSNEVKDMKPVCEATTVDIESLASPASVNLKPPPKIERNKSFDDDDDFSNKLVAKKSNITPINATVYSVADLQMATDSFSFDNLVGEGTFGRVYRAQFNDGKVLAIKKLDSTVMPFQSSDDFAELVSNISKLHHPNLNELVGYCMEHGQHLLVYDFHRNGSLHDLLHLSDEYSKPLSWNTRIKIALGSARALEYLHEICSPSIIHKNFKSSNILLDSEFNPHLSDAGLASFIPDAEFQAAEQSAGYTAPEVDMTGQYTFKSDVYSFGVVMLELLTGRRPFDSSRPRSEQSLVRWATPQLHDIDALDRMVDPALKGLYPAKSLSRFADVLALCVQPEPEFRPPMSEVVQALVRLVQRANMTKRMLDGDTSRRPDDLDQDFI

SEQ ID NO: 36141 - protein, 610 aa, Zea mays subsp. mays
  peptide (1)..(610): Ceres Seq. ID no. 13587781
  misc_feature (1)..(610): NCBI GI NO: 29367551 NR Description: putative leucine-rich repeat transmembrane proteinkinase
  misc_feature (5)..(336): NCBI GI NO: 37533916 NR Description: putative leucine-rich repeat transmembrane proteinkinase 1
  misc_feature (332)..(610): NCBI GI NO: 37533916 NR Description: putative leucine-rich repeat transmembrane proteinkinase 1
  misc_feature (1)..(606): NCBI GI NO: 15220928 NR Description: leucine-rich repeat transmembrane protein kinase 1
  misc_feature (1)..(592): NCBI GI NO: 30683104 NR Description: leucine-rich repeat transmembrane protein kinase
  misc_feature (1)..(198): NCBI GI NO: 37533916 NR Description: putative leucine-rich repeat transmembrane proteinkinase 1
  misc_feature (1)..(304): NCBI GI NO: 7489785 NR Description: leucine-rich repeat transmembrane protein kinase 3
  misc_feature (1)..(609): NCBI GI NO: 15219262 NR Description: leucine-rich repeat transmembrane protein kinase
  misc_feature (258)..(584): NCBI GI NO: 1931637 NR Description: receptor-associated kinase isolog; 3024-808
  misc_feature (297)..(580): NCBI GI NO: 13897308 NR Description: SERK1 protein [Zea mays]
MSQNNLGGGGQVQYNLPNMKLEKLNLAGNQFGGNLPYSISTMPNLKYLNLNHNQLQGNISDVFSNLYSLSELDLSFNSLTGDLPQSFTGLSSLKKVYLQNNQFTGNINVLANLPLETLNVANNHFTGWIPSQLKKINSLQTDGNSWSTGPAPPPPPYTAPPPPPNHWNADGSSSSSSSGGRSGIGGGGVAGIIISLLVVGSVVAFLVIKRRKRKAAMKEHFEQHQPFTSFPSNEVKDMKPVCEATTVDIESLASPASVNLKPPPKIERNKSFDDDDDFSNKLVAKKSNITPINATVYSVADLQMATDSFSFDNLVGEGTFGRVYRAQFNDGKVLAIKKLDSTVMPFQSSDDFAELVSNISKLHHPNLNELVGYCMEHGQHLLVYDFHRNGSLHDLLHLSDEYSKPLSWNTRIKIALGSARALEYLHEICSPSIIHKNFKSSNILLDSEFNPHLSDAGLASFIPDAEFQAAEQSAGYTAPEVDMTGQYTFKSDVYSFGVVMLELLTGRRPFDSSRPRSEQSLVRWATPQLHDIDALDRMVDPALKGLYPAKSLSRFADVLALCVQPEPEFRPPMSEVVQALVRLVQRANMTKRMLDGDTSRRPDDLDQDFI

SEQ ID NO: 36142 - DNA, 510 bp, Zea mays subsp. mays
  misc_feature (1)..(510): Ceres Seq. ID no. 3623923
aatatggtggatattcgkgrtgttgctgatgctcttcttctgacttacgaaaagccarargcgtctggacgatacatctgcagttcacatgcaataaaaatttctgatatgataaacatactgaagaccatgtatccgtcttacccttatcccaaaaattttgtggaagatgatgtcaactctgtatacagctctgagaaactgcagaagctggggtggaccttcaagcctatagaggaatccctccgtgacactgttgaatcctacaaggcatttggcatcctgaattgaacatccaactaggactgtttccatctgctgttgcctccgaactcctcctgaataatgtaggcgcagttaaacagcagcagcactgccgatctctttatttttcaatattgktatctagtggttcaggaccaaataagtaggccaggtgctgactgttgtatggtttgkggcctattgkcgttgctaaaaactagaaatgcgcgtmctaatgttgcattg

SEQ ID NO: 36143 - protein, 96 aa, Zea mays subsp. mays
  peptide (1)..(96): Ceres Seq. ID no. 3623924
  misc_feature (1)..(90): NCBI GI NO: 15226134 NR Description: putative cinnamoyl-CoA reductase
  misc_feature (1)..(90): NCBI GI NO: 15226135 NR Description: putative cinnamoyl-CoA reductase
  misc_feature (2)..(95): NCBI GI NO: 6554472 NR Description: putative cinnamoyl-CoA reductase; 14056-15506
  misc_feature (2)..(95): NCBI GI NO: 15223068 NR Description: putative cinnamoyl-CoA reductase
  misc_feature (3)..(95): NCBI GI NO: 3341511 NR Description: cinnamoyl-CoA reductase [Saccharum officinarum]
  misc_feature (3)..(95): NCBI GI NO: 9964087 NR Description: cinnamoyl CoA reductase [Lolium perenne]
  misc_feature (3)..(95): NCBI GI NO: 3242328 NR Description: cinnamoyl-CoA reductase [Zea mays]
  misc_feature (3)..(95): NCBI GI NO: 7431410 NR Description: cinnamoyl CoA reductase - maize
  misc_feature (3)..(95): NCBI GI NO: 25140432 NR Description: cinnamoyl CoA reductase [Hordeum vulgare]
  misc_feature (3)..(95): NCBI GI NO: 34905082 NR Description: putative dihydroflavonol 4-reductase
  misc_feature (6)..(6): Xaa is any aa, unknown or other
  misc_feature (7)..(7): Xaa is any aa, unknown or other
  misc_feature (20)..(20): Xaa is any aa, unknown or other
NMVDIXXVADALLLTYEKPXASGRYICSSHAIKISDMINILKTMYPSYPYPKNFVEDDVNSVYSSEKLQKLGWTFKPIEESLRDTVESYKAFGILN

SEQ ID NO: 36144 - protein, 95 aa, Zea mays subsp. mays
  peptide (1)..(95): Ceres Seq. ID no. 3623925
  misc_feature (1)..(89): NCBI GI NO: 15226134 NR Description: putative cinnamoyl-CoA reductase
  misc_feature (1)..(89): NCBI GI NO: 15226135 NR Description: putative cinnamoyl-CoA reductase
  misc_feature (1)..(94): NCBI GI NO: 6554472 NR Description: putative cinnamoyl-CoA reductase; 14056-15506
  misc_feature (1)..(94): NCBI GI NO: 15223068 NR Description: putative cinnamoyl-CoA reductase
  misc_feature (2)..(94): NCBI GI NO: 3341511 NR Description: cinnamoyl-CoA reductase [Saccharum officinarum]
  misc_feature (2)..(94): NCBI GI NO: 9964087 NR Description: cinnamoyl CoA reductase [Lolium perenne]
  misc_feature (2)..(94): NCBI GI NO: 3242328 NR Description: cinnamoyl-CoA reductase [Zea mays]
  misc_feature (2)..(94): NCBI GI NO: 7431410 NR Description: cinnamoyl CoA reductase - maize
  misc_feature (2)..(94): NCBI GI NO: 25140432 NR Description: cinnamoyl CoA reductase [Hordeum vulgare]
  misc_feature (2)..(94): NCBI GI NO: 34905082 NR Description: putative dihydroflavonol 4-reductase
  misc_feature (5)..(5): Xaa is any aa, unknown or other
  misc_feature (6)..(6): Xaa is any aa, unknown or other
  misc_feature (19)..(19): Xaa is any aa, unknown or other
MVDIXXVADALLLTYEKPXASGRYICSSHAIKISDMINILKTMYPSYPYPKNFVEDDVNSVYSSEKLQKLGWTFKPIEESLRDTVESYKAFGILN

SEQ ID NO: 36145 - protein, 60 aa, Zea mays subsp. mays
  peptide (1)..(60): Ceres Seq. ID no. 3623926
  misc_feature (1)..(54): NCBI GI NO: 15226134 NR Description: putative cinnamoyl-CoA reductase
  misc_feature (1)..(54): NCBI GI NO: 15226135 NR Description: putative cinnamoyl-CoA reductase
  misc_feature (1)..(59): NCBI GI NO: 6554472 NR Description: putative cinnamoyl-CoA reductase; 14056-15506
  misc_feature (1)..(59): NCBI GI NO: 15223068 NR Description: putative cinnamoyl-CoA reductase
  misc_feature (1)..(59): NCBI GI NO: 3341511 NR Description: cinnamoyl-CoA reductase [Saccharum officinarum]
  misc_feature (1)..(59): NCBI GI NO: 9964087 NR Description: cinnamoyl CoA reductase [Lolium perenne]
  misc_feature (1)..(59): NCBI GI NO: 3242328 NR Description: cinnamoyl-CoA reductase [Zea mays]
  misc_feature (1)..(59): NCBI GI NO: 7431410 NR Description: cinnamoyl CoA reductase - maize
  misc_feature (1)..(59): NCBI GI NO: 25140432 NR Description: cinnamoyl CoA reductase [Hordeum vulgare]
  misc_feature (1)..(59): NCBI GI NO: 34905082 NR Description: putative dihydroflavonol 4-reductase
MINILKTMYPSYPYPKNFVEDDVNSVYSSEKLQKLGWTFKPIEESLRDTVESYKAFGILN

SEQ ID NO: 36146 - DNA, 1396 bp, Zea mays subsp. mays
  misc_feature (1)..(1396): Ceres Seq. ID no. 13636262
caattaaccctcactaaagggaacaaaagctggagctccaccgcggtggcggccgctctagaactagtggatcccccgggctgcaggaattcgcacgagaccattacctagaacatcctaatcgaaaaaagttccatatccaacacacacagcaacgctcgctcggcactgtcactagctagttgctctactagagggcgggtatagagctgcctgcaatccgccgctgagaagggaggatcggaagcgacgatgaggtcgtttgctcctgtctttctgtcggcggtcgtggcctggctggagctggcgggcaccgcgcagggcggcaacttctaccaggacacagagatgacctggggcgatggccgcggcaaggtagtggacggcgggcgcgggctggacctgacgctggaccgcacgtccggctccgggttccagtccaagagcgagtacctgttcggcaagatcgacatgcagatcaagctggtgccaggcaactccgctggcacggtcaccaccttctacctgtcgtccccagggcgacgcgcacgacgagatcgacttcgagttcctgggcaacgtgagcggggagccctacacgctgcacaccaacgtgttcacgcgcggacagggccagcgggagcagcagttccgcctctggttcgaccctaccactgccttccacacctactccatcctgtggaacccgcagcacgtgatcttcgcggtggacggcaccccggtgcgggacttcaagaaccacgaggcgcgcggggtggcgttcccgaggatgcagcccatgaggctgtacgccagcctgtggaacgccgacgactgggccacgcagggcgggcgcgtcaaggcggactggtccaaggcccccttcgtcgcctccttccgcggtttcagcgccgacgcctgcgtctgggacggcggcaggcagcgctgccctgagggcaccatggaggccgccgccgtcgcgggtgccggctccggccgcggctggtggaaccagcagctcagcgacatgagctaccgccgcatgcgctgggtgcagcgcaagttcatgatctacaactactgcgccgacgccaagcgcttcccgcagggcgtgcccgccgagtgcaagctccggtgagggagcgaggtttgttgggacgtccgtggggcatcaaaaccaagcacgatccctagtcgtggaaagtagaaaccaggcatcgattcgatcgtcgtcgacggtcttagtagtagctacttatttcgcagtgggcgatgaaagaatggtgtcatgtaaatgtagctctagtcgtgtcgcattctttgatttgttgtttcagcagcaccggatgtacaagtattgagtttgggctagcaagaataagtaatctttttcggc

SEQ ID NO: 36147 - protein, 233 aa, Zea mays subsp. mays
  peptide (1)..(233): Ceres Seq. ID no. 13636263
  misc_feature (27)..(96): Pfam Name: Pfam Description:  Glycosyl hydrolases family 16
  misc_feature (12)..(96): NCBI GI NO: 7447413 NR Description: xyloglucan endo-1,4-beta-D-glucanase (EC 3
  misc_feature (5)..(81): NCBI GI NO: 14330332 NR Description: Xet1 protein [Festuca pratensis]
  misc_feature (9)..(96): NCBI GI NO: 8886867 NR Description: xyloglucan endotransglycosylase XET2
  misc_feature (1)..(96): NCBI GI NO: 8886865 NR Description: xyloglucan endotransglycosylase XET1
  misc_feature (9)..(96): NCBI GI NO: 7447412 NR Description: xyloglucan endo-1,4-beta-D-glucanase (EC 3
  misc_feature (6)..(96): NCBI GI NO: 15242781 NR Description: xyloglucan endotransglycosylase (TCH4)
  misc_feature (1)..(96): NCBI GI NO: 15235997 NR Description: xyloglucan endotransglycosylase (XTR-6)
  misc_feature (1)..(96): NCBI GI NO: 17064792 NR Description: xyloglucan endo-1, 4-beta-D-glucanase (XTR-6)
  misc_feature (7)..(96): NCBI GI NO: 22947852 NR Description: xyloglucan endotransglycosylase
  misc_feature (26)..(96): NCBI GI NO: 29500891 NR Description: putative xyloglucan endotransglycosylase
MRSFAPVFLSAVVAWLELAGTAQGGNFYQDTEMTWGDGRGKVVDGGRGLDLTLDRTSGSGFQSKSEYLFGKIDMQIKLVPGNSAGTVTTFYLSSPGRRARRDRLRVPGQRERGALHAAHQRVHARTGPAGAAVPPLVRPYHCLPHLLHPVEPAARDLRGGRHPGAGLQEPRGARGGVPEDAAHEAVRQPVERRRLGHAGRARQGGLVQGPLRRLLPRFQRRRLRLGRRQAALP

SEQ ID NO: 36148 - protein, 201 aa, Zea mays subsp. mays
  peptide (1)..(201): Ceres Seq. ID no. 13636264
  misc_feature (1)..(64): Pfam Name: Pfam Description:  Glycosyl hydrolases family 16
  misc_feature (1)..(64): NCBI GI NO: 7447413 NR Description: xyloglucan endo-1,4-beta-D-glucanase (EC 3
  misc_feature (1)..(49): NCBI GI NO: 14330332 NR Description: Xet1 protein [Festuca pratensis]
  misc_feature (1)..(64): NCBI GI NO: 8886867 NR Description: xyloglucan endotransglycosylase XET2
  misc_feature (1)..(64): NCBI GI NO: 8886865 NR Description: xyloglucan endotransglycosylase XET1
  misc_feature (1)..(64): NCBI GI NO: 7447412 NR Description: xyloglucan endo-1,4-beta-D-glucanase (EC 3
  misc_feature (1)..(64): NCBI GI NO: 15242781 NR Description: xyloglucan endotransglycosylase (TCH4)
  misc_feature (1)..(64): NCBI GI NO: 15235997 NR Description: xyloglucan endotransglycosylase (XTR-6)
  misc_feature (1)..(64): NCBI GI NO: 17064792 NR Description: xyloglucan endo-1, 4-beta-D-glucanase (XTR-6)
  misc_feature (1)..(64): NCBI GI NO: 22947852 NR Description: xyloglucan endotransglycosylase
  misc_feature (1)..(64): NCBI GI NO: 29500891 NR Description: putative xyloglucan endotransglycosylase
MTWGDGRGKVVDGGRGLDLTLDRTSGSGFQSKSEYLFGKIDMQIKLVPGNSAGTVTTFYLSSPGRRARRDRLRVPGQRERGALHAAHQRVHARTGPAGAAVPPLVRPYHCLPHLLHPVEPAARDLRGGRHPGAGLQEPRGARGGVPEDAAHEAVRQPVERRRLGHAGRARQGGLVQGPLRRLLPRFQRRRLRLGRRQAALP

SEQ ID NO: 36149 - protein, 160 aa, Zea mays subsp. mays
  peptide (1)..(160): Ceres Seq. ID no. 13636265
  misc_feature (1)..(23): NCBI GI NO: 7447413 NR Description: xyloglucan endo-1,4-beta-D-glucanase (EC 3
  misc_feature (1)..(23): NCBI GI NO: 8886867 NR Description: xyloglucan endotransglycosylase XET2
  misc_feature (1)..(23): NCBI GI NO: 8886865 NR Description: xyloglucan endotransglycosylase XET1
  misc_feature (1)..(23): NCBI GI NO: 7447412 NR Description: xyloglucan endo-1,4-beta-D-glucanase (EC 3
  misc_feature (1)..(23): NCBI GI NO: 15242781 NR Description: xyloglucan endotransglycosylase (TCH4)
  misc_feature (1)..(23): NCBI GI NO: 15235997 NR Description: xyloglucan endotransglycosylase (XTR-6)
  misc_feature (1)..(23): NCBI GI NO: 17064792 NR Description: xyloglucan endo-1, 4-beta-D-glucanase (XTR-6)
  misc_feature (1)..(23): NCBI GI NO: 22947852 NR Description: xyloglucan endotransglycosylase
  misc_feature (1)..(23): NCBI GI NO: 29500891 NR Description: putative xyloglucan endotransglycosylase
  misc_feature (1)..(21): NCBI GI NO: 28804632 NR Description: xyloglucan endotransglycosylase [Pyrus communis]
MQIKLVPGNSAGTVTTFYLSSPGRRARRDRLRVPGQRERGALHAAHQRVHARTGPAGAAVPPLVRPYHCLPHLLHPVEPAARDLRGGRHPGAGLQEPRGARGGVPEDAAHEAVRQPVERRRLGHAGRARQGGLVQGPLRRLLPRFQRRRLRLGRRQAALP

SEQ ID NO: 36150 - DNA, 2328 bp, Zea mays subsp. mays; identical to SEQ ID NO: 36126
  misc_feature (1)..(2328): Ceres Seq. ID no. 13635296
  misc_feature (2299)..(2299): n is a, c, t, g, unknown, or other

SEQ ID NO: 36151 - protein, 676 aa, Zea mays subsp. mays; identical to SEQ ID NO: 36127
  peptide (1)..(676): Ceres Seq. ID no. 15220344
  misc_feature (324)..(517): Pfam Name: Pfam Description:  ATP synthase alpha/beta family
  misc_feature (107)..(674): NCBI GI NO: 137460 NR Description: Vacuolar ATP synthase catalytic subunit A
  misc_feature (107)..(675): NCBI GI NO: 11527563 NR Description: vacuolar proton-ATPase
  misc_feature (107)..(674): NCBI GI NO: 401322 NR Description: Vacuolar ATP synthase catalytic subunit A
  misc_feature (107)..(674): NCBI GI NO: 3169287 NR Description: vacuolar H+-ATPase catalytic subunit
  misc_feature (107)..(674): NCBI GI NO: 2506211 NR Description: Vacuolar ATP synthase catalytic subunit A
  misc_feature (107)..(674): NCBI GI NO: 2493122 NR Description: Vacuolar ATP synthase catalytic subunit A
  misc_feature (107)..(674): NCBI GI NO: 12585490 NR Description: Vacuolar ATP synthase catalytic subunit A
  misc_feature (107)..(674): NCBI GI NO: 15982954 NR Description: V-ATPase catalytic subunit A [Prunus persica]
  misc_feature (107)..(674): NCBI GI NO: 27883932 NR Description: vacuolar H+-ATPase A1 subunit isoform
  misc_feature (107)..(674): NCBI GI NO: 27884018 NR Description: vacuolar H+-ATPase A2 subunit isoform
  misc_feature (160)..(160): Xaa is any aa, unknown or other
  misc_feature (436)..(436): Xaa is any aa, unknown or other
  misc_feature (448)..(448): Xaa is any aa, unknown or other
  misc_feature (450)..(450): Xaa is any aa, unknown or other
  misc_feature (457)..(457): Xaa is any aa, unknown or other
  misc_feature (465)..(465): Xaa is any aa, unknown or other
  misc_feature (469)..(469): Xaa is any aa, unknown or other
  misc_feature (479)..(479): Xaa is any aa, unknown or other
  misc_feature (519)..(519): Xaa is any aa, unknown or other
  misc_feature (521)..(521): Xaa is any aa, unknown or other
  misc_feature (523)..(523): Xaa is any aa, unknown or other
  misc_feature (524)..(524): Xaa is any aa, unknown or other
  misc_feature (536)..(536): Xaa is any aa, unknown or other
  misc_feature (545)..(545): Xaa is any aa, unknown or other
  misc_feature (555)..(555): Xaa is any aa, unknown or other
  misc_feature (564)..(564): Xaa is any aa, unknown or other
  misc_feature (570)..(570): Xaa is any aa, unknown or other
  misc_feature (571)..(571): Xaa is any aa, unknown or other
  misc_feature (581)..(581): Xaa is any aa, unknown or other
  misc_feature (649)..(649): Xaa is any aa, unknown or other
  misc_feature (660)..(660): Xaa is any aa, unknown or other
  misc_feature (661)..(661): Xaa is any aa, unknown or other
  misc_feature (662)..(662): Xaa is any aa, unknown or other
  misc_feature (676)..(676): Xaa is any aa, unknown or other

SEQ ID NO: 36152 - protein, 601 aa, Zea mays subsp. mays; identical to SEQ ID NO: 36128
  peptide (1)..(601): Ceres Seq. ID no. 15220345
  misc_feature (249)..(442): Pfam Name: Pfam Description:  ATP synthase alpha/beta family
  misc_feature (32)..(599): NCBI GI NO: 137460 NR Description: Vacuolar ATP synthase catalytic subunit A
  misc_feature (32)..(600): NCBI GI NO: 11527563 NR Description: vacuolar proton-ATPase
  misc_feature (32)..(599): NCBI GI NO: 401322 NR Description: Vacuolar ATP synthase catalytic subunit A
  misc_feature (32)..(599): NCBI GI NO: 3169287 NR Description: vacuolar H+-ATPase catalytic subunit
  misc_feature (32)..(599): NCBI GI NO: 2506211 NR Description: Vacuolar ATP synthase catalytic subunit A
  misc_feature (32)..(599): NCBI GI NO: 2493122 NR Description: Vacuolar ATP synthase catalytic subunit A
  misc_feature (32)..(599): NCBI GI NO: 12585490 NR Description: Vacuolar ATP synthase catalytic subunit A
  misc_feature (32)..(599): NCBI GI NO: 15982954 NR Description: V-ATPase catalytic subunit A [Prunus persica]
  misc_feature (32)..(599): NCBI GI NO: 27883932 NR Description: vacuolar H+-ATPase A1 subunit isoform
  misc_feature (32)..(599): NCBI GI NO: 27884018 NR Description: vacuolar H+-ATPase A2 subunit isoform
  misc_feature (85)..(85): Xaa is any aa, unknown or other
  misc_feature (361)..(361): Xaa is any aa, unknown or other
  misc_feature (373)..(373): Xaa is any aa, unknown or other
  misc_feature (375)..(375): Xaa is any aa, unknown or other
  misc_feature (382)..(382): Xaa is any aa, unknown or other
  misc_feature (390)..(390): Xaa is any aa, unknown or other
  misc_feature (394)..(394): Xaa is any aa, unknown or other
  misc_feature (404)..(404): Xaa is any aa, unknown or other
  misc_feature (444)..(444): Xaa is any aa, unknown or other
  misc_feature (446)..(446): Xaa is any aa, unknown or other
  misc_feature (448)..(448): Xaa is any aa, unknown or other
  misc_feature (449)..(449): Xaa is any aa, unknown or other
  misc_feature (461)..(461): Xaa is any aa, unknown or other
  misc_feature (470)..(470): Xaa is any aa, unknown or other
  misc_feature (480)..(480): Xaa is any aa, unknown or other
  misc_feature (489)..(489): Xaa is any aa, unknown or other
  misc_feature (495)..(495): Xaa is any aa, unknown or other
  misc_feature (496)..(496): Xaa is any aa, unknown or other
  misc_feature (506)..(506): Xaa is any aa, unknown or other
  misc_feature (574)..(574): Xaa is any aa, unknown or other
  misc_feature (585)..(585): Xaa is any aa, unknown or other
  misc_feature (586)..(586): Xaa is any aa, unknown or other
  misc_feature (587)..(587): Xaa is any aa, unknown or other
  misc_feature (601)..(601): Xaa is any aa, unknown or other

SEQ ID NO: 36153 - protein, 589 aa, Zea mays subsp. mays; identical to SEQ ID NO: 36129
  peptide (1)..(589): Ceres Seq. ID no. 15220346
  misc_feature (237)..(430): Pfam Name: Pfam Description:  ATP synthase alpha/beta family
  misc_feature (20)..(587): NCBI GI NO: 137460 NR Description: Vacuolar ATP synthase catalytic subunit A
  misc_feature (20)..(588): NCBI GI NO: 11527563 NR Description: vacuolar proton-ATPase
  misc_feature (20)..(587): NCBI GI NO: 401322 NR Description: Vacuolar ATP synthase catalytic subunit A
  misc_feature (20)..(587): NCBI GI NO: 3169287 NR Description: vacuolar H+-ATPase catalytic subunit
  misc_feature (20)..(587): NCBI GI NO: 2506211 NR Description: Vacuolar ATP synthase catalytic subunit A
  misc_feature (20)..(587): NCBI GI NO: 2493122 NR Description: Vacuolar ATP synthase catalytic subunit A
  misc_feature (20)..(587): NCBI GI NO: 12585490 NR Description: Vacuolar ATP synthase catalytic subunit A
  misc_feature (20)..(587): NCBI GI NO: 15982954 NR Description: V-ATPase catalytic subunit A [Prunus persica]
  misc_feature (20)..(587): NCBI GI NO: 27883932 NR Description: vacuolar H+-ATPase A1 subunit isoform
  misc_feature (20)..(587): NCBI GI NO: 27884018 NR Description: vacuolar H+-ATPase A2 subunit isoform
  misc_feature (73)..(73): Xaa is any aa, unknown or other
  misc_feature (349)..(349): Xaa is any aa, unknown or other
  misc_feature (361)..(361): Xaa is any aa, unknown or other
  misc_feature (363)..(363): Xaa is any aa, unknown or other
  misc_feature (370)..(370): Xaa is any aa, unknown or other
  misc_feature (378)..(378): Xaa is any aa, unknown or other
  misc_feature (382)..(382): Xaa is any aa, unknown or other
  misc_feature (392)..(392): Xaa is any aa, unknown or other
  misc_feature (432)..(432): Xaa is any aa, unknown or other
  misc_feature (434)..(434): Xaa is any aa, unknown or other
  misc_feature (436)..(436): Xaa is any aa, unknown or other
  misc_feature (437)..(437): Xaa is any aa, unknown or other
  misc_feature (449)..(449): Xaa is any aa, unknown or other
  misc_feature (458)..(458): Xaa is any aa, unknown or other
  misc_feature (468)..(468): Xaa is any aa, unknown or other
  misc_feature (477)..(477): Xaa is any aa, unknown or other
  misc_feature (483)..(483): Xaa is any aa, unknown or other
  misc_feature (484)..(484): Xaa is any aa, unknown or other
  misc_feature (494)..(494): Xaa is any aa, unknown or other
  misc_feature (562)..(562): Xaa is any aa, unknown or other
  misc_feature (573)..(573): Xaa is any aa, unknown or other
  misc_feature (574)..(574): Xaa is any aa, unknown or other
  misc_feature (575)..(575): Xaa is any aa, unknown or other
  misc_feature (589)..(589): Xaa is any aa, unknown or other

SEQ ID NO: 36154 - DNA, 1290 bp, Zea mays subsp. mays
  misc_feature (1)..(1290): Ceres Seq. ID no. 12436652
atcatattcccacctcgcgaacgaggacgaactgctacccccctcgcctcgccctcgccgcctcctctcccgttcccccaccaaccgcagcagcgagagcgagactgagaatggccgcggcgccgtcgtccctcgtgtcctcccatctctctcgcctcgccgacctccgccgcgcggcggcgccggccactcccaccgtcccacagcagcttcgcgtcggctgctcgcgccgccgcgcccagcgcgtcgtcgccatggctggatccggcaagttcttcgtcggaggcaactggaagtgcaacggaacaaaggactccgttagcaagcttgtctctgaactgaatgctgctaccctcgaaactgatgtagatgttgtggtggctcctccattcatctatatcgatcaggtcaagaattcactaacgggtcgcattgaggtttctgctcagaatgtgtggattggaaaaggaggagcctacaccggagagatcagtgcagaacaactggtggacatcggttgtcaatgggttattcttggacactcagagcgtagacatattattggtgaaaatgacgagtttattgggaagaaagctgcatatgcattgagccaaaatgttaaggttattgcctgcataggagagcttctggaagagagggaagcaggcaaaacttttgaagtatgttttgagcagatgaaggcttttgcagatagtatttccaactgggccgatgttgtgattgcatacgagcctgtttgggctattggaaccggaaaagttgctactcctgagcaggcccaggaagttcatgctgctgtacgcgattggttgacgaccaacatatcacctgatgttgcgtctagcacacgaataatctatggaggttctgtgaatgcagccaactgtgcagagctatcaaagaaagaagatatcgacggttttcttgttggtggtgcctcgttgaaggccccggacttcgccaccattatcaactcagtgaccgccaagaaagttgcagcctgatggaccaccctgtgagaaataagaggccatcagcgtgtcgcctcatctgccacgccttaaagcctgtataggaggtgatccgtgtgatggtgtgcccgtcacctcctgtttttgctgatttgcagcacggggacagaaaataatgttttgctctcgtggacctgcactgcacgtgacgaggagagttcagttgtcgtgagcgatgtacgttggggatattgtgatgtggtccttttctaaagaaaaaaaatgttgacggtcaagg

SEQ ID NO: 36155 - protein, 340 aa, Zea mays subsp. mays
  peptide (1)..(340): Ceres Seq. ID no. 12436653
  misc_feature (89)..(334): Pfam Name: Pfam Description:  Triosephosphate isomerase
  misc_feature (79)..(340): NCBI GI NO: 1174745 NR Description: Triosephosphate isomerase, chloroplast precursor
  misc_feature (41)..(340): NCBI GI NO: 1351271 NR Description: Triosephosphate isomerase, chloroplast precursor
  misc_feature (18)..(340): NCBI GI NO: 15226479 NR Description: putative triosephosphate isomerase
  misc_feature (37)..(340): NCBI GI NO: 13431949 NR Description: Triosephosphate isomerase, chloroplast precursor
  misc_feature (90)..(340): NCBI GI NO: 1351282 NR Description: Triosephosphate isomerase, cytosolic (TIM)
  misc_feature (90)..(336): NCBI GI NO: 136063 NR Description: TRIOSEPHOSPHATE ISOMERASE, CYTOSOLIC (TIM)
  misc_feature (90)..(336): NCBI GI NO: 11124572 NR Description: triosephosphat-isomerase [Triticum aestivum]
  misc_feature (90)..(336): NCBI GI NO: 1174749 NR Description: Triosephosphate isomerase, cytosolic (TIM)
  misc_feature (90)..(339): NCBI GI NO: 1351279 NR Description: Triosephosphate isomerase, cytosolic (TIM)
  misc_feature (90)..(331): NCBI GI NO: 7274156 NR Description: triosephosphate isomerase + glyceraldehyde-3-phosphate dehydrogenase
HIPTSRTRTNCYPPRLALAASSPVPPPTAAARARLRMAAAPSSLVSSHLSRLADLRRAAAPATPTVPQQLRVGCSRRRAQRVVAMAGSGKFFVGGNWKCNGTKDSVSKLVSELNAATLETDVDVVVAPPFIYIDQVKNSLTGRIEVSAQNVWIGKGGAYTGEISAEQLVDIGCQWVILGHSERRHIIGENDEFIGKKAAYALSQNVKVIACIGELLEEREAGKTFEVCFEQMKAFADSISNWADVVIAYEPVWAIGTGKVATPEQAQEVHAAVRDWLTTNISPDVASSTRIIYGGSVNAANCAELSKKEDIDGFLVGGASLKAPDFATIINSVTAKKVAA

SEQ ID NO: 36156 - protein, 304 aa, Zea mays subsp. mays
  peptide (1)..(304): Ceres Seq. ID no. 12436654
  misc_feature (53)..(298): Pfam Name: Pfam Description:  Triosephosphate isomerase
  misc_feature (43)..(304): NCBI GI NO: 1174745 NR Description: Triosephosphate isomerase, chloroplast precursor
  misc_feature (5)..(304): NCBI GI NO: 1351271 NR Description: Triosephosphate isomerase, chloroplast precursor
  misc_feature (1)..(304): NCBI GI NO: 15226479 NR Description: putative triosephosphate isomerase
  misc_feature (1)..(304): NCBI GI NO: 13431949 NR Description: Triosephosphate isomerase, chloroplast precursor
  misc_feature (54)..(304): NCBI GI NO: 1351282 NR Description: Triosephosphate isomerase, cytosolic (TIM)
  misc_feature (54)..(300): NCBI GI NO: 136063 NR Description: TRIOSEPHOSPHATE ISOMERASE, CYTOSOLIC (TIM)
  misc_feature (54)..(300): NCBI GI NO: 11124572 NR Description: triosephosphat-isomerase [Triticum aestivum]
  misc_feature (54)..(300): NCBI GI NO: 1174749 NR Description: Triosephosphate isomerase, cytosolic (TIM)
  misc_feature (54)..(303): NCBI GI NO: 1351279 NR Description: Triosephosphate isomerase, cytosolic (TIM)
  misc_feature (54)..(295): NCBI GI NO: 7274156 NR Description: triosephosphate isomerase + glyceraldehyde-3-phosphate dehydrogenase
MAAAPSSLVSSHLSRLADLRRAAAPATPTVPQQLRVGCSRRRAQRVVAMAGSGKFFVGGNWKCNGTKDSVSKLVSELNAATLETDVDVVVAPPFIYIDQVKNSLTGRIEVSAQNVWIGKGGAYTGEISAEQLVDIGCQWVILGHSERRHIIGENDEFIGKKAAYALSQNVKVIACIGELLEEREAGKTFEVCFEQMKAFADSISNWADVVIAYEPVWAIGTGKVATPEQAQEVHAAVRDWLTTNISPDVASSTRIIYGGSVNAANCAELSKKEDIDGFLVGGASLKAPDFATIINSVTAKKVAA

SEQ ID NO: 36157 - protein, 256 aa, Zea mays subsp. mays
  peptide (1)..(256): Ceres Seq. ID no. 12436655
  misc_feature (5)..(250): Pfam Name: Pfam Description:  Triosephosphate isomerase
  misc_feature (1)..(256): NCBI GI NO: 1174745 NR Description: Triosephosphate isomerase, chloroplast precursor
  misc_feature (1)..(256): NCBI GI NO: 1351271 NR Description: Triosephosphate isomerase, chloroplast precursor
  misc_feature (1)..(256): NCBI GI NO: 15226479 NR Description: putative triosephosphate isomerase
  misc_feature (1)..(256): NCBI GI NO: 13431949 NR Description: Triosephosphate isomerase, chloroplast precursor
  misc_feature (6)..(256): NCBI GI NO: 1351282 NR Description: Triosephosphate isomerase, cytosolic (TIM)
  misc_feature (6)..(252): NCBI GI NO: 136063 NR Description: TRIOSEPHOSPHATE ISOMERASE, CYTOSOLIC (TIM)
  misc_feature (6)..(252): NCBI GI NO: 11124572 NR Description: triosephosphat-isomerase [Triticum aestivum]
  misc_feature (6)..(252): NCBI GI NO: 1174749 NR Description: Triosephosphate isomerase, cytosolic (TIM)
  misc_feature (6)..(255): NCBI GI NO: 1351279 NR Description: Triosephosphate isomerase, cytosolic (TIM)
  misc_feature (6)..(247): NCBI GI NO: 7274156 NR Description: triosephosphate isomerase + glyceraldehyde-3-phosphate dehydrogenase
MAGSGKFFVGGNWKCNGTKDSVSKLVSELNAATLETDVDVVVAPPFIYIDQVKNSLTGRIEVSAQNVWIGKGGAYTGEISAEQLVDIGCQWVILGHSERRHIIGENDEFIGKKAAYALSQNVKVIACIGELLEEREAGKTFEVCFEQMKAFADSISNWADVVIAYEPVWAIGTGKVATPEQAQEVHAAVRDWLTTNISPDVASSTRIIYGGSVNAANCAELSKKEDIDGFLVGGASLKAPDFATIINSVTAKKVAA

SEQ ID NO: 36158 - DNA, 691 bp, Zea mays subsp. mays
  misc_feature (1)..(691): Ceres Seq. ID no. 12589525
cagctacgtaggccccccccccggggatatttcgaaaggccctgcaagacgttgagatcaaaggctatacgattccggcgggatggggcgtcatggtgtgcccaccggcagtgcacttaaaccccgacatctatgaagaccctctggcgttcaacccgtggagatggcagggcaaacctgaaatcaccggtgggacgaaacacttcatggcgtttggaggtggcctcaggttttgcgttggcactgatcttagcagggtcttgatggcaacattcatccacagcttggttacaaaatacagttggaggacggtaaaaggaggcaacatagtccggacccccggtctcggctttcctgatggcttccacatccaactttttcctagaaattgaaattggcccttttcaaacctctgactaggtcgtgcatgtaattaaattggataggtctcttaggaccaacgccgcaacagtaaaggattggaaatcatatacttagcctagtgttagcctgttagggtagacatcactagttacaagttcagtcatgttactggtactacctctaatctttgcaaggggtttttgtacttggttgtttgttttccatgtggttagtaatctacccatgtgtttgtatgtatatctggttatacatgtctaatgaaagaaaaaatacaggagctgtgctt

SEQ ID NO: 36159 - protein, 99 aa, Zea mays subsp. mays
  peptide (1)..(99): Ceres Seq. ID no. 12589526
  misc_feature (1)..(96): Pfam Name: Pfam Description:  Cytochrome P450
  misc_feature (1)..(99): NCBI GI NO: 20520627 NR Description: putative cytochrome P450
  misc_feature (1)..(99): NCBI GI NO: 38567920 NR Description: OSJNBa0088I22.16
  misc_feature (1)..(95): NCBI GI NO: 30682922 NR Description: cytochrome P450, putative [Arabidopsis thaliana]
  misc_feature (1)..(95): NCBI GI NO: 9502380 NR Description: T12C24.27 [Arabidopsis thaliana]
  misc_feature (1)..(99): NCBI GI NO: 38567916 NR Description: OSJNBa0088I22.12
  misc_feature (1)..(98): NCBI GI NO: 6635860 NR Description: cytochrome P450 [Helianthus annuus]
  misc_feature (1)..(98): NCBI GI NO: 27764671 NR Description: putative hydroxylase
  misc_feature (1)..(95): NCBI GI NO: 18483228 NR Description: putative cytochrome P450-like protein
  misc_feature (1)..(95): NCBI GI NO: 22530982 NR Description: cytochrome P450-like protein
  misc_feature (1)..(95): NCBI GI NO: 30695352 NR Description: cytochrome p450 family [Arabidopsis thaliana]
MVCPPAVHLNPDIYEDPLAFNPWRWQGKPEITGGTKHFMAFGGGLRFCVGTDLSRVLMATFIHSLVTKYSWRTVKGGNIVRTPGLGFPDGFHIQLFPRN

SEQ ID NO: 36160 - protein, 61 aa, Zea mays subsp. mays
  peptide (1)..(61): Ceres Seq. ID no. 12589527
  misc_feature (1)..(58): Pfam Name: Pfam Description:  Cytochrome P450
  misc_feature (1)..(61): NCBI GI NO: 20520627 NR Description: putative cytochrome P450
  misc_feature (1)..(61): NCBI GI NO: 38567920 NR Description: OSJNBa0088I22.16
  misc_feature (1)..(57): NCBI GI NO: 30682922 NR Description: cytochrome P450, putative [Arabidopsis thaliana]
  misc_feature (1)..(57): NCBI GI NO: 9502380 NR Description: T12C24.27 [Arabidopsis thaliana]
  misc_feature (1)..(61): NCBI GI NO: 38567916 NR Description: OSJNBa0088I22.12
  misc_feature (1)..(60): NCBI GI NO: 6635860 NR Description: cytochrome P450 [Helianthus annuus]
  misc_feature (1)..(60): NCBI GI NO: 27764671 NR Description: putative hydroxylase
  misc_feature (1)..(57): NCBI GI NO: 18483228 NR Description: putative cytochrome P450-like protein
  misc_feature (1)..(57): NCBI GI NO: 22530982 NR Description: cytochrome P450-like protein
  misc_feature (1)..(57): NCBI GI NO: 30695352 NR Description: cytochrome p450 family [Arabidopsis thaliana]
MAFGGGLRFCVGTDLSRVLMATFIHSLVTKYSWRTVKGGNIVRTPGLGFPDGFHIQLFPRN

SEQ ID NO: 36161 - DNA, 552 bp, Zea mays subsp. mays
  misc_feature (1)..(552): Ceres Seq. ID no. 13622879
gatcaatgcaggagctcaagcctttgtaaattgttggagtgtgaccttggggagagcaagtgccactccccgagcacaatcatgaagatgttccagagttctatgttctgtttgcagccccagggtgactcctacacaagaagatctgcctttgactcgatgttggctggctgcgtgcctgttttcttccatcccggttcagcgtacgtccagtatacatggcatctcccaaagaactatacaacgtactctgtattcatccctgaagatgacgtccgttctggaaatgccagcattgaggagaggctaaagagtattcacccagatgtggtcaagcaaatgagagaggaggtcatcaatctgataccaaaggtgatatatgctgatccaagatcgaaactggagacattgaaagatgcatttgatgtttccatagaggcgatcattaacaaagtgacaaagttgagaagagatatcatcgcaggccaagaagacaaagattttatcgaagagaatagctggaagtatagtctgttagacgatggacagcgg

SEQ ID NO: 36162 - protein, 184 aa, Zea mays subsp. mays
  peptide (1)..(184): Ceres Seq. ID no. 13622880
  misc_feature (1)..(118): Pfam Name: Pfam Description:  Exostosin family
  misc_feature (1)..(183): NCBI GI NO: 27497206 NR Description: Unknown protein
  misc_feature (1)..(183): NCBI GI NO: 25411977 NR Description: hypothetical protein At2g20370
  misc_feature (1)..(183): NCBI GI NO: 30680972 NR Description: expressed protein [Arabidopsis thaliana]
  misc_feature (2)..(183): NCBI GI NO: 37535066 NR Description: hypothetical protein
  misc_feature (2)..(183): NCBI GI NO: 37535064 NR Description: putative exostosin family protein
  misc_feature (2)..(159): NCBI GI NO: 27497204 NR Description: Hypothetical protein
  misc_feature (2)..(156): NCBI GI NO: 27497203 NR Description: Hypothetical protein
  misc_feature (1)..(183): NCBI GI NO: 15227020 NR Description: hypothetical protein [Arabidopsis thaliana]
  misc_feature (1)..(183): NCBI GI NO: 37535048 NR Description: hypothetical protein
  misc_feature (1)..(177): NCBI GI NO: 29824391 NR Description: unknown protein [Arabidopsis thaliana]
DQCRSSSLCKLLECDLGESKCHSPSTIMKMFQSSMFCLQPQGDSYTRRSAFDSMLAGCVPVFFHPGSAYVQYTWHLPKNYTTYSVFIPEDDVRSGNASIEERLKSIHPDVVKQMREEVINLIPKVIYADPRSKLETLKDAFDVSIEAIINKVTKLRRDIIAGQEDKDFIEENSWKYSLLDDGQR

SEQ ID NO: 36163 - protein, 157 aa, Zea mays subsp. mays
  peptide (1)..(157): Ceres Seq. ID no. 13622881
  misc_feature (1)..(91): Pfam Name: Pfam Description:  Exostosin family
  misc_feature (1)..(156): NCBI GI NO: 27497206 NR Description: Unknown protein
  misc_feature (1)..(156): NCBI GI NO: 25411977 NR Description: hypothetical protein At2g20370
  misc_feature (1)..(156): NCBI GI NO: 30680972 NR Description: expressed protein [Arabidopsis thaliana]
  misc_feature (1)..(156): NCBI GI NO: 37535066 NR Description: hypothetical protein
  misc_feature (1)..(156): NCBI GI NO: 37535064 NR Description: putative exostosin family protein
  misc_feature (1)..(132): NCBI GI NO: 27497204 NR Description: Hypothetical protein
  misc_feature (1)..(129): NCBI GI NO: 27497203 NR Description: Hypothetical protein
  misc_feature (1)..(156): NCBI GI NO: 15227020 NR Description: hypothetical protein [Arabidopsis thaliana]
  misc_feature (1)..(156): NCBI GI NO: 37535048 NR Description: hypothetical protein
  misc_feature (1)..(150): NCBI GI NO: 29824391 NR Description: unknown protein [Arabidopsis thaliana]
MKMFQSSMFCLQPQGDSYTRRSAFDSMLAGCVPVFFHPGSAYVQYTWHLPKNYTTYSVFIPEDDVRSGNASIEERLKSIHPDVVKQMREEVINLIPKVIYADPRSKLETLKDAFDVSIEAIINKVTKLRRDIIAGQEDKDFIEENSWKYSLLDDGQR

SEQ ID NO: 36164 - protein, 155 aa, Zea mays subsp. mays
  peptide (1)..(155): Ceres Seq. ID no. 13622882
  misc_feature (1)..(89): Pfam Name: Pfam Description:  Exostosin family
  misc_feature (1)..(154): NCBI GI NO: 27497206 NR Description: Unknown protein
  misc_feature (1)..(154): NCBI GI NO: 25411977 NR Description: hypothetical protein At2g20370
  misc_feature (1)..(154): NCBI GI NO: 30680972 NR Description: expressed protein [Arabidopsis thaliana]
  misc_feature (1)..(154): NCBI GI NO: 37535066 NR Description: hypothetical protein
  misc_feature (1)..(154): NCBI GI NO: 37535064 NR Description: putative exostosin family protein
  misc_feature (1)..(130): NCBI GI NO: 27497204 NR Description: Hypothetical protein
  misc_feature (1)..(127): NCBI GI NO: 27497203 NR Description: Hypothetical protein
  misc_feature (1)..(154): NCBI GI NO: 15227020 NR Description: hypothetical protein [Arabidopsis thaliana]
  misc_feature (1)..(154): NCBI GI NO: 37535048 NR Description: hypothetical protein
  misc_feature (1)..(148): NCBI GI NO: 29824391 NR Description: unknown protein [Arabidopsis thaliana]
MFQSSMFCLQPQGDSYTRRSAFDSMLAGCVPVFFHPGSAYVQYTWHLPKNYTTYSVFIPEDDVRSGNASIEERLKSIHPDVVKQMREEVINLIPKVIYADPRSKLETLKDAFDVSIEAIINKVTKLRRDIIAGQEDKDFIEENSWKYSLLDDGQR

SEQ ID NO: 36165 - DNA, 479 bp, Zea mays subsp. mays
  misc_feature (1)..(479): Ceres Seq. ID no. 4616752
ttcagaaccctagcgccccgcccgtcctgccgccgccgcagccgccatcgcacggccatgggtatcgatctcgtagccggcggccgcaacaagaagaccaagcgcacggcgcccaagtccgacgatgtctacctcaagctcctcgtcaagctctaccgcttccttgtgcgcaggacaaagagcaacttcaacgccgtgatcctcaagcgcctcttcatgagcaagaccaaccgcccgccgctctcgatgcgccgcctcgtcaggttcatggaggggaagggtgatcagatcgccgtgattgtgggcaccgtgaccgacgacaagaggatcagcgaggtgccggcgatgaaggtctgcgcgctcaggttcactgagacagcgagggccaggatcatcaatgctggcggagagtgcctcaccttcgaccagctcgcgctccgtgccccacttgggcaaaacacggttctgctgaggggtcc

SEQ ID NO: 36166 - protein, 159 aa, Zea mays subsp. mays
  peptide (1)..(159): Ceres Seq. ID no. 4616753
  misc_feature (20)..(158): NCBI GI NO: 34393858 NR Description: putative cytoplasmic ribosomal protein L18
  misc_feature (20)..(158): NCBI GI NO: 34897628 NR Description: cytoplasmic ribosomal protein L18 [Oryza sativa]
  misc_feature (20)..(158): NCBI GI NO: 15241061 NR Description: 60S ribosomal protein - like; protein id:At5g27850
  misc_feature (20)..(158): NCBI GI NO: 606970 NR Description: cytoplasmic ribosomal protein L18
  misc_feature (20)..(158): NCBI GI NO: 15230011 NR Description: putative 60S ribosomal protein L18
  misc_feature (20)..(158): NCBI GI NO: 28798549 NR Description: 60S ribosomal protein [Medicago sativa]
  misc_feature (23)..(158): NCBI GI NO: 6094021 NR Description: 60S RIBOSOMAL PROTEIN L18
  misc_feature (21)..(158): NCBI GI NO: 7440855 NR Description: ribosomal protein L18
  misc_feature (20)..(158): NCBI GI NO: 28630354 NR Description: ribosomal protein L18 [Branchiostoma lanceolatum]
  misc_feature (20)..(158): NCBI GI NO: 32450084 NR Description: Unknown (protein for MGC:64299) [Xenopus laevis]
FRTLAPRPSCRRRSRHRTAMGIDLVAGGRNKKTKRTAPKSDDVYLKLLVKLYRFLVRRTKSNFNAVILKRLFMSKTNRPPLSMRRLVRFMEGKGDQIAVIVGTVTDDKRISEVPAMKVCALRFTETARARIINAGGECLTFDQLALRAPLGQNTVLLRG

SEQ ID NO: 36167 - protein, 140 aa, Zea mays subsp. mays
  peptide (1)..(140): Ceres Seq. ID no. 4616754
  misc_feature (1)..(139): NCBI GI NO: 34393858 NR Description: putative cytoplasmic ribosomal protein L18
  misc_feature (1)..(139): NCBI GI NO: 34897628 NR Description: cytoplasmic ribosomal protein L18 [Oryza sativa]
  misc_feature (1)..(139): NCBI GI NO: 15241061 NR Description: 60S ribosomal protein - like; protein id:At5g27850
  misc_feature (1)..(139): NCBI GI NO: 606970 NR Description: cytoplasmic ribosomal protein L18
  misc_feature (1)..(139): NCBI GI NO: 15230011 NR Description: putative 60S ribosomal protein L18
  misc_feature (1)..(139): NCBI GI NO: 28798549 NR Description: 60S ribosomal protein [Medicago sativa]
  misc_feature (4)..(139): NCBI GI NO: 6094021 NR Description: 60S RIBOSOMAL PROTEIN L18
  misc_feature (2)..(139): NCBI GI NO: 7440855 NR Description: ribosomal protein L18
  misc_feature (1)..(139): NCBI GI NO: 28630354 NR Description: ribosomal protein L18 [Branchiostoma lanceolatum]
  misc_feature (1)..(139): NCBI GI NO: 32450084 NR Description: Unknown (protein for MGC:64299) [Xenopus laevis]
MGIDLVAGGRNKKTKRTAPKSDDVYLKLLVKLYRFLVRRTKSNFNAVILKRLFMSKTNRPPLSMRRLVRFMEGKGDQIAVIVGTVTDDKRISEVPAMKVCALRFTETARARIINAGGECLTFDQLALRAPLGQNTVLLRG

SEQ ID NO: 36168 - protein, 93 aa, Zea mays subsp. mays
  peptide (1)..(93): Ceres Seq. ID no. 4616755
QNPSAPPVLPPPQPPSHGHGYRSRSRRPQQEDQAHGAQVRRCLPQAPRQALPLPCAQDKEQLQRRDPQAPLHEQDQPPAALDAPPRQVHGGEG

SEQ ID NO: 36169 - DNA, 1187 bp, Zea mays subsp. mays
  misc_feature (1)..(1187): Ceres Seq. ID no. 12436465
  misc_feature (1180)..(1180): n is a, c, t, g, unknown, or other
ggctggctgcccccgctgctctcctctcctccgagatcccggcaccgtcctgtcccgccgcgccgacagctccccgcctagactgctgcacgcgcggatctcgcgtcgccttccgcccagctgcgatgcatattcgcgccgccgccgccgccgccgccgcacttgtcctcctcctcgcgctctccgtccccgtctccgccgccgaccaggatgctaatggcgctgccgggaatggcactggagtcggcgccgaccgcctggaccgccgcaccaagatgttcctccaccacacggtgcgcgcggccgcggccggggcgcacgacacggggctggggctcctcgacgccttcttcgccagcctgtccatgatcgtcgtcagcgagattggcgatgagacgttcatcatcgcggcgctgatggcgatgcggcaccccaagtcgacggtgctctcgggcgcactgtcggcgcttgtagttatgacggtgctgtctactggactaggcaggattgttccgaatttgatatcgaggaagcacactaacagcgcggcgacagtcctctatgcattttttgggctacggctcctgtacatcgcttggaggtcagattccaaggcatcacagaagaaggaaatagaagaggtagaggaaaagctggaagcaggccaagggaagtcaacatttagacgtgttttctcgagattctgcactcctattttcctggagtcatttgtgttgaccttcttggcggagtggggcgaccgaagtcagatagctacaatagcgctggcgacccacaagaacgcggtcggagtcgctacgggagcgaccttggggcacaccatctgcacgtcgatcgcggtggtgggcggcagcatgctggcctccaagatatctcagggcacggtcgccaccgtcggaggcctcctcttccttgggttctctctttcgtcgtatttctacccgccattgtagtaccaccctgtcatgcgagccccctatttgtttcttggccagcttcctcattgatccagtgacccttgtcctgcggcattttttttcctgtactagtaaagcatacatggatatgtgtagtaggtagggatatatacgatcattgccaatgtataccatacaagtcatgtcatggattcaaaaacagacggaagagctttttgtcncgaattc

SEQ ID NO: 36170 - protein, 323 aa, Zea mays subsp. mays
  peptide (1)..(323): Ceres Seq. ID no. 12436466
  misc_feature (239)..(314): Pfam Name: Pfam Description:  Uncharacterized protein family UPF0016
  misc_feature (108)..(323): NCBI GI NO: 18421551 NR Description: transmembrane protein FT27/PFT27-like
  misc_feature (108)..(303): NCBI GI NO: 9759042 NR Description: transmembrane protein FT27/PFT27-like
  misc_feature (207)..(322): NCBI GI NO: 20385488 NR Description: transmembrane protein HTP-1 [Danio rerio]
  misc_feature (110)..(219): NCBI GI NO: 20385488 NR Description: transmembrane protein HTP-1 [Danio rerio]
  misc_feature (96)..(268): NCBI GI NO: 34877387 NR Description: similar to probable transmembrane protein FT27 -mouse
  misc_feature (270)..(322): NCBI GI NO: 34877387 NR Description: similar to probable transmembrane protein FT27 -mouse
  misc_feature (113)..(319): NCBI GI NO: 15420543 NR Description: putative membrane protein [Crithidia fasciculata]
  misc_feature (112)..(318): NCBI GI NO: 15222613 NR Description: transmembrane protein, putative
  misc_feature (116)..(319): NCBI GI NO: 17556152 NR Description: Uncharacterized protein family UPF0016 (32.1 kD)
  misc_feature (112)..(318): NCBI GI NO: 21593636 NR Description: transmembrane protein, putative
LAAPAALLSSEIPAPSCPAAPTAPRLDCCTRGSRVAFRPAAMHIRAAAAAAAALVLLLALSVPVSAADQDANGAAGNGTGVGADRLDRRTKMFLHHTVRAAAAGAHDTGLGLLDAFFASLSMIVVSEIGDETFIIAALMAMRHPKSTVLSGALSALVVMTVLSTGLGRIVPNLISRKHTNSAATVLYAFFGLRLLYIAWRSDSKASQKKEIEEVEEKLEAGQGKSTFRRVFSRFCTPIFLESFVLTFLAEWGDRSQIATIALATHKNAVGVATGATLGHTICTSIAVVGGSMLASKISQGTVATVGGLLFLGFSLSSYFYPPL

SEQ ID NO: 36171 - protein, 282 aa, Zea mays subsp. mays
  peptide (1)..(282): Ceres Seq. ID no. 12436467
  misc_feature (198)..(273): Pfam Name: Pfam Description:  Uncharacterized protein family UPF0016
  misc_feature (67)..(282): NCBI GI NO: 18421551 NR Description: transmembrane protein FT27/PFT27-like
  misc_feature (67)..(262): NCBI GI NO: 9759042 NR Description: transmembrane protein FT27/PFT27-like
  misc_feature (166)..(281): NCBI GI NO: 20385488 NR Description: transmembrane protein HTP-1 [Danio rerio]
  misc_feature (69)..(178): NCBI GI NO: 20385488 NR Description: transmembrane protein HTP-1 [Danio rerio]
  misc_feature (55)..(227): NCBI GI NO: 34877387 NR Description: similar to probable transmembrane protein FT27 -mouse
  misc_feature (229)..(281): NCBI GI NO: 34877387 NR Description: similar to probable transmembrane protein FT27 -mouse
  misc_feature (72)..(278): NCBI GI NO: 15420543 NR Description: putative membrane protein [Crithidia fasciculata]
  misc_feature (71)..(277): NCBI GI NO: 15222613 NR Description: transmembrane protein, putative
  misc_feature (75)..(278): NCBI GI NO: 17556152 NR Description: Uncharacterized protein family UPF0016 (32.1 kD)
  misc_feature (71)..(277): NCBI GI NO: 21593636 NR Description: transmembrane protein, putative
MHIRAAAAAAAALVLLLALSVPVSAADQDANGAAGNGTGVGADRLDRRTKMFLHHTVRAAAAGAHDTGLGLLDAFFASLSMIVVSEIGDETFIIAALMAMRHPKSTVLSGALSALVVMTVLSTGLGRIVPNLISRKHTNSAATVLYAFFGLRLLYIAWRSDSKASQKKEIEEVEEKLEAGQGKSTFRRVFSRFCTPIFLESFVLTFLAEWGDRSQIATIALATHKNAVGVATGATLGHTICTSIAVVGGSMLASKISQGTVATVGGLLFLGFSLSSYFYPPL

SEQ ID NO: 36172 - protein, 232 aa, Zea mays subsp. mays
  peptide (1)..(232): Ceres Seq. ID no. 12436468
  misc_feature (148)..(223): Pfam Name: Pfam Description:  Uncharacterized protein family UPF0016
  misc_feature (17)..(232): NCBI GI NO: 18421551 NR Description: transmembrane protein FT27/PFT27-like
  misc_feature (17)..(212): NCBI GI NO: 9759042 NR Description: transmembrane protein FT27/PFT27-like
  misc_feature (116)..(231): NCBI GI NO: 20385488 NR Description: transmembrane protein HTP-1 [Danio rerio]
  misc_feature (19)..(128): NCBI GI NO: 20385488 NR Description: transmembrane protein HTP-1 [Danio rerio]
  misc_feature (5)..(177): NCBI GI NO: 34877387 NR Description: similar to probable transmembrane protein FT27 -mouse
  misc_feature (179)..(231): NCBI GI NO: 34877387 NR Description: similar to probable transmembrane protein FT27 -mouse
  misc_feature (22)..(228): NCBI GI NO: 15420543 NR Description: putative membrane protein [Crithidia fasciculata]
  misc_feature (21)..(227): NCBI GI NO: 15222613 NR Description: transmembrane protein, putative
  misc_feature (25)..(228): NCBI GI NO: 17556152 NR Description: Uncharacterized protein family UPF0016 (32.1 kD)
  misc_feature (21)..(227): NCBI GI NO: 21593636 NR Description: transmembrane protein, putative
MFLHHTVRAAAAGAHDTGLGLLDAFFASLSMIVVSEIGDETFIIAALMAMRHPKSTVLSGALSALVVMTVLSTGLGRIVPNLISRKHTNSAATVLYAFFGLRLLYIAWRSDSKASQKKEIEEVEEKLEAGQGKSTFRRVFSRFCTPIFLESFVLTFLAEWGDRSQIATIALATHKNAVGVATGATLGHTICTSIAVVGGSMLASKISQGTVATVGGLLFLGFSLSSYFYPPL

SEQ ID NO: 36173 - DNA, 503 bp, Zea mays subsp. mays
  misc_feature (1)..(503): Ceres Seq. ID no. 3629574
aattgatctaattcgccggatcggacagcaacttttggaatctgttgcattcatgcatcgtcttcagctaattcatactgatctgaaaccagagaacatcctcctcgtttcttcagattatgtcaagttacctgatcccaaggacggatcattctcaaggaaactgccaaaatcaagtgccattaaattgattgactttggaagtgcagcataccatcaccaggatcgcagttacattgtatctaccagacactatcgcgcccctgaagttattttgggacatggatggagctatccatgtgatatctggagtgttggttgtatacttgttgagctttgctcgggtgagacactgtttcagactcacgataacttggaacaccttgcaatgatggatagagttctaggtcctcttccacggcacatgctggaaagagccgaccagcatgcggagaagtacckcagaaaaggaggattgaactggccacaagcaataacaacag

SEQ ID NO: 36174 - protein, 167 aa, Zea mays subsp. mays
  peptide (1)..(167): Ceres Seq. ID no. 3629575
  misc_feature (1)..(166): Pfam Name: Pfam Description:  Protein kinase domain
  misc_feature (1)..(166): NCBI GI NO: 7489189 NR Description: protein kinase PK12 (EC 2
  misc_feature (1)..(166): NCBI GI NO: 601787 NR Description: protein kinase
  misc_feature (1)..(166): NCBI GI NO: 15231839 NR Description: protein kinase (AME2/AFC1); protein id:At3g53570
  misc_feature (1)..(166): NCBI GI NO: 30693861 NR Description: protein kinase (AME2/AFC1) [Arabidopsis thaliana]
  misc_feature (1)..(163): NCBI GI NO: 7211773 NR Description: protein kinase MK5 [Mesembryanthemum crystallinum]
  misc_feature (1)..(163): NCBI GI NO: 34908100 NR Description: putative protein kinase AFC1
  misc_feature (1)..(166): NCBI GI NO: 15233948 NR Description: protein kinase (AFC2); protein id: At4g24740
  misc_feature (1)..(163): NCBI GI NO: 34912246 NR Description: putative protein kinase AFC3
  misc_feature (3)..(163): NCBI GI NO: 601791 NR Description: protein kinase
  misc_feature (3)..(163): NCBI GI NO: 15233872 NR Description: protein kinase AME3; protein id: At4g32660
  misc_feature (154)..(154): Xaa is any aa, unknown or other
IDLIRRIGQQLLESVAFMHRLQLIHTDLKPENILLVSSDYVKLPDPKDGSFSRKLPKSSAIKLIDFGSAAYHHQDRSYIVSTRHYRAPEVILGHGWSYPCDIWSVGCILVELCSGETLFQTHDNLEHLAMMDRVLGPLPRHMLERADQHAEKYXRKGGLNWPQAITT

SEQ ID NO: 36175 - protein, 150 aa, Zea mays subsp. mays
  peptide (1)..(150): Ceres Seq. ID no. 3629576
  misc_feature (1)..(149): Pfam Name: Pfam Description:  Protein kinase domain
  misc_feature (1)..(149): NCBI GI NO: 7489189 NR Description: protein kinase PK12 (EC 2
  misc_feature (1)..(149): NCBI GI NO: 601787 NR Description: protein kinase
  misc_feature (1)..(149): NCBI GI NO: 15231839 NR Description: protein kinase (AME2/AFC1); protein id:At3g53570
  misc_feature (1)..(149): NCBI GI NO: 30693861 NR Description: protein kinase (AME2/AFC1) [Arabidopsis thaliana]
  misc_feature (1)..(146): NCBI GI NO: 7211773 NR Description: protein kinase MK5 [Mesembryanthemum crystallinum]
  misc_feature (1)..(146): NCBI GI NO: 34908100 NR Description: putative protein kinase AFC1
  misc_feature (1)..(149): NCBI GI NO: 15233948 NR Description: protein kinase (AFC2); protein id: At4g24740
  misc_feature (1)..(146): NCBI GI NO: 34912246 NR Description: putative protein kinase AFC3
  misc_feature (1)..(146): NCBI GI NO: 601791 NR Description: protein kinase
  misc_feature (1)..(146): NCBI GI NO: 15233872 NR Description: protein kinase AME3; protein id: At4g32660
  misc_feature (137)..(137): Xaa is any aa, unknown or other
MHRLQLIHTDLKPENILLVSSDYVKLPDPKDGSFSRKLPKSSAIKLIDFGSAAYHHQDRSYIVSTRHYRAPEVILGHGWSYPCDIWSVGCILVELCSGETLFQTHDNLEHLAMMDRVLGPLPRHMLERADQHAEKYXRKGGLNWPQAITT

SEQ ID NO: 36176 - DNA, 341 bp, Zea mays subsp. mays
  misc_feature (1)..(341): Ceres Seq. ID no. 3624239
tgcgcgccaactactacccgcggtgcccgcagccggacctgacgctgggcctctccgcgcactcggaccccggcgccctcaccgtcctcctcgcggacgagcacgtccgcggcctgcaggtccgccgcgccgccgccgacgactgggtcaccgtgcagcccgtccgcgacgccttcatcgtcaacgtcggcgaccaagtccagatactgagcaactccgtgtacaagagcgtggagcaccgggtggtcgtgaacgccgaggaggagcgcatttccctcgcgctcttctacaaccccaagggcgacgtccccatcrccccggcgccggadctggkggcggct

SEQ ID NO: 36177 - protein, 113 aa, Zea mays subsp. mays
  peptide (1)..(113): Ceres Seq. ID no. 3624240
  misc_feature (7)..(102): Pfam Name: Pfam Description:  Cupin
  misc_feature (105)..(105): Xaa is any aa, unknown or other
  misc_feature (110)..(110): Xaa is any aa, unknown or other
  misc_feature (111)..(111): Xaa is any aa, unknown or other
ARQLLPAVPAAGPDAGPLRALGPRRPHRPPRGRARPRPAGPPRRRRRLGHRAARPRRLHRQRRRPSPDTEQLRVQERGAPGGRERRGGAHFPRALLQPQGRRPHXPGAGXXGG

SEQ ID NO: 36178 - protein, 113 aa, Zea mays subsp. mays
  peptide (1)..(113): Ceres Seq. ID no. 3624241
  misc_feature (1)..(72): Pfam Name: II Pfam Description: 2OG-Fe
  misc_feature (1)..(72): NCBI GI NO: 34907994 NR Description: leucoanthocyanidin dioxygenase-like protein
  misc_feature (64)..(110): NCBI GI NO: 34907994 NR Description: leucoanthocyanidin dioxygenase-like protein
  misc_feature (1)..(110): NCBI GI NO: 15229694 NR Description: putative leucoanthocyanidin dioxygenase
  misc_feature (1)..(110): NCBI GI NO: 15228785 NR Description: leucoanthocyanidin dioxygenase -like protein
  misc_feature (1)..(110): NCBI GI NO: 15239179 NR Description: leucoanthocyanidin dioxygenase-like protein
  misc_feature (1)..(110): NCBI GI NO: 21537324 NR Description: leucoanthocyanidin dioxygenase-like protein
  misc_feature (1)..(112): NCBI GI NO: 15224472 NR Description: putative anthocyanidin synthase
  misc_feature (1)..(112): NCBI GI NO: 21554535 NR Description: putative anthocyanidin synthase
  misc_feature (15)..(110): NCBI GI NO: 5813796 NR Description: unknown [Pisum sativum]
  misc_feature (3)..(112): NCBI GI NO: 38345872 NR Description: OSJNBa0064M23.14
  misc_feature (105)..(105): Xaa is any aa, unknown or other
  misc_feature (109)..(109): Xaa is any aa, unknown or other
  misc_feature (111)..(111): Xaa is any aa, unknown or other
RANYYPRCPQPDLTLGLSAHSDPGALTVLLADEHVRGLQVRRAAADDWVTVQPVRDAFIVNVGDQVQILSNSVYKSVEHRVVVNAEEERISLALFYNPKGDVPIXPAPXLXAA

SEQ ID NO: 36179 - DNA, 1073 bp, Zea mays subsp. mays; identical to SEQ ID NO: 36120
  misc_feature (1)..(1073): Ceres Seq. ID no. 12595306

SEQ ID NO: 36180 - protein, 306 aa, Zea mays subsp. mays; identical to SEQ ID NO: 36121
  peptide (1)..(306): Ceres Seq. ID no. 12595307
  misc_feature (31)..(193): Pfam Name: Pfam Description:  Aminotransferase class-III

SEQ ID NO: 36181 - protein, 272 aa, Zea mays subsp. mays; identical to SEQ ID NO: 36122
  peptide (1)..(272): Ceres Seq. ID no. 12595308
  misc_feature (33)..(254): Pfam Name: Pfam Description:  Major intrinsic protein
  misc_feature (23)..(272): NCBI GI NO: 13447823 NR Description: tonoplast membrane integral protein ZmTIP2-2
  misc_feature (23)..(272): NCBI GI NO: 13447821 NR Description: tonoplast membrane integral protein ZmTIP2-1
  misc_feature (23)..(272): NCBI GI NO: 14140156 NR Description: putative aquaporin [Oryza sativa]
  misc_feature (23)..(271): NCBI GI NO: 7441255 NR Description: probable tonoplast aquaporin - maize
  misc_feature (23)..(271): NCBI GI NO: 9623335 NR Description: tonoplast intrinsic protein 1 [Hordeum vulgare]
  misc_feature (23)..(271): NCBI GI NO: 29650739 NR Description: tonoplast water channel [Zea mays]
  misc_feature (23)..(272): NCBI GI NO: 7441268 NR Description: probable membrane protein - carrot
  misc_feature (23)..(272): NCBI GI NO: 2058706 NR Description: Rb7 [Lycopersicon esculentum]
  misc_feature (23)..(272): NCBI GI NO: 11276918 NR Description: membrane channel protein
  misc_feature (23)..(272): NCBI GI NO: 126959 NR Description: Tonoplast intrinsic protein, root-specific RB7-5A

SEQ ID NO: 36182 - protein, 250 aa, Zea mays subsp. mays; identical to SEQ ID NO: 36123
  peptide (1)..(250): Ceres Seq. ID no. 12595309
  misc_feature (11)..(232): Pfam Name: Pfam Description:  Major intrinsic protein
  misc_feature (1)..(250): NCBI GI NO: 13447823 NR Description: tonoplast membrane integral protein ZmTIP2-2
  misc_feature (1)..(250): NCBI GI NO: 13447821 NR Description: tonoplast membrane integral protein ZmTIP2-1
  misc_feature (1)..(250): NCBI GI NO: 14140156 NR Description: putative aquaporin [Oryza sativa]
  misc_feature (1)..(249): NCBI GI NO: 7441255 NR Description: probable tonoplast aquaporin - maize
  misc_feature (1)..(249): NCBI GI NO: 9623335 NR Description: tonoplast intrinsic protein 1 [Hordeum vulgare]
  misc_feature (1)..(249): NCBI GI NO: 29650739 NR Description: tonoplast water channel [Zea mays]
  misc_feature (1)..(250): NCBI GI NO: 7441268 NR Description: probable membrane protein - carrot
  misc_feature (1)..(250): NCBI GI NO: 2058706 NR Description: Rb7 [Lycopersicon esculentum]
  misc_feature (1)..(250): NCBI GI NO: 11276918 NR Description: membrane channel protein
  misc_feature (1)..(250): NCBI GI NO: 126959 NR Description: Tonoplast intrinsic protein, root-specific RB7-5A

SEQ ID NO: 36183 - DNA, 572 bp, Zea mays subsp. mays
  misc_feature (1)..(572): Ceres Seq. ID no. 3629591
aaaagcaatacagtacttggagagaagagagtgtgagtacgaccagaaaatatccattgatttctacaaggaaggagatcccttgaaaccagctgtgacgggcgtcttartgttcgtttccactccagatccaattggcaacaagtactatcttggccctgctcctctgcaggatatggcaaggcaaattgctacagccaatggccctactggctataatagggattacctgttctcaatggagaaggcattagccagcattagccacgaagatgattcgatcatagagcttgcaaacgaggtgaggaaggtgctcaacagaacaaaggagaccaagatcactggtgccaatgcttccctgaaatcacatgcccctcttgtgcacctgtccgcgcttccagaaggcaccgttgtggactcgagatagcgagagccttggacgttggacctctactcggaatttacttccagctcttgcatgtttgkggccatcatgtactgattttcccttttcaacagttgtcgtgaggsttgkatcttctggagttaaaaaaaatgctaaaagccggcac

SEQ ID NO: 36184 - protein, 141 aa, Zea mays subsp. mays
  peptide (1)..(141): Ceres Seq. ID no. 3629592
  misc_feature (2)..(104): Pfam Name: Pfam Description:  ChaC-like protein
  misc_feature (3)..(141): NCBI GI NO: 31711499 NR Description: OsCTTP [Oryza sativa (indica cultivar-group)]
  misc_feature (2)..(122): NCBI GI NO: 18417778 NR Description: unknown protein; protein id: At4g31290
  misc_feature (2)..(122): NCBI GI NO: 21593515 NR Description: unknown [Arabidopsis thaliana]
  misc_feature (2)..(140): NCBI GI NO: 27525010 NR Description: putative cation transporter [Beta procumbens]
  misc_feature (2)..(112): NCBI GI NO: 15239626 NR Description: putative protein; protein id: At5g26220.1
  misc_feature (23)..(112): NCBI GI NO: 7486723 NR Description: hypothetical protein F9D12
  misc_feature (2)..(119): NCBI GI NO: 12083292 NR Description: unknown protein [Arabidopsis thaliana]
  misc_feature (2)..(119): NCBI GI NO: 18401334 NR Description: expressed protein; protein id: At1g44790
  misc_feature (5)..(119): NCBI GI NO: 25349686 NR Description: hypothetical protein T12C22.6
  misc_feature (2)..(103): NCBI GI NO: 38344831 NR Description: OSJNBa0064H22.12
  misc_feature (37)..(37): Xaa is any aa, unknown or other
KAIQYLERRECEYDQKISIDFYKEGDPLKPAVTGVLXFVSTPDPIGNKYYLGPAPLQDMARQIATANGPTGYNRDYLFSMEKALASISHEDDSIIELANEVRKVLNRTKETKITGANASLKSHAPLVHLSALPEGTVVDSR

SEQ ID NO: 36185 - protein, 83 aa, Zea mays subsp. mays
  peptide (1)..(83): Ceres Seq. ID no. 3629593
  misc_feature (1)..(83): NCBI GI NO: 31711499 NR Description: OsCTTP [Oryza sativa (indica cultivar-group)]
  misc_feature (1)..(64): NCBI GI NO: 18417778 NR Description: unknown protein; protein id: At4g31290
  misc_feature (1)..(64): NCBI GI NO: 21593515 NR Description: unknown [Arabidopsis thaliana]
  misc_feature (1)..(82): NCBI GI NO: 27525010 NR Description: putative cation transporter [Beta procumbens]
  misc_feature (1)..(54): NCBI GI NO: 15239626 NR Description: putative protein; protein id: At5g26220.1
  misc_feature (1)..(54): NCBI GI NO: 7486723 NR Description: hypothetical protein F9D12
  misc_feature (1)..(61): NCBI GI NO: 12083292 NR Description: unknown protein [Arabidopsis thaliana]
  misc_feature (1)..(61): NCBI GI NO: 18401334 NR Description: expressed protein; protein id: At1g44790
  misc_feature (1)..(61): NCBI GI NO: 25349686 NR Description: hypothetical protein T12C22.6
  misc_feature (1)..(45): NCBI GI NO: 38344831 NR Description: OSJNBa0064H22.12
MARQIATANGPTGYNRDYLFSMEKALASISHEDDSIIELANEVRKVLNRTKETKITGANASLKSHAPLVHLSALPEGTVVDSR

SEQ ID NO: 36186 - DNA, 593 bp, Zea mays subsp. mays
  misc_feature (1)..(593): Ceres Seq. ID no. 12420357
  misc_feature (577)..(577): n is a, c, t, g, unknown, or other
tttgaatgctaaggatacagaaattgcgaggttgagagaggaaatcagaatattgtctgctcactggacgaacaaaaccaaggaacttgagtcacatttagaaaagcaccggagaactgatcaggagctgaagaagagggttctaaagcttgaattttgccttcaagaatcccagtctcagatgcgaaaattaaagaggatgggcgagagaagagacaaggctctcaaggagctcatggaccaggtggccacgaagcagccaaacagcatgtgccatggcaacaaggagaatttctgggagggccagggcttcaagttcatcgtgtctatgtcgatgctggcactagtgatcctcgcaaagcgatgaagcagcatcgcatacccaatcttgtgtaaagaaggtagagattccatctatcgttaggtgagcaactagctcatagcttaagcagatgtcgatgtagcgtttacattagtttgttgtttgtattcttgggcagctgtgcataatgcatggtcagaagttgcagtctgtaatccgtagtctctgctagggcatgtgaactcagaaggtgtnttgtactcacagctag

SEQ ID NO: 36187 - protein, 121 aa, Zea mays subsp. mays
  peptide (1)..(121): Ceres Seq. ID no. 12420358
  misc_feature (1)..(121): NCBI GI NO: 18421042 NR Description: putative protein; protein id: At5g26770
  misc_feature (1)..(121): NCBI GI NO: 4097950 NR Description: plant IF-like protein [Arabidopsis thaliana]
  misc_feature (1)..(121): NCBI GI NO: 18397379 NR Description: expressed protein; protein id: At3g05830
  misc_feature (1)..(121): NCBI GI NO: 22329439 NR Description: hypothetical protein; protein id: At1g09470.1
  misc_feature (1)..(112): NCBI GI NO: 7485248 NR Description: hypothetical protein A_IG002P16
  misc_feature (18)..(111): NCBI GI NO: 22329441 NR Description: similar to contains similarity to myosin heavychain
  misc_feature (1)..(67): NCBI GI NO: 25402551 NR Description: hypothetical protein
  misc_feature (5)..(121): NCBI GI NO: 34894370 NR Description: unnamed protein product
LNAKDTEIARLREEIRILSAHWTNKTKELESHLEKHRRTDQELKKRVLKLEFCLQESQSQMRKLKRMGERRDKALKELMDQVATKQPNSMCHGNKENFWEGQGFKFIVSMSMLALVILAKR

SEQ ID NO: 36188 - protein, 61 aa, Zea mays subsp. mays
  peptide (1)..(61): Ceres Seq. ID no. 12420359
  misc_feature (1)..(61): NCBI GI NO: 18421042 NR Description: putative protein; protein id: At5g26770
  misc_feature (1)..(61): NCBI GI NO: 4097950 NR Description: plant IF-like protein [Arabidopsis thaliana]
  misc_feature (1)..(61): NCBI GI NO: 18397379 NR Description: expressed protein; protein id: At3g05830
  misc_feature (1)..(61): NCBI GI NO: 22329439 NR Description: hypothetical protein; protein id: At1g09470.1
  misc_feature (1)..(52): NCBI GI NO: 7485248 NR Description: hypothetical protein A_IG002P16
  misc_feature (1)..(51): NCBI GI NO: 22329441 NR Description: similar to contains similarity to myosin heavychain
  misc_feature (1)..(61): NCBI GI NO: 34894370 NR Description: unnamed protein product
MRKLKRMGERRDKALKELMDQVATKQPNSMCHGNKENFWEGQGFKFIVSMSMLALVILAKR

SEQ ID NO: 36189 - DNA, 445 bp, Zea mays subsp. mays
  misc_feature (1)..(445): Ceres Seq. ID no. 12468480
gaatctatctatggcatgaagtttgctgatgagaacttcaagatcaagcacactggaccaggccttctgtccatggccaatgctgggagagatacaaacggatctcagtttttcatcaccaccgtgacaacaagctggttggacgggaagcatgttgtgtttggcaaggtgttgtctggaatggatgttgtgtacaaggtggaagctgagggccggcagagcgggcaaccaaagagcaaggttgtcatagcagatagcggcgagctgccgatgtgatgagctgaactgatgttctatctggaaggatgttaagaagttgctggtgaccatttgtcgttctggaacttttattagtgcctgaaattggactgaaccagtttcttctgtttgctacagtgactttcttatttacttattagttgaaaaggttttaaaaggttgagtt

SEQ ID NO: 36190 - protein, 91 aa, Zea mays subsp. mays
  peptide (1)..(91): Ceres Seq. ID no. 12468481
  misc_feature (1)..(91): NCBI GI NO: 11270326 NR Description: peptidylprolyl isomerase (EC 5.2.1.8) CYP5
  misc_feature (1)..(91): NCBI GI NO: 15227674 NR Description: cyclophilin; protein id: At2g29960
  misc_feature (1)..(91): NCBI GI NO: 32351008 NR Description: cyclophilin [Triticum aestivum]
  misc_feature (1)..(91): NCBI GI NO: 15237739 NR Description: cyclophilin ROC7; protein id: At5g58710
  misc_feature (1)..(91): NCBI GI NO: 21554007 NR Description: cyclophilin [Arabidopsis thaliana]
  misc_feature (1)..(91): NCBI GI NO: 11270308 NR Description: peptidylprolyl isomerase (EC 5.2.1.8) F27K19.100
  misc_feature (1)..(91): NCBI GI NO: 18410386 NR Description: cyclophilin-like protein; protein id: At3g55920
  misc_feature (1)..(91): NCBI GI NO: 27805448 NR Description: Peptidyl-prolyl cis-trans isomerase B precursor
  misc_feature (1)..(89): NCBI GI NO: 863016 NR Description: cyclophilin
  misc_feature (1)..(89): NCBI GI NO: 17566266 NR Description: CYcloPhilin family CYP-7 (18.4 kD) (cyp-7)
ESIYGMKFADENFKIKHTGPGLLSMANAGRDTNGSQFFITTVTTSWLDGKHVVFGKVLSGMDVVYKVEAEGRQSGQPKSKVVIADSGELPM

SEQ ID NO: 36191 - protein, 86 aa, Zea mays subsp. mays
  peptide (1)..(86): Ceres Seq. ID no. 12468482
  misc_feature (1)..(86): NCBI GI NO: 11270326 NR Description: peptidylprolyl isomerase (EC 5.2.1.8) CYP5
  misc_feature (1)..(86): NCBI GI NO: 15227674 NR Description: cyclophilin; protein id: At2g29960
  misc_feature (1)..(86): NCBI GI NO: 32351008 NR Description: cyclophilin [Triticum aestivum]
  misc_feature (1)..(86): NCBI GI NO: 15237739 NR Description: cyclophilin ROC7; protein id: At5g58710
  misc_feature (1)..(86): NCBI GI NO: 21554007 NR Description: cyclophilin [Arabidopsis thaliana]
  misc_feature (1)..(86): NCBI GI NO: 11270308 NR Description: peptidylprolyl isomerase (EC 5.2.1.8) F27K19.100
  misc_feature (1)..(86): NCBI GI NO: 18410386 NR Description: cyclophilin-like protein; protein id: At3g55920
  misc_feature (1)..(86): NCBI GI NO: 27805448 NR Description: Peptidyl-prolyl cis-trans isomerase B precursor
  misc_feature (1)..(84): NCBI GI NO: 863016 NR Description: cyclophilin
  misc_feature (1)..(84): NCBI GI NO: 1480465 NR Description: cyclophilin Ovcyp-2
MKFADENFKIKHTGPGLLSMANAGRDTNGSQFFITTVTTSWLDGKHVVFGKVLSGMDVVYKVEAEGRQSGQPKSKVVIADSGELPM

SEQ ID NO: 36192 - protein, 67 aa, Zea mays subsp. mays
  peptide (1)..(67): Ceres Seq. ID no. 12468483
  misc_feature (1)..(67): NCBI GI NO: 11270326 NR Description: peptidylprolyl isomerase (EC 5.2.1.8) CYP5
  misc_feature (1)..(67): NCBI GI NO: 15227674 NR Description: cyclophilin; protein id: At2g29960
  misc_feature (1)..(67): NCBI GI NO: 32351008 NR Description: cyclophilin [Triticum aestivum]
  misc_feature (1)..(67): NCBI GI NO: 15237739 NR Description: cyclophilin ROC7; protein id: At5g58710
  misc_feature (1)..(67): NCBI GI NO: 21554007 NR Description: cyclophilin [Arabidopsis thaliana]
  misc_feature (1)..(67): NCBI GI NO: 11270308 NR Description: peptidylprolyl isomerase (EC 5.2.1.8) F27K19.100
  misc_feature (1)..(67): NCBI GI NO: 18410386 NR Description: cyclophilin-like protein; protein id: At3g55920
  misc_feature (1)..(67): NCBI GI NO: 27805448 NR Description: Peptidyl-prolyl cis-trans isomerase B precursor
  misc_feature (1)..(65): NCBI GI NO: 863016 NR Description: cyclophilin
  misc_feature (1)..(65): NCBI GI NO: 17566266 NR Description: CYcloPhilin family CYP-7 (18.4 kD) (cyp-7)
MANAGRDTNGSQFFITTVTTSWLDGKHVVFGKVLSGMDVVYKVEAEGRQSGQPKSKVVIADSGELPM

SEQ ID NO: 36193 - DNA, 1017 bp, Zea mays subsp. mays
  misc_feature (1)..(1017): Ceres Seq. ID no. 12567193
gaggcctttaaatgccggcacagatgttggccggagcaggacgccacgaggcgaacaaccaactgcttccttccgcgccgccgccgcctacaacgaccacatcacgtgacttacctcttctccgcctcaagtgttcacggctccatcctctctagagtctaagcccatctcgcgaagccgctaacgccgaaaacgaccctacatatggaggcgaagaagtcgggtcccgccgctgccggagccgcggcgccgccgccggctaacgggtacttcagcaccgtcttctccgcgtcgcctgcggggagcgcaaatgacgcaaagcaggccgacctgtacacgatgctgaacaagcagacctccagagggcagaatggcagtggcattacagatggcaaatcacacggccgccctacttacaaggatggaaaacatgcttatccaaatgactcgtcagaatccccttactttggctcgtccgtgcattacggtggtcgggaattctacagcaacacgttacagaagcagccagccaatgaaccccagacaaaatacaaggaggacaagccggatggctctgctactagaggtgattggtggcaaggttcactttattactgaacaatctgctgggaactctccttttttttgtgaacaaggaataaaaaggagtggagctgagcttggtttgtcataatagtgttggaactgttgatgcgagccgttaggcatatggatcgaaagtaatagatgtaatccggtcggtggaggcagtatttagatgcatcatcacacctggacagacgtggatgtaggctgcgtccttttgtgttcctgttttcgctaagtgtgttcttgtggttttagatgtgcagtcgtgcagtgctgaacttactaatgaactggtaggtcagcctgaagtagttttgataaaagcagttgccaaagagtctgcagctcgcaggatcacctgctatatgtgcatgttcctgctatctttcggaaagatttgggttgtgc

SEQ ID NO: 36194 - protein, 137 aa, Zea mays subsp. mays
  peptide (1)..(137): Ceres Seq. ID no. 12567194
  misc_feature (1)..(137): NCBI GI NO: 34908300 NR Description: P0005H10.22
  misc_feature (17)..(137): NCBI GI NO: 15241665 NR Description: putative protein; protein id: At5g02020
  misc_feature (14)..(137): NCBI GI NO: 22326622 NR Description: hypothetical protein; protein id: At5g05965.1
MEAKKSGPAAAGAAAPPPANGYFSTVFSASPAGSANDAKQADLYTMLNKQTSRGQNGSGITDGKSHGRPTYKDGKHAYPNDSSESPYFGSSVHYGGREFYSNTLQKQPANEPQTKYKEDKPDGSATRGDWWQGSLYY

SEQ ID NO: 36195 - protein, 107 aa, Zea mays subsp. mays
  peptide (1)..(107): Ceres Seq. ID no. 12567195
MAVALQMANHTAALLTRMENMLIQMTRQNPLTLARPCITVVGNSTATRYRSSQPMNPRQNTRRTSRMALLLEVIGGKVHFITEQSAGNSPFFCEQGIKRSGAELGLS

SEQ ID NO: 36196 - protein, 101 aa, Zea mays subsp. mays
  peptide (1)..(101): Ceres Seq. ID no. 12567196
MANHTAALLTRMENMLIQMTRQNPLTLARPCITVVGNSTATRYRSSQPMNPRQNTRRTSRMALLLEVIGGKVHFITEQSAGNSPFFCEQGIKRSGAELGLS

SEQ ID NO: 36197 - DNA, 520 bp, Zea mays subsp. mays
  misc_feature (1)..(520): Ceres Seq. ID no. 3624558
gaacttctcacgttcatttctacacatccctagctctgtcgttccgtcgttgacgatggcgtttcgggtgcgaagccctgacctccgctctctctttcttctctctctcttgtccatcgcttccgccaatgtcttcttcgaagagcgtttcgatgacgggtgggaaaatcgatgggttaaatcagattggaaaaaagatgagaacgtggctggggagtggaaccacacctctggtcaatggaatggagacgctaatgacaaaggtattcaaaccagtgaggattacagattctatgctatttcagctgagtaccctgaattcggcaacaagggtaagacactagtctttcaattttctgttaagcacgaacagaagcttgactgtggtggtggctacatgaagttgctcagtggggatgttgatcagaagaaatttggcggggatactccttacagtattatgtttggcccagatatctgcggttacagtaccaagaaagttcacgctattcttacctac

SEQ ID NO: 36198 - protein, 173 aa, Zea mays subsp. mays
  peptide (1)..(173): Ceres Seq. ID no. 3624559
  misc_feature (44)..(172): Pfam Name: Pfam Description:  Calreticulin family
  misc_feature (19)..(172): NCBI GI NO: 11131904 NR Description: Calreticulin precursor
  misc_feature (25)..(172): NCBI GI NO: 11131745 NR Description: Calreticulin precursor
  misc_feature (26)..(172): NCBI GI NO: 2052381 NR Description: calreticulin
  misc_feature (26)..(172): NCBI GI NO: 12643243 NR Description: CALRETICULIN 2 PRECURSOR
  misc_feature (26)..(172): NCBI GI NO: 21555174 NR Description: putative calcium-binding protein, calreticulin
  misc_feature (26)..(172): NCBI GI NO: 25295763 NR Description: hypothetical protein
  misc_feature (26)..(172): NCBI GI NO: 15217459 NR Description: putative calcium-binding protein, calreticulin
  misc_feature (19)..(172): NCBI GI NO: 11131631 NR Description: Calreticulin precursor
  misc_feature (22)..(172): NCBI GI NO: 11131769 NR Description: Calreticulin precursor
  misc_feature (29)..(172): NCBI GI NO: 11131949 NR Description: Calreticulin precursor
NFSRSFLHIPSSVVPSLTMAFRVRSPDLRSLFLLSLLSIASANVFFEERFDDGWENRWVKSDWKKDENVAGEWNHTSGQWNGDANDKGIQTSEDYRFYAISAEYPEFGNKGKTLVFQFSVKHEQKLDCGGGYMKLLSGDVDQKKFGGDTPYSIMFGPDICGYSTKKVHAILTY

SEQ ID NO: 36199 - protein, 155 aa, Zea mays subsp. mays
  peptide (1)..(155): Ceres Seq. ID no. 3624560
  misc_feature (26)..(154): Pfam Name: Pfam Description:  Calreticulin family
  misc_feature (1)..(154): NCBI GI NO: 11131904 NR Description: Calreticulin precursor
  misc_feature (7)..(154): NCBI GI NO: 11131745 NR Description: Calreticulin precursor
  misc_feature (8)..(154): NCBI GI NO: 2052381 NR Description: calreticulin
  misc_feature (8)..(154): NCBI GI NO: 25295763 NR Description: hypothetical protein
  misc_feature (8)..(154): NCBI GI NO: 21555174 NR Description: putative calcium-binding protein, calreticulin
  misc_feature (8)..(154): NCBI GI NO: 15217459 NR Description: putative calcium-binding protein, calreticulin
  misc_feature (8)..(154): NCBI GI NO: 12643243 NR Description: CALRETICULIN 2 PRECURSOR
  misc_feature (1)..(154): NCBI GI NO: 11131631 NR Description: Calreticulin precursor
  misc_feature (4)..(154): NCBI GI NO: 11131769 NR Description: Calreticulin precursor
  misc_feature (11)..(154): NCBI GI NO: 11131949 NR Description: Calreticulin precursor
MAFRVRSPDLRSLFLLSLLSIASANVFFEERFDDGWENRWVKSDWKKDENVAGEWNHTSGQWNGDANDKGIQTSEDYRFYAISAEYPEFGNKGKTLVFQFSVKHEQKLDCGGGYMKLLSGDVDQKKFGGDTPYSIMFGPDICGYSTKKVHAILTY

SEQ ID NO: 36200 - DNA, 618 bp, Zea mays subsp. mays
  misc_feature (1)..(618): Ceres Seq. ID no. 12468438
gcgcgccacggcggcggcgaccccgtgttcgtcggcgtcaacatgcagcgcatccacaacgacttcatcgacgaccccaaggcgtacggcttccagaccgccaccgacgcgtgctgcggccagggccgcttcaacggcatggggctctgcaccatggtgtccagcctctgcgccgaccgcgacacctacgtgttctgggacgccttccaccccacggagcgcgccaaccgcctcatcgtgcagcagttcatgtccggctccaccgactacatcatgcccatgaacctcagcaccgtcctcgccgtcgacctccagaagcagcagctgcgtacgtgacgtgatgtcgtcatccgcttcatcagctgcctgatcagcttcgtgcgtcgccattgccacatcgtcagatcagtttcgtatgcgtgtgtagtgagagtacctagctagtgcatcatgtgccatcagtttccggatgtggttttctgcagggtttcgttcgttcgttcgtgtgtgtgctgcagtgcaggtgtttaattgtgtgatagtgacgaccgtatcctgtcaattgtcatatagcaggacagcttcttgtaataatttatataaattttcaggcgattc

SEQ ID NO: 36201 - protein, 112 aa, Zea mays subsp. mays
  peptide (1)..(112): Ceres Seq. ID no. 12468439
APRRRRPRVRRRQHAAHPQRLHRRPQGVRLPDRHRRVLRPGPLQRHGALHHGVQPLRRPRHLRVLGRLPPHGARQPPHRAAVHVRLHRLHHAHEPQHRPRRRPPEAAAAYVT

SEQ ID NO: 36202 - protein, 111 aa, Zea mays subsp. mays
  peptide (1)..(111): Ceres Seq. ID no. 12468440
  misc_feature (6)..(83): Pfam Name: Pfam Description:  GDSL-like Lipase/Acylhydrolase
  misc_feature (1)..(103): NCBI GI NO: 28071322 NR Description: P0705A05.30
  misc_feature (6)..(107): NCBI GI NO: 22758315 NR Description: putative early nodulin gene (Enod) related protein
  misc_feature (6)..(107): NCBI GI NO: 37535146 NR Description: putative early nodulin gene (Enod) related protein
  misc_feature (6)..(103): NCBI GI NO: 15242808 NR Description: putative protein; protein id: At5g33370
  misc_feature (6)..(103): NCBI GI NO: 15235421 NR Description: Proline-rich APG - like protein
  misc_feature (6)..(106): NCBI GI NO: 15229265 NR Description: putative GDSL-motif lipase/acylhydrolase
  misc_feature (6)..(102): NCBI GI NO: 15238814 NR Description: putative protein; protein id: At5g18430.1
  misc_feature (21)..(102): NCBI GI NO: 13161399 NR Description: CPRD47 [Vigna unguiculata]
  misc_feature (7)..(96): NCBI GI NO: 15229742 NR Description: putative protein; protein id: At3g50400.1
  misc_feature (9)..(97): NCBI GI NO: 15227849 NR Description: putative GDSL-motif lipase/hydrolase
ARHGGGDPVFVGVNMQRIHNDFIDDPKAYGFQTATDACCGQGRFNGMGLCTMVSSLCADRDTYVFWDAFHPTERANRLIVQQFMSGSTDYIMPMNLSTVLAVDLQKQQLRT

SEQ ID NO: 36203 - protein, 97 aa, Zea mays subsp. mays
  peptide (1)..(97): Ceres Seq. ID no. 12468441
  misc_feature (1)..(69): Pfam Name: Pfam Description:  GDSL-like Lipase/Acylhydrolase
  misc_feature (1)..(89): NCBI GI NO: 28071322 NR Description: P0705A05.30
  misc_feature (1)..(93): NCBI GI NO: 22758315 NR Description: putative early nodulin gene (Enod) related protein
  misc_feature (1)..(93): NCBI GI NO: 37535146 NR Description: putative early nodulin gene (Enod) related protein
  misc_feature (1)..(89): NCBI GI NO: 15242808 NR Description: putative protein; protein id: At5g33370
  misc_feature (1)..(89): NCBI GI NO: 15235421 NR Description: Proline-rich APG - like protein
  misc_feature (1)..(92): NCBI GI NO: 15229265 NR Description: putative GDSL-motif lipase/acylhydrolase
  misc_feature (1)..(88): NCBI GI NO: 15238814 NR Description: putative protein; protein id: At5g18430.1
  misc_feature (7)..(88): NCBI GI NO: 13161399 NR Description: CPRD47 [Vigna unguiculata]
  misc_feature (1)..(82): NCBI GI NO: 15229742 NR Description: putative protein; protein id: At3g50400.1
  misc_feature (1)..(83): NCBI GI NO: 15227849 NR Description: putative GDSL-motif lipase/hydrolase
MQRIHNDFIDDPKAYGFQTATDACCGQGRFNGMGLCTMVSSLCADRDTYVFWDAFHPTERANRLIVQQFMSGSTDYIMPMNLSTVLAVDLQKQQLRT

SEQ ID NO: 36204 - DNA, 976 bp, Zea mays subsp. mays
  misc_feature (1)..(976): Ceres Seq. ID no. 12578960
acatggacgtcgacaaggtcagcttcaccgggtccacggaggtcggccgcctcgtcatgagggccgcggccgagagcaacctcaagcccgtgtcgctcgagctgggcggcaagtctcccgtcatcgtcttcgacgacgccgacctcgacatggccgttaacctcgtcaacttcgccacctacaccaacaagggcgagatctgtgtggccggcacgcgcatctacgtgcaggaagggatctacgacgagttcgtgaagaaggccgccgagctcgccagcaagtccgtggtcggagacccgttcaacccgagtgtcagccaaggcccccaggttgacaaggaccagtacgagaaggtcctcaggtacattgacatcgggaagcgcgaaggcgccacgctggtcaccggagggaagccctgcggcgacaataagggctactacatcgagcccaccatcttcacggacgtcaaggacgacatgacgatcgcacaggatgaaatctttgggccggtgatggctctcatgaaattcaagaccgtggaggaggtgatccagaaagcgaacaacacccggtacggcctggccgccggcatcgtgaccaagaacatcgacgtcgccaacaccgtgtcgcggtccatccgcgccggcgccatttggatcaactgctacttcgcgttcgacccggacgcgccgttcggcgggtacaagatgagcgggttcggcaaggacatgggcatggacgcgctcgacaagtacctgcagaccaagaccgtcgtcactccgctgtacaacactccatggctctgaccgacctcatcctgtccgatgaacagttcaacatcacaaacaagaagaaacatgtcttgtaagatactcctccaaaggatcggttgcctgtacctgtactcttacacctgcatggattgatgatgcagtgcaatgtagcattcagaacaataaagacatgtttcggactg

SEQ ID NO: 36205 - protein, 267 aa, Zea mays subsp. mays
  peptide (1)..(267): Ceres Seq. ID no. 12578961
  misc_feature (1)..(267): NCBI GI NO: 19850243 NR Description: cytosolic aldehyde dehydrogenase RF2C [Zea mays]
  misc_feature (1)..(267): NCBI GI NO: 19850241 NR Description: cytosolic aldehyde dehydrogenase RF2C [Zea mays]
  misc_feature (1)..(267): NCBI GI NO: 34912248 NR Description: cytosolic aldehyde dehydrogenase
  misc_feature (1)..(266): NCBI GI NO: 19850245 NR Description: cytosolic aldehyde dehydrogenase RF2D [Zea mays]
  misc_feature (1)..(266): NCBI GI NO: 19850247 NR Description: cytosolic aldehyde dehydrogenase RF2D [Zea mays]
  misc_feature (1)..(266): NCBI GI NO: 34912252 NR Description: putative cytosolic aldehyde dehydrogenase
  misc_feature (1)..(267): NCBI GI NO: 18404212 NR Description: Expressed protein; protein id: At3g24503
  misc_feature (1)..(267): NCBI GI NO: 20530127 NR Description: mitochondrial aldehyde dehydrogenase
  misc_feature (1)..(267): NCBI GI NO: 15128580 NR Description: mitochondrial aldehyde dehydrogenase ALDH2
  misc_feature (1)..(267): NCBI GI NO: 7431451 NR Description: rf2 nuclear restorer protein - maize
MDVDKVSFTGSTEVGRLVMRAAAESNLKPVSLELGGKSPVIVFDDADLDMAVNLVNFATYTNKGEICVAGTRIYVQEGIYDEFVKKAAELASKSVVGDPFNPSVSQGPQVDKDQYEKVLRYIDIGKREGATLVTGGKPCGDNKGYYIEPTIFTDVKDDMTIAQDEIFGPVMALMKFKTVEEVIQKANNTRYGLAAGIVTKNIDVANTVSRSIRAGAIWINCYFAFDPDAPFGGYKMSGFGKDMGMDALDKYLQTKTVVTPLYNTPWL

SEQ ID NO: 36206 - protein, 249 aa, Zea mays subsp. mays
  peptide (1)..(249): Ceres Seq. ID no. 12578962
  misc_feature (1)..(249): NCBI GI NO: 19850243 NR Description: cytosolic aldehyde dehydrogenase RF2C [Zea mays]
  misc_feature (1)..(249): NCBI GI NO: 19850241 NR Description: cytosolic aldehyde dehydrogenase RF2C [Zea mays]
  misc_feature (1)..(249): NCBI GI NO: 34912248 NR Description: cytosolic aldehyde dehydrogenase
  misc_feature (1)..(248): NCBI GI NO: 19850245 NR Description: cytosolic aldehyde dehydrogenase RF2D [Zea mays]
  misc_feature (1)..(248): NCBI GI NO: 19850247 NR Description: cytosolic aldehyde dehydrogenase RF2D [Zea mays]
  misc_feature (1)..(248): NCBI GI NO: 34912252 NR Description: putative cytosolic aldehyde dehydrogenase
  misc_feature (1)..(249): NCBI GI NO: 18404212 NR Description: Expressed protein; protein id: At3g24503
  misc_feature (1)..(249): NCBI GI NO: 20530127 NR Description: mitochondrial aldehyde dehydrogenase
  misc_feature (1)..(249): NCBI GI NO: 15128580 NR Description: mitochondrial aldehyde dehydrogenase ALDH2
  misc_feature (1)..(249): NCBI GI NO: 7431451 NR Description: rf2 nuclear restorer protein - maize
MRAAAESNLKPVSLELGGKSPVIVFDDADLDMAVNLVNFATYTNKGEICVAGTRIYVQEGIYDEFVKKAAELASKSVVGDPFNPSVSQGPQVDKDQYEKVLRYIDIGKREGATLVTGGKPCGDNKGYYIEPTIFTDVKDDMTIAQDEIFGPVMALMKFKTVEEVIQKANNTRYGLAAGIVTKNIDVANTVSRSIRAGAIWINCYFAFDPDAPFGGYKMSGFGKDMGMDALDKYLQTKTVVTPLYNTPWL

SEQ ID NO: 36207 - protein, 218 aa, Zea mays subsp. mays
  peptide (1)..(218): Ceres Seq. ID no. 12578963
  misc_feature (1)..(218): NCBI GI NO: 19850243 NR Description: cytosolic aldehyde dehydrogenase RF2C [Zea mays]
  misc_feature (1)..(218): NCBI GI NO: 19850241 NR Description: cytosolic aldehyde dehydrogenase RF2C [Zea mays]
  misc_feature (1)..(218): NCBI GI NO: 34912248 NR Description: cytosolic aldehyde dehydrogenase
  misc_feature (1)..(217): NCBI GI NO: 19850245 NR Description: cytosolic aldehyde dehydrogenase RF2D [Zea mays]
  misc_feature (1)..(217): NCBI GI NO: 19850247 NR Description: cytosolic aldehyde dehydrogenase RF2D [Zea mays]
  misc_feature (1)..(217): NCBI GI NO: 34912252 NR Description: putative cytosolic aldehyde dehydrogenase
  misc_feature (1)..(218): NCBI GI NO: 18404212 NR Description: Expressed protein; protein id: At3g24503
  misc_feature (1)..(218): NCBI GI NO: 20530127 NR Description: mitochondrial aldehyde dehydrogenase
  misc_feature (1)..(218): NCBI GI NO: 15128580 NR Description: mitochondrial aldehyde dehydrogenase ALDH2
  misc_feature (1)..(218): NCBI GI NO: 7431451 NR Description: rf2 nuclear restorer protein - maize
MAVNLVNFATYTNKGEICVAGTRIYVQEGIYDEFVKKAAELASKSVVGDPFNPSVSQGPQVDKDQYEKVLRYIDIGKREGATLVTGGKPCGDNKGYYIEPTIFTDVKDDMTIAQDEIFGPVMALMKFKTVEEVIQKANNTRYGLAAGIVTKNIDVANTVSRSIRAGAIWINCYFAFDPDAPFGGYKMSGFGKDMGMDALDKYLQTKTVVTPLYNTPWL

SEQ ID NO: 36208 - DNA, 1571 bp, Zea mays subsp. mays
  misc_feature (1)..(1571): Ceres Seq. ID no. 13586780
tctgcaccccggactacatcacgccggagatgccgcaggtggccaacgagttcgacgacgacgataaggagaacatcccctgcccaaaatctccggagaagtcagcgaaccctcgtagcaagcggtacagaaccgattgttctcccaaagctcgggaggttacggacttctctttcgaccatcagattacgccggttctgtttgacagcttgactcgagatgattcggaagaagagcagccgaagcagcctgcgctggaaaagaggggtggttatgtctcccagtcagcagtggctctgcgttgccgggtgatgcctccgccatgcgtcaagaatccatacctcaataccgatccatgcatagatgctgctgtttacggtgggaggcagtgcaactcagcagtattctctccttcaattggtggtaatggtctttcacgctatcgaactgatttccatgaaatagagaaaattggttatggcaacttcagtgttgtgttcaaagttctgaataggatagacgggtgcttgtatgctgttaaacggagcatcaagcaattgcataatgatatggaaaggaggcaagcagtgaaagaagtccaagctatggcagccttaggttctcacgagaacatagttcgatatttcacctcttggtttgagaatgagcaactttatattcagatggaactctgcgaccgctgtctatctatgaatcggaaccagccagtgaagcgtggggaagccctggaactgttgtatcagatctgcaaaggcttggatttcatgcacgaacgtggcatagcacaccttgatgtgaagcctgataatatatatgtcagaaatggtatttataagctcggggattttggctgtgctacacttgttaaccggagtctagcaattgaagatggagattcacgctatatgcctccggaaatgctgaatgataagtatgagcatctcgacaaggttgatatcttttctcttggggcagccgtctatgagctaataagaggcaccccgcttcccgagtctggatctcactttacaagcattagagagggtaagatcgcattgcttccagggtgcccgatgcagtttcaaagcttaatcaagtctatgatggaccctgatccggtgaggcggccttcagcaaaggagatcctgagacacccttcctttgacaagctccacaaggcctcatcgaagtagaagtgctgccgcgcccccatcagatcagagcagccggcaaagggaattccgcagctgcgtcacattcaccgtcagctgctcccaatttttggtgtatctatctatctctatgcgtgtgccatgtgccctgttctgatactgtagaagatggctggaaacgaagcagggatctgattttaattccaggaactggagcacgagcagcgtctgtaaaggactaaaggctgtggctgctgttgtgttaaggttgtgcctctcttttggtttctgatgcacgcttggaaccatcaaccctgtgcctttttttggggtgcttgttatcagttgcatttgggcagcgaatgctaatttggatcc

SEQ ID NO: 36209 - protein, 403 aa, Zea mays subsp. mays
  peptide (1)..(403): Ceres Seq. ID no. 13586781
  misc_feature (151)..(394): Pfam Name: Pfam Description:  Protein kinase domain
  misc_feature (1)..(403): NCBI GI NO: 5821717 NR Description: Wee1-like protein [Zea mays]
  misc_feature (1)..(397): NCBI GI NO: 15218666 NR Description: protein kinase, putative [Arabidopsis thaliana]
  misc_feature (1)..(397): NCBI GI NO: 25518409 NR Description: hypothetical protein F22D16
  misc_feature (112)..(288): NCBI GI NO: 21070391 NR Description: putative cell cycle regulatory protein kinase  Wee1
  misc_feature (142)..(279): NCBI GI NO: 15208193 NR Description: hypothetical protein [Macaca fascicularis]
  misc_feature (283)..(391): NCBI GI NO: 15208193 NR Description: hypothetical protein [Macaca fascicularis]
  misc_feature (142)..(279): NCBI GI NO: 228044 NR Description: Wee1-like gene
  misc_feature (283)..(391): NCBI GI NO: 228044 NR Description: Wee1-like gene
  misc_feature (146)..(281): NCBI GI NO: 4160308 NR Description: wee1-like kinase [Platynereis dumerilii]
  misc_feature (284)..(393): NCBI GI NO: 4160308 NR Description: wee1-like kinase [Platynereis dumerilii]
CTPDYITPEMPQVANEFDDDDKENIPCPKSPEKSANPRSKRYRTDCSPKAREVTDFSFDHQITPVLFDSLTRDDSEEEQPKQPALEKRGGYVSQSAVALRCRVMPPPCVKNPYLNTDPCIDAAVYGGRQCNSAVFSPSIGGNGLSRYRTDFHEIEKIGYGNFSVVFKVLNRIDGCLYAVKRSIKQLHNDMERRQAVKEVQAMAALGSHENIVRYFTSWFENEQLYIQMELCDRCLSMNRNQPVKRGEALELLYQICKGLDFMHERGIAHLDVKPDNIYVRNGIYKLGDFGCATLVNRSLAIEDGDSRYMPPEMLNDKYEHLDKVDIFSLGAAVYELIRGTPLPESGSHFTSIREGKIALLPGCPMQFQSLIKSMMDPDPVRRPSAKEILRHPSFDKLHKASSK

SEQ ID NO: 36210 - protein, 394 aa, Zea mays subsp. mays
  peptide (1)..(394): Ceres Seq. ID no. 13586782
  misc_feature (142)..(385): Pfam Name: Pfam Description:  Protein kinase domain
  misc_feature (1)..(394): NCBI GI NO: 5821717 NR Description: Wee1-like protein [Zea mays]
  misc_feature (1)..(388): NCBI GI NO: 15218666 NR Description: protein kinase, putative [Arabidopsis thaliana]
  misc_feature (1)..(388): NCBI GI NO: 25518409 NR Description: hypothetical protein F22D16
  misc_feature (103)..(279): NCBI GI NO: 21070391 NR Description: putative cell cycle regulatory protein kinase  Wee1
  misc_feature (133)..(270): NCBI GI NO: 15208193 NR Description: hypothetical protein [Macaca fascicularis]
  misc_feature (274)..(382): NCBI GI NO: 15208193 NR Description: hypothetical protein [Macaca fascicularis]
  misc_feature (133)..(270): NCBI GI NO: 228044 NR Description: Wee1-like gene
  misc_feature (274)..(382): NCBI GI NO: 228044 NR Description: Wee1-like gene
  misc_feature (137)..(272): NCBI GI NO: 4160308 NR Description: wee1-like kinase [Platynereis dumerilii]
  misc_feature (275)..(384): NCBI GI NO: 4160308 NR Description: wee1-like kinase [Platynereis dumerilii]
MPQVANEFDDDDKENIPCPKSPEKSANPRSKRYRTDCSPKAREVTDFSFDHQITPVLFDSLTRDDSEEEQPKQPALEKRGGYVSQSAVALRCRVMPPPCVKNPYLNTDPCIDAAVYGGRQCNSAVFSPSIGGNGLSRYRTDFHEIEKIGYGNFSVVFKVLNRIDGCLYAVKRSIKQLHNDMERRQAVKEVQAMAALGSHENIVRYFTSWFENEQLYIQMELCDRCLSMNRNQPVKRGEALELLYQICKGLDFMHERGIAHLDVKPDNIYVRNGIYKLGDFGCATLVNRSLAIEDGDSRYMPPEMLNDKYEHLDKVDIFSLGAAVYELIRGTPLPESGSHFTSIREGKIALLPGCPMQFQSLIKSMMDPDPVRRPSAKEILRHPSFDKLHKASSK

SEQ ID NO: 36211 - protein, 300 aa, Zea mays subsp. mays
  peptide (1)..(300): Ceres Seq. ID no. 13586783
  misc_feature (48)..(291): Pfam Name: Pfam Description:  Protein kinase domain
  misc_feature (1)..(300): NCBI GI NO: 5821717 NR Description: Wee1-like protein [Zea mays]
  misc_feature (1)..(294): NCBI GI NO: 15218666 NR Description: protein kinase, putative [Arabidopsis thaliana]
  misc_feature (1)..(294): NCBI GI NO: 25518409 NR Description: hypothetical protein F22D16
  misc_feature (9)..(185): NCBI GI NO: 21070391 NR Description: putative cell cycle regulatory protein kinase  Wee1
  misc_feature (39)..(176): NCBI GI NO: 15208193 NR Description: hypothetical protein [Macaca fascicularis]
  misc_feature (180)..(288): NCBI GI NO: 15208193 NR Description: hypothetical protein [Macaca fascicularis]
  misc_feature (39)..(176): NCBI GI NO: 228044 NR Description: Wee1-like gene
  misc_feature (180)..(288): NCBI GI NO: 228044 NR Description: Wee1-like gene
  misc_feature (43)..(178): NCBI GI NO: 4160308 NR Description: wee1-like kinase [Platynereis dumerilii]
  misc_feature (181)..(290): NCBI GI NO: 4160308 NR Description: wee1-like kinase [Platynereis dumerilii]
MPPPCVKNPYLNTDPCIDAAVYGGRQCNSAVFSPSIGGNGLSRYRTDFHEIEKIGYGNFSVVFKVLNRIDGCLYAVKRSIKQLHNDMERRQAVKEVQAMAALGSHENIVRYFTSWFENEQLYIQMELCDRCLSMNRNQPVKRGEALELLYQICKGLDFMHERGIAHLDVKPDNIYVRNGIYKLGDFGCATLVNRSLAIEDGDSRYMPPEMLNDKYEHLDKVDIFSLGAAVYELIRGTPLPESGSHFTSIREGKIALLPGCPMQFQSLIKSMMDPDPVRRPSAKEILRHPSFDKLHKASSK

SEQ ID NO: 36212 - DNA, 530 bp, Zea mays subsp. mays
  misc_feature (1)..(530): Ceres Seq. ID no. 3629587
ttggcgaattccagcttgaaggcattccaccagccccaagaggcatgccccagatcgaggttacctttgacattgatgccaatggcattgtaaaggtgtcagctagggacaaagccacaggcaaagaacaagaaatcaccatcaagtcttytggtggtttgtcagaggtcgaaattgakaagatggtgaaggaggcaragctacattctcagaaggaccaggaaaggaagtctcttattgatctcaagaactctgcasataccacgatctacagcattgasaagagtgtcagcgagtacaaggacaaggtccctgctgaagtcaccaaggagatcgagtctgctgtctctgatctgagggcagctatggctgaggatgatctggacaagatcaagcagaagctggaagcagcaaacaaggctgtttcaaagatcggagarcacatgcmacaaggtggtggtggcggcsgcagcscttgtggcagcagcagtggaggaraccagactccagaagctgagtaccagggacgc

SEQ ID NO: 36213 - protein, 176 aa, Zea mays subsp. mays
  peptide (1)..(176): Ceres Seq. ID no. 3629588
  misc_feature (1)..(148): Pfam Name: Pfam Description:  Hsp70 protein
  misc_feature (1)..(174): NCBI GI NO: 27476086 NR Description: Putative heat shock 70 KD protein
  misc_feature (1)..(174): NCBI GI NO: 399940 NR Description: HEAT SHOCK 70 KD PROTEIN, MITOCHONDRIAL PRECURSOR
  misc_feature (1)..(174): NCBI GI NO: 300265 NR Description: HSP68=68 kda heat-stress DnaK homolog
  misc_feature (1)..(174): NCBI GI NO: 7441879 NR Description: dnaK-type molecular chaperone HSC70-11
  misc_feature (1)..(174): NCBI GI NO: 585272 NR Description: HEAT SHOCK 70 KD PROTEIN, MITOCHONDRIAL PRECURSOR
  misc_feature (1)..(174): NCBI GI NO: 7441844 NR Description: dnaK-type molecular chaperone PHSP1 precursor
  misc_feature (1)..(174): NCBI GI NO: 7441881 NR Description: dnaK-type molecular chaperone HSC70-10
  misc_feature (1)..(174): NCBI GI NO: 15242459 NR Description: heat shock protein 70
  misc_feature (1)..(174): NCBI GI NO: 7441874 NR Description: dnaK-type molecular chaperone F20D10
  misc_feature (1)..(174): NCBI GI NO: 30691626 NR Description: heat shock protein mtHsc70-1
  misc_feature (50)..(50): Xaa is any aa, unknown or other
  misc_feature (59)..(59): Xaa is any aa, unknown or other
  misc_feature (66)..(66): Xaa is any aa, unknown or other
  misc_feature (86)..(86): Xaa is any aa, unknown or other
  misc_feature (93)..(93): Xaa is any aa, unknown or other
  misc_feature (146)..(146): Xaa is any aa, unknown or other
  misc_feature (149)..(149): Xaa is any aa, unknown or other
  misc_feature (156)..(156): Xaa is any aa, unknown or other
  misc_feature (158)..(158): Xaa is any aa, unknown or other
  misc_feature (166)..(166): Xaa is any aa, unknown or other
GEFQLEGIPPAPRGMPQIEVTFDIDANGIVKVSARDKATGKEQEITIKSXGGLSEVEIXKMVKEAXLHSQKDQERKSLIDLKNSAXTTIYSIXKSVSEYKDKVPAEVTKEIESAVSDLRAAMAEDDLDKIKQKLEAANKAVSKIGXHMXQGGGGGXSXCGSSSGGXQTPEAEYQGR

SEQ ID NO: 36214 - protein, 162 aa, Zea mays subsp. mays
  peptide (1)..(162): Ceres Seq. ID no. 3629589
  misc_feature (1)..(134): Pfam Name: Pfam Description:  Hsp70 protein
  misc_feature (1)..(160): NCBI GI NO: 27476086 NR Description: Putative heat shock 70 KD protein
  misc_feature (1)..(160): NCBI GI NO: 399940 NR Description: HEAT SHOCK 70 KD PROTEIN, MITOCHONDRIAL PRECURSOR
  misc_feature (1)..(160): NCBI GI NO: 300265 NR Description: HSP68=68 kda heat-stress DnaK homolog
  misc_feature (1)..(160): NCBI GI NO: 7441879 NR Description: dnaK-type molecular chaperone HSC70-11
  misc_feature (1)..(160): NCBI GI NO: 585272 NR Description: HEAT SHOCK 70 KD PROTEIN, MITOCHONDRIAL PRECURSOR
  misc_feature (1)..(160): NCBI GI NO: 7441844 NR Description: dnaK-type molecular chaperone PHSP1 precursor
  misc_feature (1)..(160): NCBI GI NO: 7441881 NR Description: dnaK-type molecular chaperone HSC70-10
  misc_feature (1)..(160): NCBI GI NO: 15242459 NR Description: heat shock protein 70
  misc_feature (1)..(160): NCBI GI NO: 7441874 NR Description: dnaK-type molecular chaperone F20D10
  misc_feature (1)..(160): NCBI GI NO: 30691626 NR Description: heat shock protein mtHsc70-1
  misc_feature (36)..(36): Xaa is any aa, unknown or other
  misc_feature (45)..(45): Xaa is any aa, unknown or other
  misc_feature (52)..(52): Xaa is any aa, unknown or other
  misc_feature (72)..(72): Xaa is any aa, unknown or other
  misc_feature (79)..(79): Xaa is any aa, unknown or other
  misc_feature (132)..(132): Xaa is any aa, unknown or other
  misc_feature (135)..(135): Xaa is any aa, unknown or other
  misc_feature (142)..(142): Xaa is any aa, unknown or other
  misc_feature (144)..(144): Xaa is any aa, unknown or other
  misc_feature (152)..(152): Xaa is any aa, unknown or other
MPQIEVTFDIDANGIVKVSARDKATGKEQEITIKSXGGLSEVEIXKMVKEAXLHSQKDQERKSLIDLKNSAXTTIYSIXKSVSEYKDKVPAEVTKEIESAVSDLRAAMAEDDLDKIKQKLEAANKAVSKIGXHMXQGGGGGXSXCGSSSGGXQTPEAEYQGR

SEQ ID NO: 36215 - protein, 116 aa, Zea mays subsp. mays
  peptide (1)..(116): Ceres Seq. ID no. 3629590
  misc_feature (1)..(88): Pfam Name: Pfam Description:  Hsp70 protein
  misc_feature (1)..(114): NCBI GI NO: 27476086 NR Description: Putative heat shock 70 KD protein
  misc_feature (1)..(114): NCBI GI NO: 399940 NR Description: HEAT SHOCK 70 KD PROTEIN, MITOCHONDRIAL PRECURSOR
  misc_feature (1)..(114): NCBI GI NO: 300265 NR Description: HSP68=68 kda heat-stress DnaK homolog
  misc_feature (1)..(114): NCBI GI NO: 7441879 NR Description: dnaK-type molecular chaperone HSC70-11
  misc_feature (1)..(114): NCBI GI NO: 585272 NR Description: HEAT SHOCK 70 KD PROTEIN, MITOCHONDRIAL PRECURSOR
  misc_feature (1)..(114): NCBI GI NO: 7441844 NR Description: dnaK-type molecular chaperone PHSP1 precursor
  misc_feature (1)..(114): NCBI GI NO: 7441881 NR Description: dnaK-type molecular chaperone HSC70-10
  misc_feature (1)..(114): NCBI GI NO: 15242459 NR Description: heat shock protein 70
  misc_feature (1)..(114): NCBI GI NO: 7441874 NR Description: dnaK-type molecular chaperone F20D10
  misc_feature (1)..(114): NCBI GI NO: 30691626 NR Description: heat shock protein mtHsc70-1
  misc_feature (6)..(6): Xaa is any aa, unknown or other
  misc_feature (26)..(26): Xaa is any aa, unknown or other
  misc_feature (33)..(33): Xaa is any aa, unknown or other
  misc_feature (86)..(86): Xaa is any aa, unknown or other
  misc_feature (89)..(89): Xaa is any aa, unknown or other
  misc_feature (96)..(96): Xaa is any aa, unknown or other
  misc_feature (98)..(98): Xaa is any aa, unknown or other
  misc_feature (106)..(106): Xaa is any aa, unknown or other
MVKEAXLHSQKDQERKSLIDLKNSAXTTIYSIXKSVSEYKDKVPAEVTKEIESAVSDLRAAMAEDDLDKIKQKLEAANKAVSKIGXHMXQGGGGGXSXCGSSSGGXQTPEAEYQGR

SEQ ID NO: 36216 - DNA, 661 bp, Zea mays subsp. mays
  misc_feature (1)..(661): Ceres Seq. ID no. 12468926
  misc_feature (579)..(579): n is a, c, t, g, unknown, or other
  misc_feature (655)..(655): n is a, c, t, g, unknown, or other
tgacttattctgctgaggatgaagcaaaaatcgaaaggcctgtgatgatacacagggcaatcctaggttctgttgaaaggatgtttgccattcttttggagcattacaatggcaaatggcccttatggctaagccctcgccaggccattgtttgttcagtatcttctggttcagtggaatatgcgaaacaggttcttgccatgctacatgaagctgatttccatgttgatattgatgtgagtgacaggacaatacaaaagaaggtacgggaagcccaggtagctcaattcaactacattcttgtcgtaggcgcacaggaggccgagactggaaatgtctgcgttagggtaagagataatgccgacctggccacaatgagcgttgatggcctcatcacacgtttgagggaggaaatcgtagccttcaaatgattttgatgctgcataatttcctagcacttcgcaatcattgactgttcatttgtgattttgattgagttttcagggaacagtactgagttcctccaaggctccaagtgtattcttgttggtacggttggaagctactaagggcatttanaagcacctagtttttaataaactggtttataaaaattgagatggttccaaacatatcggtttatattatggatttntagttt

SEQ ID NO: 36217 - protein, 142 aa, Zea mays subsp. mays
  peptide (1)..(142): Ceres Seq. ID no. 12468927
  misc_feature (1)..(142): NCBI GI NO: 38175524 NR Description: putative threonyl-tRNA synthetase
  misc_feature (1)..(142): NCBI GI NO: 20429011 NR Description: threonyl-tRNA synthetase
  misc_feature (2)..(141): NCBI GI NO: 15081626 NR Description: AT5g26830/F2P16_90 [Arabidopsis thaliana]
  misc_feature (2)..(141): NCBI GI NO: 11271129 NR Description: threonine-tRNA ligase (EC 6.1.1.3)
  misc_feature (2)..(141): NCBI GI NO: 30690426 NR Description: threonyl-tRNA synthetase [Arabidopsis thaliana]
  misc_feature (2)..(141): NCBI GI NO: 7437517 NR Description: threonine-tRNA ligase (EC 6
  misc_feature (2)..(126): NCBI GI NO: 8671766 NR Description: T10O22.10 [Arabidopsis thaliana]
  misc_feature (2)..(126): NCBI GI NO: 15220974 NR Description: hypothetical protein; protein id: At1g18130.1
  misc_feature (6)..(141): NCBI GI NO: 15220911 NR Description: threonyl-tRNA synthetase, putative
  misc_feature (10)..(126): NCBI GI NO: 9719727 NR Description: Contains similarity to threonyl-tRNA synthetasefrom Arabidopsis thaliana gb|Y14329
TYSAEDEAKIERPVMIHRAILGSVERMFAILLEHYNGKWPLWLSPRQAIVCSVSSGSVEYAKQVLAMLHEADFHVDIDVSDRTIQKKVREAQVAQFNYILVVGAQEAETGNVCVRVRDNADLATMSVDGLITRLREEIVAFK

SEQ ID NO: 36218 - protein, 128 aa, Zea mays subsp. mays
  peptide (1)..(128): Ceres Seq. ID no. 12468928
  misc_feature (1)..(128): NCBI GI NO: 38175524 NR Description: putative threonyl-tRNA synthetase
  misc_feature (1)..(128): NCBI GI NO: 20429011 NR Description: threonyl-tRNA synthetase
  misc_feature (1)..(127): NCBI GI NO: 15081626 NR Description: AT5g26830/F2P16_90 [Arabidopsis thaliana]
  misc_feature (1)..(127): NCBI GI NO: 11271129 NR Description: threonine-tRNA ligase (EC 6.1.1.3)
  misc_feature (1)..(127): NCBI GI NO: 30690426 NR Description: threonyl-tRNA synthetase [Arabidopsis thaliana]
  misc_feature (1)..(127): NCBI GI NO: 7437517 NR Description: threonine-tRNA ligase (EC 6
  misc_feature (1)..(112): NCBI GI NO: 8671766 NR Description: T10O22.10 [Arabidopsis thaliana]
  misc_feature (1)..(112): NCBI GI NO: 15220974 NR Description: hypothetical protein; protein id: At1g18130.1
  misc_feature (1)..(127): NCBI GI NO: 15220911 NR Description: threonyl-tRNA synthetase, putative
  misc_feature (1)..(112): NCBI GI NO: 9719727 NR Description: Contains similarity to threonyl-tRNA synthetasefrom Arabidopsis thaliana gb|Y14329
MIHRAILGSVERMFAILLEHYNGKWPLWLSPRQAIVCSVSSGSVEYAKQVLAMLHEADFHVDIDVSDRTIQKKVREAQVAQFNYILVVGAQEAETGNVCVRVRDNADLATMSVDGLITRLREEIVAFK

SEQ ID NO: 36219 - protein, 116 aa, Zea mays subsp. mays
  peptide (1)..(116): Ceres Seq. ID no. 12468929
  misc_feature (1)..(116): NCBI GI NO: 38175524 NR Description: putative threonyl-tRNA synthetase
  misc_feature (1)..(116): NCBI GI NO: 20429011 NR Description: threonyl-tRNA synthetase
  misc_feature (1)..(115): NCBI GI NO: 15081626 NR Description: AT5g26830/F2P16_90 [Arabidopsis thaliana]
  misc_feature (1)..(115): NCBI GI NO: 11271129 NR Description: threonine-tRNA ligase (EC 6.1.1.3)
  misc_feature (1)..(115): NCBI GI NO: 30690426 NR Description: threonyl-tRNA synthetase [Arabidopsis thaliana]
  misc_feature (1)..(115): NCBI GI NO: 7437517 NR Description: threonine-tRNA ligase (EC 6
  misc_feature (1)..(100): NCBI GI NO: 8671766 NR Description: T10O22.10 [Arabidopsis thaliana]
  misc_feature (1)..(100): NCBI GI NO: 15220974 NR Description: hypothetical protein; protein id: At1g18130.1
  misc_feature (1)..(115): NCBI GI NO: 15220911 NR Description: threonyl-tRNA synthetase, putative
  misc_feature (1)..(100): NCBI GI NO: 9719727 NR Description: Contains similarity to threonyl-tRNA synthetasefrom Arabidopsis thaliana gb|Y14329
MFAILLEHYNGKWPLWLSPRQAIVCSVSSGSVEYAKQVLAMLHEADFHVDIDVSDRTIQKKVREAQVAQFNYILVVGAQEAETGNVCVRVRDNADLATMSVDGLITRLREEIVAFK

SEQ ID NO: 36220 - DNA, 491 bp, Zea mays subsp. mays
  misc_feature (1)..(491): Ceres Seq. ID no. 12468404
cgtcacgggcggctacaacggcaagtgggtgtgggccgagcaggaggtgctgccggccgactggcgccccggccaggtctacgacaccggcgtccgcatcgtcgacgtcgcccgggacgcatcccgcggctgcaccgccgccgccatggacgactggaagtgaagtgaggatatggctgggtagattaaaaatacgtatgaatacatactaacacgtcgccacatcggtgctgcgacactctggtaagaagaggacagcatgcaatggctccaagaacagcatcccccccaagcgcgtccggctgtccagaggagaggaggaagaagattggagtagctagcagctagggtgtaattgtgtatgcaggatcttctatcaaggtcgatccgattagatgcaggcaaaaaaaaaagagctgggatccagtcgacagttctaatgggtcatggcgtcatgccatcctggctgtaccacaaactcgactaaaagc

SEQ ID NO: 36221 - protein, 69 aa, Zea mays subsp. mays
  peptide (1)..(69): Ceres Seq. ID no. 12468405
SRAATTASGCGPSRRCCRPTGAPARSTTPASASSTSPGTHPAAAPPPPWTTGSEVRIWLGRLKIRMNTY

SEQ ID NO: 36222 - protein, 55 aa, Zea mays subsp. mays
  peptide (1)..(55): Ceres Seq. ID no. 12468406
RHGRLQRQVGVGRAGGAAGRLAPRPGLRHRRPHRRRRPGRIPRLHRRRHGRLEVK

SEQ ID NO: 36223 - protein, 53 aa, Zea mays subsp. mays
  peptide (1)..(53): Ceres Seq. ID no. 12468407
  misc_feature (1)..(53): NCBI GI NO: 34901594 NR Description: P0571D04.11
  misc_feature (1)..(53): NCBI GI NO: 25136297 NR Description: expansin-like protein
  misc_feature (1)..(53): NCBI GI NO: 21654743 NR Description: expansin-like protein 1 [Oryza sativa]
  misc_feature (1)..(53): NCBI GI NO: 20502989 NR Description: Putative pollen allergen
  misc_feature (1)..(53): NCBI GI NO: 37536544 NR Description: putative pollen allergen
  misc_feature (1)..(53): NCBI GI NO: 33111959 NR Description: expansin-like protein [Quercus robur]
  misc_feature (1)..(44): NCBI GI NO: 30692657 NR Description: expansin protein family (EXPL3)
  misc_feature (1)..(46): NCBI GI NO: 15231303 NR Description: putative protein; protein id: At3g45970
  misc_feature (1)..(46): NCBI GI NO: 21555265 NR Description: Expansin-like 1 precursor
  misc_feature (1)..(44): NCBI GI NO: 20138389 NR Description: Expansin-like 3 precursor
VTGGYNGKWVWAEQEVLPADWRPGQVYDTGVRIVDVARDASRGCTAAAMDDWK

SEQ ID NO: 36224 - DNA, 474 bp, Zea mays subsp. mays
  misc_feature (1)..(474): Ceres Seq. ID no. 15180595
gtgtggtctcgcccctgaggttcctgatcgcaccatctccctccggcgacagtccgccgccccgccccgcgcgctcgacgaggccgctccgggtggtgaagagggtgctgctgcagtgtctcccctctcgctatgagtagtgctgtgaaggaccagctacagcagatgtcgacgacgtgcgattctctcctgttggagctcaacgtgatttgggatgaggtcggtgagcccgacatggcgagggaccggatgctgctggagctcgagcaggagtgcctcgacgtctacaagagaaaggtcgaccaggccaatcgatgcagggcccagttgcggcaggccattgcggaggcagaggccgagctcgctggcatatgctcggccatgggcgagccaccgatacatgttagacagtcaaatcagaagttacaaggtttaagggaagtattgaatgcgattgtcccatacttggaggag

SEQ ID NO: 36225 - protein, 114 aa, Zea mays subsp. mays
  peptide (1)..(114): Ceres Seq. ID no. 15180596
  misc_feature (37)..(113): Pfam Name: MAP65/ASE1 family Pfam Description: Microtubule associated protein
  misc_feature (1)..(113): NCBI GI NO: 34911266 NR Description: cytokinesis regulating protein - like
  misc_feature (1)..(113): NCBI GI NO: 15242132 NR Description: microtubule associated protein (MAP65/ASE1) family
  misc_feature (14)..(113): NCBI GI NO: 28200790 NR Description: 65kD microtubule associated protein
  misc_feature (13)..(113): NCBI GI NO: 15224935 NR Description: microtubule associated protein (MAP65/ASE1) family
  misc_feature (14)..(113): NCBI GI NO: 11558252 NR Description: microtubule-associated protein MAP65-1a
  misc_feature (15)..(113): NCBI GI NO: 15240485 NR Description: microtubule associated protein (MAP65/ASE1) family
  misc_feature (13)..(113): NCBI GI NO: 21539547 NR Description: unknown protein [Arabidopsis thaliana]
  misc_feature (13)..(113): NCBI GI NO: 8778239 NR Description: F10B6.9 [Arabidopsis thaliana]
  misc_feature (13)..(113): NCBI GI NO: 25410943 NR Description: hypothetical protein At2g01910
  misc_feature (1)..(113): NCBI GI NO: 18416818 NR Description: microtubule associated protein (MAP65/ASE1) family
MSSAVKDQLQQMSTTCDSLLLELNVIWDEVGEPDMARDRMLLELEQECLDVYKRKVDQANRCRAQLRQAIAEAEAELAGICSAMGEPPIHVRQSNQKLQGLREVLNAIVPYLEE

SEQ ID NO: 36226 - protein, 103 aa, Zea mays subsp. mays
  peptide (1)..(103): Ceres Seq. ID no. 15180597
  misc_feature (26)..(102): Pfam Name: MAP65/ASE1 family Pfam Description: Microtubule associated protein
  misc_feature (1)..(102): NCBI GI NO: 34911266 NR Description: cytokinesis regulating protein - like
  misc_feature (1)..(102): NCBI GI NO: 15242132 NR Description: microtubule associated protein (MAP65/ASE1) family
  misc_feature (3)..(102): NCBI GI NO: 28200790 NR Description: 65kD microtubule associated protein
  misc_feature (2)..(102): NCBI GI NO: 15224935 NR Description: microtubule associated protein (MAP65/ASE1) family
  misc_feature (3)..(102): NCBI GI NO: 11558252 NR Description: microtubule-associated protein MAP65-1a
  misc_feature (4)..(102): NCBI GI NO: 15240485 NR Description: microtubule associated protein (MAP65/ASE1) family
  misc_feature (2)..(102): NCBI GI NO: 21539547 NR Description: unknown protein [Arabidopsis thaliana]
  misc_feature (2)..(102): NCBI GI NO: 8778239 NR Description: F10B6.9 [Arabidopsis thaliana]
  misc_feature (2)..(102): NCBI GI NO: 25410943 NR Description: hypothetical protein At2g01910
  misc_feature (1)..(102): NCBI GI NO: 18416818 NR Description: microtubule associated protein (MAP65/ASE1) family
MSTTCDSLLLELNVIWDEVGEPDMARDRMLLELEQECLDVYKRKVDQANRCRAQLRQAIAEAEAELAGICSAMGEPPIHVRQSNQKLQGLREVLNAIVPYLEE

SEQ ID NO: 36227 - protein, 80 aa, Zea mays subsp. mays
  peptide (1)..(80): Ceres Seq. ID no. 15180598
  misc_feature (3)..(79): Pfam Name: MAP65/ASE1 family Pfam Description: Microtubule associated protein
  misc_feature (1)..(79): NCBI GI NO: 34911266 NR Description: cytokinesis regulating protein - like
  misc_feature (1)..(79): NCBI GI NO: 15242132 NR Description: microtubule associated protein (MAP65/ASE1) family
  misc_feature (1)..(79): NCBI GI NO: 28200790 NR Description: 65kD microtubule associated protein
  misc_feature (1)..(79): NCBI GI NO: 15224935 NR Description: microtubule associated protein (MAP65/ASE1) family
  misc_feature (1)..(79): NCBI GI NO: 11558252 NR Description: microtubule-associated protein MAP65-1a
  misc_feature (1)..(79): NCBI GI NO: 15240485 NR Description: microtubule associated protein (MAP65/ASE1) family
  misc_feature (1)..(79): NCBI GI NO: 21539547 NR Description: unknown protein [Arabidopsis thaliana]
  misc_feature (1)..(79): NCBI GI NO: 8778239 NR Description: F10B6.9 [Arabidopsis thaliana]
  misc_feature (1)..(79): NCBI GI NO: 25410943 NR Description: hypothetical protein At2g01910
  misc_feature (1)..(79): NCBI GI NO: 18416818 NR Description: microtubule associated protein (MAP65/ASE1) family
MARDRMLLELEQECLDVYKRKVDQANRCRAQLRQAIAEAEAELAGICSAMGEPPIHVRQSNQKLQGLREVLNAIVPYLEE

SEQ ID NO: 36228 - DNA, 362 bp, Zea mays subsp. mays
  misc_feature (1)..(362): Ceres Seq. ID no. 3624729
ttttctcgtgatcgggargacgtctcctgtaacctaccaagtccttggccatctgaaaacatgcttggtcctcacctttggctatgtcctgcttcacgacccgtttagctggagaaacatacttgggatcctaatcgcggtaatcgggatggttctgtactcgtacttctgcactagagagactcagcaaaaaccagcagaagcctccccgcaagccgttcaggcaaaggagggtgaatcgaacccgctgatctcggactccctgagcgctgccgaaaatggaggcagtgccaccgacgatgaacctctgaaggtaccaatgtggagctcgaagtactcgaaggcgtgaagtggctgttctg

SEQ ID NO: 36229 - protein, 115 aa, Zea mays subsp. mays
  peptide (1)..(115): Ceres Seq. ID no. 3624730
  misc_feature (1)..(115): NCBI GI NO: 34896140 NR Description: P0701D05.25
  misc_feature (1)..(115): NCBI GI NO: 13699188 NR Description: putative glucose-6-phosphate/phosphate-tranlocat or
  misc_feature (1)..(110): NCBI GI NO: 22329373 NR Description: unknown protein; protein id: At1g06890
  misc_feature (1)..(110): NCBI GI NO: 25406945 NR Description: hypothetical protein
  misc_feature (1)..(110): NCBI GI NO: 15224511 NR Description: putative integral membrane protein
  misc_feature (1)..(110): NCBI GI NO: 27311731 NR Description: putative integral membrane protein
  misc_feature (1)..(84): NCBI GI NO: 30683853 NR Description: transporter-related [Arabidopsis thaliana]
  misc_feature (1)..(97): NCBI GI NO: 13384378 NR Description: putative phosphate translocator
  misc_feature (1)..(97): NCBI GI NO: 37535412 NR Description: putative glucose-6-phosphate/phosphate-translocator
  misc_feature (1)..(88): NCBI GI NO: 18411172 NR Description: expressed protein; protein id: At1g76670
  misc_feature (6)..(6): Xaa is any aa, unknown or other
FLVIGXTSPVTYQVLGHLKTCLVLTFGYVLLHDPFSWRNILGILIAVIGMVLYSYFCTRETQQKPAEASPQAVQAKEGESNPLISDSLSAAENGGSATDDEPLKVPMWSSKYSKA

SEQ ID NO: 36230 - protein, 66 aa, Zea mays subsp. mays
  peptide (1)..(66): Ceres Seq. ID no. 3624731
  misc_feature (1)..(66): NCBI GI NO: 34896140 NR Description: P0701D05.25
  misc_feature (1)..(66): NCBI GI NO: 13699188 NR Description: putative glucose-6-phosphate/phosphate-tranlocat or
  misc_feature (1)..(61): NCBI GI NO: 22329373 NR Description: unknown protein; protein id: At1g06890
  misc_feature (1)..(61): NCBI GI NO: 25406945 NR Description: hypothetical protein
  misc_feature (1)..(61): NCBI GI NO: 15224511 NR Description: putative integral membrane protein
  misc_feature (1)..(61): NCBI GI NO: 27311731 NR Description: putative integral membrane protein
  misc_feature (1)..(35): NCBI GI NO: 30683853 NR Description: transporter-related [Arabidopsis thaliana]
  misc_feature (1)..(48): NCBI GI NO: 13384378 NR Description: putative phosphate translocator
  misc_feature (1)..(48): NCBI GI NO: 37535412 NR Description: putative glucose-6-phosphate/phosphate-translocator
  misc_feature (1)..(39): NCBI GI NO: 18411172 NR Description: expressed protein; protein id: At1g76670
MVLYSYFCTRETQQKPAEASPQAVQAKEGESNPLISDSLSAAENGGSATDDEPLKVPMWSSKYSKA

SEQ ID NO: 36231 - DNA, 561 bp, Zea mays subsp. mays
  misc_feature (1)..(561): Ceres Seq. ID no. 4576519
ttcaagagcttgtagaggcaattgtactgcccatgacacataaagaccggttccagaagttgggtattcgtcctccaaaaggggttcttttgtacggaccaccaggaactggcaagacactcatggctcgtgcatgtgctgcacagacgaatgcaacgtttcttaaattagctggtccacaacttgtgcagatgtttattggtgatggagcaaagcttgtccgggatgcattccagcttgccaaagagaaagctccttgtattatatttattgatgagatagatgccattggcaccaaacgttttgatagtgaagttagcggtgatagagaagttcagcggacaatgttggaattattgaatcaactggatggattcagcagcgatgagagaataaaggtcatagctgcaactaaccgtgctgacatccttgaccctgctctgatgcgatctggacggttggaccgaaagattgagttccctcacccatccgaagaagcaagagctagaatcttgcaaatccattcaaggaaaatgaatgtaaatcctgatgtcaactttg

SEQ ID NO: 36232 - protein, 186 aa, Zea mays subsp. mays
  peptide (1)..(186): Ceres Seq. ID no. 4576520
  misc_feature (27)..(185): Pfam Name: AAA Pfam Description: ATPase family associated with various cellular activities
  misc_feature (1)..(185): NCBI GI NO: 1174613 NR Description: 26S PROTEASE REGULATORY SUBUNIT 6A HOMOLOG
  misc_feature (1)..(185): NCBI GI NO: 17297989 NR Description: 26S proteasome regulatory particle triple-A ATPase subunit5a
  misc_feature (1)..(185): NCBI GI NO: 3024434 NR Description: 26S PROTEASE REGULATORY SUBUNIT 6A HOMOLOG
  misc_feature (1)..(185): NCBI GI NO: 15230005 NR Description: 26S proteasome AAA-ATPase subunit RPT5a
  misc_feature (1)..(185): NCBI GI NO: 12697589 NR Description: Tat binding protein like protein [Brassica rapa]
  misc_feature (1)..(185): NCBI GI NO: 1729860 NR Description: 26S PROTEASE REGULATORY SUBUNIT 6A HOMOLOG
  misc_feature (1)..(185): NCBI GI NO: 5669047 NR Description: 19S proteasome regulatory complex subunit S6A
  misc_feature (1)..(185): NCBI GI NO: 23197864 NR Description: 26S proteasome AAA-ATPase subunit RPT5a
  misc_feature (3)..(185): NCBI GI NO: 32400784 NR Description: tat binding protein [Triticum aestivum]
  misc_feature (1)..(185): NCBI GI NO: 3024431 NR Description: 26S protease regulatory subunit 6A homolog
QELVEAIVLPMTHKDRFQKLGIRPPKGVLLYGPPGTGKTLMARACAAQTNATFLKLAGPQLVQMFIGDGAKLVRDAFQLAKEKAPCIIFIDEIDAIGTKRFDSEVSGDREVQRTMLELLNQLDGFSSDERIKVIAATNRADILDPALMRSGRLDRKIEFPHPSEEARARILQIHSRKMNVNPDVNF

SEQ ID NO: 36233 - protein, 176 aa, Zea mays subsp. mays
  peptide (1)..(176): Ceres Seq. ID no. 4576521
  misc_feature (17)..(175): Pfam Name: AAA Pfam Description: ATPase family associated with various cellular activities
  misc_feature (1)..(175): NCBI GI NO: 1174613 NR Description: 26S PROTEASE REGULATORY SUBUNIT 6A HOMOLOG
  misc_feature (1)..(175): NCBI GI NO: 17297989 NR Description: 26S proteasome regulatory particle triple-A ATPase subunit5a
  misc_feature (1)..(175): NCBI GI NO: 3024434 NR Description: 26S PROTEASE REGULATORY SUBUNIT 6A HOMOLOG
  misc_feature (1)..(175): NCBI GI NO: 15230005 NR Description: 26S proteasome AAA-ATPase subunit RPT5a
  misc_feature (1)..(175): NCBI GI NO: 12697589 NR Description: Tat binding protein like protein [Brassica rapa]
  misc_feature (1)..(175): NCBI GI NO: 1729860 NR Description: 26S PROTEASE REGULATORY SUBUNIT 6A HOMOLOG
  misc_feature (1)..(175): NCBI GI NO: 5669047 NR Description: 19S proteasome regulatory complex subunit S6A
  misc_feature (1)..(175): NCBI GI NO: 23197864 NR Description: 26S proteasome AAA-ATPase subunit RPT5a
  misc_feature (1)..(175): NCBI GI NO: 32400784 NR Description: tat binding protein [Triticum aestivum]
  misc_feature (1)..(175): NCBI GI NO: 3024431 NR Description: 26S protease regulatory subunit 6A homolog
MTHKDRFQKLGIRPPKGVLLYGPPGTGKTLMARACAAQTNATFLKLAGPQLVQMFIGDGAKLVRDAFQLAKEKAPCIIFIDEIDAIGTKRFDSEVSGDREVQRTMLELLNQLDGFSSDERIKVIAATNRADILDPALMRSGRLDRKIEFPHPSEEARARILQIHSRKMNVNPDVNF

SEQ ID NO: 36234 - protein, 146 aa, Zea mays subsp. mays
  peptide (1)..(146): Ceres Seq. ID no. 4576522
  misc_feature (1)..(145): Pfam Name: AAA Pfam Description: ATPase family associated with various cellular activities
  misc_feature (1)..(145): NCBI GI NO: 1174613 NR Description: 26S PROTEASE REGULATORY SUBUNIT 6A HOMOLOG
  misc_feature (1)..(145): NCBI GI NO: 17297989 NR Description: 26S proteasome regulatory particle triple-A ATPase subunit5a
  misc_feature (1)..(145): NCBI GI NO: 3024434 NR Description: 26S PROTEASE REGULATORY SUBUNIT 6A HOMOLOG
  misc_feature (1)..(145): NCBI GI NO: 15230005 NR Description: 26S proteasome AAA-ATPase subunit RPT5a
  misc_feature (1)..(145): NCBI GI NO: 12697589 NR Description: Tat binding protein like protein [Brassica rapa]
  misc_feature (1)..(145): NCBI GI NO: 1729860 NR Description: 26S PROTEASE REGULATORY SUBUNIT 6A HOMOLOG
  misc_feature (1)..(145): NCBI GI NO: 5669047 NR Description: 19S proteasome regulatory complex subunit S6A
  misc_feature (1)..(145): NCBI GI NO: 23197864 NR Description: 26S proteasome AAA-ATPase subunit RPT5a
  misc_feature (1)..(145): NCBI GI NO: 32400784 NR Description: tat binding protein [Triticum aestivum]
  misc_feature (1)..(145): NCBI GI NO: 3024431 NR Description: 26S protease regulatory subunit 6A homolog
MARACAAQTNATFLKLAGPQLVQMFIGDGAKLVRDAFQLAKEKAPCIIFIDEIDAIGTKRFDSEVSGDREVQRTMLELLNQLDGFSSDERIKVIAATNRADILDPALMRSGRLDRKIEFPHPSEEARARILQIHSRKMNVNPDVNF

SEQ ID NO: 36235 - DNA, 885 bp, Zea mays subsp. mays
  misc_feature (1)..(885): Ceres Seq. ID no. 12468373
  misc_feature (831)..(831): n is a, c, t, g, unknown, or other
  misc_feature (695)..(695): n is a, c, t, g, unknown, or other
  misc_feature (601)..(601): n is a, c, t, g, unknown, or other
  misc_feature (861)..(861): n is a, c, t, g, unknown, or other
gaatatattgaagatcctgatcaagttaagccagagggatatgattcaattcctaaagagatacctgatcccaaggacaaaaagcctgagtcatgggatgacgatgacgatggtacatggaagcctagaatgatacctaatccagaatacaagggaccatggaagcggaagaaaattaagaatcctaactacaaaggaaaatggaagaccccatggattgtcaatccagagtttgaggatgacccagacctatatgttctgaaacctttgcagtatgtggggattgaagtatggcaggtcaaagctggttcagtttttgacaacattttgatttgcgatgacccagactatgcaagacatgttgtagatgaaacttttgctgcaaataaggaggctgaaaaggaggcctttgaaggagctgaaagaaagaggaaggctagagaagaagaggaagcacggagggcacgggaggaaggggagagacgaaggcgggagagggatagggaccgcggcagggaccgatacaaggatagatataagcgtcataggcactacgactaccatgacgagctatagatcctgtattcttttgaaatctgcncgatattggatgtctgtctacggagagcgcacgtgcaaaacttgtatgttgtactcacggatgaagctgaacctgtgattttggcgatgggtanagattggccatcgcgtctgtaactaaatttccacgttgcgatgcaatatgagctgtagtactgtcctcgcactactatttaccgtttgtgctgcatatgtgatataaaccttcaagaaacacacacacgaagggtntgaatgagcacggcctttgttgtttgcttnttataaaaaagaactgttttatcg

SEQ ID NO: 36236 - protein, 191 aa, Zea mays subsp. mays
  peptide (1)..(191): Ceres Seq. ID no. 12468374
  misc_feature (1)..(111): Pfam Name: Pfam Description:  Calreticulin family
  misc_feature (1)..(191): NCBI GI NO: 34907604 NR Description: putative calreticulin
  misc_feature (1)..(191): NCBI GI NO: 18390896 NR Description: calreticulin, putative; protein id: At1g08450
  misc_feature (1)..(191): NCBI GI NO: 12643531 NR Description: Calreticulin 3 precursor
  misc_feature (1)..(191): NCBI GI NO: 27311777 NR Description: calreticulin, putative [Arabidopsis thaliana]
  misc_feature (1)..(150): NCBI GI NO: 33517365 NR Description: calreticulin 3 [Brassica rapa subsp. pekinensis]
  misc_feature (1)..(191): NCBI GI NO: 11131949 NR Description: Calreticulin precursor
  misc_feature (1)..(191): NCBI GI NO: 11131769 NR Description: Calreticulin precursor
  misc_feature (1)..(191): NCBI GI NO: 7441497 NR Description: calreticulin - common tobacco (fragment)
  misc_feature (1)..(191): NCBI GI NO: 11131745 NR Description: Calreticulin precursor
  misc_feature (1)..(180): NCBI GI NO: 9858814 NR Description: calreticulin [Pinus taeda]
EYIEDPDQVKPEGYDSIPKEIPDPKDKKPESWDDDDDGTWKPRMIPNPEYKGPWKRKKIKNPNYKGKWKTPWIVNPEFEDDPDLYVLKPLQYVGIEVWQVKAGSVFDNILICDDPDYARHVVDETFAANKEAEKEAFEGAERKRKAREEEEARRAREEGERRRRERDRDRGRDRYKDRYKRHRHYDYHDEL

SEQ ID NO: 36237 - protein, 148 aa, Zea mays subsp. mays
  peptide (1)..(148): Ceres Seq. ID no. 12468375
  misc_feature (1)..(68): Pfam Name: Pfam Description:  Calreticulin family
  misc_feature (1)..(148): NCBI GI NO: 34907604 NR Description: putative calreticulin
  misc_feature (1)..(148): NCBI GI NO: 18390896 NR Description: calreticulin, putative; protein id: At1g08450
  misc_feature (1)..(148): NCBI GI NO: 12643531 NR Description: Calreticulin 3 precursor
  misc_feature (1)..(148): NCBI GI NO: 27311777 NR Description: calreticulin, putative [Arabidopsis thaliana]
  misc_feature (1)..(107): NCBI GI NO: 33517365 NR Description: calreticulin 3 [Brassica rapa subsp. pekinensis]
  misc_feature (1)..(148): NCBI GI NO: 11131949 NR Description: Calreticulin precursor
  misc_feature (1)..(148): NCBI GI NO: 11131769 NR Description: Calreticulin precursor
  misc_feature (1)..(148): NCBI GI NO: 7441497 NR Description: calreticulin - common tobacco (fragment)
  misc_feature (1)..(148): NCBI GI NO: 11131745 NR Description: Calreticulin precursor
  misc_feature (1)..(137): NCBI GI NO: 9858814 NR Description: calreticulin [Pinus taeda]
MIPNPEYKGPWKRKKIKNPNYKGKWKTPWIVNPEFEDDPDLYVLKPLQYVGIEVWQVKAGSVFDNILICDDPDYARHVVDETFAANKEAEKEAFEGAERKRKAREEEEARRAREEGERRRRERDRDRGRDRYKDRYKRHRHYDYHDEL

SEQ ID NO: 36238 - protein, 103 aa, Zea mays subsp. mays
  peptide (1)..(103): Ceres Seq. ID no. 12468376
  misc_feature (78)..(78): Xaa is any aa, unknown or other
MKLLLQIRRLKRRPLKELKERGRLEKKRKHGGHGRKGRDEGGRGIGTAAGTDTRIDISVIGTTTTMTSYRSCILLKSXRYWMSVYGERTCKTCMLYSRMKLNL

SEQ ID NO: 36239 - DNA, 814 bp, Zea mays subsp. mays
  misc_feature (1)..(814): Ceres Seq. ID no. 12544477
atagataagggcgactccaggcccttgcgaaccctagcgccgcaccctcccgcccaccgccgtcgccgcccaaccgcagtaaggaggaaggagcaggaagatgccggcggggcacgggctgcggtcgcggacccgcgacctgttcgcgcggcccttccgcaagaaggggtacatcccactcaccacgtacctgcgcacctacaagatcggcgactacgtcgacgtcaaggttaacggcgccgtgcacaagggcatgccgcacaagttctaccacggccgcaccgggagcgtctggaacgtcaccaagcgcgccatcggcgtcgagatcaacaagcaggttaatggccgcatcatcaggaagcggatccatgtccgcgtggagcatgtgcagccctcccgttgcacggaggagttccgcctgaggaaggcgaagaatgaccagctgaaggcggatgccaaaaagcgcggcgaggttatcagcaccaagaggcagccattgggtcccaagcccggcttcatggtcgagggcaccaccattgagaccgtaactcccatcccatatgatgtggtcaatgatctcaagggtggatactaggttgtttggtccatctacctgcagtacccagttctacatctgtgttactctagtgcgtgcaactttgctcactctgagcagtagtatgaacctgttgtctgttcctgttgaaagatttcccattttaggtgcaaacctgagtttctccgaacgcgttataccctgaccttgcttctgagaacgaagatgtgctatttttgcattttgttgtttcgaccg

SEQ ID NO: 36240 - protein, 164 aa, Zea mays subsp. mays
  peptide (1)..(164): Ceres Seq. ID no. 12544478
  misc_feature (2)..(100): Pfam Name: Pfam Description:  Ribosomal protein L21e
  misc_feature (1)..(164): NCBI GI NO: 37535194 NR Description: 60S ribosomal protein L21
  misc_feature (1)..(164): NCBI GI NO: 11276828 NR Description: ribosomal protein L21 [imported] - rice
  misc_feature (1)..(164): NCBI GI NO: 18406015 NR Description: 60S ribosomal protein L21, putative
  misc_feature (1)..(164): NCBI GI NO: 18391042 NR Description: putative 60S ribosomal protein L21
  misc_feature (1)..(157): NCBI GI NO: 15213768 NR Description: ribosomal protein L21 [Spodoptera frugiperda]
  misc_feature (1)..(155): NCBI GI NO: 6094029 NR Description: 60S RIBOSOMAL PROTEIN L21
  misc_feature (1)..(155): NCBI GI NO: 40741182 NR Description: hypothetical protein AN4802.2
  misc_feature (1)..(157): NCBI GI NO: 38048363 NR Description: similar to Drosophila melanogaster CG12775
  misc_feature (1)..(157): NCBI GI NO: 20129705 NR Description: CG12775-PA [Drosophila melanogaster]
  misc_feature (1)..(155): NCBI GI NO: 6319668 NR Description: Homology to rat L21; Rpl21ap
MPAGHGLRSRTRDLFARPFRKKGYIPLTTYLRTYKIGDYVDVKVNGAVHKGMPHKFYHGRTGSVWNVTKRAIGVEINKQVNGRIIRKRIHVRVEHVQPSRCTEEFRLRKAKNDQLKADAKKRGEVISTKRQPLGPKPGFMVEGTTIETVTPIPYDVVNDLKGGY

SEQ ID NO: 36241 - protein, 113 aa, Zea mays subsp. mays
  peptide (1)..(113): Ceres Seq. ID no. 12544479
  misc_feature (1)..(113): NCBI GI NO: 37535194 NR Description: 60S ribosomal protein L21
  misc_feature (1)..(113): NCBI GI NO: 11276828 NR Description: ribosomal protein L21 [imported] - rice
  misc_feature (1)..(113): NCBI GI NO: 18406015 NR Description: 60S ribosomal protein L21, putative
  misc_feature (1)..(113): NCBI GI NO: 18391042 NR Description: putative 60S ribosomal protein L21
  misc_feature (1)..(106): NCBI GI NO: 15213768 NR Description: ribosomal protein L21 [Spodoptera frugiperda]
  misc_feature (1)..(104): NCBI GI NO: 6094029 NR Description: 60S RIBOSOMAL PROTEIN L21
  misc_feature (1)..(104): NCBI GI NO: 40741182 NR Description: hypothetical protein AN4802.2
  misc_feature (1)..(106): NCBI GI NO: 38048363 NR Description: similar to Drosophila melanogaster CG12775
  misc_feature (1)..(106): NCBI GI NO: 20129705 NR Description: CG12775-PA [Drosophila melanogaster]
  misc_feature (1)..(104): NCBI GI NO: 6319668 NR Description: Homology to rat L21; Rpl21ap
MPHKFYHGRTGSVWNVTKRAIGVEINKQVNGRIIRKRIHVRVEHVQPSRCTEEFRLRKAKNDQLKADAKKRGEVISTKRQPLGPKPGFMVEGTTIETVTPIPYDVVNDLKGGY

SEQ ID NO: 36242 - DNA, 2064 bp, Zea mays subsp. mays; identical to SEQ ID NO: 31202
  misc_feature (1)..(2064): Ceres Seq. ID no. 13622175

SEQ ID NO: 36243 - protein, 562 aa, Zea mays subsp. mays; identical to SEQ ID NO: 31203
  peptide (1)..(562): Ceres Seq. ID no. 13622176
  misc_feature (133)..(408): Pfam Name: Pfam Description:  Nucleotidyl transferase
  misc_feature (53)..(562): NCBI GI NO: 13892040 NR Description: ADP-glucose pyrophosphorylase small subunit
  misc_feature (56)..(562): NCBI GI NO: 13508485 NR Description: ADP-glucose pyrophosphorylase small subunit
  misc_feature (53)..(562): NCBI GI NO: 27464770 NR Description: ADP-glucose pyrophosphorylase small subunit
  misc_feature (56)..(562): NCBI GI NO: 14582768 NR Description: ADP-glucose pyrophosphorylase small subunit
  misc_feature (53)..(562): NCBI GI NO: 38423972 NR Description: putative glucose-1-phosphate adenylyltransferase
  misc_feature (56)..(562): NCBI GI NO: 1707940 NR Description: Glucose-1-phosphate adenylyltransferase small subunit
  misc_feature (104)..(562): NCBI GI NO: 21666502 NR Description: ADP-glucose pyrophosphorylase small subunit
  misc_feature (96)..(562): NCBI GI NO: 15238933 NR Description: glucose-1-phosphate adenylyltransferase
  misc_feature (51)..(562): NCBI GI NO: 1237080 NR Description: ADP-glucose pyrophosphorylase [Pisum sativum]
  misc_feature (104)..(562): NCBI GI NO: 17865468 NR Description: Glucose-1-phosphate adenylyltransferase small subunit

SEQ ID NO: 36244 - protein, 510 aa, Zea mays subsp. mays; identical to SEQ ID NO: 31204
  peptide (1)..(510): Ceres Seq. ID no. 13622177
  misc_feature (81)..(356): Pfam Name: Pfam Description:  Nucleotidyl transferase
  misc_feature (1)..(510): NCBI GI NO: 13892040 NR Description: ADP-glucose pyrophosphorylase small subunit
  misc_feature (4)..(510): NCBI GI NO: 13508485 NR Description: ADP-glucose pyrophosphorylase small subunit
  misc_feature (1)..(510): NCBI GI NO: 27464770 NR Description: ADP-glucose pyrophosphorylase small subunit
  misc_feature (4)..(510): NCBI GI NO: 14582768 NR Description: ADP-glucose pyrophosphorylase small subunit
  misc_feature (1)..(510): NCBI GI NO: 38423972 NR Description: putative glucose-1-phosphate adenylyltransferase
  misc_feature (4)..(510): NCBI GI NO: 1707940 NR Description: Glucose-1-phosphate adenylyltransferase small subunit
  misc_feature (52)..(510): NCBI GI NO: 21666502 NR Description: ADP-glucose pyrophosphorylase small subunit
  misc_feature (44)..(510): NCBI GI NO: 15238933 NR Description: glucose-1-phosphate adenylyltransferase
  misc_feature (1)..(510): NCBI GI NO: 1237080 NR Description: ADP-glucose pyrophosphorylase [Pisum sativum]
  misc_feature (52)..(510): NCBI GI NO: 17865468 NR Description: Glucose-1-phosphate adenylyltransferase small subunit

SEQ ID NO: 36245 - protein, 506 aa, Zea mays subsp. mays; identical to SEQ ID NO: 31205
  peptide (1)..(506): Ceres Seq. ID no. 13622178
  misc_feature (77)..(352): Pfam Name: Pfam Description:  Nucleotidyl transferase
  misc_feature (1)..(506): NCBI GI NO: 13892040 NR Description: ADP-glucose pyrophosphorylase small subunit
  misc_feature (1)..(506): NCBI GI NO: 13508485 NR Description: ADP-glucose pyrophosphorylase small subunit
  misc_feature (1)..(506): NCBI GI NO: 27464770 NR Description: ADP-glucose pyrophosphorylase small subunit
  misc_feature (1)..(506): NCBI GI NO: 14582768 NR Description: ADP-glucose pyrophosphorylase small subunit
  misc_feature (1)..(506): NCBI GI NO: 38423972 NR Description: putative glucose-1-phosphate adenylyltransferase
  misc_feature (1)..(506): NCBI GI NO: 1707940 NR Description: Glucose-1-phosphate adenylyltransferase small subunit
  misc_feature (48)..(506): NCBI GI NO: 21666502 NR Description: ADP-glucose pyrophosphorylase small subunit
  misc_feature (40)..(506): NCBI GI NO: 15238933 NR Description: glucose-1-phosphate adenylyltransferase
  misc_feature (1)..(506): NCBI GI NO: 1237080 NR Description: ADP-glucose pyrophosphorylase [Pisum sativum]
  misc_feature (48)..(506): NCBI GI NO: 17865468 NR Description: Glucose-1-phosphate adenylyltransferase small subunit

SEQ ID NO: 36246 - DNA, 889 bp, Zea mays subsp. mays
  misc_feature (1)..(889): Ceres Seq. ID no. 12468317
acgacagcgccggcggccagggagccaacagtgccgccggtggcggcggcttcctcacgggaatcatcaccatcgtaatcgcctgcgtctgctggtccgccttcttcgtgctccaggccaacacgctcaagagctaccccgcggagctgtcgctgacggcgctcatctgcctcatggggtcgctcatgagcggctccgtcgcgctcgtcgccgagcgccgcaacacccaggcctgggtcatcggcttcgacacgcgcctcttcaccgccgtctacgccggcatagtgtgctccggcgtggcatactacgtgcaaggcatcgtgtccaggcaacgaggcccggtgttcgtcacggccttcaaccctctctgcatgatcatcaccgccgtcatgggctccatcatactcaaagaagagatcactctcggaagcgtgattggcgctgcgatcatcgtgttaggcctgtacgcgctcatctggggcaagagcaaggacagcgtggccgacgtctcagcatcaggcggctccaagggcgcatcagcggctgccgccgtcgagctgcccatcaccttggcgcagcccaacggcaacggcaactgcaagcacgaggtcggcagcggccgcggcgtcgtcttcgacgtcgagacgccggcggccaacaacggccattactagtagctacagctagtatatctatctatctactactcctaaacctaaatcaacctgcccggccgtcagttgtagctatagacactgacacacgcagatagaagcgtcctgccgcaggttatatatggctgatcgagtggacgttgacgcactgcacatacatatgccgtgcgattttttgtttgttttccgtttttgttaattattaatttcgcctt

SEQ ID NO: 36247 - protein, 256 aa, Zea mays subsp. mays
  peptide (1)..(256): Ceres Seq. ID no. 12468318
RQRRRPGSQQCRRWRRLPHGNHHHRNRLRLLVRLLRAPGQHAQELPRGAVADGAHLPHGVAHERLRRARRRAPQHPGLGHRLRHAPLHRRLRRHSVLRRGILRARHRVQATRPGVRHGLQPSLHDHHRRHGLHHTQRRDHSRKRDWRCDHRVRPVRAHLGQEQGQRGRRLSIRRLQGRISGCRRRAAHHLGAAQRQRQLQARGRQRPRRRLRRRDAGGQQRPLLVATASISIYLLLLNLNQPARPSVVAIDTDTRR

SEQ ID NO: 36248 - protein, 223 aa, Zea mays subsp. mays
  peptide (1)..(223): Ceres Seq. ID no. 12468319
  misc_feature (30)..(159): Pfam Name: Pfam Description:  Integral membrane protein DUF6
  misc_feature (9)..(164): NCBI GI NO: 37532392 NR Description: putative nodulin-like protein
  misc_feature (1)..(164): NCBI GI NO: 6552743 NR Description: T26F17.11 [Arabidopsis thaliana]
  misc_feature (1)..(164): NCBI GI NO: 15219123 NR Description: nodulin-like protein; protein id: At1g21890
  misc_feature (1)..(164): NCBI GI NO: 17529004 NR Description: putative nodulin protein [Arabidopsis thaliana]
  misc_feature (20)..(164): NCBI GI NO: 15225480 NR Description: nodulin-like protein; protein id: At2g39510.1
  misc_feature (5)..(203): NCBI GI NO: 21553757 NR Description: nodulin-like protein [Arabidopsis thaliana]
  misc_feature (1)..(196): NCBI GI NO: 21593603 NR Description: nodulin-like protein [Arabidopsis thaliana]
  misc_feature (5)..(203): NCBI GI NO: 15224291 NR Description: nodulin-like protein; protein id: At2g37460
  misc_feature (1)..(196): NCBI GI NO: 15236455 NR Description: nodulin-like protein; protein id: At4g08290
  misc_feature (1)..(196): NCBI GI NO: 26452235 NR Description: putative nodulin [Arabidopsis thaliana]
DSAGGQGANSAAGGGGFLTGIITIVIACVCWSAFFVLQANTLKSYPAELSLTALICLMGSLMSGSVALVAERRNTQAWVIGFDTRLFTAVYAGIVCSGVAYYVQGIVSRQRGPVFVTAFNPLCMIITAVMGSIILKEEITLGSVIGAAIIVLGLYALIWGKSKDSVADVSASGGSKGASAAAAVELPITLAQPNGNGNCKHEVGSGRGVVFDVETPAANNGHY

SEQ ID NO: 36249 - protein, 166 aa, Zea mays subsp. mays
  peptide (1)..(166): Ceres Seq. ID no. 12468320
  misc_feature (1)..(102): Pfam Name: Pfam Description:  Integral membrane protein DUF6
  misc_feature (1)..(107): NCBI GI NO: 37532392 NR Description: putative nodulin-like protein
  misc_feature (1)..(107): NCBI GI NO: 6552743 NR Description: T26F17.11 [Arabidopsis thaliana]
  misc_feature (1)..(107): NCBI GI NO: 17529004 NR Description: putative nodulin protein [Arabidopsis thaliana]
  misc_feature (1)..(107): NCBI GI NO: 15219123 NR Description: nodulin-like protein; protein id: At1g21890
  misc_feature (1)..(107): NCBI GI NO: 15225480 NR Description: nodulin-like protein; protein id: At2g39510.1
  misc_feature (1)..(146): NCBI GI NO: 21553757 NR Description: nodulin-like protein [Arabidopsis thaliana]
  misc_feature (1)..(139): NCBI GI NO: 21593603 NR Description: nodulin-like protein [Arabidopsis thaliana]
  misc_feature (1)..(146): NCBI GI NO: 15224291 NR Description: nodulin-like protein; protein id: At2g37460
  misc_feature (1)..(139): NCBI GI NO: 15236455 NR Description: nodulin-like protein; protein id: At4g08290
  misc_feature (1)..(139): NCBI GI NO: 26452235 NR Description: putative nodulin [Arabidopsis thaliana]
MGSLMSGSVALVAERRNTQAWVIGFDTRLFTAVYAGIVCSGVAYYVQGIVSRQRGPVFVTAFNPLCMIITAVMGSIILKEEITLGSVIGAAIIVLGLYALIWGKSKDSVADVSASGGSKGASAAAAVELPITLAQPNGNGNCKHEVGSGRGVVFDVETPAANNGHY

SEQ ID NO: 36250 - DNA, 513 bp, Zea mays subsp. mays
  misc_feature (1)..(513): Ceres Seq. ID no. 12468302
aaagacaacgttctggatggcctcaccgataggatccacatgttgcacgatgcaatagcgtctgatgcggcccaaccgaagactgaagatacggaacatgcatttgaaaacttcttttccagccgtgtaatcagaagaatggtaatcgactgcccagcttttgcagtcactctctggagaaaggctcttcagggcaagtgcaagatatgggctgaaggacacagttcgaaggtagttgcgggtttcctggagtcgccaagtacggaggtcaaggatcttgcaaaacctgagttgcagccgctggttgatgctggcatccttaaagtgccagaccctaaggttgttcaaaaatgactggaggaccatcccttgttaaaaattgttaagtcacggataggtttttttgaagctcgttctgccgataaaaattgttaagtcactcgttcgtgtgtacgccagtccgttgtacacttaccctggatatatggtgaatcggatacgttattttgtttt

SEQ ID NO: 36251 - protein, 117 aa, Zea mays subsp. mays
  peptide (1)..(117): Ceres Seq. ID no. 12468303
  misc_feature (1)..(117): NCBI GI NO: 34897258 NR Description: unknown protein
  misc_feature (2)..(113): NCBI GI NO: 18401257 NR Description: expressed protein; protein id: At3g16810
KDNVLDGLTDRIHMLHDAIASDAAQPKTEDTEHAFENFFSSRVIRRMVIDCPAFAVTLWRKALQGKCKIWAEGHSSKVVAGFLESPSTEVKDLAKPELQPLVDAGILKVPDPKVVQK

SEQ ID NO: 36252 - protein, 104 aa, Zea mays subsp. mays
  peptide (1)..(104): Ceres Seq. ID no. 12468304
  misc_feature (1)..(104): NCBI GI NO: 34897258 NR Description: unknown protein
  misc_feature (1)..(100): NCBI GI NO: 18401257 NR Description: expressed protein; protein id: At3g16810
MLHDAIASDAAQPKTEDTEHAFENFFSSRVIRRMVIDCPAFAVTLWRKALQGKCKIWAEGHSSKVVAGFLESPSTEVKDLAKPELQPLVDAGILKVPDPKVVQK

SEQ ID NO: 36253 - protein, 71 aa, Zea mays subsp. mays
  peptide (1)..(71): Ceres Seq. ID no. 12468305
  misc_feature (1)..(71): NCBI GI NO: 34897258 NR Description: unknown protein
  misc_feature (1)..(67): NCBI GI NO: 18401257 NR Description: expressed protein; protein id: At3g16810
MVIDCPAFAVTLWRKALQGKCKIWAEGHSSKVVAGFLESPSTEVKDLAKPELQPLVDAGILKVPDPKVVQK

SEQ ID NO: 36254 - DNA, 913 bp, Zea mays subsp. mays
  misc_feature (1)..(913): Ceres Seq. ID no. 12468286
attgatggtgatcgttagtgagctactaccagggatgtcactgaaaagttacctgcatagcatacggcctagccaattagatacacacactgcaataagctatgcactggacatagctcatgcaatggactgtttacatgccaatggcataatacatagagacctgaaacctgataatttattgcttacagcaaatcgcaagaagctaaaacttactgattttggacttgcacgtgaagaaactgtgactgaaatgatgactgctgaaactgggacttaccgatggatggccccagagctatacagcacagtcacacttcgacgtggtgagaaaaagcattacacaaataaagtggatgtgtacagctttggcattgttttgtgggaattattgaccaatagaatgccatttgaaggcatgtcgaatctacaagctgcatatgctgctgcttttcagcaaaagcgcccagctctccctgaggagaccccccaggagcttgtgttcatagtacaatcatgctgggttgaggatcctgccatgcgacccagtttcagccagatcatccgaatgcttgaaactttcattatgacaatacatccacctccgctttcagagccaaacgaaggcgaggaatcggaagaaacgaggtcgtcactgagcagtaggagctcctctggctcctcgctcgtttctcgcgcgacaagcaagctctcggtcgtccgccacctcttcgtctcaaagaagacaggcaatgggaaggcgtgatgcgccatgccctgagacgcttttcttcggtgctgtaaagatgctagcctaggtgatgcgcaatacaagagggaacttgttcagtgtagagtagctgttgtattgatgttacaaaaggggaaagttgaagtgcagcttttgcaagcc

SEQ ID NO: 36255 - protein, 254 aa, Zea mays subsp. mays
  peptide (1)..(254): Ceres Seq. ID no. 12468287
  misc_feature (1)..(253): NCBI GI NO: 28876011 NR Description: putative protein kinase
  misc_feature (1)..(251): NCBI GI NO: 30679428 NR Description: protein kinase, putative [Arabidopsis thaliana]
  misc_feature (1)..(251): NCBI GI NO: 11259780 NR Description: protein kinase ATN1-like protein
  misc_feature (1)..(231): NCBI GI NO: 15232197 NR Description: putative protein kinase, ATN1
  misc_feature (1)..(231): NCBI GI NO: 2129698 NR Description: protein kinase ATN1 (EC 2
  misc_feature (1)..(228): NCBI GI NO: 32815816 NR Description: protein kinase [Cucumis sativus]
  misc_feature (1)..(232): NCBI GI NO: 15240630 NR Description: protein kinase ATN1-like protein
  misc_feature (1)..(206): NCBI GI NO: 15237443 NR Description: protein kinase - like protein
  misc_feature (2)..(221): NCBI GI NO: 15240070 NR Description: protein kinase ATN1-like protein
  misc_feature (2)..(219): NCBI GI NO: 15230296 NR Description: protein kinase ATN1 - like protein
LMVIVSELLPGMSLKSYLHSIRPSQLDTHTAISYALDIAHAMDCLHANGIIHRDLKPDNLLLTANRKKLKLTDFGLAREETVTEMMTAETGTYRWMAPELYSTVTLRRGEKKHYTNKVDVYSFGIVLWELLTNRMPFEGMSNLQAAYAAAFQQKRPALPEETPQELVFIVQSCWVEDPAMRPSFSQIIRMLETFIMTIHPPPLSEPNEGEESEETRSSLSSRSSSGSSLVSRATSKLSVVRHLFVSKKTGNGKA

SEQ ID NO: 36256 - protein, 253 aa, Zea mays subsp. mays
  peptide (1)..(253): Ceres Seq. ID no. 12468288
  misc_feature (1)..(252): NCBI GI NO: 28876011 NR Description: putative protein kinase
  misc_feature (1)..(250): NCBI GI NO: 30679428 NR Description: protein kinase, putative [Arabidopsis thaliana]
  misc_feature (1)..(250): NCBI GI NO: 11259780 NR Description: protein kinase ATN1-like protein
  misc_feature (1)..(230): NCBI GI NO: 15232197 NR Description: putative protein kinase, ATN1
  misc_feature (1)..(230): NCBI GI NO: 2129698 NR Description: protein kinase ATN1 (EC 2
  misc_feature (1)..(227): NCBI GI NO: 32815816 NR Description: protein kinase [Cucumis sativus]
  misc_feature (1)..(231): NCBI GI NO: 15240630 NR Description: protein kinase ATN1-like protein
  misc_feature (1)..(205): NCBI GI NO: 15237443 NR Description: protein kinase - like protein
  misc_feature (1)..(220): NCBI GI NO: 15240070 NR Description: protein kinase ATN1-like protein
  misc_feature (1)..(218): NCBI GI NO: 15230296 NR Description: protein kinase ATN1 - like protein
MVIVSELLPGMSLKSYLHSIRPSQLDTHTAISYALDIAHAMDCLHANGIIHRDLKPDNLLLTANRKKLKLTDFGLAREETVTEMMTAETGTYRWMAPELYSTVTLRRGEKKHYTNKVDVYSFGIVLWELLTNRMPFEGMSNLQAAYAAAFQQKRPALPEETPQELVFIVQSCWVEDPAMRPSFSQIIRMLETFIMTIHPPPLSEPNEGEESEETRSSLSSRSSSGSSLVSRATSKLSVVRHLFVSKKTGNGKA

SEQ ID NO: 36257 - protein, 243 aa, Zea mays subsp. mays
  peptide (1)..(243): Ceres Seq. ID no. 12468289
  misc_feature (1)..(242): NCBI GI NO: 28876011 NR Description: putative protein kinase
  misc_feature (1)..(240): NCBI GI NO: 30679428 NR Description: protein kinase, putative [Arabidopsis thaliana]
  misc_feature (1)..(240): NCBI GI NO: 11259780 NR Description: protein kinase ATN1-like protein
  misc_feature (1)..(220): NCBI GI NO: 15232197 NR Description: putative protein kinase, ATN1
  misc_feature (1)..(220): NCBI GI NO: 2129698 NR Description: protein kinase ATN1 (EC 2
  misc_feature (1)..(217): NCBI GI NO: 32815816 NR Description: protein kinase [Cucumis sativus]
  misc_feature (1)..(221): NCBI GI NO: 15240630 NR Description: protein kinase ATN1-like protein
  misc_feature (1)..(195): NCBI GI NO: 15237443 NR Description: protein kinase - like protein
  misc_feature (1)..(210): NCBI GI NO: 15240070 NR Description: protein kinase ATN1-like protein
  misc_feature (1)..(208): NCBI GI NO: 15230296 NR Description: protein kinase ATN1 - like protein
MSLKSYLHSIRPSQLDTHTAISYALDIAHAMDCLHANGIIHRDLKPDNLLLTANRKKLKLTDFGLAREETVTEMMTAETGTYRWMAPELYSTVTLRRGEKKHYTNKVDVYSFGIVLWELLTNRMPFEGMSNLQAAYAAAFQQKRPALPEETPQELVFIVQSCWVEDPAMRPSFSQIIRMLETFIMTIHPPPLSEPNEGEESEETRSSLSSRSSSGSSLVSRATSKLSVVRHLFVSKKTGNGKA

SEQ ID NO: 36258 - DNA, 532 bp, Zea mays subsp. mays
  misc_feature (1)..(532): Ceres Seq. ID no. 3625134
gatcaaatcgactggaaacgcagatacggaaaatacaagcccattgttgakccagcaaaatgccagaagtgtaataagcgaaacgtccggcaagcataccataacgtatgcagagattgctccaaggacctcggcatatgtgctaagtgctgcacatgtgttaatgagcttgtcggaagggatgcgaatgaggaggaaagtgaacgcaagtcactagaagaggctgtcagaggtgctagggagagggaacgacgtacacttcttcgtattgttattgagatgcaagtggaatgtgactttggttccttattatgaacaaaggcaaaggtggggagagtgggccgtcagtcccaaagattgctgacagaagtcgagaaggtgatatctttcctgctggatcacttgatgaatacgccgaacaaactagagagcaagaggaagatgactcagatgtagaggctggagattttgtggaarattaaagtttggaatgctttatgctgtaaagacratactttctgtgatgcctatg

SEQ ID NO: 36259 - protein, 104 aa, Zea mays subsp. mays
  peptide (1)..(104): Ceres Seq. ID no. 3625135
  misc_feature (1)..(91): NCBI GI NO: 34909774 NR Description: P0512C01.29
  misc_feature (1)..(89): NCBI GI NO: 15232864 NR Description: unknown protein; protein id: At3g02220.1
  misc_feature (1)..(89): NCBI GI NO: 26453098 NR Description: unknown protein [Arabidopsis thaliana]
  misc_feature (3)..(89): NCBI GI NO: 31197373 NR Description: ENSANGP00000016345 [Anopheles gambiae]
  misc_feature (3)..(89): NCBI GI NO: 31202629 NR Description: ENSANGP00000015213 [Anopheles gambiae]
  misc_feature (1)..(89): NCBI GI NO: 24642765 NR Description: CG8675-PA [Drosophila melanogaster]
  misc_feature (3)..(82): NCBI GI NO: 13384816 NR Description: RIKEN cDNA 1110059E24 [Mus musculus]
  misc_feature (3)..(50): NCBI GI NO: 16552651 NR Description: unnamed protein product [Homo sapiens]
  misc_feature (3)..(85): NCBI GI NO: 34862080 NR Description: similar to RIKEN cDNA 1110059E24
  misc_feature (17)..(17): Xaa is any aa, unknown or other
DQIDWKRRYGKYKPIVXPAKCQKCNKRNVRQAYHNVCRDCSKDLGICAKCCTCVNELVGRDANEEESERKSLEEAVRGARERERRTLLRIVIEMQVECDFGSLL

SEQ ID NO: 36260 - protein, 71 aa, Zea mays subsp. mays
  peptide (1)..(71): Ceres Seq. ID no. 3625136
  misc_feature (17)..(17): Xaa is any aa, unknown or other
IKSTGNADTENTSPLLXQQNARSVISETSGKHTITYAEIAPRTSAYVLSAAHVLMSLSEGMRMRRKVNASH

SEQ ID NO: 36261 - protein, 56 aa, Zea mays subsp. mays
  peptide (1)..(56): Ceres Seq. ID no. 3625137
  misc_feature (1)..(55): NCBI GI NO: 34909774 NR Description: P0512C01.29
  misc_feature (56)..(56): Xaa is any aa, unknown or other
MNKGKGGESGPSVPKIADRSREGDIFPAGSLDEYAEQTREQEEDDSDVEAGDFVEX

SEQ ID NO: 36262 - DNA, 1178 bp, Zea mays subsp. mays
  misc_feature (1)..(1178): Ceres Seq. ID no. 14305367
agaggagtcagtatttgagctttctttgtttgctgagtcattcagtgaaatgcttcaacacagaatgggttgtgttatcctgtcttttcttgagaaattgcacaggcgatatgttgtgaagaggaatcagcgtaagcgccaaagagaggaagatctaaagaaagaagagaaatcttcagagaagcggtctaagactactcatgagactactaaaactgaaagtgttgataatccaggaggcagctttaaaatgacaaaagagggtgaagaaaagatgagcacagatcaatctgcaaatgtccatgctgaactgtcaaaagagggtcagataaaacttggcaccgatcatccaattgctaaccatggagaaccagcaaaagggggtgatgaaaatatggaggaagatcctgaatacgaggaagatcctgaagaagtagaagtatatgaagatgacgaggacatggatgatgctcacgctgaagaacagattgcagaacagaatgagaacacaaacgacagagagattaagccaaaagaagtagcgacaacagatggtggaaataacaaaagtacaagacagcctgaagtagaaaatgttactaatatccatgaaagagctgcttcaatggaagaaaagcagtccgtgccagagataggagatttggtgggaggtggagaaaaggtagttagtaaagagattaagccagcaaaagatgaggtgatcgacaaggacctattgcaggccttcaggtactttgacataaatggagcaggatatctcaaggttgatgatttaaaatgtattcttcacaacatggggaagtttttatcaagcagggacgtgaaggacttggttcaaattgctcttgttgagagcaattctgcaagggacaatcgcataatctatcctaagcttgtgaagattgttgacctgtaatctggcactgcttggcccgcgtcagtccccttgaagttaaccatgctatgatcgttgagaagtcagttatgagaaactattttgtttacttattaatgggttcactgccatttttgtggctacctgtttctacgattatgctacaagcagctgcttttcgtttcgatgaatgttttttgtggaattataagtcatgaacttaatcgatgttgcctcatttcgtaaaagaggtgtttgtgtc

SEQ ID NO: 36263 - protein, 311 aa, Zea mays subsp. mays
  peptide (1)..(311): Ceres Seq. ID no. 14305368
  misc_feature (23)..(174): Pfam Name: Pfam Description:  Chromadorea ALT protein
  misc_feature (1)..(308): NCBI GI NO: 15227543 NR Description: calmodulin -related [Arabidopsis thaliana]
  misc_feature (69)..(307): NCBI GI NO: 4731916 NR Description: development protein DG1124
  misc_feature (164)..(306): NCBI GI NO: 31218375 NR Description: ENSANGP00000010930 [Anopheles gambiae]
  misc_feature (69)..(307): NCBI GI NO: 28829323 NR Description: similar to Dictyostelium discoideum (Slime mold)
  misc_feature (40)..(243): NCBI GI NO: 9837385 NR Description: retinitis pigmentosa GTPase regulator-like protein
EESVFELSLFAESFSEMLQHRMGCVILSFLEKLHRRYVVKRNQRKRQREEDLKKEEKSSEKRSKTTHETTKTESVDNPGGSFKMTKEGEEKMSTDQSANVHAELSKEGQIKLGTDHPIANHGEPAKGGDENMEEDPEYEEDPEEVEVYEDDEDMDDAHAEEQIAEQNENTNDREIKPKEVATTDGGNNKSTRQPEVENVTNIHERAASMEEKQSVPEIGDLVGGGEKVVSKEIKPAKDEVIDKDLLQAFRYFDINGAGYLKVDDLKCILHNMGKFLSSRDVKDLVQIALVESNSARDNRIIYPKLVKIVDL

SEQ ID NO: 36264 - protein, 295 aa, Zea mays subsp. mays
  peptide (1)..(295): Ceres Seq. ID no. 14305369
  misc_feature (7)..(158): Pfam Name: Pfam Description:  Chromadorea ALT protein
  misc_feature (1)..(292): NCBI GI NO: 15227543 NR Description: calmodulin -related [Arabidopsis thaliana]
  misc_feature (53)..(291): NCBI GI NO: 4731916 NR Description: development protein DG1124
  misc_feature (148)..(290): NCBI GI NO: 31218375 NR Description: ENSANGP00000010930 [Anopheles gambiae]
  misc_feature (53)..(291): NCBI GI NO: 28829323 NR Description: similar to Dictyostelium discoideum (Slime mold)
  misc_feature (24)..(227): NCBI GI NO: 9837385 NR Description: retinitis pigmentosa GTPase regulator-like protein
MLQHRMGCVILSFLEKLHRRYVVKRNQRKRQREEDLKKEEKSSEKRSKTTHETTKTESVDNPGGSFKMTKEGEEKMSTDQSANVHAELSKEGQIKLGTDHPIANHGEPAKGGDENMEEDPEYEEDPEEVEVYEDDEDMDDAHAEEQIAEQNENTNDREIKPKEVATTDGGNNKSTRQPEVENVTNIHERAASMEEKQSVPEIGDLVGGGEKVVSKEIKPAKDEVIDKDLLQAFRYFDINGAGYLKVDDLKCILHNMGKFLSSRDVKDLVQIALVESNSARDNRIIYPKLVKIVDL

SEQ ID NO: 36265 - protein, 290 aa, Zea mays subsp. mays
  peptide (1)..(290): Ceres Seq. ID no. 14305370
  misc_feature (2)..(153): Pfam Name: Pfam Description:  Chromadorea ALT protein
  misc_feature (1)..(287): NCBI GI NO: 15227543 NR Description: calmodulin -related [Arabidopsis thaliana]
  misc_feature (48)..(286): NCBI GI NO: 4731916 NR Description: development protein DG1124
  misc_feature (143)..(285): NCBI GI NO: 31218375 NR Description: ENSANGP00000010930 [Anopheles gambiae]
  misc_feature (48)..(286): NCBI GI NO: 28829323 NR Description: similar to Dictyostelium discoideum (Slime mold)
  misc_feature (19)..(222): NCBI GI NO: 9837385 NR Description: retinitis pigmentosa GTPase regulator-like protein
MGCVILSFLEKLHRRYVVKRNQRKRQREEDLKKEEKSSEKRSKTTHETTKTESVDNPGGSFKMTKEGEEKMSTDQSANVHAELSKEGQIKLGTDHPIANHGEPAKGGDENMEEDPEYEEDPEEVEVYEDDEDMDDAHAEEQIAEQNENTNDREIKPKEVATTDGGNNKSTRQPEVENVTNIHERAASMEEKQSVPEIGDLVGGGEKVVSKEIKPAKDEVIDKDLLQAFRYFDINGAGYLKVDDLKCILHNMGKFLSSRDVKDLVQIALVESNSARDNRIIYPKLVKIVDL

SEQ ID NO: 36266 - DNA, 695 bp, Zea mays subsp. mays
  misc_feature (1)..(695): Ceres Seq. ID no. 12436617
tgatccatgtctgcgcagtgtttcttttcacagtttgcgcttgcgaacatccgaaccccgttttcatcttgaattcaacttatgatgtatatcggacagttccaccacattctggcgccgccttcgtctgatcctggaggcaattggagccgctgcaagtcggatcctggtggatgcagcgcaacacagatcgcaaccctccaaggactgagaagtggaatgttgacatctctgagacagtctgaaagcaaaccgaaggcaggggtgttcatcaactcctgcttcgcgcattgctagagtgagctacaggacacatggttcgcaccaaattctccatccatatataacaagaaaattgcagaggtggtaggtgattggtactttgaaagaggagctgacgtggagattgactgcgcctatccctgtgattcacagtcttgtcgcaaccttataccaattgataaggaactgaggatgtattaggagttcggcagacgattatactcaattatcatcataataaaaaacactcttctaattgttgatgatgttatgttacttgcatcagatagcaaaccaccctattgtacaatctgttggtggaaacatgtttgtgttgtgtgttccaggttgtctgtttcttggtagccttttttggctgaattggtgatatacacaaaatctatttacttgtt

SEQ ID NO: 36267 - protein, 71 aa, Zea mays subsp. mays
  peptide (1)..(71): Ceres Seq. ID no. 12436618
  misc_feature (6)..(71): Pfam Name: Pfam Description:  Pectinacetylesterase
  misc_feature (6)..(71): NCBI GI NO: 37536674 NR Description: putative pectin acetylesterase
  misc_feature (1)..(71): NCBI GI NO: 10176854 NR Description: pectinacetylesterase [Arabidopsis thaliana]
  misc_feature (1)..(71): NCBI GI NO: 22327018 NR Description: pectinacetylesterase family; protein id:At5g23870
  misc_feature (1)..(71): NCBI GI NO: 21703105 NR Description: At1g57590/T8L23_6 [Arabidopsis thaliana]
  misc_feature (1)..(71): NCBI GI NO: 30696158 NR Description: pectinacetylesterase, putative
  misc_feature (1)..(71): NCBI GI NO: 25347293 NR Description: probable pectinacetylesterase precursor T8L23.6
  misc_feature (1)..(71): NCBI GI NO: 15228677 NR Description: pectinacetylesterase family; protein id:At3g62060
  misc_feature (1)..(71): NCBI GI NO: 28392968 NR Description: putative pectinacetylesterase
  misc_feature (1)..(71): NCBI GI NO: 7487997 NR Description: pectin acetylesterase homolog F21E10
  misc_feature (1)..(71): NCBI GI NO: 30690308 NR Description: pectinacetylesterase, putative
MMYIGQFHHILAPPSSDPGGNWSRCKSDPGGCSATQIATLQGLRSGMLTSLRQSESKPKAGVFINSCFAHC

SEQ ID NO: 36268 - protein, 70 aa, Zea mays subsp. mays
  peptide (1)..(70): Ceres Seq. ID no. 12436619
  misc_feature (5)..(70): Pfam Name: Pfam Description:  Pectinacetylesterase
  misc_feature (5)..(70): NCBI GI NO: 37536674 NR Description: putative pectin acetylesterase
  misc_feature (1)..(70): NCBI GI NO: 10176854 NR Description: pectinacetylesterase [Arabidopsis thaliana]
  misc_feature (1)..(70): NCBI GI NO: 22327018 NR Description: pectinacetylesterase family; protein id:At5g23870
  misc_feature (1)..(70): NCBI GI NO: 21703105 NR Description: At1g57590/T8L23_6 [Arabidopsis thaliana]
  misc_feature (1)..(70): NCBI GI NO: 30696158 NR Description: pectinacetylesterase, putative
  misc_feature (1)..(70): NCBI GI NO: 25347293 NR Description: probable pectinacetylesterase precursor T8L23.6
  misc_feature (1)..(70): NCBI GI NO: 15228677 NR Description: pectinacetylesterase family; protein id:At3g62060
  misc_feature (1)..(70): NCBI GI NO: 28392968 NR Description: putative pectinacetylesterase
  misc_feature (1)..(70): NCBI GI NO: 7487997 NR Description: pectin acetylesterase homolog F21E10
  misc_feature (1)..(70): NCBI GI NO: 30690308 NR Description: pectinacetylesterase, putative
MYIGQFHHILAPPSSDPGGNWSRCKSDPGGCSATQIATLQGLRSGMLTSLRQSESKPKAGVFINSCFAHC

SEQ ID NO: 36269 - protein, 42 aa, Zea mays subsp. mays
  peptide (1)..(42): Ceres Seq. ID no. 12436620
IHVCAVFLFTVCACEHPNPVFILNSTYDVYRTVPPHSGAAFV

SEQ ID NO: 36270 - DNA, 1529 bp, Zea mays subsp. mays
  misc_feature (1)..(1529): Ceres Seq. ID no. 13496467
gttgtttgataaacatttttctgtggaggagcaagataaacttgtaggtcgtataattggttcaacaggtgctgaggttctccaatctatgttaccctgggttacatcagttctcactcaagaggagcagaacaaaatgcttgatatgtggaagcaagctacaaaaaatacaatgtttggtgaatggctaaacgagtggtggaagggagctggaacagcatctgattcttcagcagaggcgtcctctgctccagaagatagtcatttacaagataagcttgaacaaaatgaccagatgttcaagcctggctggaaggacatatttcgaatgaatcggagtgaacttgaggctgaggtgcgaaaggtttcacgagattctacacttgacccaaggcggaaggcgtatctaattcaaaatctcatgacaagccgctggatagctgcacagcagaagttaccagaaccacattctgaagaatgtaatcacgatgccagtatacctggatgtgcaccttcataccgagaccaggagaaacaaatttatggttgtgaacactacaaacggaactgcaaacttgttgctgcatgctgcaacaagctcttcacatgcaggttctgccatgataaagttagtgaccatacaatggaaaggaaagcaacacaggagatgatgtgcatggtatgcctaaagattcaacctgttggttcgttctgccaaaccccatcttgcaacagactatcgatggcaaagtactactgtaacatctgtaaattttttgatgatgaaaggactgtgtaccactgtccgttttgtaatttgtgtcgtcttgggaaaggtcttggtgttgatttcttccattgcatgaaatgcaactgctgccttggaatgaaattaactgagcacaaatgtcgggaaaaagggctagagacgaattgtccaatatgctgtgacttcctatttacatcaagtgccgcagtcagagccctcccttgtggccactccatgcattcagcttgctttcaggcatacacttgtagtcactacacttgccctatctgctgcaaatccttgggagatatggcggtttattttggcatgcttgatgccttgttggcggctgaagagcttccggaggaataccgtgatcggtgtcaggatatactttgcaatgactgtgagaggaaaggtagatgtcgatttcattggttataccacaaatgcggctcctgtgggtcgtacaacacccgagttatcaagactgccacagcagattgctctacaccaaactagttggagggaacatttgtgcttaattagtcactgtattctttgtttctctttgtacatatcttctagagagaaggaaaaagagaagttgtgtagcatagttataccataatttcattcgtagccatttcagttttgtaagtgtagcagtttacaatttactaggtctagtgcgttatactgacaaaattgacggttctgatggaagaagaacataacctgaggaaattggcttgttagc

SEQ ID NO: 36271 - protein, 429 aa, Zea mays subsp. mays
  peptide (1)..(429): Ceres Seq. ID no. 13496468
  misc_feature (183)..(260): Pfam Name: Pfam Description:  CHY zinc finger
  misc_feature (1)..(429): NCBI GI NO: 34911328 NR Description: putative zinc finger protein
  misc_feature (30)..(429): NCBI GI NO: 22347790 NR Description: putative zinc finger protein [Zea mays]
  misc_feature (1)..(427): NCBI GI NO: 9279663 NR Description: gb|AAD55299
  misc_feature (1)..(427): NCBI GI NO: 15229615 NR Description: zinc finger protein -related
  misc_feature (85)..(369): NCBI GI NO: 29367543 NR Description: putative zinc finger protein
  misc_feature (74)..(417): NCBI GI NO: 25402866 NR Description: protein F14D16.3 [imported] - Arabidopsis thaliana
  misc_feature (1)..(87): NCBI GI NO: 25402866 NR Description: protein F14D16.3 [imported] - Arabidopsis thaliana
  misc_feature (1)..(58): NCBI GI NO: 25402866 NR Description: protein F14D16.3 [imported] - Arabidopsis thaliana
  misc_feature (165)..(418): NCBI GI NO: 15221379 NR Description: hypothetical protein [Arabidopsis thaliana]
  misc_feature (223)..(417): NCBI GI NO: 15221895 NR Description: hypothetical protein [Arabidopsis thaliana]
LFDKHFSVEEQDKLVGRIIGSTGAEVLQSMLPWVTSVLTQEEQNKMLDMWKQATKNTMFGEWLNEWWKGAGTASDSSAEASSAPEDSHLQDKLEQNDQMFKPGWKDIFRMNRSELEAEVRKVSRDSTLDPRRKAYLIQNLMTSRWIAAQQKLPEPHSEECNHDASIPGCAPSYRDQEKQIYGCEHYKRNCKLVAACCNKLFTCRFCHDKVSDHTMERKATQEMMCMVCLKIQPVGSFCQTPSCNRLSMAKYYCNICKFFDDERTVYHCPFCNLCRLGKGLGVDFFHCMKCNCCLGMKLTEHKCREKGLETNCPICCDFLFTSSAAVRALPCGHSMHSACFQAYTCSHYTCPICCKSLGDMAVYFGMLDALLAAEELPEEYRDRCQDILCNDCERKGRCRFHWLYHKCGSCGSYNTRVIKTATADCSTPN

SEQ ID NO: 36272 - protein, 400 aa, Zea mays subsp. mays
  peptide (1)..(400): Ceres Seq. ID no. 13496469
  misc_feature (154)..(231): Pfam Name: Pfam Description:  CHY zinc finger
  misc_feature (1)..(400): NCBI GI NO: 34911328 NR Description: putative zinc finger protein
  misc_feature (1)..(400): NCBI GI NO: 22347790 NR Description: putative zinc finger protein [Zea mays]
  misc_feature (1)..(398): NCBI GI NO: 9279663 NR Description: gb|AAD55299
  misc_feature (1)..(398): NCBI GI NO: 15229615 NR Description: zinc finger protein -related
  misc_feature (56)..(340): NCBI GI NO: 29367543 NR Description: putative zinc finger protein
  misc_feature (45)..(388): NCBI GI NO: 25402866 NR Description: protein F14D16.3 [imported] - Arabidopsis thaliana
  misc_feature (1)..(58): NCBI GI NO: 25402866 NR Description: protein F14D16.3 [imported] - Arabidopsis thaliana
  misc_feature (1)..(29): NCBI GI NO: 25402866 NR Description: protein F14D16.3 [imported] - Arabidopsis thaliana
  misc_feature (136)..(389): NCBI GI NO: 15221379 NR Description: hypothetical protein [Arabidopsis thaliana]
  misc_feature (194)..(388): NCBI GI NO: 15221895 NR Description: hypothetical protein [Arabidopsis thaliana]
MLPWVTSVLTQEEQNKMLDMWKQATKNTMFGEWLNEWWKGAGTASDSSAEASSAPEDSHLQDKLEQNDQMFKPGWKDIFRMNRSELEAEVRKVSRDSTLDPRRKAYLIQNLMTSRWIAAQQKLPEPHSEECNHDASIPGCAPSYRDQEKQIYGCEHYKRNCKLVAACCNKLFTCRFCHDKVSDHTMERKATQEMMCMVCLKIQPVGSFCQTPSCNRLSMAKYYCNICKFFDDERTVYHCPFCNLCRLGKGLGVDFFHCMKCNCCLGMKLTEHKCREKGLETNCPICCDFLFTSSAAVRALPCGHSMHSACFQAYTCSHYTCPICCKSLGDMAVYFGMLDALLAAEELPEEYRDRCQDILCNDCERKGRCRFHWLYHKCGSCGSYNTRVIKTATADCSTPN

SEQ ID NO: 36273 - protein, 384 aa, Zea mays subsp. mays
  peptide (1)..(384): Ceres Seq. ID no. 13496470
  misc_feature (138)..(215): Pfam Name: Pfam Description:  CHY zinc finger
  misc_feature (1)..(384): NCBI GI NO: 34911328 NR Description: putative zinc finger protein
  misc_feature (1)..(384): NCBI GI NO: 22347790 NR Description: putative zinc finger protein [Zea mays]
  misc_feature (1)..(382): NCBI GI NO: 9279663 NR Description: gb|AAD55299
  misc_feature (1)..(382): NCBI GI NO: 15229615 NR Description: zinc finger protein -related
  misc_feature (40)..(324): NCBI GI NO: 29367543 NR Description: putative zinc finger protein
  misc_feature (29)..(372): NCBI GI NO: 25402866 NR Description: protein F14D16.3 [imported] - Arabidopsis thaliana
  misc_feature (1)..(42): NCBI GI NO: 25402866 NR Description: protein F14D16.3 [imported] - Arabidopsis thaliana
  misc_feature (1)..(13): NCBI GI NO: 25402866 NR Description: protein F14D16.3 [imported] - Arabidopsis thaliana
  misc_feature (120)..(373): NCBI GI NO: 15221379 NR Description: hypothetical protein [Arabidopsis thaliana]
  misc_feature (178)..(372): NCBI GI NO: 15221895 NR Description: hypothetical protein [Arabidopsis thaliana]
MLDMWKQATKNTMFGEWLNEWWKGAGTASDSSAEASSAPEDSHLQDKLEQNDQMFKPGWKDIFRMNRSELEAEVRKVSRDSTLDPRRKAYLIQNLMTSRWIAAQQKLPEPHSEECNHDASIPGCAPSYRDQEKQIYGCEHYKRNCKLVAACCNKLFTCRFCHDKVSDHTMERKATQEMMCMVCLKIQPVGSFCQTPSCNRLSMAKYYCNICKFFDDERTVYHCPFCNLCRLGKGLGVDFFHCMKCNCCLGMKLTEHKCREKGLETNCPICCDFLFTSSAAVRALPCGHSMHSACFQAYTCSHYTCPICCKSLGDMAVYFGMLDALLAAEELPEEYRDRCQDILCNDCERKGRCRFHWLYHKCGSCGSYNTRVIKTATADCSTPN

SEQ ID NO: 36274 - DNA, 727 bp, Zea mays subsp. mays
  misc_feature (1)..(727): Ceres Seq. ID no. 12468256
  misc_feature (659)..(659): n is a, c, t, g, unknown, or other
ttactttagcggtggcaaggatgaagaggaggaagatatacctgacatggatacttatgaagacacaggggataatttggctgctgctgaaccatcatactttatcgcagaagaaccagaagatgacaacattcttcataccagaacatatgatgttagcataacgtatgacaagtactaccaaactccacgtgtctggctaactggatatgacgagtcaagaatgccattaatgcctgaacttgtgtttgaagacatcagccaagaccacgcacgaaaaacggtgactattgaggaccatcctcacttattggctgggaagcatgcatcagtgcacccatgcaaacatgcagctgtgatgaaaaagatcatcgacgttccaatgtcggggggagtggaaccagaagttgacaagtaccttttcatatttttgaaattcatagcgacagtcataccgactattgagtacgattatacaatggacgtcgaccttggcagtacaagctgattattggttggcttgaagcttgtcacttgtctcgggaaaaggaagcaccctaccagaaggcgcaggaagaaggctgaattgcgtgtttgtggttgaacatttgtgcatatgtgcttgttccttggatcggtttgcatttgtgaacaaactntgaaaagctcaaaggcaagacccatcttgtacattctgtgacgctgtcagcttgtgaatccattcgtt

SEQ ID NO: 36275 - protein, 168 aa, Zea mays subsp. mays
  peptide (1)..(168): Ceres Seq. ID no. 12468257
  misc_feature (42)..(160): Pfam Name: Pfam Description:  Autophagocytosis associated protein
  misc_feature (1)..(168): NCBI GI NO: 34903638 NR Description: B1015E06.2
  misc_feature (1)..(168): NCBI GI NO: 18424474 NR Description: autophagocytosis protein - like
  misc_feature (1)..(168): NCBI GI NO: 21595613 NR Description: autophagocytosis protein-like
  misc_feature (1)..(168): NCBI GI NO: 9758466 NR Description: autophagocytosis protein AUT1-like
  misc_feature (9)..(163): NCBI GI NO: 28828597 NR Description: hypothetical protein [Dictyostelium discoideum]
  misc_feature (3)..(159): NCBI GI NO: 34785406 NR Description: Unknown (protein for MGC:64156) [Danio rerio]
  misc_feature (6)..(159): NCBI GI NO: 13385890 NR Description: RIKEN cDNA 2610016C12 [Mus musculus]
  misc_feature (6)..(159): NCBI GI NO: 19705511 NR Description: preconditioning-inducible gene 1 protein
  misc_feature (6)..(159): NCBI GI NO: 19526773 NR Description: Apg3p; PC3-96 protein [Homo sapiens]
  misc_feature (38)..(164): NCBI GI NO: 21357935 NR Description: CG6877-PA [Drosophila melanogaster]
YFSGGKDEEEEDIPDMDTYEDTGDNLAAAEPSYFIAEEPEDDNILHTRTYDVSITYDKYYQTPRVWLTGYDESRMPLMPELVFEDISQDHARKTVTIEDHPHLLAGKHASVHPCKHAAVMKKIIDVPMSGGVEPEVDKYLFIFLKFIATVIPTIEYDYTMDVDLGSTS

SEQ ID NO: 36276 - protein, 153 aa, Zea mays subsp. mays
  peptide (1)..(153): Ceres Seq. ID no. 12468258
  misc_feature (27)..(145): Pfam Name: Pfam Description:  Autophagocytosis associated protein
  misc_feature (1)..(153): NCBI GI NO: 34903638 NR Description: B1015E06.2
  misc_feature (1)..(153): NCBI GI NO: 18424474 NR Description: autophagocytosis protein - like
  misc_feature (1)..(153): NCBI GI NO: 21595613 NR Description: autophagocytosis protein-like
  misc_feature (1)..(153): NCBI GI NO: 9758466 NR Description: autophagocytosis protein AUT1-like
  misc_feature (1)..(148): NCBI GI NO: 28828597 NR Description: hypothetical protein [Dictyostelium discoideum]
  misc_feature (1)..(144): NCBI GI NO: 34785406 NR Description: Unknown (protein for MGC:64156) [Danio rerio]
  misc_feature (1)..(144): NCBI GI NO: 13385890 NR Description: RIKEN cDNA 2610016C12 [Mus musculus]
  misc_feature (1)..(144): NCBI GI NO: 19705511 NR Description: preconditioning-inducible gene 1 protein
  misc_feature (1)..(144): NCBI GI NO: 19526773 NR Description: Apg3p; PC3-96 protein [Homo sapiens]
  misc_feature (23)..(149): NCBI GI NO: 21357935 NR Description: CG6877-PA [Drosophila melanogaster]
MDTYEDTGDNLAAAEPSYFIAEEPEDDNILHTRTYDVSITYDKYYQTPRVWLTGYDESRMPLMPELVFEDISQDHARKTVTIEDHPHLLAGKHASVHPCKHAAVMKKIIDVPMSGGVEPEVDKYLFIFLKFIATVIPTIEYDYTMDVDLGSTS

SEQ ID NO: 36277 - protein, 94 aa, Zea mays subsp. mays
  peptide (1)..(94): Ceres Seq. ID no. 12468259
  misc_feature (1)..(86): Pfam Name: Pfam Description:  Autophagocytosis associated protein
  misc_feature (1)..(94): NCBI GI NO: 34903638 NR Description: B1015E06.2
  misc_feature (1)..(94): NCBI GI NO: 18424474 NR Description: autophagocytosis protein - like
  misc_feature (1)..(94): NCBI GI NO: 21595613 NR Description: autophagocytosis protein-like
  misc_feature (1)..(94): NCBI GI NO: 9758466 NR Description: autophagocytosis protein AUT1-like
  misc_feature (1)..(89): NCBI GI NO: 28828597 NR Description: hypothetical protein [Dictyostelium discoideum]
  misc_feature (1)..(85): NCBI GI NO: 34785406 NR Description: Unknown (protein for MGC:64156) [Danio rerio]
  misc_feature (1)..(85): NCBI GI NO: 13385890 NR Description: RIKEN cDNA 2610016C12 [Mus musculus]
  misc_feature (1)..(85): NCBI GI NO: 19705511 NR Description: preconditioning-inducible gene 1 protein
  misc_feature (1)..(85): NCBI GI NO: 19526773 NR Description: Apg3p; PC3-96 protein [Homo sapiens]
  misc_feature (1)..(90): NCBI GI NO: 21357935 NR Description: CG6877-PA [Drosophila melanogaster]
MPLMPELVFEDISQDHARKTVTIEDHPHLLAGKHASVHPCKHAAVMKKIIDVPMSGGVEPEVDKYLFIFLKFIATVIPTIEYDYTMDVDLGSTS

SEQ ID NO: 36278 - DNA, 671 bp, Zea mays subsp. mays
  misc_feature (1)..(671): Ceres Seq. ID no. 12468244
  misc_feature (667)..(667): n is a, c, t, g, unknown, or other
gataagtttgctcctgatgctaacagccagattgttccagcatctgcaattcctgatggttggatggggctggatattggcccagattccattgctgcattcaacgcagccctggaaacaacccagactgtcatctggaacgggcccatgggtgtttttgaatatgacaagttcgctataggaactgaggctgtggcaaagaagttggcagaacttagccgcaagggtgtgacaactatcatcggaggtggagactctgtcgccgccgttgagaaggtcggagttgctgacgttatgagccacatttccaccggaggtggtgccagcttggaattgttggaaggaaaggagcttccaggagttactgcattggatgaagcagccactgtgactgtatgaagcaagttttcattttgtttcatcttcttttttggaagttaccgggggagggactcccacctgaataaggtgcgcaaggccaggattgttggctcaaccacagggagcgcacgccaccgcatcatcttcatgtaccattgtatacttgctacattcttgcttgctcctcctcagccgctcgaaatgtaggagatcaatgatttatagagctctggaaatcgtttgaacaaggagtaagcgacccaagtaatatgcttactgagtcatntttc

SEQ ID NO: 36279 - protein, 132 aa, Zea mays subsp. mays
  peptide (1)..(132): Ceres Seq. ID no. 12468245
  misc_feature (1)..(126): Pfam Name: Pfam Description:  Phosphoglycerate kinase
  misc_feature (1)..(132): NCBI GI NO: 129915 NR Description: Phosphoglycerate kinase, chloroplast precursor
  misc_feature (1)..(132): NCBI GI NO: 15223484 NR Description: phosphoglycerate kinase, putative
  misc_feature (1)..(132): NCBI GI NO: 2129668 NR Description: phosphoglycerate kinase (EC 2
  misc_feature (1)..(132): NCBI GI NO: 2499497 NR Description: Phosphoglycerate kinase, chloroplast precursor
  misc_feature (1)..(132): NCBI GI NO: 7434544 NR Description: phosphoglycerate kinase (EC 2
  misc_feature (1)..(132): NCBI GI NO: 3738261 NR Description: chloroplast phosphoglycerate kinase
  misc_feature (1)..(132): NCBI GI NO: 2129669 NR Description: phosphoglycerate kinase (EC 2
  misc_feature (1)..(132): NCBI GI NO: 15230595 NR Description: phosphoglycerate kinase, putative
  misc_feature (1)..(132): NCBI GI NO: 12644295 NR Description: PHOSPHOGLYCERATE KINASE, CHLOROPLAST PRECURSOR
  misc_feature (1)..(127): NCBI GI NO: 15219412 NR Description: phosphoglycerate kinase, putative
DKFAPDANSQIVPASAIPDGWMGLDIGPDSIAAFNAALETTQTVIWNGPMGVFEYDKFAIGTEAVAKKLAELSRKGVTTIIGGGDSVAAVEKVGVADVMSHISTGGGASLELLEGKELPGVTALDEAATVTV

SEQ ID NO: 36280 - protein, 111 aa, Zea mays subsp. mays
  peptide (1)..(111): Ceres Seq. ID no. 12468246
  misc_feature (1)..(105): Pfam Name: Pfam Description:  Phosphoglycerate kinase
  misc_feature (1)..(111): NCBI GI NO: 129915 NR Description: Phosphoglycerate kinase, chloroplast precursor
  misc_feature (1)..(111): NCBI GI NO: 15223484 NR Description: phosphoglycerate kinase, putative
  misc_feature (1)..(111): NCBI GI NO: 2129668 NR Description: phosphoglycerate kinase (EC 2
  misc_feature (1)..(111): NCBI GI NO: 2499497 NR Description: Phosphoglycerate kinase, chloroplast precursor
  misc_feature (1)..(111): NCBI GI NO: 7434544 NR Description: phosphoglycerate kinase (EC 2
  misc_feature (1)..(111): NCBI GI NO: 3738261 NR Description: chloroplast phosphoglycerate kinase
  misc_feature (1)..(111): NCBI GI NO: 2129669 NR Description: phosphoglycerate kinase (EC 2
  misc_feature (1)..(111): NCBI GI NO: 12644295 NR Description: PHOSPHOGLYCERATE KINASE, CHLOROPLAST PRECURSOR
  misc_feature (1)..(111): NCBI GI NO: 15230595 NR Description: phosphoglycerate kinase, putative
  misc_feature (1)..(106): NCBI GI NO: 15219412 NR Description: phosphoglycerate kinase, putative
MGLDIGPDSIAAFNAALETTQTVIWNGPMGVFEYDKFAIGTEAVAKKLAELSRKGVTTIIGGGDSVAAVEKVGVADVMSHISTGGGASLELLEGKELPGVTALDEAATVTV

SEQ ID NO: 36281 - protein, 83 aa, Zea mays subsp. mays
  peptide (1)..(83): Ceres Seq. ID no. 12468247
  misc_feature (1)..(77): Pfam Name: Pfam Description:  Phosphoglycerate kinase
  misc_feature (1)..(83): NCBI GI NO: 129915 NR Description: Phosphoglycerate kinase, chloroplast precursor
  misc_feature (1)..(83): NCBI GI NO: 15223484 NR Description: phosphoglycerate kinase, putative
  misc_feature (1)..(83): NCBI GI NO: 2129668 NR Description: phosphoglycerate kinase (EC 2
  misc_feature (1)..(83): NCBI GI NO: 2499497 NR Description: Phosphoglycerate kinase, chloroplast precursor
  misc_feature (1)..(83): NCBI GI NO: 7434544 NR Description: phosphoglycerate kinase (EC 2
  misc_feature (1)..(83): NCBI GI NO: 3738261 NR Description: chloroplast phosphoglycerate kinase
  misc_feature (1)..(83): NCBI GI NO: 2129669 NR Description: phosphoglycerate kinase (EC 2
  misc_feature (1)..(83): NCBI GI NO: 12644295 NR Description: PHOSPHOGLYCERATE KINASE, CHLOROPLAST PRECURSOR
  misc_feature (1)..(83): NCBI GI NO: 15230595 NR Description: phosphoglycerate kinase, putative
  misc_feature (1)..(78): NCBI GI NO: 15219412 NR Description: phosphoglycerate kinase, putative
MGVFEYDKFAIGTEAVAKKLAELSRKGVTTIIGGGDSVAAVEKVGVADVMSHISTGGGASLELLEGKELPGVTALDEAATVTV

SEQ ID NO: 36282 - DNA, 581 bp, Zea mays subsp. mays
  misc_feature (1)..(581): Ceres Seq. ID no. 13572718
gaatcaagaggctgggcttgtgccaagcttgaatcctcttgtgaaggagtttctcaatgctgctgatgacaagcggaaggaagtcctctctaaaatagaagaggatgttgctaagctcagcggttctgcagccaagcatggaaagatatatgtgacagctgcaaagaagatcatagacaagggctctgactacactaagaaggagactgagaggcttcaccgcatgctggagaagtcaatcagtccttccaaagctgatgaattcatcgttaagaagaacattctttcgatattctcttcgtgaaggtgatgatccacagccacggcctgccagtgacttgaactgatagcgaaccaccactttacggaaaacagaacaaatcggatgatgtgagagaaaggtggtagtgaagtccagtagtggcagagctacttcgtgcacgtagatctcttttgcattttctggttccagggattgacttcgtactcacagtttacttcacacagaaggtttatgtagccatcctgtgataacatctactttctttttgatccaataaattggttattcagcttccgtc

SEQ ID NO: 36283 - protein, 100 aa, Zea mays subsp. mays
  peptide (1)..(100): Ceres Seq. ID no. 13572719
  misc_feature (3)..(100): NCBI GI NO: 34897646 NR Description: putative disulfide-isomerase precursor
  misc_feature (3)..(100): NCBI GI NO: 34894982 NR Description: putative protein disulfide isomerase
  misc_feature (3)..(100): NCBI GI NO: 10180029 NR Description: putative protein disulfide-isomerase
  misc_feature (3)..(99): NCBI GI NO: 729442 NR Description: PROBABLE PROTEIN DISULFIDE ISOMERASE P5 PRECURSOR
  misc_feature (4)..(99): NCBI GI NO: 7489183 NR Description: probable protein disulfide-isomerase (EC 5
  misc_feature (3)..(98): NCBI GI NO: 15226610 NR Description: protein disulfide isomerase family
  misc_feature (4)..(100): NCBI GI NO: 28829383 NR Description: similar to Dictyostelium discoideum (Slime mold)
  misc_feature (7)..(100): NCBI GI NO: 27803657 NR Description: protein disulfide isomerase-like protein
  misc_feature (4)..(100): NCBI GI NO: 2627440 NR Description: protein disulfide isomerase; PDI; P5-like
  misc_feature (58)..(99): NCBI GI NO: 4650854 NR Description: disulfide-isomerase precursor
NQEAGLVPSLNPLVKEFLNAADDKRKEVLSKIEEDVAKLSGSAAKHGKIYVTAAKKIIDKGSDYTKKETERLHRMLEKSISPSKADEFIVKKNILSIFSS

SEQ ID NO: 36284 - DNA, 1329 bp, Zea mays subsp. mays; identical to SEQ ID NO: 35984
  misc_feature (1)..(1329): Ceres Seq. ID no. 13503166

SEQ ID NO: 36285 - protein, 245 aa, Zea mays subsp. mays; identical to SEQ ID NO: 35985
  peptide (1)..(245): Ceres Seq. ID no. 13503167
  misc_feature (75)..(174): Pfam Name: Pfam Description:  K-box region
  misc_feature (1)..(245): NCBI GI NO: 29372764 NR Description: m4 [Zea mays]
  misc_feature (1)..(244): NCBI GI NO: 29372748 NR Description: putative MADS-domain transcription factor
  misc_feature (1)..(244): NCBI GI NO: 21070923 NR Description: AP1-like MADS-box protein
  misc_feature (1)..(244): NCBI GI NO: 6606070 NR Description: MADS14 protein [Oryza sativa]
  misc_feature (1)..(244): NCBI GI NO: 12019658 NR Description: FDRMADS6 [Oryza sativa]
  misc_feature (1)..(244): NCBI GI NO: 7592642 NR Description: AP1-like MADS box protein [Oryza sativa]
  misc_feature (1)..(244): NCBI GI NO: 30090030 NR Description: MADS box transcription factor AP1
  misc_feature (1)..(244): NCBI GI NO: 4204232 NR Description: MADS-box protein 1 [Lolium temulentum]
  misc_feature (1)..(244): NCBI GI NO: 30721847 NR Description: MADS-box protein TaVRT-1 [Triticum aestivum]
  misc_feature (1)..(244): NCBI GI NO: 28630953 NR Description: MADS1 [Lolium perenne]

SEQ ID NO: 36286 - protein, 183 aa, Zea mays subsp. mays; identical to SEQ ID NO: 35986
  peptide (1)..(183): Ceres Seq. ID no. 13503168
  misc_feature (13)..(112): Pfam Name: Pfam Description:  K-box region
  misc_feature (1)..(183): NCBI GI NO: 29372764 NR Description: m4 [Zea mays]
  misc_feature (1)..(182): NCBI GI NO: 29372748 NR Description: putative MADS-domain transcription factor
  misc_feature (1)..(182): NCBI GI NO: 21070923 NR Description: AP1-like MADS-box protein
  misc_feature (1)..(182): NCBI GI NO: 6606070 NR Description: MADS14 protein [Oryza sativa]
  misc_feature (1)..(182): NCBI GI NO: 12019658 NR Description: FDRMADS6 [Oryza sativa]
  misc_feature (1)..(182): NCBI GI NO: 7592642 NR Description: AP1-like MADS box protein [Oryza sativa]
  misc_feature (1)..(182): NCBI GI NO: 30090030 NR Description: MADS box transcription factor AP1
  misc_feature (1)..(182): NCBI GI NO: 4204232 NR Description: MADS-box protein 1 [Lolium temulentum]
  misc_feature (1)..(182): NCBI GI NO: 30721847 NR Description: MADS-box protein TaVRT-1 [Triticum aestivum]
  misc_feature (1)..(182): NCBI GI NO: 28630953 NR Description: MADS1 [Lolium perenne]

SEQ ID NO: 36287 - protein, 133 aa, Zea mays subsp. mays; identical to SEQ ID NO: 35987
  peptide (1)..(133): Ceres Seq. ID no. 13503169
  misc_feature (1)..(62): Pfam Name: Pfam Description:  K-box region
  misc_feature (1)..(133): NCBI GI NO: 29372764 NR Description: m4 [Zea mays]
  misc_feature (1)..(132): NCBI GI NO: 29372748 NR Description: putative MADS-domain transcription factor
  misc_feature (1)..(132): NCBI GI NO: 21070923 NR Description: AP1-like MADS-box protein
  misc_feature (1)..(132): NCBI GI NO: 6606070 NR Description: MADS14 protein [Oryza sativa]
  misc_feature (1)..(132): NCBI GI NO: 12019658 NR Description: FDRMADS6 [Oryza sativa]
  misc_feature (1)..(132): NCBI GI NO: 7592642 NR Description: AP1-like MADS box protein [Oryza sativa]
  misc_feature (1)..(132): NCBI GI NO: 30090030 NR Description: MADS box transcription factor AP1
  misc_feature (1)..(132): NCBI GI NO: 4204232 NR Description: MADS-box protein 1 [Lolium temulentum]
  misc_feature (1)..(132): NCBI GI NO: 30721847 NR Description: MADS-box protein TaVRT-1 [Triticum aestivum]
  misc_feature (1)..(132): NCBI GI NO: 28630953 NR Description: MADS1 [Lolium perenne]

SEQ ID NO: 36288 - DNA, 531 bp, Zea mays subsp. mays
  misc_feature (1)..(531): Ceres Seq. ID no. 13572745
aacaggctggcatgggaggatccaaacaacgtgctgcagagctgggatccaaccctcgccaatccctgcacgtggtttcatgttacctgcaacctgaacaactccgtcatccgcgtggatttgggaaaggcaggcatctccggccccctgcttccagatcttggagcacttgagagcctccagtacatggagctgttcggcaacagcctgaacggttcgattccgtcaacgctgggcaacctgactgatctcatcagcttggatctctgggacaacctgcttaccggcccaatcccaactacgcttggttccatcagcacgctgcgatatctgaggktgtacgagaacaacctgacagggcctataccaccatcgtttggcaatctgactagccttctggaactgaagctccacaggaattcgttgagcggttcgattccggcctcccttggcaacatcaaatcgctgcagttcttgaaattgaacgaaaatatgctgaccggcacggttccattggaagtcctctccctt

SEQ ID NO: 36289 - protein, 177 aa, Zea mays subsp. mays
  peptide (1)..(177): Ceres Seq. ID no. 13572746
  misc_feature (107)..(130): Pfam Name: Pfam Description:  Leucine Rich Repeat
  misc_feature (2)..(171): NCBI GI NO: 7489646 NR Description: leucine-rich repeat protein LRP - sorghum
  misc_feature (2)..(170): NCBI GI NO: 15217584 NR Description: protein kinase -related [Arabidopsis thaliana]
  misc_feature (7)..(170): NCBI GI NO: 15218543 NR Description: somatic embryogenesis receptor-related kinase
  misc_feature (2)..(170): NCBI GI NO: 15081616 NR Description: At1g71830/F14O23_24 [Arabidopsis thaliana]
  misc_feature (7)..(170): NCBI GI NO: 14573457 NR Description: somatic embryogenesis receptor-like kinase 2
  misc_feature (6)..(170): NCBI GI NO: 24935324 NR Description: somatic embryogenesis receptor kinase 1
  misc_feature (7)..(149): NCBI GI NO: 40253600 NR Description: putative somatic embryogenesis receptor kinase 1
  misc_feature (7)..(151): NCBI GI NO: 38679443 NR Description: benzothiadiazole-induced somatic embryogenesisreceptor kinase 1
  misc_feature (2)..(149): NCBI GI NO: 13897308 NR Description: SERK1 protein [Zea mays]
  misc_feature (2)..(149): NCBI GI NO: 13897310 NR Description: SERK2 protein [Zea mays]
  misc_feature (113)..(113): Xaa is any aa, unknown or other
NRLAWEDPNNVLQSWDPTLANPCTWFHVTCNLNNSVIRVDLGKAGISGPLLPDLGALESLQYMELFGNSLNGSIPSTLGNLTDLISLDLWDNLLTGPIPTTLGSISTLRYLRXYENNLTGPIPPSFGNLTSLLELKLHRNSLSGSIPASLGNIKSLQFLKLNENMLTGTVPLEVLSL

SEQ ID NO: 36290 - protein, 115 aa, Zea mays subsp. mays
  peptide (1)..(115): Ceres Seq. ID no. 13572747
  misc_feature (45)..(68): Pfam Name: Pfam Description:  Leucine Rich Repeat
  misc_feature (1)..(109): NCBI GI NO: 7489646 NR Description: leucine-rich repeat protein LRP - sorghum
  misc_feature (1)..(108): NCBI GI NO: 15217584 NR Description: protein kinase -related [Arabidopsis thaliana]
  misc_feature (1)..(108): NCBI GI NO: 15218543 NR Description: somatic embryogenesis receptor-related kinase
  misc_feature (1)..(108): NCBI GI NO: 15081616 NR Description: At1g71830/F14O23_24 [Arabidopsis thaliana]
  misc_feature (1)..(108): NCBI GI NO: 14573457 NR Description: somatic embryogenesis receptor-like kinase 2
  misc_feature (1)..(108): NCBI GI NO: 24935324 NR Description: somatic embryogenesis receptor kinase 1
  misc_feature (1)..(87): NCBI GI NO: 40253600 NR Description: putative somatic embryogenesis receptor kinase 1
  misc_feature (1)..(89): NCBI GI NO: 38679443 NR Description: benzothiadiazole-induced somatic embryogenesisreceptor kinase 1
  misc_feature (1)..(87): NCBI GI NO: 13897308 NR Description: SERK1 protein [Zea mays]
  misc_feature (1)..(87): NCBI GI NO: 13897310 NR Description: SERK2 protein [Zea mays]
  misc_feature (51)..(51): Xaa is any aa, unknown or other
MELFGNSLNGSIPSTLGNLTDLISLDLWDNLLTGPIPTTLGSISTLRYLRXYENNLTGPIPPSFGNLTSLLELKLHRNSLSGSIPASLGNIKSLQFLKLNENMLTGTVPLEVLSL

SEQ ID NO: 36291 - DNA, 540 bp, Zea mays subsp. mays
  misc_feature (1)..(540): Ceres Seq. ID no. 3625528
  misc_feature (495)..(495): n is a, c, t, g, unknown, or other
attgagtttgagaaccctgctgtggcaaaggtcgtagcagatgagatgaataactatctcttgtttgagcgcaccttgcaagttgcacttgttgagccagagaaagttcatcctaaattatggaaaggggtgcgaaggggatttatacctgttgatcgagtagcaattgaacggaagagacacaacaaggataagactgtagcagagcacaaaaagatggttgaaggaattgtaaagcgggatggaaagcgtcgcaaaagaatcaaggcagctggtattgactatgagtgtccagctcttatagggagcattcaaccatcagcgaaaaagatcaagttcgatgaggcatagtattttattctaatgggctgttggatccttagtagacgaggcggtggaatggttgagcaatatattcaccttttgaggagacggcagacaactatgtatttcacttttgaatttctctatgttttatgaatgacaccgacacangatgttacaacttaagtatgaaaatgcaatgggcgatgtgttctc

SEQ ID NO: 36292 - protein, 116 aa, Zea mays subsp. mays
  peptide (1)..(116): Ceres Seq. ID no. 3625529
  misc_feature (1)..(115): NCBI GI NO: 18652180 NR Description: RNA binding protein [Elaeis oleifera]
  misc_feature (1)..(115): NCBI GI NO: 15238220 NR Description: RRM-containing protein; protein id: At5g04600
  misc_feature (1)..(98): NCBI GI NO: 32450283 NR Description: Unknown (protein for IMAGE:6878823)
  misc_feature (1)..(109): NCBI GI NO: 27545352 NR Description: mki67
  misc_feature (1)..(101): NCBI GI NO: 21314753 NR Description: MKI67
  misc_feature (1)..(101): NCBI GI NO: 15214657 NR Description: Similar to nucleolar protein interacting with theFHA domain of pKi-67
  misc_feature (1)..(101): NCBI GI NO: 13699902 NR Description: nucleolar phosphoprotein Nopp34 [Homo sapiens]
  misc_feature (1)..(116): NCBI GI NO: 20302745 NR Description: unknown [Branchiostoma floridae]
  misc_feature (1)..(100): NCBI GI NO: 40741317 NR Description: hypothetical protein AN4346.2
  misc_feature (1)..(101): NCBI GI NO: 13774097 NR Description: RNA binding protein [Mus musculus]
IEFENPAVAKVVADEMNNYLLFERTLQVALVEPEKVHPKLWKGVRRGFIPVDRVAIERKRHNKDKTVAEHKKMVEGIVKRDGKRRKRIKAAGIDYECPALIGSIQPSAKKIKFDEA

SEQ ID NO: 36293 - protein, 101 aa, Zea mays subsp. mays
  peptide (1)..(101): Ceres Seq. ID no. 3625530
  misc_feature (1)..(100): NCBI GI NO: 18652180 NR Description: RNA binding protein [Elaeis oleifera]
  misc_feature (1)..(100): NCBI GI NO: 15238220 NR Description: RRM-containing protein; protein id: At5g04600
  misc_feature (1)..(83): NCBI GI NO: 32450283 NR Description: Unknown (protein for IMAGE:6878823)
  misc_feature (1)..(94): NCBI GI NO: 27545352 NR Description: mki67
  misc_feature (1)..(86): NCBI GI NO: 21314753 NR Description: MKI67
  misc_feature (1)..(86): NCBI GI NO: 15214657 NR Description: Similar to nucleolar protein interacting with theFHA domain of pKi-67
  misc_feature (1)..(86): NCBI GI NO: 13699902 NR Description: nucleolar phosphoprotein Nopp34 [Homo sapiens]
  misc_feature (1)..(101): NCBI GI NO: 20302745 NR Description: unknown [Branchiostoma floridae]
  misc_feature (1)..(85): NCBI GI NO: 40741317 NR Description: hypothetical protein AN4346.2
  misc_feature (1)..(86): NCBI GI NO: 13774097 NR Description: RNA binding protein [Mus musculus]
MNNYLLFERTLQVALVEPEKVHPKLWKGVRRGFIPVDRVAIERKRHNKDKTVAEHKKMVEGIVKRDGKRRKRIKAAGIDYECPALIGSIQPSAKKIKFDEA

SEQ ID NO: 36294 - DNA, 418 bp, Zea mays subsp. mays
  misc_feature (1)..(418): Ceres Seq. ID no. 3625581
gtgtywkctgyagactttggattagtgaattatttattgcamggctattackaggkcwagagggcttctgaagctgaattgttgtcaaagtttacatatggaggagtgatactgargcctggttttattcatggaactcgtcgagtgggcagtgtaaagatacctcttggtcttgtcggttctcctatgcagatggtgctccaaaatataaaacctttgactaggttaccacttatcgggccgctattgactcctcccgtcagtgctgcctccgtggggaaggtcgctgtgagagcagcgacggatccggtgtttcctcctggcatcgwtgatgtctacgggatcatgcgttacagcgagcaaaactaagctgcctcattcaccgggcagtatatacatgccgstgkacttttgttac

SEQ ID NO: 36295 - protein, 122 aa, Zea mays subsp. mays
  peptide (1)..(122): Ceres Seq. ID no. 3625582
  misc_feature (1)..(121): NCBI GI NO: 10129651 NR Description: putative protein [Arabidopsis thaliana]
  misc_feature (1)..(121): NCBI GI NO: 18416362 NR Description: putative protein; protein id: At5g10730
  misc_feature (1)..(118): NCBI GI NO: 11346175 NR Description: hypothetical protein F1N13_50 - Arabidopsisthaliana
  misc_feature (1)..(118): NCBI GI NO: 21592373 NR Description: unknown [Arabidopsis thaliana]
  misc_feature (1)..(118): NCBI GI NO: 18417824 NR Description: putative protein; protein id: At5g15910
  misc_feature (1)..(105): NCBI GI NO: 38346147 NR Description: OSJNBb0118P14.7
  misc_feature (1)..(105): NCBI GI NO: 18398333 NR Description: expressed protein; protein id: At1g32220
  misc_feature (2)..(2): Xaa is any aa, unknown or other
  misc_feature (3)..(3): Xaa is any aa, unknown or other
  misc_feature (4)..(4): Xaa is any aa, unknown or other
  misc_feature (14)..(14): Xaa is any aa, unknown or other
  misc_feature (18)..(18): Xaa is any aa, unknown or other
  misc_feature (19)..(19): Xaa is any aa, unknown or other
  misc_feature (20)..(20): Xaa is any aa, unknown or other
  misc_feature (39)..(39): Xaa is any aa, unknown or other
  misc_feature (110)..(110): Xaa is any aa, unknown or other
VXXXDFGLVNYLLXGYYXXXRASEAELLSKFTYGGVILXPGFIHGTRRVGSVKIPLGLVGSPMQMVLQNIKPLTRLPLIGPLLTPPVSAASVGKVAVRAATDPVFPPGIXDVYGIMRYSEQN

SEQ ID NO: 36296 - protein, 60 aa, Zea mays subsp. mays
  peptide (1)..(60): Ceres Seq. ID no. 3625583
  misc_feature (1)..(59): NCBI GI NO: 10129651 NR Description: putative protein [Arabidopsis thaliana]
  misc_feature (1)..(59): NCBI GI NO: 18416362 NR Description: putative protein; protein id: At5g10730
  misc_feature (1)..(56): NCBI GI NO: 11346175 NR Description: hypothetical protein F1N13_50 - Arabidopsisthaliana
  misc_feature (1)..(56): NCBI GI NO: 18417824 NR Description: putative protein; protein id: At5g15910
  misc_feature (1)..(56): NCBI GI NO: 21592373 NR Description: unknown [Arabidopsis thaliana]
  misc_feature (1)..(43): NCBI GI NO: 38346147 NR Description: OSJNBb0118P14.7
  misc_feature (1)..(43): NCBI GI NO: 18398333 NR Description: expressed protein; protein id: At1g32220
  misc_feature (48)..(48): Xaa is any aa, unknown or other
MQMVLQNIKPLTRLPLIGPLLTPPVSAASVGKVAVRAATDPVFPPGIXDVYGIMRYSEQN

SEQ ID NO: 36297 - DNA, 3723 bp, Zea mays subsp. mays
  misc_feature (1)..(3723): Ceres Seq. ID no. 13666073
  misc_feature (1799)..(1799): n is a, c, t, g, unknown, or other
taggatcaaaaccgtctcgccgctgcaataatcttttgtcaattcttaatccctcgcgtcgacagcgacagcggaaccaactcacgttgccgcggcttcctccatcggtgcggtgccctgtccttttctctcgtccctcctccccccgtatagttaagccccgccccgctactactactactagcagcagcagcgctctcgcagcgggagatgcggtgttgatccgtgccccgctcggatctcgggactggtgccggctctgcccaggccccaggctccaggccagctccctcgacgtttctcggcgagctcgcttgccatggagggcgacgcggacggcgtgaagtcggggaggcgcggtggcggacaggtgtgccagatctgcggcgacggcgtgggcaccacggcggagggggacgtcttcgccgcctgcgacgtctgcgggtttccggtgtgccgcccctgctacgagtacgagcgcaaggacggcacgcaggcgtgcccccagtgcaagaccaagtacaagcgccacaaggggagcccggcgatccgtggggaggaaggagacgacactgatgccgatagcgacttcaattaccttgcatctggcaatgaggaccagaagcagaagattgccgacagaatgcgcagctggcgcatgaacgttgggggcagcggggatgttggtcgccccaagtatgacagtggcgagatcgggcttaccaagtatgacagtggcgagattcctcggggatacatcccatcagtcactaacagccagatctcaggagaaatccctggtgcttcccctgaccatcatatgatgtccccaactgggaacattggcaagcgtgctccatttccctatgtgaaccattcgccaaatccgtcaagggagttctctggtagcattgggaatgttgcctggaaagagagggttgatggctggaaaatgaagcaggacaaggggacgattcccatgacgaatggcacaagcattgctccctctgagggtcggggtgttggtgatattgatgcatcaactgattacaacatggaagatgccttattgaacgacgaaactcgacagcctctatctaggaaagttccacttccttcctccaggataaatccatacaggatggtcattgtgctgcgattgattgttctaagcatcttcttgcactaccgtatcacaaatcctgtgcgcaatgcatacccattatggcttctatctgttatatgtgagatctggtttgctctttcgtggatattggatcagttccctaagtggtttccaatcaaccgggagacgtaccttgataggctggcattaaggtatgaccgggaaggtgagccatctcagttggctgctgttgacattttcgtcagtacagtcgacccaatgaaggagcctcctcttgtcactgccaataccgtgctatccattcttgctgtggattaccctgtggataaggtctcttgctatgtatctgatgatggagctgcgatgctgacatttgatgcactagctgagacttcagagtttgctagaaaatgggtaccatttgttaagaagtacaacattgaacctagagctcctgaatggtacttctcccagaaaattgattacttgaaggacaaagtgcacccttcatttgttaaagaccgccgggccatgaagagagaatatgaagaattcaaagttagggtaaatggccttgttgctaaggcacagaaagttcctgaggaaggatggatcatgcaagatggcacaccatggccaggaaacaataccngggaccatcctggaatgattcaggttttccttggtcacagtggtggccttgatactgagggcaatgagctaccccgtttggtctatgtttctcgtgaaaagcgtcctggattccagcatcacaagaaagctggtgccatgaatgctcttgttcgtgtctcagctgtgcttaccaatggacaatacatgttgaatcttgattgtgatcactacattaacaacagtaaggctctcagggaagctatgtgcttccttatggaccctaacctaggaaggagtgtctgctacgtccagtttccccagagattcgatggcattgacaggaatgatcgatatgccaacaggaacaccgtgtttttcgatattaacttgagaggtcttgatggcatccaaggaccagtttatgtcggaactggctgtgttttcaaccgaacagctctatatggttatgagcccccaattaagcagaagaagggtggtttcttgtcatcactatgtggcggtaggaagaaggcaagcaaatcaaagaagggctcggacaagaagaagtcgcagaagcatgtggacagttctgtgccagtattcaaccttgaagatatagaggagggagttgaaggcgctggatttgacgacgagaaatcacttcttatgtctcaaatgagcctggagaagagatttggccagtccgcagcgtttgttgcctccactctgatggagtatggtggtgttcctcagtccgcaactccggagtctcttctgaaagaagctatccatgttataagctgtggctatgaggacaagactgaatggggaactgagatcgggtggatctacggttctgtgacagaagacattctcaccggattcaagatgcacgcgcgaggctggcggtcgatctactgcatgcccaagcggccagctttcaaggggtctgcccccatcaatctttcggaccgtctgaaccaggtgctccggtgggctcttgggtccgtggagatcctcttcagccggcactgccccctgtggtacggctacggagggcggctcaagttcctggagagattcgcgtacatcaacaccaccatctacccgctcacgtccatcccgcttctcatctactgcatcctgcccgccatctgtctgctcaccggaaagttcatcattccagagatcagcaacttcgccagcatctggttcatctccctcttcatctcgatcttcgccacgggcatcctggagatgaggtggagcggggtgggcatcgacgagtggtggaggaacgagcagttctgggtgatcgggggcatctccgcgcacctcttcgccgtgttccagggcctgctcaaggtgctggccggcatcgacaccaacttcaccgtcacctccaaggcctcggacgaggacggcgacttcgcggagctgtacatgttcaagtggacgacgctcctgatcccgcccaccaccatcctgatcatcaacctggtcggcgtcgtcgccggcatctcctacgccatcaacagcggataccagtcgtggggcccgctcttcggcaagctcttcttcgccttctgggtcatcgtccacctgtacccgttcctcaagggcctcatgggcaggcagaaccgcaccccgaccatcgtcgtcgtctgggccatcctgctggcgtccatcttctccttgctgtgggttcgcatcgaccccttcaccacccgcgtcactggcccggatacccagacgtgtggcatcaactgctagggaagtggaaggtttgtactttgtagaaacggaggaataccacgtgccatctgttgtctgttaagttatatatatataagcagcaagtggcgttatttacagctacgtacagaccagtggatattgtttaccacaaagttttacttgtgttaatatgcattcttttgttg

SEQ ID NO: 36298 - protein, 1077 aa, Zea mays subsp. mays
  peptide (1)..(1077): Ceres Seq. ID no. 13666074
  misc_feature (534)..(640): Pfam Name: Pfam Description:  Glycosyl transferase
  misc_feature (517)..(1060): NCBI GI NO: 15217853 NR Description: cellulose synthase family [Arabidopsis thaliana]
  misc_feature (210)..(468): NCBI GI NO: 15217853 NR Description: cellulose synthase family [Arabidopsis thaliana]
  misc_feature (16)..(146): NCBI GI NO: 15217853 NR Description: cellulose synthase family [Arabidopsis thaliana]
  misc_feature (474)..(1060): NCBI GI NO: 15237873 NR Description: cellulose synthase family [Arabidopsis thaliana]
  misc_feature (236)..(468): NCBI GI NO: 15237873 NR Description: cellulose synthase family [Arabidopsis thaliana]
  misc_feature (16)..(69): NCBI GI NO: 15237873 NR Description: cellulose synthase family [Arabidopsis thaliana]
  misc_feature (469)..(1070): NCBI GI NO: 15228448 NR Description: cellulose synthase family [Arabidopsis thaliana]
  misc_feature (224)..(468): NCBI GI NO: 15228448 NR Description: cellulose synthase family [Arabidopsis thaliana]
  misc_feature (487)..(1067): NCBI GI NO: 27372782 NR Description: cellulose synthase-like protein D4
  misc_feature (224)..(468): NCBI GI NO: 27372782 NR Description: cellulose synthase-like protein D4
  misc_feature (494)..(494): Xaa is any aa, unknown or other
MEGDADGVKSGRRGGGQVCQICGDGVGTTAEGDVFAACDVCGFPVCRPCYEYERKDGTQACPQCKTKYKRHKGSPAIRGEEGDDTDADSDFNYLASGNEDQKQKIADRMRSWRMNVGGSGDVGRPKYDSGEIGLTKYDSGEIPRGYIPSVTNSQISGEIPGASPDHHMMSPTGNIGKRAPFPYVNHSPNPSREFSGSIGNVAWKERVDGWKMKQDKGTIPMTNGTSIAPSEGRGVGDIDASTDYNMEDALLNDETRQPLSRKVPLPSSRINPYRMVIVLRLIVLSIFLHYRITNPVRNAYPLWLLSVICEIWFALSWILDQFPKWFPINRETYLDRLALRYDREGEPSQLAAVDIFVSTVDPMKEPPLVTANTVLSILAVDYPVDKVSCYVSDDGAAMLTFDALAETSEFARKWVPFVKKYNIEPRAPEWYFSQKIDYLKDKVHPSFVKDRRAMKREYEEFKVRVNGLVAKAQKVPEEGWIMQDGTPWPGNNTXDHPGMIQVFLGHSGGLDTEGNELPRLVYVSREKRPGFQHHKKAGAMNALVRVSAVLTNGQYMLNLDCDHYINNSKALREAMCFLMDPNLGRSVCYVQFPQRFDGIDRNDRYANRNTVFFDINLRGLDGIQGPVYVGTGCVFNRTALYGYEPPIKQKKGGFLSSLCGGRKKASKSKKGSDKKKSQKHVDSSVPVFNLEDIEEGVEGAGFDDEKSLLMSQMSLEKRFGQSAAFVASTLMEYGGVPQSATPESLLKEAIHVISCGYEDKTEWGTEIGWIYGSVTEDILTGFKMHARGWRSIYCMPKRPAFKGSAPINLSDRLNQVLRWALGSVEILFSRHCPLWYGYGGRLKFLERFAYINTTIYPLTSIPLLIYCILPAICLLTGKFIIPEISNFASIWFISLFISIFATGILEMRWSGVGIDEWWRNEQFWVIGGISAHLFAVFQGLLKVLAGIDTNFTVTSKASDEDGDFAELYMFKWTTLLIPPTTILIINLVGVVAGISYAINSGYQSWGPLFGKLFFAFWVIVHLYPFLKGLMGRQNRTPTIVVVWAILLASIFSLLWVRIDPFTTRVTGPDTQTCGINC

SEQ ID NO: 36299 - protein, 969 aa, Zea mays subsp. mays
  peptide (1)..(969): Ceres Seq. ID no. 13666075
  misc_feature (426)..(532): Pfam Name: Pfam Description:  Glycosyl transferase
  misc_feature (409)..(952): NCBI GI NO: 15217853 NR Description: cellulose synthase family [Arabidopsis thaliana]
  misc_feature (102)..(360): NCBI GI NO: 15217853 NR Description: cellulose synthase family [Arabidopsis thaliana]
  misc_feature (1)..(38): NCBI GI NO: 15217853 NR Description: cellulose synthase family [Arabidopsis thaliana]
  misc_feature (366)..(952): NCBI GI NO: 15237873 NR Description: cellulose synthase family [Arabidopsis thaliana]
  misc_feature (128)..(360): NCBI GI NO: 15237873 NR Description: cellulose synthase family [Arabidopsis thaliana]
  misc_feature (361)..(962): NCBI GI NO: 15228448 NR Description: cellulose synthase family [Arabidopsis thaliana]
  misc_feature (116)..(360): NCBI GI NO: 15228448 NR Description: cellulose synthase family [Arabidopsis thaliana]
  misc_feature (379)..(959): NCBI GI NO: 27372782 NR Description: cellulose synthase-like protein D4
  misc_feature (116)..(360): NCBI GI NO: 27372782 NR Description: cellulose synthase-like protein D4
  misc_feature (628)..(969): NCBI GI NO: 15233733 NR Description: cellulose synthase family [Arabidopsis thaliana]
  misc_feature (386)..(386): Xaa is any aa, unknown or other
MRSWRMNVGGSGDVGRPKYDSGEIGLTKYDSGEIPRGYIPSVTNSQISGEIPGASPDHHMMSPTGNIGKRAPFPYVNHSPNPSREFSGSIGNVAWKERVDGWKMKQDKGTIPMTNGTSIAPSEGRGVGDIDASTDYNMEDALLNDETRQPLSRKVPLPSSRINPYRMVIVLRLIVLSIFLHYRITNPVRNAYPLWLLSVICEIWFALSWILDQFPKWFPINRETYLDRLALRYDREGEPSQLAAVDIFVSTVDPMKEPPLVTANTVLSILAVDYPVDKVSCYVSDDGAAMLTFDALAETSEFARKWVPFVKKYNIEPRAPEWYFSQKIDYLKDKVHPSFVKDRRAMKREYEEFKVRVNGLVAKAQKVPEEGWIMQDGTPWPGNNTXDHPGMIQVFLGHSGGLDTEGNELPRLVYVSREKRPGFQHHKKAGAMNALVRVSAVLTNGQYMLNLDCDHYINNSKALREAMCFLMDPNLGRSVCYVQFPQRFDGIDRNDRYANRNTVFFDINLRGLDGIQGPVYVGTGCVFNRTALYGYEPPIKQKKGGFLSSLCGGRKKASKSKKGSDKKKSQKHVDSSVPVFNLEDIEEGVEGAGFDDEKSLLMSQMSLEKRFGQSAAFVASTLMEYGGVPQSATPESLLKEAIHVISCGYEDKTEWGTEIGWIYGSVTEDILTGFKMHARGWRSIYCMPKRPAFKGSAPINLSDRLNQVLRWALGSVEILFSRHCPLWYGYGGRLKFLERFAYINTTIYPLTSIPLLIYCILPAICLLTGKFIIPEISNFASIWFISLFISIFATGILEMRWSGVGIDEWWRNEQFWVIGGISAHLFAVFQGLLKVLAGIDTNFTVTSKASDEDGDFAELYMFKWTTLLIPPTTILIINLVGVVAGISYAINSGYQSWGPLFGKLFFAFWVIVHLYPFLKGLMGRQNRTPTIVVVWAILLASIFSLLWVRIDPFTTRVTGPDTQTCGINC

SEQ ID NO: 36300 - protein, 964 aa, Zea mays subsp. mays
  peptide (1)..(964): Ceres Seq. ID no. 13666076
  misc_feature (421)..(527): Pfam Name: Pfam Description:  Glycosyl transferase
  misc_feature (404)..(947): NCBI GI NO: 15217853 NR Description: cellulose synthase family [Arabidopsis thaliana]
  misc_feature (97)..(355): NCBI GI NO: 15217853 NR Description: cellulose synthase family [Arabidopsis thaliana]
  misc_feature (1)..(33): NCBI GI NO: 15217853 NR Description: cellulose synthase family [Arabidopsis thaliana]
  misc_feature (361)..(947): NCBI GI NO: 15237873 NR Description: cellulose synthase family [Arabidopsis thaliana]
  misc_feature (123)..(355): NCBI GI NO: 15237873 NR Description: cellulose synthase family [Arabidopsis thaliana]
  misc_feature (356)..(957): NCBI GI NO: 15228448 NR Description: cellulose synthase family [Arabidopsis thaliana]
  misc_feature (111)..(355): NCBI GI NO: 15228448 NR Description: cellulose synthase family [Arabidopsis thaliana]
  misc_feature (374)..(954): NCBI GI NO: 27372782 NR Description: cellulose synthase-like protein D4
  misc_feature (111)..(355): NCBI GI NO: 27372782 NR Description: cellulose synthase-like protein D4
  misc_feature (623)..(964): NCBI GI NO: 15233733 NR Description: cellulose synthase family [Arabidopsis thaliana]
  misc_feature (381)..(381): Xaa is any aa, unknown or other
MNVGGSGDVGRPKYDSGEIGLTKYDSGEIPRGYIPSVTNSQISGEIPGASPDHHMMSPTGNIGKRAPFPYVNHSPNPSREFSGSIGNVAWKERVDGWKMKQDKGTIPMTNGTSIAPSEGRGVGDIDASTDYNMEDALLNDETRQPLSRKVPLPSSRINPYRMVIVLRLIVLSIFLHYRITNPVRNAYPLWLLSVICEIWFALSWILDQFPKWFPINRETYLDRLALRYDREGEPSQLAAVDIFVSTVDPMKEPPLVTANTVLSILAVDYPVDKVSCYVSDDGAAMLTFDALAETSEFARKWVPFVKKYNIEPRAPEWYFSQKIDYLKDKVHPSFVKDRRAMKREYEEFKVRVNGLVAKAQKVPEEGWIMQDGTPWPGNNTXDHPGMIQVFLGHSGGLDTEGNELPRLVYVSREKRPGFQHHKKAGAMNALVRVSAVLTNGQYMLNLDCDHYINNSKALREAMCFLMDPNLGRSVCYVQFPQRFDGIDRNDRYANRNTVFFDINLRGLDGIQGPVYVGTGCVFNRTALYGYEPPIKQKKGGFLSSLCGGRKKASKSKKGSDKKKSQKHVDSSVPVFNLEDIEEGVEGAGFDDEKSLLMSQMSLEKRFGQSAAFVASTLMEYGGVPQSATPESLLKEAIHVISCGYEDKTEWGTEIGWIYGSVTEDILTGFKMHARGWRSIYCMPKRPAFKGSAPINLSDRLNQVLRWALGSVEILFSRHCPLWYGYGGRLKFLERFAYINTTIYPLTSIPLLIYCILPAICLLTGKFIIPEISNFASIWFISLFISIFATGILEMRWSGVGIDEWWRNEQFWVIGGISAHLFAVFQGLLKVLAGIDTNFTVTSKASDEDGDFAELYMFKWTTLLIPPTTILIINLVGVVAGISYAINSGYQSWGPLFGKLFFAFWVIVHLYPFLKGLMGRQNRTPTIVVVWAILLASIFSLLWVRIDPFTTRVTGPDTQTCGINC

SEQ ID NO: 36301 - DNA, 1485 bp, Zea mays subsp. mays
  misc_feature (1)..(1485): Ceres Seq. ID no. 13496475
ctgggcgctccgcgtctccgcgcccacccgcctcacctccgccgtcgaggaggacaagaggagctccccccttggggagggggacgagcacgtggcggccagcggcgccgcgggcggggagttcgacccgggggcgccgccgccgttcgggctggcggagatccgcgcggccatccccaagcactgctgggtcaaggacccctggcgctccatggcctacgtgctgcgcgacgtcgtcgtcgtcctggggctcgccgcggccgccgcgcgcctcgacagctggctcgtctggccgctctactgggccgcgcagggcaccatgttctgggcgctcttcgtcctcggccacgactgtggacacgggagcttctcgaacaaccccaagctgaacagcgtggtcggacacatactccattcctccattcttgtcccgtaccacggatggaggattagccacaggacgcaccatcaaaaccacggccacgttgagaaggacgagtcctggcacccgctaccagagaggctgtacaaaagcctggactttatgactaggaaattgcggttcaccatgccgttccccttgctcgcattcccattatacttgttcgcaaggagtccagggaagtcaggatcacacttcaacccaagcagtgatttgttccaacctaatgaaaagaaggacatcataacatcaacggcatcctggctggccatggttggtgttctggctggtctcacctttctgatgggtcctgttgcgatgctaaagctctacggagtcccatactttgtatttgttgcttggctggatatggttacatacttgcaccatcatggccatgaagacaagcttccctggtaccgtggacaggaatggagttatctgcgtggaggactgacgacgctcgaccgggactatggactgattaacaatatccaccatgacattggaactcatgtcatccatcaccttttccctcaaatcccgcattaccatctcattgaggcgaccgaggcagcaaaaccggttcttggcaagtactacaaagaaccaaagaagtcgggtcctctcccgtggcacctgtttggggtgctagcacaaagcttaaagcaagaccactatgttagcgacaccggagacgtagtgtactaccaaactgactcgaaaacgaacacctctgcacaaaaatctgattgacacagagtatagaacgtagcgtattcttcatttttcgcaggcggactgtgcctgaagacctggccagcctcctgagacctctcgattagtgtgtgtgtgtgtgtgtgtgtgtgtgtgaccgggttcgtcaattcaagaatgtaaggtggcgaagtattatcatgtatgcgagtgagggtataattctttcgaatgatcgaagtcggatgctgcttccgatgtaacgaactgtgattctttgcacaagaggtgtactattacagtaaagagtaaaaaaagagttagct

SEQ ID NO: 36302 - protein, 398 aa, Zea mays subsp. mays
  peptide (1)..(398): Ceres Seq. ID no. 13496476
  misc_feature (100)..(344): Pfam Name: Pfam Description:  Fatty acid desaturase
  misc_feature (1)..(398): NCBI GI NO: 7433278 NR Description: omega-3 fatty acid desaturase (EC 1
  misc_feature (1)..(398): NCBI GI NO: 7433277 NR Description: omega-3 fatty acid desaturase (EC 1
  misc_feature (1)..(395): NCBI GI NO: 1345971 NR Description: Omega-3 fatty acid desaturase
  misc_feature (21)..(398): NCBI GI NO: 21668465 NR Description: plastid omega-3 fatty acid desaturase
  misc_feature (1)..(391): NCBI GI NO: 1754795 NR Description: omega-3 fatty acid desaturase
  misc_feature (1)..(397): NCBI GI NO: 1345970 NR Description: Omega-3 fatty acid desaturase
  misc_feature (1)..(387): NCBI GI NO: 7433276 NR Description: omega-3 fatty acid desaturase (EC 1
  misc_feature (1)..(395): NCBI GI NO: 23345021 NR Description: omega-3 fatty acid desaturase [Betula pendula]
  misc_feature (1)..(390): NCBI GI NO: 23345023 NR Description: omega-3 fatty acid desaturase [Betula pendula]
  misc_feature (1)..(398): NCBI GI NO: 1345969 NR Description: Omega-3 fatty acid desaturase
WALRVSAPTRLTSAVEEDKRSSPLGEGDEHVAASGAAGGEFDPGAPPPFGLAEIRAAIPKHCWVKDPWRSMAYVLRDVVVVLGLAAAAARLDSWLVWPLYWAAQGTMFWALFVLGHDCGHGSFSNNPKLNSVVGHILHSSILVPYHGWRISHRTHHQNHGHVEKDESWHPLPERLYKSLDFMTRKLRFTMPFPLLAFPLYLFARSPGKSGSHFNPSSDLFQPNEKKDIITSTASWLAMVGVLAGLTFLMGPVAMLKLYGVPYFVFVAWLDMVTYLHHHGHEDKLPWYRGQEWSYLRGGLTTLDRDYGLINNIHHDIGTHVIHHLFPQIPHYHLIEATEAAKPVLGKYYKEPKKSGPLPWHLFGVLAQSLKQDHYVSDTGDVVYYQTDSKTNTSAQKSD

SEQ ID NO: 36303 - protein, 328 aa, Zea mays subsp. mays
  peptide (1)..(328): Ceres Seq. ID no. 13496477
  misc_feature (30)..(274): Pfam Name: Pfam Description:  Fatty acid desaturase
  misc_feature (1)..(328): NCBI GI NO: 7433278 NR Description: omega-3 fatty acid desaturase (EC 1
  misc_feature (1)..(328): NCBI GI NO: 7433277 NR Description: omega-3 fatty acid desaturase (EC 1
  misc_feature (1)..(325): NCBI GI NO: 1345971 NR Description: Omega-3 fatty acid desaturase
  misc_feature (1)..(328): NCBI GI NO: 21668465 NR Description: plastid omega-3 fatty acid desaturase
  misc_feature (1)..(321): NCBI GI NO: 1754795 NR Description: omega-3 fatty acid desaturase
  misc_feature (1)..(327): NCBI GI NO: 1345970 NR Description: Omega-3 fatty acid desaturase
  misc_feature (1)..(317): NCBI GI NO: 7433276 NR Description: omega-3 fatty acid desaturase (EC 1
  misc_feature (1)..(325): NCBI GI NO: 23345021 NR Description: omega-3 fatty acid desaturase [Betula pendula]
  misc_feature (1)..(320): NCBI GI NO: 23345023 NR Description: omega-3 fatty acid desaturase [Betula pendula]
  misc_feature (1)..(328): NCBI GI NO: 1345969 NR Description: Omega-3 fatty acid desaturase
MAYVLRDVVVVLGLAAAAARLDSWLVWPLYWAAQGTMFWALFVLGHDCGHGSFSNNPKLNSVVGHILHSSILVPYHGWRISHRTHHQNHGHVEKDESWHPLPERLYKSLDFMTRKLRFTMPFPLLAFPLYLFARSPGKSGSHFNPSSDLFQPNEKKDIITSTASWLAMVGVLAGLTFLMGPVAMLKLYGVPYFVFVAWLDMVTYLHHHGHEDKLPWYRGQEWSYLRGGLTTLDRDYGLINNIHHDIGTHVIHHLFPQIPHYHLIEATEAAKPVLGKYYKEPKKSGPLPWHLFGVLAQSLKQDHYVSDTGDVVYYQTDSKTNTSAQKSD

SEQ ID NO: 36304 - protein, 292 aa, Zea mays subsp. mays
  peptide (1)..(292): Ceres Seq. ID no. 13496478
  misc_feature (1)..(238): Pfam Name: Pfam Description:  Fatty acid desaturase
  misc_feature (1)..(292): NCBI GI NO: 7433278 NR Description: omega-3 fatty acid desaturase (EC 1
  misc_feature (1)..(292): NCBI GI NO: 7433277 NR Description: omega-3 fatty acid desaturase (EC 1
  misc_feature (1)..(289): NCBI GI NO: 1345971 NR Description: Omega-3 fatty acid desaturase
  misc_feature (1)..(292): NCBI GI NO: 21668465 NR Description: plastid omega-3 fatty acid desaturase
  misc_feature (1)..(285): NCBI GI NO: 1754795 NR Description: omega-3 fatty acid desaturase
  misc_feature (1)..(291): NCBI GI NO: 1345970 NR Description: Omega-3 fatty acid desaturase
  misc_feature (1)..(281): NCBI GI NO: 7433276 NR Description: omega-3 fatty acid desaturase (EC 1
  misc_feature (1)..(289): NCBI GI NO: 23345021 NR Description: omega-3 fatty acid desaturase [Betula pendula]
  misc_feature (1)..(284): NCBI GI NO: 23345023 NR Description: omega-3 fatty acid desaturase [Betula pendula]
  misc_feature (1)..(292): NCBI GI NO: 1345969 NR Description: Omega-3 fatty acid desaturase
MFWALFVLGHDCGHGSFSNNPKLNSVVGHILHSSILVPYHGWRISHRTHHQNHGHVEKDESWHPLPERLYKSLDFMTRKLRFTMPFPLLAFPLYLFARSPGKSGSHFNPSSDLFQPNEKKDIITSTASWLAMVGVLAGLTFLMGPVAMLKLYGVPYFVFVAWLDMVTYLHHHGHEDKLPWYRGQEWSYLRGGLTTLDRDYGLINNIHHDIGTHVIHHLFPQIPHYHLIEATEAAKPVLGKYYKEPKKSGPLPWHLFGVLAQSLKQDHYVSDTGDVVYYQTDSKTNTSAQKSD

SEQ ID NO: 36305 - DNA, 583 bp, Zea mays subsp. mays
  misc_feature (1)..(583): Ceres Seq. ID no. 3625683
tctaaggactttgctgatgtccatggacttgtcatgcatgcttacaacccaccaaatgcagattcacttgttgatcatcttggtttgcacaaggcattgtgtgttcttatgggatgggattatacaaaagtccctgagaactttaagggctaccaatcattaccttctgaccttgtccaagcaagtagggaggacctcattgtctggccgcctactgttatcattcacaatacttcgactgggaggaagaaagatggtcgcttggagggtttagggaacaaagaaatggataaaaaaatgacagaactagggttttctggtgggaagtcgaagtccttgtatggaaaggaaggacatatgggtttgacacttatcaagtttgcaaacaactcatctggcttgaaggaggctgagcgtcttgctgagtatcttgagaggcaagatcgtggacgtataggttggtcacgcgctcatgccagtcgttctgtagattcagatcagaaccctttgttggtcgagacggataccaggacagctgagaaaaagaggatactttatgggtacctarcaattgcatccgatc

SEQ ID NO: 36306 - protein, 194 aa, Zea mays subsp. mays
  peptide (1)..(194): Ceres Seq. ID no. 3625684
  misc_feature (63)..(191): Pfam Name: Pfam Description:  XS domain
  misc_feature (1)..(193): NCBI GI NO: 22773240 NR Description: Hypothetical protein
  misc_feature (12)..(193): NCBI GI NO: 9293880 NR Description: gene_id:MCB17.19~unknown protein
  misc_feature (37)..(193): NCBI GI NO: 30686649 NR Description: expressed protein [Arabidopsis thaliana]
  misc_feature (88)..(193): NCBI GI NO: 15081713 NR Description: AT3g22430/MCB17_17 [Arabidopsis thaliana]
  misc_feature (3)..(156): NCBI GI NO: 15237789 NR Description: putative protein; protein id: At5g23570.1
  misc_feature (190)..(190): Xaa is any aa, unknown or other
SKDFADVHGLVMHAYNPPNADSLVDHLGLHKALCVLMGWDYTKVPENFKGYQSLPSDLVQASREDLIVWPPTVIIHNTSTGRKKDGRLEGLGNKEMDKKMTELGFSGGKSKSLYGKEGHMGLTLIKFANNSSGLKEAERLAEYLERQDRGRIGWSRAHASRSVDSDQNPLLVETDTRTAEKKRILYGYLXIASD

SEQ ID NO: 36307 - protein, 183 aa, Zea mays subsp. mays
  peptide (1)..(183): Ceres Seq. ID no. 3625685
  misc_feature (52)..(180): Pfam Name: Pfam Description:  XS domain
  misc_feature (1)..(182): NCBI GI NO: 22773240 NR Description: Hypothetical protein
  misc_feature (1)..(182): NCBI GI NO: 9293880 NR Description: gene_id:MCB17.19~unknown protein
  misc_feature (26)..(182): NCBI GI NO: 30686649 NR Description: expressed protein [Arabidopsis thaliana]
  misc_feature (77)..(182): NCBI GI NO: 15081713 NR Description: AT3g22430/MCB17_17 [Arabidopsis thaliana]
  misc_feature (1)..(145): NCBI GI NO: 15237789 NR Description: putative protein; protein id: At5g23570.1
  misc_feature (179)..(179): Xaa is any aa, unknown or other
MHAYNPPNADSLVDHLGLHKALCVLMGWDYTKVPENFKGYQSLPSDLVQASREDLIVWPPTVIIHNTSTGRKKDGRLEGLGNKEMDKKMTELGFSGGKSKSLYGKEGHMGLTLIKFANNSSGLKEAERLAEYLERQDRGRIGWSRAHASRSVDSDQNPLLVETDTRTAEKKRILYGYLXIASD

SEQ ID NO: 36308 - protein, 158 aa, Zea mays subsp. mays
  peptide (1)..(158): Ceres Seq. ID no. 3625686
  misc_feature (27)..(155): Pfam Name: Pfam Description:  XS domain
  misc_feature (1)..(157): NCBI GI NO: 22773240 NR Description: Hypothetical protein
  misc_feature (1)..(157): NCBI GI NO: 9293880 NR Description: gene_id:MCB17.19~unknown protein
  misc_feature (1)..(157): NCBI GI NO: 30686649 NR Description: expressed protein [Arabidopsis thaliana]
  misc_feature (52)..(157): NCBI GI NO: 15081713 NR Description: AT3g22430/MCB17_17 [Arabidopsis thaliana]
  misc_feature (1)..(120): NCBI GI NO: 15237789 NR Description: putative protein; protein id: At5g23570.1
  misc_feature (154)..(154): Xaa is any aa, unknown or other
MGWDYTKVPENFKGYQSLPSDLVQASREDLIVWPPTVIIHNTSTGRKKDGRLEGLGNKEMDKKMTELGFSGGKSKSLYGKEGHMGLTLIKFANNSSGLKEAERLAEYLERQDRGRIGWSRAHASRSVDSDQNPLLVETDTRTAEKKRILYGYLXIASD

SEQ ID NO: 36309 - DNA, 548 bp, Zea mays subsp. mays
  misc_feature (1)..(548): Ceres Seq. ID no. 3625697
tcaacatctacgacatctcccccctcaaccactacctctactggttcggactcggcatcttccactccgggatccaagtccatggcatggagtatggctttggagctcatgaataccccaccagcggagtcttccaagtagaacccaaaagctgccccgggtttatcttcaggcgctctgtgtgtgtgggtgtaactcacatgtcccgttcccaagtccgcacttccatagaggatctcgccgaggattatcatggggacacttatcatttgattctcaagaactgcaatcatttcacagcagatgtctgcgagcgtttgaccgggaagccagtacctggatgggtgaatcgactcgccagattaggttccttcttcaattgtgtattgcctgacagcatcaaggtttcagcagtcagagatgtaaatgcacatccagatttttctggtactctacctacacccagtttaactacttgtaccttcacattcacatcacatggttggaatttgaccttacagaatcatgtaccactttattaaagattg

SEQ ID NO: 36310 - protein, 179 aa, Zea mays subsp. mays
  peptide (1)..(179): Ceres Seq. ID no. 3625698
  misc_feature (1)..(119): Pfam Name: DUF862 Pfam Description: Eukaryotic protein of unknown function
  misc_feature (1)..(148): NCBI GI NO: 38346173 NR Description: OSJNBa0079A21.20
  misc_feature (1)..(146): NCBI GI NO: 15238059 NR Description: putative protein; protein id: At5g47310.1
  misc_feature (1)..(148): NCBI GI NO: 30684058 NR Description: expressed protein [Arabidopsis thaliana]
  misc_feature (19)..(148): NCBI GI NO: 7488100 NR Description: probable EREBP-4 - Arabidopsis thaliana
  misc_feature (1)..(25): NCBI GI NO: 7488100 NR Description: probable EREBP-4 - Arabidopsis thaliana
  misc_feature (1)..(138): NCBI GI NO: 18401869 NR Description: expressed protein; protein id: At1g47740
  misc_feature (1)..(138): NCBI GI NO: 21593644 NR Description: unknown [Arabidopsis thaliana]
  misc_feature (1)..(143): NCBI GI NO: 18420889 NR Description: putative protein; protein id: At5g25170
  misc_feature (1)..(138): NCBI GI NO: 9802596 NR Description: T2E6.19 [Arabidopsis thaliana]
  misc_feature (1)..(148): NCBI GI NO: 18412886 NR Description: expressed protein; protein id: At1g80690
NIYDISPLNHYLYWFGLGIFHSGIQVHGMEYGFGAHEYPTSGVFQVEPKSCPGFIFRRSVCVGVTHMSRSQVRTSIEDLAEDYHGDTYHLILKNCNHFTADVCERLTGKPVPGWVNRLARLGSFFNCVLPDSIKVSAVRDVNAHPDFSGTLPTPSLTTCTFTFTSHGWNLTLQNHVPLY

SEQ ID NO: 36311 - protein, 151 aa, Zea mays subsp. mays
  peptide (1)..(151): Ceres Seq. ID no. 3625699
  misc_feature (1)..(91): Pfam Name: DUF862 Pfam Description: Eukaryotic protein of unknown function
  misc_feature (1)..(120): NCBI GI NO: 38346173 NR Description: OSJNBa0079A21.20
  misc_feature (1)..(118): NCBI GI NO: 15238059 NR Description: putative protein; protein id: At5g47310.1
  misc_feature (1)..(120): NCBI GI NO: 30684058 NR Description: expressed protein [Arabidopsis thaliana]
  misc_feature (1)..(120): NCBI GI NO: 7488100 NR Description: probable EREBP-4 - Arabidopsis thaliana
  misc_feature (1)..(110): NCBI GI NO: 18401869 NR Description: expressed protein; protein id: At1g47740
  misc_feature (1)..(110): NCBI GI NO: 21593644 NR Description: unknown [Arabidopsis thaliana]
  misc_feature (1)..(115): NCBI GI NO: 18420889 NR Description: putative protein; protein id: At5g25170
  misc_feature (1)..(110): NCBI GI NO: 9802596 NR Description: T2E6.19 [Arabidopsis thaliana]
  misc_feature (1)..(120): NCBI GI NO: 18412886 NR Description: expressed protein; protein id: At1g80690
  misc_feature (1)..(113): NCBI GI NO: 18400749 NR Description: expressed protein; protein id: At2g25190
MEYGFGAHEYPTSGVFQVEPKSCPGFIFRRSVCVGVTHMSRSQVRTSIEDLAEDYHGDTYHLILKNCNHFTADVCERLTGKPVPGWVNRLARLGSFFNCVLPDSIKVSAVRDVNAHPDFSGTLPTPSLTTCTFTFTSHGWNLTLQNHVPLY

SEQ ID NO: 36312 - protein, 113 aa, Zea mays subsp. mays
  peptide (1)..(113): Ceres Seq. ID no. 3625700
  misc_feature (1)..(53): Pfam Name: DUF862 Pfam Description: Eukaryotic protein of unknown function
  misc_feature (1)..(82): NCBI GI NO: 38346173 NR Description: OSJNBa0079A21.20
  misc_feature (1)..(80): NCBI GI NO: 15238059 NR Description: putative protein; protein id: At5g47310.1
  misc_feature (1)..(82): NCBI GI NO: 30684058 NR Description: expressed protein [Arabidopsis thaliana]
  misc_feature (1)..(82): NCBI GI NO: 7488100 NR Description: probable EREBP-4 - Arabidopsis thaliana
  misc_feature (1)..(72): NCBI GI NO: 18401869 NR Description: expressed protein; protein id: At1g47740
  misc_feature (1)..(72): NCBI GI NO: 21593644 NR Description: unknown [Arabidopsis thaliana]
  misc_feature (1)..(77): NCBI GI NO: 18420889 NR Description: putative protein; protein id: At5g25170
  misc_feature (1)..(72): NCBI GI NO: 9802596 NR Description: T2E6.19 [Arabidopsis thaliana]
  misc_feature (1)..(82): NCBI GI NO: 18412886 NR Description: expressed protein; protein id: At1g80690
  misc_feature (1)..(75): NCBI GI NO: 18400749 NR Description: expressed protein; protein id: At2g25190
MSRSQVRTSIEDLAEDYHGDTYHLILKNCNHFTADVCERLTGKPVPGWVNRLARLGSFFNCVLPDSIKVSAVRDVNAHPDFSGTLPTPSLTTCTFTFTSHGWNLTLQNHVPLY

SEQ ID NO: 36313 - DNA, 456 bp, Zea mays subsp. mays
  misc_feature (1)..(456): Ceres Seq. ID no. 5761952
gatcaagaagccgcagtccaaggccaaggcacagagacagagatcatagaagccaaagtcgcagcaggagcagagaaaggcatgtccgtgatagagacaggggctatcgtcgtcggagcagaagtagaagccgaagtcttagttcaagccctgacaacagaagtcatcatagagcaagagatgatgataagcgcaagagtatgagtaagagcaggagcaggagcacaagtagaagccgctcatactatagtgcttcacctgcccggcacagtgctagccctcgcaagagcccaccgccacagaggagccccactcctgcaaagcatgccaatggaaaagtagcacctctgtcacgctgtgtttctccattaccgaagcgtgcaacctcccsgcagcccaggcagtgatggcagggcaattcacgtcaggagtaaagcttgctgatttggtgatgcc

SEQ ID NO: 36314 - protein, 134 aa, Zea mays subsp. mays
  peptide (1)..(134): Ceres Seq. ID no. 5761953
  misc_feature (39)..(108): Pfam Name: Pfam Description:  Nuclear transition protein 2
  misc_feature (1)..(122): NCBI GI NO: 7446336 NR Description: probable arginine/serine-rich splicing factor -alfalfa
  misc_feature (4)..(134): NCBI GI NO: 7446336 NR Description: probable arginine/serine-rich splicing factor -alfalfa
  misc_feature (1)..(131): NCBI GI NO: 33146621 NR Description: putative splicing factor, arginine/serine-rich 2
  misc_feature (2)..(132): NCBI GI NO: 9843653 NR Description: splicing factor SC35 [Arabidopsis thaliana]
  misc_feature (2)..(132): NCBI GI NO: 15237641 NR Description: arginine/serine-rich splicing factor SC35
  misc_feature (2)..(103): NCBI GI NO: 21751099 NR Description: unnamed protein product [Homo sapiens]
  misc_feature (1)..(131): NCBI GI NO: 7446336 NR Description: probable arginine/serine-rich splicing factor -alfalfa
  misc_feature (2)..(114): NCBI GI NO: 39794351 NR Description: Unknown (protein for MGC:75633)
  misc_feature (1)..(114): NCBI GI NO: 26351271 NR Description: unnamed protein product [Mus musculus]
  misc_feature (1)..(114): NCBI GI NO: 26377499 NR Description: unnamed protein product [Mus musculus]
  misc_feature (130)..(130): Xaa is any aa, unknown or other
SRSRSPRPRHRDRDHRSQSRSRSRERHVRDRDRGYRRRSRSRSRSLSSSPDNRSHHRARDDDKRKSMSKSRSRSTSRSRSYYSASPARHSASPRKSPPPQRSPTPAKHANGKVAPLSRCVSPLPKRATSXQPRQ

SEQ ID NO: 36315 - protein, 68 aa, Zea mays subsp. mays
  peptide (1)..(68): Ceres Seq. ID no. 5761954
  misc_feature (1)..(56): NCBI GI NO: 7446336 NR Description: probable arginine/serine-rich splicing factor -alfalfa
  misc_feature (1)..(68): NCBI GI NO: 7446336 NR Description: probable arginine/serine-rich splicing factor -alfalfa
  misc_feature (1)..(65): NCBI GI NO: 33146621 NR Description: putative splicing factor, arginine/serine-rich 2
  misc_feature (1)..(66): NCBI GI NO: 9843653 NR Description: splicing factor SC35 [Arabidopsis thaliana]
  misc_feature (1)..(66): NCBI GI NO: 15237641 NR Description: arginine/serine-rich splicing factor SC35
  misc_feature (1)..(37): NCBI GI NO: 21751099 NR Description: unnamed protein product [Homo sapiens]
  misc_feature (1)..(65): NCBI GI NO: 7446336 NR Description: probable arginine/serine-rich splicing factor -alfalfa
  misc_feature (1)..(48): NCBI GI NO: 39794351 NR Description: Unknown (protein for MGC:75633)
  misc_feature (1)..(48): NCBI GI NO: 26351271 NR Description: unnamed protein product [Mus musculus]
  misc_feature (1)..(48): NCBI GI NO: 26377499 NR Description: unnamed protein product [Mus musculus]
  misc_feature (64)..(64): Xaa is any aa, unknown or other
MSKSRSRSTSRSRSYYSASPARHSASPRKSPPPQRSPTPAKHANGKVAPLSRCVSPLPKRATSXQPRQ

SEQ ID NO: 36316 - protein, 67 aa, Zea mays subsp. mays
  peptide (1)..(67): Ceres Seq. ID no. 5761955
DQEAAVQGQGTETEIIEAKVAAGAEKGMSVIETGAIVVGAEVEAEVLVQALTTEVIIEQEMMISARV

SEQ ID NO: 36317 - DNA, 643 bp, Zea mays subsp. mays
  misc_feature (1)..(643): Ceres Seq. ID no. 12468172
gctatcatgagccatcccatcccaaatactgctgaatctcactcagtacagatcatattaccacagaagcaacttggccgcagatcagacatgtatgttttctgctgttcctactctcataatgtcgcatcaaaaggcaaattcatcgcattcgtgtcagcacaagcggagactgataatccagagaaggaactaaagccagggatcgatcttcttgggaaggtggacgagttatttatcgacatatatgacagatatgaacctaccaatgactcatcagcagacaattgtttcatctcaacaagttatgatgccacaacacactttgagtccactgttatggatgtactttccctttacacaaagatcaccggaaagactgttgatctcagcgtggatctaagcgctgctagtgctgctgaagatgatatgtgatacttatcgtagtgctatgtggcgtagtgtggaaaatatttaattaagctttgctttggcaacgattattaggttcacctttatttttccaattgttgttattagctgtgttgtgaccatgattaaagattgcatgctgtaaatttgaaggcattttttttatcaaaagttgttaacgcggtgatccgtgtttagatttttgaagggt

SEQ ID NO: 36318 - protein, 144 aa, Zea mays subsp. mays
  peptide (1)..(144): Ceres Seq. ID no. 12468173
  misc_feature (32)..(136): Pfam Name: Pfam Description:  GDP dissociation inhibitor
  misc_feature (1)..(144): NCBI GI NO: 33146460 NR Description: putative GDP dissociation inhibitor
  misc_feature (1)..(142): NCBI GI NO: 7489479 NR Description: GDP dissociation inhibitor protein - rice
  misc_feature (1)..(141): NCBI GI NO: 7489478 NR Description: GDP dissociation inhibitor protein - rice
  misc_feature (1)..(142): NCBI GI NO: 3175990 NR Description: GDP dissociation inhibitor [Cicer arietinum]
  misc_feature (1)..(142): NCBI GI NO: 15232210 NR Description: Rab GDP dissociation inhibitor
  misc_feature (1)..(143): NCBI GI NO: 15224814 NR Description: GDP dissociation inhibitor; protein id:At2g44100
  misc_feature (1)..(143): NCBI GI NO: 17473582 NR Description: GDP dissociation inhibitor [Arabidopsis thaliana]
  misc_feature (1)..(142): NCBI GI NO: 7489133 NR Description: GDP dissociation inhibitor - common tobacco
  misc_feature (1)..(143): NCBI GI NO: 1550740 NR Description: GDP-associated inhibitor [Arabidopsis thaliana]
  misc_feature (1)..(143): NCBI GI NO: 21592535 NR Description: GDP dissociation inhibitor [Arabidopsis thaliana]
AIMSHPIPNTAESHSVQIILPQKQLGRRSDMYVFCCSYSHNVASKGKFIAFVSAQAETDNPEKELKPGIDLLGKVDELFIDIYDRYEPTNDSSADNCFISTSYDATTHFESTVMDVLSLYTKITGKTVDLSVDLSAASAAEDDM

SEQ ID NO: 36319 - protein, 142 aa, Zea mays subsp. mays
  peptide (1)..(142): Ceres Seq. ID no. 12468174
  misc_feature (30)..(134): Pfam Name: Pfam Description:  GDP dissociation inhibitor
  misc_feature (1)..(142): NCBI GI NO: 33146460 NR Description: putative GDP dissociation inhibitor
  misc_feature (1)..(140): NCBI GI NO: 7489479 NR Description: GDP dissociation inhibitor protein - rice
  misc_feature (1)..(139): NCBI GI NO: 7489478 NR Description: GDP dissociation inhibitor protein - rice
  misc_feature (1)..(140): NCBI GI NO: 3175990 NR Description: GDP dissociation inhibitor [Cicer arietinum]
  misc_feature (1)..(140): NCBI GI NO: 15232210 NR Description: Rab GDP dissociation inhibitor
  misc_feature (1)..(141): NCBI GI NO: 15224814 NR Description: GDP dissociation inhibitor; protein id:At2g44100
  misc_feature (1)..(141): NCBI GI NO: 17473582 NR Description: GDP dissociation inhibitor [Arabidopsis thaliana]
  misc_feature (1)..(140): NCBI GI NO: 7489133 NR Description: GDP dissociation inhibitor - common tobacco
  misc_feature (1)..(141): NCBI GI NO: 1550740 NR Description: GDP-associated inhibitor [Arabidopsis thaliana]
  misc_feature (1)..(141): NCBI GI NO: 21592535 NR Description: GDP dissociation inhibitor [Arabidopsis thaliana]
MSHPIPNTAESHSVQIILPQKQLGRRSDMYVFCCSYSHNVASKGKFIAFVSAQAETDNPEKELKPGIDLLGKVDELFIDIYDRYEPTNDSSADNCFISTSYDATTHFESTVMDVLSLYTKITGKTVDLSVDLSAASAAEDDM

SEQ ID NO: 36320 - protein, 114 aa, Zea mays subsp. mays
  peptide (1)..(114): Ceres Seq. ID no. 12468175
  misc_feature (2)..(106): Pfam Name: Pfam Description:  GDP dissociation inhibitor
  misc_feature (1)..(114): NCBI GI NO: 33146460 NR Description: putative GDP dissociation inhibitor
  misc_feature (1)..(112): NCBI GI NO: 7489479 NR Description: GDP dissociation inhibitor protein - rice
  misc_feature (1)..(111): NCBI GI NO: 7489478 NR Description: GDP dissociation inhibitor protein - rice
  misc_feature (1)..(112): NCBI GI NO: 3175990 NR Description: GDP dissociation inhibitor [Cicer arietinum]
  misc_feature (1)..(112): NCBI GI NO: 15232210 NR Description: Rab GDP dissociation inhibitor
  misc_feature (1)..(113): NCBI GI NO: 15224814 NR Description: GDP dissociation inhibitor; protein id:At2g44100
  misc_feature (1)..(113): NCBI GI NO: 17473582 NR Description: GDP dissociation inhibitor [Arabidopsis thaliana]
  misc_feature (1)..(112): NCBI GI NO: 7489133 NR Description: GDP dissociation inhibitor - common tobacco
  misc_feature (1)..(113): NCBI GI NO: 1550740 NR Description: GDP-associated inhibitor [Arabidopsis thaliana]
  misc_feature (1)..(113): NCBI GI NO: 21592535 NR Description: GDP dissociation inhibitor [Arabidopsis thaliana]
MYVFCCSYSHNVASKGKFIAFVSAQAETDNPEKELKPGIDLLGKVDELFIDIYDRYEPTNDSSADNCFISTSYDATTHFESTVMDVLSLYTKITGKTVDLSVDLSAASAAEDDM

SEQ ID NO: 36321 - DNA, 2053 bp, Zea mays subsp. mays; identical to SEQ ID NO: 27232
  misc_feature (1)..(2053): Ceres Seq. ID no. 13577863
  misc_feature (1648)..(1648): n is a, c, t, g, unknown, or other
  misc_feature (638)..(638): n is a, c, t, g, unknown, or other
  misc_feature (518)..(518): n is a, c, t, g, unknown, or other
  misc_feature (132)..(132): n is a, c, t, g, unknown, or other

SEQ ID NO: 36322 - protein, 362 aa, Zea mays subsp. mays; identical to SEQ ID NO: 27233
  peptide (1)..(362): Ceres Seq. ID no. 13577864
  misc_feature (100)..(362): Pfam Name: Pfam Description:  TCP-1/cpn60 chaperonin family
  misc_feature (61)..(362): NCBI GI NO: 18396719 NR Description: chaperonin, putative [Arabidopsis thaliana]
  misc_feature (61)..(362): NCBI GI NO: 6223641 NR Description: putative T-complex protein 1, theta subunit
  misc_feature (71)..(361): NCBI GI NO: 27924345 NR Description: Similar to chaperonin containing TCP1, subunit 8
  misc_feature (72)..(362): NCBI GI NO: 17066726 NR Description: CCT chaperonin theta subunit
  misc_feature (71)..(361): NCBI GI NO: 29791676 NR Description: Similar to chaperonin containing TCP1, subunit 8
  misc_feature (71)..(361): NCBI GI NO: 37362194 NR Description: chaperonin containing TCP1, subunit 8 (theta)
  misc_feature (71)..(361): NCBI GI NO: 9988062 NR Description: T-complex protein 1, theta subunit
  misc_feature (71)..(361): NCBI GI NO: 6005727 NR Description: chaperonin containing TCP1, subunit 8
  misc_feature (71)..(361): NCBI GI NO: 1136741 NR Description: KIAA0002 [Homo sapiens]
  misc_feature (71)..(361): NCBI GI NO: 23478707 NR Description: T-complex protein 1 [Plasmodium yoelii yoelii]
  misc_feature (44)..(44): Xaa is any aa, unknown or other
  misc_feature (173)..(173): Xaa is any aa, unknown or other
  misc_feature (213)..(213): Xaa is any aa, unknown or other

SEQ ID NO: 36323 - protein, 302 aa, Zea mays subsp. mays; identical to SEQ ID NO: 27234
  peptide (1)..(302): Ceres Seq. ID no. 13577865
  misc_feature (40)..(302): Pfam Name: Pfam Description:  TCP-1/cpn60 chaperonin family
  misc_feature (1)..(302): NCBI GI NO: 18396719 NR Description: chaperonin, putative [Arabidopsis thaliana]
  misc_feature (1)..(302): NCBI GI NO: 6223641 NR Description: putative T-complex protein 1, theta subunit
  misc_feature (11)..(301): NCBI GI NO: 27924345 NR Description: Similar to chaperonin containing TCP1, subunit 8
  misc_feature (12)..(302): NCBI GI NO: 17066726 NR Description: CCT chaperonin theta subunit
  misc_feature (11)..(301): NCBI GI NO: 29791676 NR Description: Similar to chaperonin containing TCP1, subunit 8
  misc_feature (11)..(301): NCBI GI NO: 37362194 NR Description: chaperonin containing TCP1, subunit 8 (theta)
  misc_feature (11)..(301): NCBI GI NO: 9988062 NR Description: T-complex protein 1, theta subunit
  misc_feature (11)..(301): NCBI GI NO: 6005727 NR Description: chaperonin containing TCP1, subunit 8
  misc_feature (11)..(301): NCBI GI NO: 1136741 NR Description: KIAA0002 [Homo sapiens]
  misc_feature (11)..(301): NCBI GI NO: 23478707 NR Description: T-complex protein 1 [Plasmodium yoelii yoelii]
  misc_feature (113)..(113): Xaa is any aa, unknown or other
  misc_feature (153)..(153): Xaa is any aa, unknown or other

SEQ ID NO: 36324 - protein, 296 aa, Zea mays subsp. mays; identical to SEQ ID NO: 27235
  peptide (1)..(296): Ceres Seq. ID no. 13577866
  misc_feature (34)..(296): Pfam Name: Pfam Description:  TCP-1/cpn60 chaperonin family
  misc_feature (1)..(296): NCBI GI NO: 18396719 NR Description: chaperonin, putative [Arabidopsis thaliana]
  misc_feature (1)..(296): NCBI GI NO: 6223641 NR Description: putative T-complex protein 1, theta subunit
  misc_feature (5)..(295): NCBI GI NO: 27924345 NR Description: Similar to chaperonin containing TCP1, subunit 8
  misc_feature (6)..(296): NCBI GI NO: 17066726 NR Description: CCT chaperonin theta subunit
  misc_feature (5)..(295): NCBI GI NO: 29791676 NR Description: Similar to chaperonin containing TCP1, subunit 8
  misc_feature (5)..(295): NCBI GI NO: 37362194 NR Description: chaperonin containing TCP1, subunit 8 (theta)
  misc_feature (5)..(295): NCBI GI NO: 9988062 NR Description: T-complex protein 1, theta subunit
  misc_feature (5)..(295): NCBI GI NO: 6005727 NR Description: chaperonin containing TCP1, subunit 8
  misc_feature (5)..(295): NCBI GI NO: 1136741 NR Description: KIAA0002 [Homo sapiens]
  misc_feature (5)..(295): NCBI GI NO: 23478707 NR Description: T-complex protein 1 [Plasmodium yoelii yoelii]
  misc_feature (107)..(107): Xaa is any aa, unknown or other
  misc_feature (147)..(147): Xaa is any aa, unknown or other

SEQ ID NO: 36325 - DNA, 1012 bp, Zea mays subsp. mays
  misc_feature (1)..(1012): Ceres Seq. ID no. 12450646
aggagtaggtgtagccgcgtaagcggcgtaggcctcagctcggctcagcagccgcctcgctcgaaccagaggagccaagcagaggaagcgaggcggcgggggcggagatgtcggcgggactggtgaccgacgaggccaccgtggggcggctgtaccggatccggcgcacggtgatgcagatgctccgtgaccgtggctacctggtggtggaccacgagctcgccaccagccgccgcgacttcctccgcaagttcggcgagtccttccaccgcgaggacctcctcatcaacaagtacaagaagaacgacccatccgaccagatatatgtcttcttccccaacgatgacaaggtagggatgaagcacatcaagaagtacgtcgaaatgatgacgcacgagaacgtctccagagctgtgctggttctccagcagaacctaactccgtttgcgaagtcgtttctcatagagctggagccgaagatccatctggaaattttccaggaggccgagatgcttataaacatcaaggaacatgtccttgttcctgagcatcaggtgctcacaaacgaggagaagaagacgcttctggagcggtacaccttgaaggaaactcagcttccaagaatacagatcacggatcctattgctaggtactacggcctgaggcgaggccaggtcgtgaagatcatcaggcccagcgagacggcgggcagatacgttacataccgctacgttgtatgacagaacgtcagaacactgaagaagaagaagagaaccacagatatgtcaaaaaaaattcaagctacacataccccacgtgcttgcagacatcagtatcgcttttgtagcagcagccactggtaacgatctgtggctgatgtgtaagtggattgaataagctgagtcagagcatacgagaattctcatgttgtacacttgtgttttatgaaccgcataaacactcacgacgataaaagaagcctgttttcggagcgacagaagctcctgcgatc

SEQ ID NO: 36326 - protein, 210 aa, Zea mays subsp. mays
  peptide (1)..(210): Ceres Seq. ID no. 12450647
  misc_feature (137)..(210): Pfam Name: Pfam Description:  RNA polymerase Rpb5, C-terminal domain
  misc_feature (5)..(210): NCBI GI NO: 15228724 NR Description: RNA polymerase I, II and III 24
  misc_feature (5)..(210): NCBI GI NO: 38344231 NR Description: OJ991113_30.8
  misc_feature (8)..(209): NCBI GI NO: 2135016 NR Description: DNA-directed RNA polymerase (EC 2
  misc_feature (5)..(210): NCBI GI NO: 39595790 NR Description: Hypothetical protein CBG12745
  misc_feature (8)..(209): NCBI GI NO: 1173134 NR Description: DNA-directed RNA polymerase II 23 kDa polypeptide
  misc_feature (8)..(209): NCBI GI NO: 28497750 NR Description: polymerase (RNA) II (DNA directed) polypeptide E
  misc_feature (5)..(210): NCBI GI NO: 17507947 NR Description: RNA polymerase Rpb5
  misc_feature (8)..(209): NCBI GI NO: 14589951 NR Description: DNA directed RNA polymerase II polypeptide E
  misc_feature (8)..(209): NCBI GI NO: 2896797 NR Description: RPB5_Human [Homo sapiens]
  misc_feature (8)..(209): NCBI GI NO: 19922004 NR Description: CG11979-PA [Drosophila melanogaster]
MSAGLVTDEATVGRLYRIRRTVMQMLRDRGYLVVDHELATSRRDFLRKFGESFHREDLLINKYKKNDPSDQIYVFFPNDDKVGMKHIKKYVEMMTHENVSRAVLVLQQNLTPFAKSFLIELEPKIHLEIFQEAEMLINIKEHVLVPEHQVLTNEEKKTLLERYTLKETQLPRIQITDPIARYYGLRRGQVVKIIRPSETAGRYVTYRYVV

SEQ ID NO: 36327 - protein, 188 aa, Zea mays subsp. mays
  peptide (1)..(188): Ceres Seq. ID no. 12450648
  misc_feature (115)..(188): Pfam Name: Pfam Description:  RNA polymerase Rpb5, C-terminal domain
  misc_feature (1)..(188): NCBI GI NO: 15228724 NR Description: RNA polymerase I, II and III 24
  misc_feature (1)..(188): NCBI GI NO: 38344231 NR Description: OJ991113_30.8
  misc_feature (1)..(187): NCBI GI NO: 2135016 NR Description: DNA-directed RNA polymerase (EC 2
  misc_feature (1)..(188): NCBI GI NO: 39595790 NR Description: Hypothetical protein CBG12745
  misc_feature (1)..(187): NCBI GI NO: 1173134 NR Description: DNA-directed RNA polymerase II 23 kDa polypeptide
  misc_feature (1)..(187): NCBI GI NO: 28497750 NR Description: polymerase (RNA) II (DNA directed) polypeptide E
  misc_feature (1)..(188): NCBI GI NO: 17507947 NR Description: RNA polymerase Rpb5
  misc_feature (1)..(187): NCBI GI NO: 14589951 NR Description: DNA directed RNA polymerase II polypeptide E
  misc_feature (1)..(187): NCBI GI NO: 2896797 NR Description: RPB5_Human [Homo sapiens]
  misc_feature (1)..(187): NCBI GI NO: 19922004 NR Description: CG11979-PA [Drosophila melanogaster]
MQMLRDRGYLVVDHELATSRRDFLRKFGESFHREDLLINKYKKNDPSDQIYVFFPNDDKVGMKHIKKYVEMMTHENVSRAVLVLQQNLTPFAKSFLIELEPKIHLEIFQEAEMLINIKEHVLVPEHQVLTNEEKKTLLERYTLKETQLPRIQITDPIARYYGLRRGQVVKIIRPSETAGRYVTYRYVV

SEQ ID NO: 36328 - protein, 186 aa, Zea mays subsp. mays
  peptide (1)..(186): Ceres Seq. ID no. 12450649
  misc_feature (113)..(186): Pfam Name: Pfam Description:  RNA polymerase Rpb5, C-terminal domain
  misc_feature (1)..(186): NCBI GI NO: 15228724 NR Description: RNA polymerase I, II and III 24
  misc_feature (1)..(186): NCBI GI NO: 38344231 NR Description: OJ991113_30.8
  misc_feature (1)..(185): NCBI GI NO: 2135016 NR Description: DNA-directed RNA polymerase (EC 2
  misc_feature (1)..(186): NCBI GI NO: 39595790 NR Description: Hypothetical protein CBG12745
  misc_feature (1)..(185): NCBI GI NO: 1173134 NR Description: DNA-directed RNA polymerase II 23 kDa polypeptide
  misc_feature (1)..(185): NCBI GI NO: 28497750 NR Description: polymerase (RNA) II (DNA directed) polypeptide E
  misc_feature (1)..(186): NCBI GI NO: 17507947 NR Description: RNA polymerase Rpb5
  misc_feature (1)..(185): NCBI GI NO: 14589951 NR Description: DNA directed RNA polymerase II polypeptide E
  misc_feature (1)..(185): NCBI GI NO: 2896797 NR Description: RPB5_Human [Homo sapiens]
  misc_feature (1)..(185): NCBI GI NO: 19922004 NR Description: CG11979-PA [Drosophila melanogaster]
MLRDRGYLVVDHELATSRRDFLRKFGESFHREDLLINKYKKNDPSDQIYVFFPNDDKVGMKHIKKYVEMMTHENVSRAVLVLQQNLTPFAKSFLIELEPKIHLEIFQEAEMLINIKEHVLVPEHQVLTNEEKKTLLERYTLKETQLPRIQITDPIARYYGLRRGQVVKIIRPSETAGRYVTYRYVV

SEQ ID NO: 36329 - DNA, 916 bp, Zea mays subsp. mays
  misc_feature (1)..(916): Ceres Seq. ID no. 12468118
  misc_feature (607)..(607): n is a, c, t, g, unknown, or other
  misc_feature (543)..(543): n is a, c, t, g, unknown, or other
  misc_feature (645)..(645): n is a, c, t, g, unknown, or other
  misc_feature (851)..(851): n is a, c, t, g, unknown, or other
  misc_feature (898)..(898): n is a, c, t, g, unknown, or other
  misc_feature (572)..(572): n is a, c, t, g, unknown, or other
  misc_feature (712)..(712): n is a, c, t, g, unknown, or other
  misc_feature (614)..(614): n is a, c, t, g, unknown, or other
  misc_feature (623)..(623): n is a, c, t, g, unknown, or other
  misc_feature (792)..(792): n is a, c, t, g, unknown, or other
  misc_feature (903)..(903): n is a, c, t, g, unknown, or other
agcaacccaacccacatccaccggaagatgagagctccagctccagctgctcctattcccgcgctgctctcccgctgctcctcgcctccctcctcggccccgcgccgcctcctctcctcctcccgcacgccagccgcctgctgcccgcctccggcagtcgtccgctctgtctccgtcgatttgctggcggtcgccggggagccggctgtcgcaggcgccccctccgcaacgccgtgccgtcgcctcatcctcctccgtcacggggacagcgccaccgggggccgcttcaccagagatcatgacagacctctaagcaaggctgggagagctgacgcaatcagcgtctctaataaactccaacagatgggatgggtacccgagcttattctctgcagtgatgcaatgcgcacaaaggagactcttaagattctgcaagagcatgtccatggattgtctgaagcagtagtgcactttatcccaagtttctactcaattgcggcaatggatggccaaactgcagagcatttgcaaaaggcgatttgngaatattcgagtgatgagatcttaactgngatgtgcatgggtcataataaaggatgggaagaanccgcctntatgttttntggcgattcagttttgcttganacatgtaacgctgcgttgttagaagctgcaggcaaatcatgggttgaggccttttttgtggctggtntgggaggatggaagctccatggaattgtaaagccatgaattattgtaactaaaagctagatgtaattttttagctgtttnttaattattattattaacctttgtgtagtggtttttacatgccactgaagctttcggtntgaaggtatcaacatggttagatagatgagatgagatgaatgaattnttccncggtccatgagtt

SEQ ID NO: 36330 - protein, 249 aa, Zea mays subsp. mays
  peptide (1)..(249): Ceres Seq. ID no. 12468119
  misc_feature (81)..(204): Pfam Name: Pfam Description:  Phosphoglycerate mutase family
  misc_feature (47)..(249): NCBI GI NO: 18409499 NR Description: Expressed protein; protein id: At3g52155
  misc_feature (97)..(249): NCBI GI NO: 11357772 NR Description: hypothetical protein F4F15
  misc_feature (80)..(220): NCBI GI NO: 22961147 NR Description: hypothetical protein [Rhodopseudomonas palustris]
  misc_feature (71)..(212): NCBI GI NO: 29833593 NR Description: hypothetical protein
  misc_feature (80)..(229): NCBI GI NO: 23136095 NR Description: hypothetical protein [Cytophaga hutchinsonii]
  misc_feature (81)..(210): NCBI GI NO: 13470938 NR Description: hypothetical protein [Mesorhizobium loti]
  misc_feature (80)..(243): NCBI GI NO: 23017923 NR Description: hypothetical protein [Thermobifida fusca]
  misc_feature (80)..(201): NCBI GI NO: 22999200 NR Description: hypothetical protein [Magnetococcus sp. MC-1]
  misc_feature (76)..(211): NCBI GI NO: 29833011 NR Description: hypothetical protein
  misc_feature (81)..(204): NCBI GI NO: 16124781 NR Description: conserved hypothetical protein
  misc_feature (181)..(181): Xaa is any aa, unknown or other
  misc_feature (191)..(191): Xaa is any aa, unknown or other
  misc_feature (203)..(203): Xaa is any aa, unknown or other
  misc_feature (205)..(205): Xaa is any aa, unknown or other
  misc_feature (208)..(208): Xaa is any aa, unknown or other
  misc_feature (215)..(215): Xaa is any aa, unknown or other
  misc_feature (238)..(238): Xaa is any aa, unknown or other
SNPTHIHRKMRAPAPAAPIPALLSRCSSPPSSAPRRLLSSSRTPAACCPPPAVVRSVSVDLLAVAGEPAVAGAPSATPCRRLILLRHGDSATGGRFTRDHDRPLSKAGRADAISVSNKLQQMGWVPELILCSDAMRTKETLKILQEHVHGLSEAVVHFIPSFYSIAAMDGQTAEHLQKAIXEYSSDEILTXMCMGHNKGWEEXAXMFXGDSVLLXTCNAALLEAAGKSWVEAFFVAGXGGWKLHGIVKP

SEQ ID NO: 36331 - protein, 240 aa, Zea mays subsp. mays
  peptide (1)..(240): Ceres Seq. ID no. 12468120
  misc_feature (72)..(195): Pfam Name: Pfam Description:  Phosphoglycerate mutase family
  misc_feature (38)..(240): NCBI GI NO: 18409499 NR Description: Expressed protein; protein id: At3g52155
  misc_feature (88)..(240): NCBI GI NO: 11357772 NR Description: hypothetical protein F4F15
  misc_feature (71)..(211): NCBI GI NO: 22961147 NR Description: hypothetical protein [Rhodopseudomonas palustris]
  misc_feature (62)..(203): NCBI GI NO: 29833593 NR Description: hypothetical protein
  misc_feature (71)..(220): NCBI GI NO: 23136095 NR Description: hypothetical protein [Cytophaga hutchinsonii]
  misc_feature (72)..(201): NCBI GI NO: 13470938 NR Description: hypothetical protein [Mesorhizobium loti]
  misc_feature (71)..(234): NCBI GI NO: 23017923 NR Description: hypothetical protein [Thermobifida fusca]
  misc_feature (71)..(192): NCBI GI NO: 22999200 NR Description: hypothetical protein [Magnetococcus sp. MC-1]
  misc_feature (67)..(202): NCBI GI NO: 29833011 NR Description: hypothetical protein
  misc_feature (72)..(195): NCBI GI NO: 16124781 NR Description: conserved hypothetical protein
  misc_feature (172)..(172): Xaa is any aa, unknown or other
  misc_feature (182)..(182): Xaa is any aa, unknown or other
  misc_feature (194)..(194): Xaa is any aa, unknown or other
  misc_feature (196)..(196): Xaa is any aa, unknown or other
  misc_feature (199)..(199): Xaa is any aa, unknown or other
  misc_feature (206)..(206): Xaa is any aa, unknown or other
  misc_feature (229)..(229): Xaa is any aa, unknown or other
MRAPAPAAPIPALLSRCSSPPSSAPRRLLSSSRTPAACCPPPAVVRSVSVDLLAVAGEPAVAGAPSATPCRRLILLRHGDSATGGRFTRDHDRPLSKAGRADAISVSNKLQQMGWVPELILCSDAMRTKETLKILQEHVHGLSEAVVHFIPSFYSIAAMDGQTAEHLQKAIXEYSSDEILTXMCMGHNKGWEEXAXMFXGDSVLLXTCNAALLEAAGKSWVEAFFVAGXGGWKLHGIVKP

SEQ ID NO: 36332 - protein, 128 aa, Zea mays subsp. mays
  peptide (1)..(128): Ceres Seq. ID no. 12468121
  misc_feature (1)..(83): Pfam Name: Pfam Description:  Phosphoglycerate mutase family
  misc_feature (1)..(128): NCBI GI NO: 18409499 NR Description: Expressed protein; protein id: At3g52155
  misc_feature (1)..(128): NCBI GI NO: 11357772 NR Description: hypothetical protein F4F15
  misc_feature (1)..(99): NCBI GI NO: 22961147 NR Description: hypothetical protein [Rhodopseudomonas palustris]
  misc_feature (1)..(91): NCBI GI NO: 29833593 NR Description: hypothetical protein
  misc_feature (1)..(108): NCBI GI NO: 23136095 NR Description: hypothetical protein [Cytophaga hutchinsonii]
  misc_feature (1)..(89): NCBI GI NO: 13470938 NR Description: hypothetical protein [Mesorhizobium loti]
  misc_feature (1)..(122): NCBI GI NO: 23017923 NR Description: hypothetical protein [Thermobifida fusca]
  misc_feature (1)..(80): NCBI GI NO: 22999200 NR Description: hypothetical protein [Magnetococcus sp. MC-1]
  misc_feature (1)..(90): NCBI GI NO: 29833011 NR Description: hypothetical protein
  misc_feature (1)..(83): NCBI GI NO: 16124781 NR Description: conserved hypothetical protein
  misc_feature (60)..(60): Xaa is any aa, unknown or other
  misc_feature (70)..(70): Xaa is any aa, unknown or other
  misc_feature (82)..(82): Xaa is any aa, unknown or other
  misc_feature (84)..(84): Xaa is any aa, unknown or other
  misc_feature (87)..(87): Xaa is any aa, unknown or other
  misc_feature (94)..(94): Xaa is any aa, unknown or other
  misc_feature (117)..(117): Xaa is any aa, unknown or other
MGWVPELILCSDAMRTKETLKILQEHVHGLSEAVVHFIPSFYSIAAMDGQTAEHLQKAIXEYSSDEILTXMCMGHNKGWEEXAXMFXGDSVLLXTCNAALLEAAGKSWVEAFFVAGXGGWKLHGIVKP

SEQ ID NO: 36333 - DNA, 1530 bp, Zea mays subsp. mays
  misc_feature (1)..(1530): Ceres Seq. ID no. 13496483
gtcgaggccgccgcccagaccgcctccccttccccgcctccggtgcccaaggccaggccaacagttttgaggtggtaatggcggaccaggctaaccaacccactgtccttcataagctaggtggccagttccacctgagctccagcttctctgaaggtgtacgggcccgtaacatctgcccttctttctcaccttatgaaaggagatttgccacgaggaactacatgacccagagcctttggggcccttcaatgtctgttagcggtggcatcaatgttccagtgatgccgactccgctttttgccaatgctccagccgagaaaggtggcaaaaacttcatgattgatttcatgatgggcggtgtttcagctgctgtttcgaagactgcagctgctcccattgaacgagtgaagctgcttattcagaatcaggatgagatgatcaagtctggtaggctatcagagccgtacaagggtattgctgattgcttcaaacgtaccatcaaggatgagggtttctcttccttgtggaggggtaacactgctaatgttattcgttacttccctactcaggctttgaactttgcgtttaaggactacttcaagaggctgttcaacttcaagaaggacagggatggttactggaagtggtttgctggcaacctggcctctggtggtgctgctggtgcttcctctttgttttttgtgtactccctggattatgcgaggacaaggttggccaatgatgccaaggctgccaagggaggaggcgatagacaattcaatggtcttgtggatgtctaccgcaagacactcaaatctgatggtattgctgggctttaccgtggatttaacatatcttgtgttggaattattgtttatcgtggcctgtatttcggactttacgattctatcaagccagttgtcctcactggcagcctccaggacaacttctttgccagttttgctctgggttggctgatcaccaacggtgctggtcttgcatcttaccccattgatactgtccgcagaaggatgatgatgacttctggtgaggctgtcaagtacaagagctcattggacgcattccagcagatccttaagaaggaaggccccaagtccctgttcaagggtgctggtgctaacattcttcgtgccattgctggcgctggtgtgctttctggctacgaccagctccagatcctcttcttcggaaagaagtacggctccggcggtgcttaaatggagaaaaatgatgacgaacaagagcagttcgctcccggtccagcccagtcaggatctggtcaagtttttgcctttcatatcgaagaaattaataatttatgtaggagaatttttccaacattcgttttgggcggagacattgatctcaaaacactcgtaactgtcctactaggtggtggcatgggtccccaaaacatggtcatagggtgtgtctagtctgcccttcgttgcagccgggcaattttccttacatatattgcctttaatcaagtatcagatgagtgtc

SEQ ID NO: 36334 - protein, 412 aa, Zea mays subsp. mays
  peptide (1)..(412): Ceres Seq. ID no. 13496484
  misc_feature (26)..(412): NCBI GI NO: 113460 NR Description: ADP,ATP carrier protein 2, mitochondrial precursor
  misc_feature (26)..(412): NCBI GI NO: 22168 NR Description: adenine nucleotide translocator [Zea mays]
  misc_feature (26)..(412): NCBI GI NO: 113456 NR Description: ADP,ATP carrier protein 1, mitochondrial precursor
  misc_feature (26)..(412): NCBI GI NO: 22166 NR Description: adenine nucleotide translocator [Zea mays]
  misc_feature (26)..(412): NCBI GI NO: 399015 NR Description: ADP,ATP carrier protein, mitochondrial precursor
  misc_feature (26)..(412): NCBI GI NO: 485517 NR Description: ADP,ATP carrier protein - rice
  misc_feature (95)..(412): NCBI GI NO: 22160 NR Description: put. ATP/ADP translocator [Zea mays]
  misc_feature (84)..(412): NCBI GI NO: 944842 NR Description: ATP/ADP carrier protein [Triticum turgidum]
  misc_feature (84)..(412): NCBI GI NO: 3334116 NR Description: ADP,ATP carrier protein 1, mitochondrial precursor
  misc_feature (28)..(412): NCBI GI NO: 3334115 NR Description: ADP,ATP carrier protein 1, mitochondrial precursor
RGRRPDRLPFPASGAQGQANSFEVVMADQANQPTVLHKLGGQFHLSSSFSEGVRARNICPSFSPYERRFATRNYMTQSLWGPSMSVSGGINVPVMPTPLFANAPAEKGGKNFMIDFMMGGVSAAVSKTAAAPIERVKLLIQNQDEMIKSGRLSEPYKGIADCFKRTIKDEGFSSLWRGNTANVIRYFPTQALNFAFKDYFKRLFNFKKDRDGYWKWFAGNLASGGAAGASSLFFVYSLDYARTRLANDAKAAKGGGDRQFNGLVDVYRKTLKSDGIAGLYRGFNISCVGIIVYRGLYFGLYDSIKPVVLTGSLQDNFFASFALGWLITNGAGLASYPIDTVRRRMMMTSGEAVKYKSSLDAFQQILKKEGPKSLFKGAGANILRAIAGAGVLSGYDQLQILFFGKKYGSGGA

SEQ ID NO: 36335 - protein, 387 aa, Zea mays subsp. mays
  peptide (1)..(387): Ceres Seq. ID no. 13496485
  misc_feature (1)..(387): NCBI GI NO: 113460 NR Description: ADP,ATP carrier protein 2, mitochondrial precursor
  misc_feature (1)..(387): NCBI GI NO: 22168 NR Description: adenine nucleotide translocator [Zea mays]
  misc_feature (1)..(387): NCBI GI NO: 113456 NR Description: ADP,ATP carrier protein 1, mitochondrial precursor
  misc_feature (1)..(387): NCBI GI NO: 22166 NR Description: adenine nucleotide translocator [Zea mays]
  misc_feature (1)..(387): NCBI GI NO: 399015 NR Description: ADP,ATP carrier protein, mitochondrial precursor
  misc_feature (1)..(387): NCBI GI NO: 485517 NR Description: ADP,ATP carrier protein - rice
  misc_feature (70)..(387): NCBI GI NO: 22160 NR Description: put. ATP/ADP translocator [Zea mays]
  misc_feature (59)..(387): NCBI GI NO: 944842 NR Description: ATP/ADP carrier protein [Triticum turgidum]
  misc_feature (59)..(387): NCBI GI NO: 3334116 NR Description: ADP,ATP carrier protein 1, mitochondrial precursor
  misc_feature (3)..(387): NCBI GI NO: 3334115 NR Description: ADP,ATP carrier protein 1, mitochondrial precursor
MADQANQPTVLHKLGGQFHLSSSFSEGVRARNICPSFSPYERRFATRNYMTQSLWGPSMSVSGGINVPVMPTPLFANAPAEKGGKNFMIDFMMGGVSAAVSKTAAAPIERVKLLIQNQDEMIKSGRLSEPYKGIADCFKRTIKDEGFSSLWRGNTANVIRYFPTQALNFAFKDYFKRLFNFKKDRDGYWKWFAGNLASGGAAGASSLFFVYSLDYARTRLANDAKAAKGGGDRQFNGLVDVYRKTLKSDGIAGLYRGFNISCVGIIVYRGLYFGLYDSIKPVVLTGSLQDNFFASFALGWLITNGAGLASYPIDTVRRRMMMTSGEAVKYKSSLDAFQQILKKEGPKSLFKGAGANILRAIAGAGVLSGYDQLQILFFGKKYGSGGA

SEQ ID NO: 36336 - protein, 338 aa, Zea mays subsp. mays
  peptide (1)..(338): Ceres Seq. ID no. 13496486
  misc_feature (1)..(338): NCBI GI NO: 113460 NR Description: ADP,ATP carrier protein 2, mitochondrial precursor
  misc_feature (1)..(338): NCBI GI NO: 22168 NR Description: adenine nucleotide translocator [Zea mays]
  misc_feature (1)..(338): NCBI GI NO: 113456 NR Description: ADP,ATP carrier protein 1, mitochondrial precursor
  misc_feature (1)..(338): NCBI GI NO: 22166 NR Description: adenine nucleotide translocator [Zea mays]
  misc_feature (1)..(338): NCBI GI NO: 399015 NR Description: ADP,ATP carrier protein, mitochondrial precursor
  misc_feature (1)..(338): NCBI GI NO: 485517 NR Description: ADP,ATP carrier protein - rice
  misc_feature (21)..(338): NCBI GI NO: 22160 NR Description: put. ATP/ADP translocator [Zea mays]
  misc_feature (10)..(338): NCBI GI NO: 944842 NR Description: ATP/ADP carrier protein [Triticum turgidum]
  misc_feature (10)..(338): NCBI GI NO: 3334116 NR Description: ADP,ATP carrier protein 1, mitochondrial precursor
  misc_feature (1)..(338): NCBI GI NO: 3334115 NR Description: ADP,ATP carrier protein 1, mitochondrial precursor
MTQSLWGPSMSVSGGINVPVMPTPLFANAPAEKGGKNFMIDFMMGGVSAAVSKTAAAPIERVKLLIQNQDEMIKSGRLSEPYKGIADCFKRTIKDEGFSSLWRGNTANVIRYFPTQALNFAFKDYFKRLFNFKKDRDGYWKWFAGNLASGGAAGASSLFFVYSLDYARTRLANDAKAAKGGGDRQFNGLVDVYRKTLKSDGIAGLYRGFNISCVGIIVYRGLYFGLYDSIKPVVLTGSLQDNFFASFALGWLITNGAGLASYPIDTVRRRMMMTSGEAVKYKSSLDAFQQILKKEGPKSLFKGAGANILRAIAGAGVLSGYDQLQILFFGKKYGSGGA

SEQ ID NO: 36337 - DNA, 709 bp, Zea mays subsp. mays
  misc_feature (1)..(709): Ceres Seq. ID no. 12468116
  misc_feature (639)..(639): n is a, c, t, g, unknown, or other
tccatggtagttcagttgattggtggactcttggaatcttcctttacgaattactctatggcaagacaccattcaagggacctggcaatgaggaaacactctcaaatgtgatctcacagggcttgaagttccctgataatccagctgtaagcttccacgctcgagatctgatcagaggtctgcttgtgaaagagcctgagtaccggcttggctcgtcgagaggagccactgagattaagcggcatcccttctttgaaggcctgaactgggccttgatccggtggaccgcaccaccagagaccctgaagaacattgacactgcaccaacacctgcaacgacacgcaagaagaaggaaggcaaatgtctggaattccggctgaatggtgacgacatcgagttcgagctattttagttgtagttgtagtggcatcgctgttgtagtctcaaggatatatcaaatatcatgataagctagcaagagtagtcttagtccctcttccctgcagttttctgttgaaagttagtcatcgttgggaagtaaggtaagattggctgttaggcctgtaactttatgccttgttaataccatcaaatattagaagacacggttgggaaattcctgggcatgtgcgagatgntgagatgcagctggcagaaagtgtacattgtgttgctggatggaacaatttgtgcctcgcttacttgatg

SEQ ID NO: 36338 - protein, 136 aa, Zea mays subsp. mays
  peptide (1)..(136): Ceres Seq. ID no. 12468117
  misc_feature (1)..(84): Pfam Name: Pfam Description:  Protein kinase domain
  misc_feature (1)..(136): NCBI GI NO: 15227639 NR Description: putative protein kinase; protein id: At2g36350.1
  misc_feature (1)..(136): NCBI GI NO: 7716430 NR Description: protein kinase KIPK [Arabidopsis thaliana]
  misc_feature (1)..(136): NCBI GI NO: 30693719 NR Description: protein kinase (KIPK) [Arabidopsis thaliana]
  misc_feature (1)..(136): NCBI GI NO: 15242814 NR Description: protein kinase -like protein; protein id:At5g03640
  misc_feature (1)..(124): NCBI GI NO: 15236802 NR Description: putative protein kinase; protein id: At4g26610
  misc_feature (1)..(136): NCBI GI NO: 15238798 NR Description: protein kinase (EC 2
  misc_feature (1)..(136): NCBI GI NO: 17064850 NR Description: protein kinase 5 [Arabidopsis thaliana]
  misc_feature (1)..(136): NCBI GI NO: 320622 NR Description: probable protein kinase - maize (fragment)
  misc_feature (1)..(110): NCBI GI NO: 1346057 NR Description: Protein kinase G11A
  misc_feature (1)..(110): NCBI GI NO: 15241076 NR Description: serine threonine-specific protein kinase ATPK64
HGSSVDWWTLGIFLYELLYGKTPFKGPGNEETLSNVISQGLKFPDNPAVSFHARDLIRGLLVKEPEYRLGSSRGATEIKRHPFFEGLNWALIRWTAPPETLKNIDTAPTPATTRKKKEGKCLEFRLNGDDIEFELF

SEQ ID NO: 36339 - DNA, 838 bp, Zea mays subsp. mays
  misc_feature (1)..(838): Ceres Seq. ID no. 12468112
  misc_feature (659)..(659): n is a, c, t, g, unknown, or other
atcggcgtccgcctggagcagcagtttggattctggaaggtgggcctggtgtacctcgtctctggcttcggagggagcgtgctctccgtcttcttcatcaggaagggcgtctccgtgggcgcctccggcgcgctcttcggcctcctgggagcgatgctgtcggagctcatcaccaactggtccatctacaccaacagatttgcagccatgctgaacctgatcatcatcgccgccatcaacctggcgctcgggatactcccgcacgttgacaacttcgcgcacatcggcgggttcgccacaggcttcctcctcggcttcgtgctgctgatccagccccagttcgggtggctggagcagcccttcggtgccaagaccaagtccaagtacaaggcatatcagatcatcctcctgcttgctgccctcgtcttgctggctgcagggttcgctgttggattggtaatggtgttcagaggagagaacggcaacgatcactgtagctggtgccactacctgacctgcgtgccgacgtcaagctggaagtgtgacaattgaactgatcagagattagtgacgggttagcatgcttgcgtcgtacagaagagaacatgcgtccccaccacgagagacaatgtcaagatagatacgtgcccctcaccttntatgacattgtcaatgtattgctttcaagtttgatttttaaagtctgcattgtacagaattctcctgcctccattggatccaaatgaggagtttattggtattttttcttgtatatgttaaaaaaaactctgtaaatcactctgcctgtgttctggtttatggttttattcattgattc

SEQ ID NO: 36340 - protein, 183 aa, Zea mays subsp. mays
  peptide (1)..(183): Ceres Seq. ID no. 12468113
  misc_feature (1)..(182): NCBI GI NO: 38344377 NR Description: OSJNBb0032E06.11
  misc_feature (1)..(183): NCBI GI NO: 15240744 NR Description: membrane protein; protein id: At5g07250
  misc_feature (1)..(182): NCBI GI NO: 294845 NR Description: membrane protein
  misc_feature (1)..(183): NCBI GI NO: 37536172 NR Description: putative membrane protein
  misc_feature (1)..(181): NCBI GI NO: 15221690 NR Description: membrane protein, putative; protein id: At1g63120
  misc_feature (1)..(182): NCBI GI NO: 18409916 NR Description: putative protein; protein id: At3g53780.1
  misc_feature (1)..(182): NCBI GI NO: 30693911 NR Description: membrane protein, Rhomboid family
  misc_feature (2)..(181): NCBI GI NO: 15222058 NR Description: membrane protein, putative; protein id:At1g12750
  misc_feature (2)..(181): NCBI GI NO: 25402744 NR Description: protein T12C24.28
  misc_feature (1)..(182): NCBI GI NO: 11357824 NR Description: hypothetical protein F5K20
IGVRLEQQFGFWKVGLVYLVSGFGGSVLSVFFIRKGVSVGASGALFGLLGAMLSELITNWSIYTNRFAAMLNLIIIAAINLALGILPHVDNFAHIGGFATGFLLGFVLLIQPQFGWLEQPFGAKTKSKYKAYQIILLLAALVLLAAGFAVGLVMVFRGENGNDHCSWCHYLTCVPTSSWKCDN

SEQ ID NO: 36341 - protein, 132 aa, Zea mays subsp. mays
  peptide (1)..(132): Ceres Seq. ID no. 12468114
  misc_feature (1)..(131): NCBI GI NO: 38344377 NR Description: OSJNBb0032E06.11
  misc_feature (1)..(132): NCBI GI NO: 15240744 NR Description: membrane protein; protein id: At5g07250
  misc_feature (1)..(131): NCBI GI NO: 294845 NR Description: membrane protein
  misc_feature (1)..(132): NCBI GI NO: 37536172 NR Description: putative membrane protein
  misc_feature (1)..(130): NCBI GI NO: 15221690 NR Description: membrane protein, putative; protein id: At1g63120
  misc_feature (1)..(131): NCBI GI NO: 18409916 NR Description: putative protein; protein id: At3g53780.1
  misc_feature (1)..(131): NCBI GI NO: 30693911 NR Description: membrane protein, Rhomboid family
  misc_feature (1)..(130): NCBI GI NO: 15222058 NR Description: membrane protein, putative; protein id:At1g12750
  misc_feature (1)..(130): NCBI GI NO: 25402744 NR Description: protein T12C24.28
  misc_feature (1)..(131): NCBI GI NO: 11357824 NR Description: hypothetical protein F5K20
MLSELITNWSIYTNRFAAMLNLIIIAAINLALGILPHVDNFAHIGGFATGFLLGFVLLIQPQFGWLEQPFGAKTKSKYKAYQIILLLAALVLLAAGFAVGLVMVFRGENGNDHCSWCHYLTCVPTSSWKCDN

SEQ ID NO: 36342 - protein, 114 aa, Zea mays subsp. mays
  peptide (1)..(114): Ceres Seq. ID no. 12468115
  misc_feature (1)..(113): NCBI GI NO: 38344377 NR Description: OSJNBb0032E06.11
  misc_feature (1)..(114): NCBI GI NO: 15240744 NR Description: membrane protein; protein id: At5g07250
  misc_feature (1)..(113): NCBI GI NO: 294845 NR Description: membrane protein
  misc_feature (1)..(114): NCBI GI NO: 37536172 NR Description: putative membrane protein
  misc_feature (1)..(112): NCBI GI NO: 15221690 NR Description: membrane protein, putative; protein id: At1g63120
  misc_feature (1)..(113): NCBI GI NO: 18409916 NR Description: putative protein; protein id: At3g53780.1
  misc_feature (1)..(113): NCBI GI NO: 30693911 NR Description: membrane protein, Rhomboid family
  misc_feature (1)..(112): NCBI GI NO: 15222058 NR Description: membrane protein, putative; protein id:At1g12750
  misc_feature (1)..(112): NCBI GI NO: 25402744 NR Description: protein T12C24.28
  misc_feature (1)..(113): NCBI GI NO: 11357824 NR Description: hypothetical protein F5K20
MLNLIIIAAINLALGILPHVDNFAHIGGFATGFLLGFVLLIQPQFGWLEQPFGAKTKSKYKAYQIILLLAALVLLAAGFAVGLVMVFRGENGNDHCSWCHYLTCVPTSSWKCDN

SEQ ID NO: 36343 - DNA, 1842 bp, Zea mays subsp. mays
  misc_feature (1)..(1842): Ceres Seq. ID no. 13574386
ggtgtctcacccttccggacgaaatctgacccgggccacactccgctgctccgccatggcgatccgctccaaggcctggatctcgctgttgctcgcgctggccgtcgcgctctccgcccgggcggaggaggagcccgccgccgccgcggagggcgaggccgtgctcaccctcgacgtcgacagcttcgacgaggccgtcgccaagcaccccttcatggtcgtcgagttctacgccccctggtgtgggcactgcaagaaacttgctccagagtatgagaatgcggccaaggcacttagcaagcatgacccaccgattgttctcgctaaggttgatgctaacgaggagaagaacaggccgcttgctaccaagtacgagatccaagggttcccaaccatcaagatattcagggaccgggggaagaacattcaggaatacaagggccctagggaggctgatggcattgtggattacttgaagaagcaggttggccctgcgtccaaggagatcaagtcaccagaagatgcgacggcccttatcgatgacaagaagatctacattgttggtatcttcgctgaattcagcggcaccgaatttacaaacttcatggaggtcgcagagaagctgaggtctgactacgactttggccacactttgcatgccaaccacctcccacgtggtgatgcagcagtggaacggccattggtcaggctgctgaagccatttgatgagcttgttgttgacagcaaggattttgatgtcgctgcactgatgaagtttattgatgctagcaccatccctagagttgtcacttttgacaagaaccctgacaaccacccatacctcatgaaattcttccaaagctcagcccccaaggctatgctgtttttgaacttctccaccggaccttttgattctttcaagtctgcctactctgctgccgcggaggaattcaaggacaaggaaatcaagttccttattggtgacatcgaagccagccagggtgccttccagtactttggcctgaaagaggaccagacaccccttatcctcatccaggatggtgactccaagaagttcttgaaggttcacgttgaggctgaccagatcgtcgcttggttgaaggagtactttgacggcaaattgacgccgttcaggaattctgagcctattcctgaggtcaacaatgagcctgttaaggtggttgtcgctgacaacgtccacgacttcgtcttcaaatctggcaaaaatgtccttattgaattctatgccccctggtgcggacactgcaagaagctggcgcccatcttggacgaggcagccaccactctccagagcgacgaggaagtcgtgattgctaagatggacgcgactgccaatgacgttcccagtgagtttgacgtccaaggctacccgaccttgtacttcgtgaccccgagcgggaaggtgacatcctacgacagcggcaggacggcggacgacatcgtcgacttcatcaagaagagcaaggagaccgcagcgccgcaccaccaccaccacccaggcgccaccggcatccgagaaggcagccgcgccgagcccgtcaaggacgagctgtgagcatccaaggtgtggacggctgtggctgcgtaagcatgggaggaaaacctggcgctaacgtgcctccaacgcctagtttttgcgggaccagagggagagagagagagggacggagttagagagagaggggatctgcgacgtgttttgctctgcggcggcatgttgtgtatcccattgaggttatgtacacaattacaccgcggtcggtgggtgtctttttagttaattatcacaagtgacagtag

SEQ ID NO: 36344 - protein, 531 aa, Zea mays subsp. mays
  peptide (1)..(531): Ceres Seq. ID no. 13574387
  misc_feature (19)..(531): NCBI GI NO: 1709619 NR Description: Protein disulfide isomerase precursor (PDI)
  misc_feature (19)..(531): NCBI GI NO: 13925728 NR Description: protein disulfide isomerase 3 precursor
  misc_feature (19)..(531): NCBI GI NO: 13925726 NR Description: protein disulfide isomerase 2 precursor
  misc_feature (19)..(531): NCBI GI NO: 12056115 NR Description: protein disulfide isomerase
  misc_feature (19)..(531): NCBI GI NO: 1709620 NR Description: Protein disulfide isomerase precursor (PDI)
  misc_feature (19)..(531): NCBI GI NO: 1709617 NR Description: Protein disulfide isomerase precursor
  misc_feature (22)..(531): NCBI GI NO: 266743 NR Description: Protein disulfide isomerase precursor (PDI)
  misc_feature (22)..(531): NCBI GI NO: 99992 NR Description: protein disulfide-isomerase (EC 5
  misc_feature (20)..(506): NCBI GI NO: 11133775 NR Description: Protein disulfide isomerase precursor (PDI)
  misc_feature (29)..(506): NCBI GI NO: 11133818 NR Description: Protein disulfide isomerase precursor (PDI)
VSHPSGRNLTRATLRCSAMAIRSKAWISLLLALAVALSARAEEEPAAAAEGEAVLTLDVDSFDEAVAKHPFMVVEFYAPWCGHCKKLAPEYENAAKALSKHDPPIVLAKVDANEEKNRPLATKYEIQGFPTIKIFRDRGKNIQEYKGPREADGIVDYLKKQVGPASKEIKSPEDATALIDDKKIYIVGIFAEFSGTEFTNFMEVAEKLRSDYDFGHTLHANHLPRGDAAVERPLVRLLKPFDELVVDSKDFDVAALMKFIDASTIPRVVTFDKNPDNHPYLMKFFQSSAPKAMLFLNFSTGPFDSFKSAYSAAAEEFKDKEIKFLIGDIEASQGAFQYFGLKEDQTPLILIQDGDSKKFLKVHVEADQIVAWLKEYFDGKLTPFRNSEPIPEVNNEPVKVVVADNVHDFVFKSGKNVLIEFYAPWCGHCKKLAPILDEAATTLQSDEEVVIAKMDATANDVPSEFDVQGYPTLYFVTPSGKVTSYDSGRTADDIVDFIKKSKETAAPHHHHHPGATGIREGSRAEPVKDEL

SEQ ID NO: 36345 - protein, 513 aa, Zea mays subsp. mays
  peptide (1)..(513): Ceres Seq. ID no. 13574388
  misc_feature (1)..(513): NCBI GI NO: 1709619 NR Description: Protein disulfide isomerase precursor (PDI)
  misc_feature (1)..(513): NCBI GI NO: 13925728 NR Description: protein disulfide isomerase 3 precursor
  misc_feature (1)..(513): NCBI GI NO: 13925726 NR Description: protein disulfide isomerase 2 precursor
  misc_feature (1)..(513): NCBI GI NO: 12056115 NR Description: protein disulfide isomerase
  misc_feature (1)..(513): NCBI GI NO: 1709620 NR Description: Protein disulfide isomerase precursor (PDI)
  misc_feature (1)..(513): NCBI GI NO: 1709617 NR Description: Protein disulfide isomerase precursor
  misc_feature (4)..(513): NCBI GI NO: 266743 NR Description: Protein disulfide isomerase precursor (PDI)
  misc_feature (4)..(513): NCBI GI NO: 99992 NR Description: protein disulfide-isomerase (EC 5
  misc_feature (2)..(488): NCBI GI NO: 11133775 NR Description: Protein disulfide isomerase precursor (PDI)
  misc_feature (11)..(488): NCBI GI NO: 11133818 NR Description: Protein disulfide isomerase precursor (PDI)
MAIRSKAWISLLLALAVALSARAEEEPAAAAEGEAVLTLDVDSFDEAVAKHPFMVVEFYAPWCGHCKKLAPEYENAAKALSKHDPPIVLAKVDANEEKNRPLATKYEIQGFPTIKIFRDRGKNIQEYKGPREADGIVDYLKKQVGPASKEIKSPEDATALIDDKKIYIVGIFAEFSGTEFTNFMEVAEKLRSDYDFGHTLHANHLPRGDAAVERPLVRLLKPFDELVVDSKDFDVAALMKFIDASTIPRVVTFDKNPDNHPYLMKFFQSSAPKAMLFLNFSTGPFDSFKSAYSAAAEEFKDKEIKFLIGDIEASQGAFQYFGLKEDQTPLILIQDGDSKKFLKVHVEADQIVAWLKEYFDGKLTPFRNSEPIPEVNNEPVKVVVADNVHDFVFKSGKNVLIEFYAPWCGHCKKLAPILDEAATTLQSDEEVVIAKMDATANDVPSEFDVQGYPTLYFVTPSGKVTSYDSGRTADDIVDFIKKSKETAAPHHHHHPGATGIREGSRAEPVKDEL

SEQ ID NO: 36346 - protein, 460 aa, Zea mays subsp. mays
  peptide (1)..(460): Ceres Seq. ID no. 13574389
  misc_feature (1)..(460): NCBI GI NO: 1709619 NR Description: Protein disulfide isomerase precursor (PDI)
  misc_feature (1)..(460): NCBI GI NO: 13925728 NR Description: protein disulfide isomerase 3 precursor
  misc_feature (1)..(460): NCBI GI NO: 13925726 NR Description: protein disulfide isomerase 2 precursor
  misc_feature (1)..(460): NCBI GI NO: 12056115 NR Description: protein disulfide isomerase
  misc_feature (1)..(460): NCBI GI NO: 1709620 NR Description: Protein disulfide isomerase precursor (PDI)
  misc_feature (1)..(460): NCBI GI NO: 1709617 NR Description: Protein disulfide isomerase precursor
  misc_feature (1)..(460): NCBI GI NO: 266743 NR Description: Protein disulfide isomerase precursor (PDI)
  misc_feature (1)..(460): NCBI GI NO: 99992 NR Description: protein disulfide-isomerase (EC 5
  misc_feature (1)..(435): NCBI GI NO: 11133775 NR Description: Protein disulfide isomerase precursor (PDI)
  misc_feature (1)..(435): NCBI GI NO: 11133818 NR Description: Protein disulfide isomerase precursor (PDI)
MVVEFYAPWCGHCKKLAPEYENAAKALSKHDPPIVLAKVDANEEKNRPLATKYEIQGFPTIKIFRDRGKNIQEYKGPREADGIVDYLKKQVGPASKEIKSPEDATALIDDKKIYIVGIFAEFSGTEFTNFMEVAEKLRSDYDFGHTLHANHLPRGDAAVERPLVRLLKPFDELVVDSKDFDVAALMKFIDASTIPRVVTFDKNPDNHPYLMKFFQSSAPKAMLFLNFSTGPFDSFKSAYSAAAEEFKDKEIKFLIGDIEASQGAFQYFGLKEDQTPLILIQDGDSKKFLKVHVEADQIVAWLKEYFDGKLTPFRNSEPIPEVNNEPVKVVVADNVHDFVFKSGKNVLIEFYAPWCGHCKKLAPILDEAATTLQSDEEVVIAKMDATANDVPSEFDVQGYPTLYFVTPSGKVTSYDSGRTADDIVDFIKKSKETAAPHHHHHPGATGIREGSRAEPVKDEL

SEQ ID NO: 36347 - DNA, 1932 bp, Zea mays subsp. mays; identical to SEQ ID NO: 26886
  misc_feature (1)..(1932): Ceres Seq. ID no. 13637288

SEQ ID NO: 36348 - protein, 538 aa, Zea mays subsp. mays; identical to SEQ ID NO: 26887
  peptide (1)..(538): Ceres Seq. ID no. 13637289
  misc_feature (22)..(538): NCBI GI NO: 14550104 NR Description: histone deacetylase HDA101 [Zea mays]
  misc_feature (22)..(538): NCBI GI NO: 3023947 NR Description: Probable histone deacetylase (RPD3 homolog)
  misc_feature (22)..(537): NCBI GI NO: 31324093 NR Description: histone deacetylase HDAC1
  misc_feature (22)..(527): NCBI GI NO: 31324097 NR Description: histone deacetylase HDAC3
  misc_feature (22)..(503): NCBI GI NO: 12698880 NR Description: histone deacetylase HD1 [Oryza sativa]
  misc_feature (29)..(527): NCBI GI NO: 15233694 NR Description: Histone deacetylase [Arabidopsis thaliana]
  misc_feature (29)..(527): NCBI GI NO: 2318131 NR Description: histone deacetylase [Arabidopsis thaliana]
  misc_feature (29)..(527): NCBI GI NO: 9022439 NR Description: histone deacetylase
  misc_feature (41)..(505): NCBI GI NO: 13128860 NR Description: histone deacetylase 1
  misc_feature (41)..(505): NCBI GI NO: 30583783 NR Description: Homo sapiens histone deacetylase 1

SEQ ID NO: 36349 - protein, 517 aa, Zea mays subsp. mays; identical to SEQ ID NO: 26888
  peptide (1)..(517): Ceres Seq. ID no. 13637290
  misc_feature (1)..(517): NCBI GI NO: 14550104 NR Description: histone deacetylase HDA101 [Zea mays]
  misc_feature (1)..(517): NCBI GI NO: 3023947 NR Description: Probable histone deacetylase (RPD3 homolog)
  misc_feature (1)..(516): NCBI GI NO: 31324093 NR Description: histone deacetylase HDAC1
  misc_feature (1)..(506): NCBI GI NO: 31324097 NR Description: histone deacetylase HDAC3
  misc_feature (1)..(482): NCBI GI NO: 12698880 NR Description: histone deacetylase HD1 [Oryza sativa]
  misc_feature (8)..(506): NCBI GI NO: 15233694 NR Description: Histone deacetylase [Arabidopsis thaliana]
  misc_feature (8)..(506): NCBI GI NO: 2318131 NR Description: histone deacetylase [Arabidopsis thaliana]
  misc_feature (8)..(506): NCBI GI NO: 9022439 NR Description: histone deacetylase
  misc_feature (20)..(484): NCBI GI NO: 13128860 NR Description: histone deacetylase 1
  misc_feature (20)..(484): NCBI GI NO: 30583783 NR Description: Homo sapiens histone deacetylase 1

SEQ ID NO: 36350 - protein, 474 aa, Zea mays subsp. mays; identical to SEQ ID NO: 26889
  peptide (1)..(474): Ceres Seq. ID no. 13637291
  misc_feature (1)..(474): NCBI GI NO: 14550104 NR Description: histone deacetylase HDA101 [Zea mays]
  misc_feature (1)..(474): NCBI GI NO: 3023947 NR Description: Probable histone deacetylase (RPD3 homolog)
  misc_feature (1)..(473): NCBI GI NO: 31324093 NR Description: histone deacetylase HDAC1
  misc_feature (1)..(463): NCBI GI NO: 31324097 NR Description: histone deacetylase HDAC3
  misc_feature (1)..(439): NCBI GI NO: 12698880 NR Description: histone deacetylase HD1 [Oryza sativa]
  misc_feature (1)..(463): NCBI GI NO: 15233694 NR Description: Histone deacetylase [Arabidopsis thaliana]
  misc_feature (1)..(463): NCBI GI NO: 2318131 NR Description: histone deacetylase [Arabidopsis thaliana]
  misc_feature (1)..(463): NCBI GI NO: 9022439 NR Description: histone deacetylase
  misc_feature (1)..(441): NCBI GI NO: 13128860 NR Description: histone deacetylase 1
  misc_feature (1)..(441): NCBI GI NO: 30583783 NR Description: Homo sapiens histone deacetylase 1

SEQ ID NO: 36351 - DNA, 661 bp, Zea mays subsp. mays
  misc_feature (1)..(661): Ceres Seq. ID no. 12468098
tcgaggccgtgaagctcaaggcgagcaagctagccaagaagcacccgcgctgcctcgccgacggcaacgagctgctgcgcttccacggcgccacgctctcgtgcgcgctcggcggcggctccggctcttccagcctctgcgcctccgacaagtgcgccgtgtgccgcatcatccggcacggcttctccgccaggaaggagggcaagggcggcgtgggcgtgttcaccacgtccaccagcggccgcgcgttcgagtccatcgttgaggcgccccccgccatcggcgtcggcgacgacgacggagcgggccagctgggcctgggcaccgcgcgcagggcgctgctggtgtgcagggtcatcgccggccgcgtgcacaagccgctggacaacctcaaggagttcgtggggcagacgggcttcgattcgctcgccggcaaggtcggaccctactccaacatcgaggagctgtacctgctgaacccgagggcgctgctcccgtgcttcgtcgtcatctgtagaccgtagcctactactagctaaacaccccgtctcattcttctctcttcccacttttctctttcgattgctactctagtgtacgtagttaacacggacacggcatagctatcgcctatcggttggaaggtcggatggatttgtcc

SEQ ID NO: 36352 - protein, 173 aa, Zea mays subsp. mays
  peptide (1)..(173): Ceres Seq. ID no. 12468099
  misc_feature (1)..(172): NCBI GI NO: 34910152 NR Description: B1070A12.19
  misc_feature (1)..(173): NCBI GI NO: 15239695 NR Description: putative protein; protein id: At5g54630
  misc_feature (1)..(173): NCBI GI NO: 18416951 NR Description: expressed protein; protein id: At4g27240
  misc_feature (1)..(173): NCBI GI NO: 15220394 NR Description: hypothetical protein; protein id: At1g11490.1
  misc_feature (1)..(146): NCBI GI NO: 6554199 NR Description: T23J18.16 [Arabidopsis thaliana]
  misc_feature (1)..(170): NCBI GI NO: 15222333 NR Description: unknown protein; protein id: At1g75710.1
  misc_feature (1)..(170): NCBI GI NO: 9802582 NR Description: T2E6.3 [Arabidopsis thaliana]
  misc_feature (1)..(170): NCBI GI NO: 15220992 NR Description: hypothetical protein; protein id: At1g47860.1
  misc_feature (16)..(173): NCBI GI NO: 38346001 NR Description: OSJNBa0073L13.11
  misc_feature (2)..(172): NCBI GI NO: 5777616 NR Description: CAA30374.1 protein [Oryza sativa]
EAVKLKASKLAKKHPRCLADGNELLRFHGATLSCALGGGSGSSSLCASDKCAVCRIIRHGFSARKEGKGGVGVFTTSTSGRAFESIVEAPPAIGVGDDDGAGQLGLGTARRALLVCRVIAGRVHKPLDNLKEFVGQTGFDSLAGKVGPYSNIEELYLLNPRALLPCFVVICRP

SEQ ID NO: 36353 - protein, 87 aa, Zea mays subsp. mays
  peptide (1)..(87): Ceres Seq. ID no. 12468100
RGREAQGEQASQEAPALPRRRQRAAALPRRHALVRARRRLRLFQPLRLRQVRRVPHHPARLLRQEGGQGRRGRVHHVHQRPRVRVHR

SEQ ID NO: 36354 - DNA, 481 bp, Zea mays subsp. mays
  misc_feature (1)..(481): Ceres Seq. ID no. 3626194
gataacgactttgcttcttkrcagggaattgctgagaggtccactctattatgtcctggtgctgctgttcagcgttttagtcttctggcgtgagtcccccatcgggatcgtctccttgtcgatgatgagcggtggcgatggttttgctgacattgttgggaggaggtatggctcagcgaagctgccattcaatcggaagaagagctgggccgggagcatctcgatgttcatttctggtttcctgctgtccgctatgatgatgctctacttctcaagcctgggttacattgatgttatctgggaagaggcacttggtaagctggcgcttgttgcactagcagcaacagtagtggagtgcgttcctgtgaccgaagttgtagatgacaacatatctgttcctttggccaccatgctggtagcttttctcttgtttagctccaaccgcacaatagttaattaaaatactactagtgcattattt

SEQ ID NO: 36355 - protein, 152 aa, Zea mays subsp. mays
  peptide (1)..(152): Ceres Seq. ID no. 3626195
  misc_feature (9)..(144): NCBI GI NO: 32488404 NR Description: OSJNBa0043A12.34
  misc_feature (9)..(144): NCBI GI NO: 21537252 NR Description: unknown [Arabidopsis thaliana]
  misc_feature (9)..(144): NCBI GI NO: 15238184 NR Description: putative protein; protein id: At5g04490
  misc_feature (9)..(144): NCBI GI NO: 28393229 NR Description: unknown protein [Arabidopsis thaliana]
  misc_feature (8)..(144): NCBI GI NO: 34907982 NR Description: P0446G04.23
  misc_feature (8)..(144): NCBI GI NO: 15237702 NR Description: putative protein; protein id: At5g58560
  misc_feature (8)..(144): NCBI GI NO: 21593148 NR Description: unknown [Arabidopsis thaliana]
  misc_feature (8)..(97): NCBI GI NO: 8843778 NR Description: emb|CAB85555
  misc_feature (8)..(143): NCBI GI NO: 28850457 NR Description: similar to Oryza sativa (japonica cultivar-group)
  misc_feature (8)..(143): NCBI GI NO: 21674801 NR Description: conserved hypothetical protein
  misc_feature (7)..(7): Xaa is any aa, unknown or other
ITTLLLXRELLRGPLYYVLVLLFSVLVFWRESPIGIVSLSMMSGGDGFADIVGRRYGSAKLPFNRKKSWAGSISMFISGFLLSAMMMLYFSSLGYIDVIWEEALGKLALVALAATVVECVPVTEVVDDNISVPLATMLVAFLLFSSNRTIVN

SEQ ID NO: 36356 - protein, 112 aa, Zea mays subsp. mays
  peptide (1)..(112): Ceres Seq. ID no. 3626196
  misc_feature (1)..(104): NCBI GI NO: 32488404 NR Description: OSJNBa0043A12.34
  misc_feature (1)..(104): NCBI GI NO: 21537252 NR Description: unknown [Arabidopsis thaliana]
  misc_feature (1)..(104): NCBI GI NO: 15238184 NR Description: putative protein; protein id: At5g04490
  misc_feature (1)..(104): NCBI GI NO: 28393229 NR Description: unknown protein [Arabidopsis thaliana]
  misc_feature (1)..(104): NCBI GI NO: 34907982 NR Description: P0446G04.23
  misc_feature (1)..(104): NCBI GI NO: 15237702 NR Description: putative protein; protein id: At5g58560
  misc_feature (1)..(104): NCBI GI NO: 21593148 NR Description: unknown [Arabidopsis thaliana]
  misc_feature (1)..(57): NCBI GI NO: 8843778 NR Description: emb|CAB85555
  misc_feature (1)..(103): NCBI GI NO: 28850457 NR Description: similar to Oryza sativa (japonica cultivar-group)
  misc_feature (1)..(103): NCBI GI NO: 21674801 NR Description: conserved hypothetical protein
MMSGGDGFADIVGRRYGSAKLPFNRKKSWAGSISMFISGFLLSAMMMLYFSSLGYIDVIWEEALGKLALVALAATVVECVPVTEVVDDNISVPLATMLVAFLLFSSNRTIVN

SEQ ID NO: 36357 - protein, 111 aa, Zea mays subsp. mays
  peptide (1)..(111): Ceres Seq. ID no. 3626197
  misc_feature (1)..(103): NCBI GI NO: 32488404 NR Description: OSJNBa0043A12.34
  misc_feature (1)..(103): NCBI GI NO: 21537252 NR Description: unknown [Arabidopsis thaliana]
  misc_feature (1)..(103): NCBI GI NO: 15238184 NR Description: putative protein; protein id: At5g04490
  misc_feature (1)..(103): NCBI GI NO: 28393229 NR Description: unknown protein [Arabidopsis thaliana]
  misc_feature (1)..(103): NCBI GI NO: 34907982 NR Description: P0446G04.23
  misc_feature (1)..(103): NCBI GI NO: 15237702 NR Description: putative protein; protein id: At5g58560
  misc_feature (1)..(103): NCBI GI NO: 21593148 NR Description: unknown [Arabidopsis thaliana]
  misc_feature (1)..(56): NCBI GI NO: 8843778 NR Description: emb|CAB85555
  misc_feature (1)..(102): NCBI GI NO: 28850457 NR Description: similar to Oryza sativa (japonica cultivar-group)
  misc_feature (1)..(102): NCBI GI NO: 21674801 NR Description: conserved hypothetical protein
MSGGDGFADIVGRRYGSAKLPFNRKKSWAGSISMFISGFLLSAMMMLYFSSLGYIDVIWEEALGKLALVALAATVVECVPVTEVVDDNISVPLATMLVAFLLFSSNRTIVN

SEQ ID NO: 36358 - DNA, 1623 bp, Zea mays subsp. mays; identical to SEQ ID NO: 35253
  misc_feature (1)..(1623): Ceres Seq. ID no. 12462280

SEQ ID NO: 36359 - protein, 467 aa, Zea mays subsp. mays; identical to SEQ ID NO: 35254
  peptide (1)..(467): Ceres Seq. ID no. 12462281
  misc_feature (25)..(247): Pfam Name: Pfam Description:  Elongation factor Tu GTP binding domain
  misc_feature (21)..(467): NCBI GI NO: 7230387 NR Description: elongation factor 1 alpha [Zea mays]
  misc_feature (21)..(467): NCBI GI NO: 7230385 NR Description: elongation factor 1 alpha [Zea mays]
  misc_feature (21)..(467): NCBI GI NO: 7230397 NR Description: elongation factor 1 alpha [Zea mays]
  misc_feature (21)..(467): NCBI GI NO: 2282584 NR Description: elongation factor 1-alpha [Zea mays]
  misc_feature (21)..(467): NCBI GI NO: 2662341 NR Description: EF-1 alpha [Oryza sativa]
  misc_feature (21)..(467): NCBI GI NO: 7230391 NR Description: elongation factor 1 alpha [Zea mays]
  misc_feature (21)..(467): NCBI GI NO: 2662343 NR Description: EF-1 alpha [Oryza sativa]
  misc_feature (21)..(467): NCBI GI NO: 6015059 NR Description: ELONGATION FACTOR 1-ALPHA (EF-1-ALPHA)
  misc_feature (21)..(467): NCBI GI NO: 3122071 NR Description: ELONGATION FACTOR 1-ALPHA (EF-1-ALPHA)
  misc_feature (21)..(467): NCBI GI NO: 9802384 NR Description: elongation factor [Saccharum officinarum]

SEQ ID NO: 36360 - protein, 447 aa, Zea mays subsp. mays; identical to SEQ ID NO: 35255
  peptide (1)..(447): Ceres Seq. ID no. 12462282
  misc_feature (5)..(227): Pfam Name: Pfam Description:  Elongation factor Tu GTP binding domain
  misc_feature (1)..(447): NCBI GI NO: 7230387 NR Description: elongation factor 1 alpha [Zea mays]
  misc_feature (1)..(447): NCBI GI NO: 7230385 NR Description: elongation factor 1 alpha [Zea mays]
  misc_feature (1)..(447): NCBI GI NO: 7230397 NR Description: elongation factor 1 alpha [Zea mays]
  misc_feature (1)..(447): NCBI GI NO: 2282584 NR Description: elongation factor 1-alpha [Zea mays]
  misc_feature (1)..(447): NCBI GI NO: 2662341 NR Description: EF-1 alpha [Oryza sativa]
  misc_feature (1)..(447): NCBI GI NO: 7230391 NR Description: elongation factor 1 alpha [Zea mays]
  misc_feature (1)..(447): NCBI GI NO: 2662343 NR Description: EF-1 alpha [Oryza sativa]
  misc_feature (1)..(447): NCBI GI NO: 6015059 NR Description: ELONGATION FACTOR 1-ALPHA (EF-1-ALPHA)
  misc_feature (1)..(447): NCBI GI NO: 3122071 NR Description: ELONGATION FACTOR 1-ALPHA (EF-1-ALPHA)
  misc_feature (1)..(447): NCBI GI NO: 9802384 NR Description: elongation factor [Saccharum officinarum]

SEQ ID NO: 36361 - protein, 399 aa, Zea mays subsp. mays; identical to SEQ ID NO: 35256
  peptide (1)..(399): Ceres Seq. ID no. 12462283
  misc_feature (1)..(179): Pfam Name: Pfam Description:  Elongation factor Tu GTP binding domain
  misc_feature (1)..(399): NCBI GI NO: 7230387 NR Description: elongation factor 1 alpha [Zea mays]
  misc_feature (1)..(399): NCBI GI NO: 7230385 NR Description: elongation factor 1 alpha [Zea mays]
  misc_feature (1)..(399): NCBI GI NO: 7230397 NR Description: elongation factor 1 alpha [Zea mays]
  misc_feature (1)..(399): NCBI GI NO: 2282584 NR Description: elongation factor 1-alpha [Zea mays]
  misc_feature (1)..(399): NCBI GI NO: 2662341 NR Description: EF-1 alpha [Oryza sativa]
  misc_feature (1)..(399): NCBI GI NO: 7230391 NR Description: elongation factor 1 alpha [Zea mays]
  misc_feature (1)..(399): NCBI GI NO: 2662343 NR Description: EF-1 alpha [Oryza sativa]
  misc_feature (1)..(399): NCBI GI NO: 6015059 NR Description: ELONGATION FACTOR 1-ALPHA (EF-1-ALPHA)
  misc_feature (1)..(399): NCBI GI NO: 3122071 NR Description: ELONGATION FACTOR 1-ALPHA (EF-1-ALPHA)
  misc_feature (1)..(399): NCBI GI NO: 9802384 NR Description: elongation factor [Saccharum officinarum]

SEQ ID NO: 36362 - DNA, 492 bp, Zea mays subsp. mays
  misc_feature (1)..(492): Ceres Seq. ID no. 3626206
tttttgcaggttcctggksctcaaggtagctttgttttcsttaaggattctatatataagaaacctgacacggctttgctcccatttcctacatacttcacgcgtgaaggtgagcctgaagacttggagcccctgattgctgatcttggtgatgttgacccattcatggcagccgattaagacaatgcacaaagttggttaattcctttttgtgttctaagcactccttgagctcgtccattccacgagattgtcaaactctcgatggatgtgagcaattcctgaatcacaagctatatccggttactggccagcctgatcaatgttgttccatgtacattacctggcaagtataccagtgctataatggkttttatatgattgktttgattgaccgaatataaccttttcctcaataagttgtacgcggagccacaagtagtatataaaatcagaatatttcactcatgaragtgtgttctggktttacsc

SEQ ID NO: 36363 - protein, 59 aa, Zea mays subsp. mays
  peptide (1)..(59): Ceres Seq. ID no. 3626207
  misc_feature (3)..(59): NCBI GI NO: 34902796 NR Description: unnamed protein product
  misc_feature (3)..(59): NCBI GI NO: 21450877 NR Description: putative ribosomal protein L3
  misc_feature (3)..(59): NCBI GI NO: 18401521 NR Description: ribosomal protein L3; protein id: At3g17465.1
  misc_feature (6)..(6): Xaa is any aa, unknown or other
  misc_feature (7)..(7): Xaa is any aa, unknown or other
  misc_feature (14)..(14): Xaa is any aa, unknown or other
FLQVPXXQGSFVFXKDSIYKKPDTALLPFPTYFTREGEPEDLEPLIADLGDVDPFMAAD

SEQ ID NO: 36364 - protein, 44 aa, Zea mays subsp. mays
  peptide (1)..(44): Ceres Seq. ID no. 3626208
  misc_feature (6)..(6): Xaa is any aa, unknown or other
  misc_feature (13)..(13): Xaa is any aa, unknown or other
FCRFLXLKVALFXLRILYIRNLTRLCSHFLHTSRVKVSLKTWSP

SEQ ID NO: 36365 - DNA, 577 bp, Zea mays subsp. mays
  misc_feature (1)..(577): Ceres Seq. ID no. 3626253
ggttcgaccccaccgccgactkccacacctactccatccagtggacgcagcagcacatcctcgtgctggtggacgggacgccgatccgggagttcaagaaccacgcggaccggggcgtgccgtacccgtcgtcgcagcggatgcgcctctacggctcgctgtgggacgccgaggactgggccacgcagggcggccgcgtgaagacggactggtcgcgggcccccttcgtggcgcagtaccgcaacttcacggccgcgccgccggccacggcggcggacggccggtacgggcaacagatggacgccgcggcgcagcaggccatgaagtgggcgcgggacaactacatggtctacgactactgcgccgacaccaagcgcttcccgcagggcgcgccgcctgagtgctccatggcgtagaggtgctgggctgaaccacggtgcacttcgattgcgatgtcgatcagctagtgcacactatatacgacgcacgggtcaattcattgtttataccgatcgatcgattctctggtgtgaaagaaatactctagtataatttaattcatttggttggttgcaag

SEQ ID NO: 36366 - protein, 137 aa, Zea mays subsp. mays
  peptide (1)..(137): Ceres Seq. ID no. 3626254
  misc_feature (1)..(72): Pfam Name: Pfam Description:  Glycosyl hydrolases family 16
  misc_feature (1)..(136): NCBI GI NO: 38344159 NR Description: OSJNBa0041A02.26
  misc_feature (1)..(136): NCBI GI NO: 17149114 NR Description: xyloglucan endotransglycosylase [Oryza sativa]
  misc_feature (1)..(136): NCBI GI NO: 29500891 NR Description: putative xyloglucan endotransglycosylase
  misc_feature (1)..(94): NCBI GI NO: 7447412 NR Description: xyloglucan endo-1,4-beta-D-glucanase (EC 3
  misc_feature (83)..(136): NCBI GI NO: 7447412 NR Description: xyloglucan endo-1,4-beta-D-glucanase (EC 3
  misc_feature (1)..(137): NCBI GI NO: 8886867 NR Description: xyloglucan endotransglycosylase XET2
  misc_feature (1)..(135): NCBI GI NO: 25044833 NR Description: xyloglucan endotransglycosylase [Ananas comosus]
  misc_feature (1)..(136): NCBI GI NO: 9857712 NR Description: xyloglucan endotransglycosylase LeXET2
  misc_feature (1)..(137): NCBI GI NO: 22947852 NR Description: xyloglucan endotransglycosylase
  misc_feature (1)..(135): NCBI GI NO: 7447403 NR Description: xyloglucan endo-1,4-beta-D-glucanase (EC 3
  misc_feature (7)..(7): Xaa is any aa, unknown or other
FDPTADXHTYSIQWTQQHILVLVDGTPIREFKNHADRGVPYPSSQRMRLYGSLWDAEDWATQGGRVKTDWSRAPFVAQYRNFTAAPPATAADGRYGQQMDAAAQQAMKWARDNYMVYDYCADTKRFPQGAPPECSMA

SEQ ID NO: 36367 - protein, 132 aa, Zea mays subsp. mays
  peptide (1)..(132): Ceres Seq. ID no. 3626255
  misc_feature (7)..(7): Xaa is any aa, unknown or other
VRPHRRXPHLLHPVDAAAHPRAGGRDADPGVQEPRGPGRAVPVVAADAPLRLAVGRRGLGHAGRPREDGLVAGPLRGAVPQLHGRAAGHGGGRPVRATDGRRGAAGHEVGAGQLHGLRLLRRHQALPAGRAA

SEQ ID NO: 36368 - protein, 91 aa, Zea mays subsp. mays
  peptide (1)..(91): Ceres Seq. ID no. 3626256
  misc_feature (1)..(90): NCBI GI NO: 38344159 NR Description: OSJNBa0041A02.26
  misc_feature (1)..(90): NCBI GI NO: 17149114 NR Description: xyloglucan endotransglycosylase [Oryza sativa]
  misc_feature (1)..(90): NCBI GI NO: 29500891 NR Description: putative xyloglucan endotransglycosylase
  misc_feature (1)..(48): NCBI GI NO: 7447412 NR Description: xyloglucan endo-1,4-beta-D-glucanase (EC 3
  misc_feature (37)..(90): NCBI GI NO: 7447412 NR Description: xyloglucan endo-1,4-beta-D-glucanase (EC 3
  misc_feature (1)..(91): NCBI GI NO: 8886867 NR Description: xyloglucan endotransglycosylase XET2
  misc_feature (1)..(89): NCBI GI NO: 25044833 NR Description: xyloglucan endotransglycosylase [Ananas comosus]
  misc_feature (1)..(90): NCBI GI NO: 9857712 NR Description: xyloglucan endotransglycosylase LeXET2
  misc_feature (1)..(91): NCBI GI NO: 22947852 NR Description: xyloglucan endotransglycosylase
  misc_feature (1)..(89): NCBI GI NO: 7447403 NR Description: xyloglucan endo-1,4-beta-D-glucanase (EC 3
MRLYGSLWDAEDWATQGGRVKTDWSRAPFVAQYRNFTAAPPATAADGRYGQQMDAAAQQAMKWARDNYMVYDYCADTKRFPQGAPPECSMA

SEQ ID NO: 36369 - DNA, 841 bp, Zea mays subsp. mays
  misc_feature (1)..(841): Ceres Seq. ID no. 12450665
  misc_feature (424)..(424): n is a, c, t, g, unknown, or other
atgctacatcagcccctcgatggttcttctagtgttcctactcaatctcttgtgacctcagtaggcttaacctcacaagttcagctaccattggtgccacagcaccctggaccatctgtcatgcctacaagtgtacaacagctacctttgacccaccctcatcttgctcaggtagctgttgcacctgagaccctaccaaatgaaataagtactttggcagagtttacccatccctcaaagttgagaaaattggaggatggaacctcggtgcctggaatggtgaacagcagccatgctgtttatacagttccactgcaagcagtgggccctagcggaccatcagggagctatagtgctggttctgttagcttacagcaaccagggaatgaagagcagcttacgcctgatgtggagtcagctcttntgcagcaagtcttgcagctgacacccgagcagctgagttcgttgccaccagagcaacagcagcaggtgattgagctccagaagatgctttcagttagtaaatagaagcaactgagagctaacgcagcaaaaatgctggttgagaatctggcacatcacataatggcgagttggtaactagtggaaactggaaatgatcctcagatttgtttatgaagtcaccacgccgcctgtaacctgtaagcattgtcggcatcctgatgccatcaggatccatatggttttctttcttcagctcggagataaaagaaatgtgataggagaagagtagtgtggaaaaagggatacgcattatccatcactgttgtatcattatagggagaaaaaaataatatgtattcaaaggaactttttttcg

SEQ ID NO: 36370 - protein, 175 aa, Zea mays subsp. mays
  peptide (1)..(175): Ceres Seq. ID no. 12450666
  misc_feature (34)..(171): NCBI GI NO: 7488708 NR Description: proline-rich protein precursor - soybean
  misc_feature (142)..(142): Xaa is any aa, unknown or other
MLHQPLDGSSSVPTQSLVTSVGLTSQVQLPLVPQHPGPSVMPTSVQQLPLTHPHLAQVAVAPETLPNEISTLAEFTHPSKLRKLEDGTSVPGMVNSSHAVYTVPLQAVGPSGPSGSYSAGSVSLQQPGNEEQLTPDVESALXQQVLQLTPEQLSSLPPEQQQQVIELQKMLSVSK

SEQ ID NO: 36371 - protein, 135 aa, Zea mays subsp. mays
  peptide (1)..(135): Ceres Seq. ID no. 12450667
  misc_feature (1)..(131): NCBI GI NO: 7488708 NR Description: proline-rich protein precursor - soybean
  misc_feature (102)..(102): Xaa is any aa, unknown or other
MPTSVQQLPLTHPHLAQVAVAPETLPNEISTLAEFTHPSKLRKLEDGTSVPGMVNSSHAVYTVPLQAVGPSGPSGSYSAGSVSLQQPGNEEQLTPDVESALXQQVLQLTPEQLSSLPPEQQQQVIELQKMLSVSK

SEQ ID NO: 36372 - DNA, 532 bp, Zea mays subsp. mays
  misc_feature (1)..(532): Ceres Seq. ID no. 3626306
aagtacaccgagaagcagatggcgtcgctgagcgccgactacgggctggatttgggcaccgtcagaggaaccgtcaacaacgcctgccggattcttgaggtgcggagggacttttgctcgctggacaagtacgtgtgggcgttcgtgaacaacaagccgctgtcgccgagctacaagtacagccggaagatcccggtgaagacgtccaagtcggagtccatcagcaaggacatggtcaggcgcggcttccgcttcgtcggccccactgtcatccactccttcatggaggcggtcgggctcaccaacgaccacctcgtctcgtgcccgcgccaccgcgtytgctcctccgccgscgscgscgsccgcgttaataataactgattctgctgacgaccaccaagcaaaacacaagaggggattatctaaggacaaccaaaacgagagagagagaggtagcagtagtaatatacaaaggagagtgctggtttgaaagtgtgtatgatgacccartgtgcttgkgtagattaattac

SEQ ID NO: 36373 - protein, 126 aa, Zea mays subsp. mays
  peptide (1)..(126): Ceres Seq. ID no. 3626307
  misc_feature (1)..(113): Pfam Name: Pfam Description:  Methyladenine glycosylase
  misc_feature (1)..(117): NCBI GI NO: 34908920 NR Description: P0691E06.10
  misc_feature (1)..(115): NCBI GI NO: 18399721 NR Description: expressed protein; protein id: At3g12710
  misc_feature (1)..(115): NCBI GI NO: 21536975 NR Description: unknown [Arabidopsis thaliana]
  misc_feature (2)..(116): NCBI GI NO: 15241554 NR Description: putative protein; protein id: At5g44680
  misc_feature (2)..(116): NCBI GI NO: 21592537 NR Description: unknown [Arabidopsis thaliana]
  misc_feature (21)..(117): NCBI GI NO: 38345034 NR Description: OSJNBa0029H02.18
  misc_feature (1)..(115): NCBI GI NO: 18410766 NR Description: putative DNA-3-methyladenine glycosylase I
  misc_feature (1)..(115): NCBI GI NO: 25406407 NR Description: hypothetical protein F9E10.6
  misc_feature (21)..(114): NCBI GI NO: 15242914 NR Description: putative protein; protein id: At5g57970.1
  misc_feature (3)..(114): NCBI GI NO: 15220860 NR Description: DNA-3-methyladenine glycosidase, putative
  misc_feature (113)..(113): Xaa is any aa, unknown or other
  misc_feature (118)..(118): Xaa is any aa, unknown or other
  misc_feature (119)..(119): Xaa is any aa, unknown or other
  misc_feature (120)..(120): Xaa is any aa, unknown or other
  misc_feature (121)..(121): Xaa is any aa, unknown or other
KYTEKQMASLSADYGLDLGTVRGTVNNACRILEVRRDFCSLDKYVWAFVNNKPLSPSYKYSRKIPVKTSKSESISKDMVRRGFRFVGPTVIHSFMEAVGLTNDHLVSCPRHRXCSSAXXXXRVNNN

SEQ ID NO: 36374 - protein, 120 aa, Zea mays subsp. mays
  peptide (1)..(120): Ceres Seq. ID no. 3626308
  misc_feature (1)..(107): Pfam Name: Pfam Description:  Methyladenine glycosylase
  misc_feature (1)..(111): NCBI GI NO: 34908920 NR Description: P0691E06.10
  misc_feature (1)..(109): NCBI GI NO: 18399721 NR Description: expressed protein; protein id: At3g12710
  misc_feature (1)..(109): NCBI GI NO: 21536975 NR Description: unknown [Arabidopsis thaliana]
  misc_feature (1)..(110): NCBI GI NO: 15241554 NR Description: putative protein; protein id: At5g44680
  misc_feature (1)..(110): NCBI GI NO: 21592537 NR Description: unknown [Arabidopsis thaliana]
  misc_feature (15)..(111): NCBI GI NO: 38345034 NR Description: OSJNBa0029H02.18
  misc_feature (1)..(109): NCBI GI NO: 18410766 NR Description: putative DNA-3-methyladenine glycosylase I
  misc_feature (1)..(109): NCBI GI NO: 25406407 NR Description: hypothetical protein F9E10.6
  misc_feature (15)..(108): NCBI GI NO: 15242914 NR Description: putative protein; protein id: At5g57970.1
  misc_feature (1)..(108): NCBI GI NO: 15220860 NR Description: DNA-3-methyladenine glycosidase, putative
  misc_feature (107)..(107): Xaa is any aa, unknown or other
  misc_feature (112)..(112): Xaa is any aa, unknown or other
  misc_feature (113)..(113): Xaa is any aa, unknown or other
  misc_feature (114)..(114): Xaa is any aa, unknown or other
  misc_feature (115)..(115): Xaa is any aa, unknown or other
MASLSADYGLDLGTVRGTVNNACRILEVRRDFCSLDKYVWAFVNNKPLSPSYKYSRKIPVKTSKSESISKDMVRRGFRFVGPTVIHSFMEAVGLTNDHLVSCPRHRXCSSAXXXXRVNNN

SEQ ID NO: 36375 - DNA, 1486 bp, Zea mays subsp. mays
  misc_feature (1)..(1486): Ceres Seq. ID no. 14307928
gctgctgcctgctcttctttttctgctgagtacaagaaacagtctttgctcgcgtcgtgggttcttcccctgttcgattcaccgcgaggtctgcgacggaggtttgcgtgcctccgattgctgcatccgttgctgatcgaggagactgggaccttcaaagagcaataggactcatggaggttggagacgcaagaaacggttctgcagcagcggcactgacaaagggaagtgcggatgatgccgcccgcaaaccgctccctccttgctgcgtcaaggccaaggcgcgtgtgcctgaaaccgaggccaactgccatgatactgtggtttcagggtggttcacggaacccagatcgcgttttggtaaaacaagcaaagtgcagtacttcaataacccgatgtggcctggagaggctcattcattgaaagtggagaagatcttgtttcaagggaaatcgccttaccaagaaattttagtttttgagtcttcaacctatggaaatgttcttgtgcttgatggtatagttcagttgactgacaaggatgaatgcgcataccaggaaatggttactcaccttccactgtgctcaattcctgcaccgaagaatgttttggttgttggaggtggtgatggtggtgtactgcgcgaaatagccagacatgattcagtggaaactattgatatatgtgagattgatcaactagttattgatgtttgcaaagaattctttccaaacttatccattggattcaaagatcctcgtgtccgacttcatgttggtgatgctgttgatttcctgaggaattctcccgaaggaaaatatgatgctattattgtagattcatcagatccaattgggccagcacaggcactcgtggagaaactgtttattcagacaattgctagagctttgaagcctggtggtgttctttgtaatcttgctgagagcatgtggctgcacacacatctaatccaggatatgcttgctatctgtcgacagacattcaaaggtgctgtgcactatgcctggacaagtgttccaacatatcccagtggtgtcattggatttttgctatgtgcaaaagaaggtcgtgcagtgaacttcttaactcctgtgaatccaattgagaaaatagaaggaacaacaaaagctggaagggaactcagattttacaattccgagatccatagggctgcttttgttctgccaacatttgtaagaagagaactggaagcatataccactcctagtacctctgctgaaaacgagaaaccgaaagaatcggtgtcagaaccgcagaagataaagatattgtcaaacaacgccattcttacagcttcctagccctgagccgtactcaatcttgctcggtatagttgtattctcacagaataaatcagtcactggcttttgctgacaccgcacgagcagctttagtatagtgagttgaatgatgatcgattgaataagagggtagatattgaact

SEQ ID NO: 36376 - protein, 389 aa, Zea mays subsp. mays
  peptide (1)..(389): Ceres Seq. ID no. 14307929
  misc_feature (53)..(310): Pfam Name: Pfam Description:  Spermine/spermidine synthase
  misc_feature (1)..(389): NCBI GI NO: 33354149 NR Description: aminopropyl transferase
  misc_feature (17)..(352): NCBI GI NO: 18423473 NR Description: spermidine synthase [Arabidopsis thaliana]
  misc_feature (17)..(352): NCBI GI NO: 15983394 NR Description: AT5g53120/MFH8_5 [Arabidopsis thaliana]
  misc_feature (17)..(352): NCBI GI NO: 21592832 NR Description: spermidine synthase [Arabidopsis thaliana]
  misc_feature (28)..(362): NCBI GI NO: 33150481 NR Description: putative spermine synthase
  misc_feature (17)..(352): NCBI GI NO: 9757993 NR Description: spermidine synthase [Arabidopsis thaliana]
  misc_feature (73)..(354): NCBI GI NO: 6094330 NR Description: Spermidine synthase 2
  misc_feature (73)..(354): NCBI GI NO: 6094327 NR Description: Spermidine synthase 1
  misc_feature (73)..(354): NCBI GI NO: 6094335 NR Description: Spermidine synthase
  misc_feature (73)..(350): NCBI GI NO: 12229998 NR Description: Spermidine synthase 1
MEVGDARNGSAAAALTKGSADDAARKPLPPCCVKAKARVPETEANCHDTVVSGWFTEPRSRFGKTSKVQYFNNPMWPGEAHSLKVEKILFQGKSPYQEILVFESSTYGNVLVLDGIVQLTDKDECAYQEMVTHLPLCSIPAPKNVLVVGGGDGGVLREIARHDSVETIDICEIDQLVIDVCKEFFPNLSIGFKDPRVRLHVGDAVDFLRNSPEGKYDAIIVDSSDPIGPAQALVEKLFIQTIARALKPGGVLCNLAESMWLHTHLIQDMLAICRQTFKGAVHYAWTSVPTYPSGVIGFLLCAKEGRAVNFLTPVNPIEKIEGTTKAGRELRFYNSEIHRAAFVLPTFVRRELEAYTTPSTSAENEKPKESVSEPQKIKILSNNAILTAS

SEQ ID NO: 36377 - protein, 315 aa, Zea mays subsp. mays
  peptide (1)..(315): Ceres Seq. ID no. 14307930
  misc_feature (1)..(236): Pfam Name: Pfam Description:  Spermine/spermidine synthase
  misc_feature (1)..(315): NCBI GI NO: 33354149 NR Description: aminopropyl transferase
  misc_feature (1)..(278): NCBI GI NO: 18423473 NR Description: spermidine synthase [Arabidopsis thaliana]
  misc_feature (1)..(278): NCBI GI NO: 15983394 NR Description: AT5g53120/MFH8_5 [Arabidopsis thaliana]
  misc_feature (1)..(278): NCBI GI NO: 21592832 NR Description: spermidine synthase [Arabidopsis thaliana]
  misc_feature (1)..(288): NCBI GI NO: 33150481 NR Description: putative spermine synthase
  misc_feature (1)..(278): NCBI GI NO: 9757993 NR Description: spermidine synthase [Arabidopsis thaliana]
  misc_feature (1)..(280): NCBI GI NO: 6094330 NR Description: Spermidine synthase 2
  misc_feature (1)..(280): NCBI GI NO: 6094327 NR Description: Spermidine synthase 1
  misc_feature (1)..(280): NCBI GI NO: 6094335 NR Description: Spermidine synthase
  misc_feature (1)..(276): NCBI GI NO: 12229998 NR Description: Spermidine synthase 1
MWPGEAHSLKVEKILFQGKSPYQEILVFESSTYGNVLVLDGIVQLTDKDECAYQEMVTHLPLCSIPAPKNVLVVGGGDGGVLREIARHDSVETIDICEIDQLVIDVCKEFFPNLSIGFKDPRVRLHVGDAVDFLRNSPEGKYDAIIVDSSDPIGPAQALVEKLFIQTIARALKPGGVLCNLAESMWLHTHLIQDMLAICRQTFKGAVHYAWTSVPTYPSGVIGFLLCAKEGRAVNFLTPVNPIEKIEGTTKAGRELRFYNSEIHRAAFVLPTFVRRELEAYTTPSTSAENEKPKESVSEPQKIKILSNNAILTAS

SEQ ID NO: 36378 - protein, 260 aa, Zea mays subsp. mays
  peptide (1)..(260): Ceres Seq. ID no. 14307931
  misc_feature (1)..(181): Pfam Name: Pfam Description:  Spermine/spermidine synthase
  misc_feature (1)..(260): NCBI GI NO: 33354149 NR Description: aminopropyl transferase
  misc_feature (1)..(223): NCBI GI NO: 18423473 NR Description: spermidine synthase [Arabidopsis thaliana]
  misc_feature (1)..(223): NCBI GI NO: 15983394 NR Description: AT5g53120/MFH8_5 [Arabidopsis thaliana]
  misc_feature (1)..(223): NCBI GI NO: 21592832 NR Description: spermidine synthase [Arabidopsis thaliana]
  misc_feature (1)..(233): NCBI GI NO: 33150481 NR Description: putative spermine synthase
  misc_feature (1)..(223): NCBI GI NO: 9757993 NR Description: spermidine synthase [Arabidopsis thaliana]
  misc_feature (1)..(225): NCBI GI NO: 6094330 NR Description: Spermidine synthase 2
  misc_feature (1)..(225): NCBI GI NO: 6094327 NR Description: Spermidine synthase 1
  misc_feature (1)..(225): NCBI GI NO: 6094335 NR Description: Spermidine synthase
  misc_feature (1)..(221): NCBI GI NO: 12229998 NR Description: Spermidine synthase 1
MVTHLPLCSIPAPKNVLVVGGGDGGVLREIARHDSVETIDICEIDQLVIDVCKEFFPNLSIGFKDPRVRLHVGDAVDFLRNSPEGKYDAIIVDSSDPIGPAQALVEKLFIQTIARALKPGGVLCNLAESMWLHTHLIQDMLAICRQTFKGAVHYAWTSVPTYPSGVIGFLLCAKEGRAVNFLTPVNPIEKIEGTTKAGRELRFYNSEIHRAAFVLPTFVRRELEAYTTPSTSAENEKPKESVSEPQKIKILSNNAILTAS

SEQ ID NO: 36379 - DNA, 1191 bp, Zea mays subsp. mays
  misc_feature (1)..(1191): Ceres Seq. ID no. 13599050
  misc_feature (729)..(729): n is a, c, t, g, unknown, or other
  misc_feature (728)..(728): n is a, c, t, g, unknown, or other
  misc_feature (731)..(731): n is a, c, t, g, unknown, or other
ggtatttaagacagcttcaaaaggttggggagtcaggacttgggacactatcctccctggggctcccatctgtgagtacacgggggtgttgaggaggactgaagatctggatggttcacagaacaactattgttttgacattgattgtcttcaaaccatgaaaggtttggatggaagggagaaaagagctggatctgaaatgcacctgcctaatctttatccagagaatgactcagatgcaccacctgcacctgagtactgcatagacggcagttccattggcaattttgcaagatttataaatcatagttgccaacctaaccttttcgtccagtgcgtcatgagctcacacaacgatgttaaactagcaaaagtgatgctttttgctgctgacacaatacttcctcttcaggagctatcctatgactacggttatcgcttggacagtgttgttgggcctgatggtaaaattgtgaagctgccatgccactgtggtgctccagattgccggaagcgcctctactagacctgcagtgtgtttccattttgattttgcaggaaacaacctatattgtaggaaagcattcatgttatttatgtagttggcatgctctgatatatagcgaaagaggagcaacttaatctccttttagagcattcttattttgtgataattggaggacatgctggtcatggtagcatattttgcaggaaatcaattaactgannanaaaaaaaaaaaaaaaaaaaaaaaaaaaaaaaaaaaaaaaaaaaaaaaaaaaaaaaaggagaaaaaaaaaaaaaaaaaggaattcctgcaccccggggaatccacaatttcaaaaggggccccccccgcgggggagccccagcttttgttcccttggggaggctgccaatttactgatttagggaatgagggggtttttgaggggctccaggggtttctgtttcaatcagttgcccctcctgttcagttactgaggggggggggggaaagggaaaaagaaccgccggacataagggttatttctgttctcattgccgaaaaacatggaaattgaagttcatttacaccgtttctcaacccggtacgcaccaaaaaatcattgatatggccataaagggcgttgaatgccggcaaacagcccgaattatgggggttggcctcaacacgattttacgtcactt

SEQ ID NO: 36380 - protein, 174 aa, Zea mays subsp. mays
  peptide (1)..(174): Ceres Seq. ID no. 13599051
  misc_feature (1)..(151): Pfam Name: Pfam Description:  SET domain
  misc_feature (1)..(174): NCBI GI NO: 22121716 NR Description: SET domain-containing protein SET118 [Zea mays]
  misc_feature (1)..(174): NCBI GI NO: 34907056 NR Description: putative SUVH4
  misc_feature (1)..(174): NCBI GI NO: 15240758 NR Description: SET-domain transcriptional regulator family
  misc_feature (1)..(174): NCBI GI NO: 27502110 NR Description: SET domain histone methyltransferase SUVH4
  misc_feature (1)..(174): NCBI GI NO: 13517749 NR Description: SUVH4 [Arabidopsis thaliana]
  misc_feature (1)..(174): NCBI GI NO: 17529178 NR Description: putative mammalian MHC III region protein G9a
  misc_feature (1)..(174): NCBI GI NO: 25412134 NR Description: similar to mammalian MHC III region protein G9a
  misc_feature (1)..(174): NCBI GI NO: 30681803 NR Description: SET-domain transcriptional regulator family
  misc_feature (1)..(174): NCBI GI NO: 37572974 NR Description: putative histone-lysine N-methyltransferase
  misc_feature (1)..(174): NCBI GI NO: 22121718 NR Description: SET domain-containing protein SET104 [Zea mays]
VFKTASKGWGVRTWDTILPGAPICEYTGVLRRTEDLDGSQNNYCFDIDCLQTMKGLDGREKRAGSEMHLPNLYPENDSDAPPAPEYCIDGSSIGNFARFINHSCQPNLFVQCVMSSHNDVKLAKVMLFAADTILPLQELSYDYGYRLDSVVGPDGKIVKLPCHCGAPDCRKRLY

SEQ ID NO: 36381 - protein, 126 aa, Zea mays subsp. mays
  peptide (1)..(126): Ceres Seq. ID no. 13599052
  misc_feature (15)..(15): Xaa is any aa, unknown or other
  misc_feature (16)..(16): Xaa is any aa, unknown or other
MLVMVAYFAGNQLTXXKKKKKKKKKKKKKKKKKKKEKKKKKKEFLHPGESTISKGAPPAGEPQLLFPWGGCQFTDLGNEGVFEGLQGFLFQSVAPPVQLLRGGGEREKEPPDIRVISVLIAEKHGN

SEQ ID NO: 36382 - protein, 123 aa, Zea mays subsp. mays
  peptide (1)..(123): Ceres Seq. ID no. 13599053
  misc_feature (12)..(12): Xaa is any aa, unknown or other
  misc_feature (13)..(13): Xaa is any aa, unknown or other
MVAYFAGNQLTXXKKKKKKKKKKKKKKKKKKKEKKKKKKEFLHPGESTISKGAPPAGEPQLLFPWGGCQFTDLGNEGVFEGLQGFLFQSVAPPVQLLRGGGEREKEPPDIRVISVLIAEKHGN

SEQ ID NO: 36383 - protein, 122 aa, Zea mays subsp. mays
  peptide (1)..(122): Ceres Seq. ID no. 13599054
  misc_feature (1)..(99): Pfam Name: Pfam Description:  SET domain
  misc_feature (1)..(122): NCBI GI NO: 22121716 NR Description: SET domain-containing protein SET118 [Zea mays]
  misc_feature (1)..(122): NCBI GI NO: 34907056 NR Description: putative SUVH4
  misc_feature (1)..(122): NCBI GI NO: 15240758 NR Description: SET-domain transcriptional regulator family
  misc_feature (1)..(122): NCBI GI NO: 27502110 NR Description: SET domain histone methyltransferase SUVH4
  misc_feature (1)..(122): NCBI GI NO: 13517749 NR Description: SUVH4 [Arabidopsis thaliana]
  misc_feature (1)..(122): NCBI GI NO: 17529178 NR Description: putative mammalian MHC III region protein G9a
  misc_feature (1)..(122): NCBI GI NO: 25412134 NR Description: similar to mammalian MHC III region protein G9a
  misc_feature (1)..(122): NCBI GI NO: 30681803 NR Description: SET-domain transcriptional regulator family
  misc_feature (1)..(122): NCBI GI NO: 37572974 NR Description: putative histone-lysine N-methyltransferase
  misc_feature (1)..(122): NCBI GI NO: 22121718 NR Description: SET domain-containing protein SET104 [Zea mays]
MKGLDGREKRAGSEMHLPNLYPENDSDAPPAPEYCIDGSSIGNFARFINHSCQPNLFVQCVMSSHNDVKLAKVMLFAADTILPLQELSYDYGYRLDSVVGPDGKIVKLPCHCGAPDCRKRLY

SEQ ID NO: 36384 - DNA, 599 bp, Zea mays subsp. mays
  misc_feature (1)..(599): Ceres Seq. ID no. 3626363
atatgtgccagtgtggattttatatctatagcatcggtgctcttgttgcttgggaaacccgcagaaaagattttgctgtaatgatgtctcatcatgtaataacatctactctaattggagtttcatatctgactggatttttccgaattgggaccatcattctcgctcttcatgatgcaagtgatgtgtttcttgagactgccaaattgtgcaaatacacagaaaaagagctgggtgctagcttgttttttggtctcttcgctatctcctggcttctattgcgtctgatttacttcccattttggataatcaaagcctctaggtttgttttttacttctctttgtgataactttctgtttctgtagtcttgtagttttggacttattgctgttgccgttgcaatggcagctatcattccatcacattcttgaggaagctggatgaattcccaacaactttgtactacatcttgaacacaatgcttctcacattgcttgtattccatatgtactggtggaaactcatatgtttgatgataatgagacagctgaataataaaggacaagttacagacgatgtccgawctgattctgaggat

SEQ ID NO: 36385 - protein, 114 aa, Zea mays subsp. mays
  peptide (1)..(114): Ceres Seq. ID no. 3626364
  misc_feature (1)..(106): Pfam Name: LAG1 Pfam Description: Longevity-assurance protein
  misc_feature (1)..(114): NCBI GI NO: 34901974 NR Description: unknown protein
  misc_feature (1)..(106): NCBI GI NO: 15230323 NR Description: longevity factor-like protein
  misc_feature (1)..(106): NCBI GI NO: 7658241 NR Description: LAG1 homolog 2 [Arabidopsis thaliana]
  misc_feature (1)..(108): NCBI GI NO: 25518747 NR Description: hypothetical protein F13B4
  misc_feature (1)..(108): NCBI GI NO: 18404559 NR Description: expressed protein; protein id: At3g25540
  misc_feature (5)..(108): NCBI GI NO: 16974114 NR Description: putative resistance protein
  misc_feature (5)..(114): NCBI GI NO: 7688742 NR Description: ASC1 [Lycopersicon esculentum]
  misc_feature (1)..(109): NCBI GI NO: 30683361 NR Description: longevity assurance protein -related
  misc_feature (1)..(106): NCBI GI NO: 31241781 NR Description: ENSANGP00000012836 [Anopheles gambiae]
  misc_feature (1)..(106): NCBI GI NO: 21358551 NR Description: Longevity assurance gene 1 CG3576-PB
MCQCGFYIYSIGALVAWETRRKDFAVMMSHHVITSTLIGVSYLTGFFRIGTIILALHDASDVFLETAKLCKYTEKELGASLFFGLFAISWLLLRLIYFPFWIIKASRFVFYFSL

SEQ ID NO: 36386 - protein, 88 aa, Zea mays subsp. mays
  peptide (1)..(88): Ceres Seq. ID no. 3626365
  misc_feature (1)..(80): Pfam Name: LAG1 Pfam Description: Longevity-assurance protein
  misc_feature (1)..(88): NCBI GI NO: 34901974 NR Description: unknown protein
  misc_feature (1)..(80): NCBI GI NO: 15230323 NR Description: longevity factor-like protein
  misc_feature (1)..(80): NCBI GI NO: 7658241 NR Description: LAG1 homolog 2 [Arabidopsis thaliana]
  misc_feature (1)..(82): NCBI GI NO: 25518747 NR Description: hypothetical protein F13B4
  misc_feature (1)..(82): NCBI GI NO: 18404559 NR Description: expressed protein; protein id: At3g25540
  misc_feature (1)..(82): NCBI GI NO: 16974114 NR Description: putative resistance protein
  misc_feature (1)..(88): NCBI GI NO: 7688742 NR Description: ASC1 [Lycopersicon esculentum]
  misc_feature (1)..(83): NCBI GI NO: 30683361 NR Description: longevity assurance protein -related
  misc_feature (1)..(80): NCBI GI NO: 31241781 NR Description: ENSANGP00000012836 [Anopheles gambiae]
  misc_feature (1)..(80): NCBI GI NO: 21358551 NR Description: Longevity assurance gene 1 CG3576-PB
MMSHHVITSTLIGVSYLTGFFRIGTIILALHDASDVFLETAKLCKYTEKELGASLFFGLFAISWLLLRLIYFPFWIIKASRFVFYFSL

SEQ ID NO: 36387 - protein, 87 aa, Zea mays subsp. mays
  peptide (1)..(87): Ceres Seq. ID no. 3626366
  misc_feature (1)..(79): Pfam Name: LAG1 Pfam Description: Longevity-assurance protein
  misc_feature (1)..(87): NCBI GI NO: 34901974 NR Description: unknown protein
  misc_feature (1)..(79): NCBI GI NO: 15230323 NR Description: longevity factor-like protein
  misc_feature (1)..(79): NCBI GI NO: 7658241 NR Description: LAG1 homolog 2 [Arabidopsis thaliana]
  misc_feature (1)..(81): NCBI GI NO: 25518747 NR Description: hypothetical protein F13B4
  misc_feature (1)..(81): NCBI GI NO: 18404559 NR Description: expressed protein; protein id: At3g25540
  misc_feature (1)..(81): NCBI GI NO: 16974114 NR Description: putative resistance protein
  misc_feature (1)..(87): NCBI GI NO: 7688742 NR Description: ASC1 [Lycopersicon esculentum]
  misc_feature (1)..(82): NCBI GI NO: 30683361 NR Description: longevity assurance protein -related
  misc_feature (1)..(79): NCBI GI NO: 31241781 NR Description: ENSANGP00000012836 [Anopheles gambiae]
  misc_feature (1)..(79): NCBI GI NO: 21358551 NR Description: Longevity assurance gene 1 CG3576-PB
MSHHVITSTLIGVSYLTGFFRIGTIILALHDASDVFLETAKLCKYTEKELGASLFFGLFAISWLLLRLIYFPFWIIKASRFVFYFSL

SEQ ID NO: 36388 - DNA, 589 bp, Zea mays subsp. mays
  misc_feature (1)..(589): Ceres Seq. ID no. 12468060
  misc_feature (370)..(370): n is a, c, t, g, unknown, or other
acactatgcaggtgtgaaacatgcatcaacttgtatgcacaacgaggtattgcatatcttattgacaaggaggattctattgaggaatacgagaagattgccaagcagaagagggagatgaaactggagcagcagcaaggagctgagacaaattttctgaattcacttaatcatgttcagaagatagagatgataagtggcatcaatgacatgaagaatgagtttcagtcctttctggagtccttcgatgcatcaaaaccggtaacatctgatgatatacattcattcttcgagaatcttgctaagaagaagaaacagaggttatcttagcttttgtgaccgcatcggaccccacctgaggcaatcgttntgctggacagaggtcctagtttgttgggctagtaaatgtaatgttatcttaggtggtacttactaatcgggccagtaatgttgaattctagctggaacgcggtaatgtttgatgcaccgaagtcgcttgcagtaggttccgatggcccaagccaccaaaaacttgtttgctccatgaacctcgcaatcctgttaggtgataatataatatacattgtgt

SEQ ID NO: 36389 - protein, 109 aa, Zea mays subsp. mays
  peptide (1)..(109): Ceres Seq. ID no. 12468061
  misc_feature (2)..(106): NCBI GI NO: 17064724 NR Description: putative protein [Arabidopsis thaliana]
  misc_feature (2)..(106): NCBI GI NO: 22328893 NR Description: putative protein; protein id: At4g23860
  misc_feature (2)..(79): NCBI GI NO: 7487590 NR Description: hypothetical protein T32A16
  misc_feature (2)..(108): NCBI GI NO: 28175400 NR Description: Similar to RIKEN cDNA 5730410I19 gene
  misc_feature (2)..(107): NCBI GI NO: 27882071 NR Description: Unknown (protein for MGC:55404) [Danio rerio]
  misc_feature (1)..(108): NCBI GI NO: 19921458 NR Description: CG15141-PA [Drosophila melanogaster]
  misc_feature (2)..(108): NCBI GI NO: 30388577 NR Description: Similar to chromosome 14 open reading frame 130
  misc_feature (2)..(108): NCBI GI NO: 37590093 NR Description: Unknown (protein for IMAGE:6812098) [Mus musculus]
  misc_feature (2)..(108): NCBI GI NO: 29789154 NR Description: RIKEN cDNA 5730410I19 [Mus musculus]
  misc_feature (2)..(108): NCBI GI NO: 7022546 NR Description: unnamed protein product [Homo sapiens]
TLCRCETCINLYAQRGIAYLIDKEDSIEEYEKIAKQKREMKLEQQQGAETNFLNSLNHVQKIEMISGINDMKNEFQSFLESFDASKPVTSDDIHSFFENLAKKKKQRLS

SEQ ID NO: 36390 - protein, 70 aa, Zea mays subsp. mays
  peptide (1)..(70): Ceres Seq. ID no. 12468062
  misc_feature (1)..(67): NCBI GI NO: 17064724 NR Description: putative protein [Arabidopsis thaliana]
  misc_feature (1)..(67): NCBI GI NO: 22328893 NR Description: putative protein; protein id: At4g23860
  misc_feature (1)..(40): NCBI GI NO: 7487590 NR Description: hypothetical protein T32A16
  misc_feature (1)..(69): NCBI GI NO: 28175400 NR Description: Similar to RIKEN cDNA 5730410I19 gene
  misc_feature (1)..(68): NCBI GI NO: 27882071 NR Description: Unknown (protein for MGC:55404) [Danio rerio]
  misc_feature (1)..(69): NCBI GI NO: 19921458 NR Description: CG15141-PA [Drosophila melanogaster]
  misc_feature (1)..(69): NCBI GI NO: 30388577 NR Description: Similar to chromosome 14 open reading frame 130
  misc_feature (1)..(69): NCBI GI NO: 37590093 NR Description: Unknown (protein for IMAGE:6812098) [Mus musculus]
  misc_feature (1)..(69): NCBI GI NO: 29789154 NR Description: RIKEN cDNA 5730410I19 [Mus musculus]
  misc_feature (1)..(69): NCBI GI NO: 7022546 NR Description: unnamed protein product [Homo sapiens]
MKLEQQQGAETNFLNSLNHVQKIEMISGINDMKNEFQSFLESFDASKPVTSDDIHSFFENLAKKKKQRLS

SEQ ID NO: 36391 - protein, 54 aa, Zea mays subsp. mays
  peptide (1)..(54): Ceres Seq. ID no. 12468063
  misc_feature (33)..(33): Xaa is any aa, unknown or other
MIYIHSSRILLRRRNRGYLSFCDRIGPHLRQSXCWTEVLVCWASKCNVILGGTY

SEQ ID NO: 36392 - DNA, 565 bp, Zea mays subsp. mays
  misc_feature (1)..(565): Ceres Seq. ID no. 3628344
aaagttgctgattttggtgtcgcacgtgttaaagctcaatctggagtcatgactgcagaaactggtacttaccgttggatggccccagaggtcatagagcataaaccctatgatcagaaggctgatgtttttagttttggaattttgatgtgggagctactcacagggaagattccttatgagtatctgactccactacaagcagctgttggcgtggtgcagaagggattacggcctacaattccgaaacatacttatgcaatgctttctgagcttcttcagaaatgttggcagcaagaccccgctcaaagaccagacttttccgaaatattagaaactcttcagagaatagcagaggaagtcggagacgagcacgaggggaagcacaaggacagaacactgggtggtttcttttcagctctgagggggcggagccattgagacacggttgaagacttgaaatgtacatggcctcggtccatcctggaaggatctgaactacaaccagctcctgttccccgcacatagcgacagtacacagaaatactgtacagacatgctgcag

SEQ ID NO: 36393 - protein, 146 aa, Zea mays subsp. mays
  peptide (1)..(146): Ceres Seq. ID no. 3628345
  misc_feature (1)..(114): Pfam Name: Pfam Description:  Protein kinase domain
  misc_feature (1)..(146): NCBI GI NO: 32490474 NR Description: putative serine/threonine-protein kinase ctr1
  misc_feature (1)..(142): NCBI GI NO: 18420244 NR Description: protein kinase like protein; protein id:At4g38470
  misc_feature (2)..(146): NCBI GI NO: 33772207 NR Description: protein kinase [Malus x domestica]
  misc_feature (1)..(146): NCBI GI NO: 22329194 NR Description: putative protein; protein id: At4g35780
  misc_feature (1)..(146): NCBI GI NO: 7486654 NR Description: hypothetical protein F8D20
  misc_feature (1)..(133): NCBI GI NO: 34393850 NR Description: putative serine/threonine protein kinase
  misc_feature (1)..(119): NCBI GI NO: 34901608 NR Description: P0571D04.18
  misc_feature (1)..(121): NCBI GI NO: 15227883 NR Description: putative protein kinase; protein id: At2g17700
  misc_feature (1)..(127): NCBI GI NO: 38637045 NR Description: serine/threonine protein kinase-like
  misc_feature (1)..(121): NCBI GI NO: 27085278 NR Description: serine/threonine protein kinase
KVADFGVARVKAQSGVMTAETGTYRWMAPEVIEHKPYDQKADVFSFGILMWELLTGKIPYEYLTPLQAAVGVVQKGLRPTIPKHTYAMLSELLQKCWQQDPAQRPDFSEILETLQRIAEEVGDEHEGKHKDRTLGGFFSALRGRSH

SEQ ID NO: 36394 - protein, 130 aa, Zea mays subsp. mays
  peptide (1)..(130): Ceres Seq. ID no. 3628346
  misc_feature (1)..(98): Pfam Name: Pfam Description:  Protein kinase domain
  misc_feature (1)..(130): NCBI GI NO: 32490474 NR Description: putative serine/threonine-protein kinase ctr1
  misc_feature (1)..(126): NCBI GI NO: 18420244 NR Description: protein kinase like protein; protein id:At4g38470
  misc_feature (1)..(130): NCBI GI NO: 33772207 NR Description: protein kinase [Malus x domestica]
  misc_feature (1)..(130): NCBI GI NO: 22329194 NR Description: putative protein; protein id: At4g35780
  misc_feature (1)..(130): NCBI GI NO: 7486654 NR Description: hypothetical protein F8D20
  misc_feature (1)..(117): NCBI GI NO: 34393850 NR Description: putative serine/threonine protein kinase
  misc_feature (1)..(103): NCBI GI NO: 34901608 NR Description: P0571D04.18
  misc_feature (1)..(105): NCBI GI NO: 15227883 NR Description: putative protein kinase; protein id: At2g17700
  misc_feature (1)..(111): NCBI GI NO: 38637045 NR Description: serine/threonine protein kinase-like
  misc_feature (1)..(105): NCBI GI NO: 27085278 NR Description: serine/threonine protein kinase
MTAETGTYRWMAPEVIEHKPYDQKADVFSFGILMWELLTGKIPYEYLTPLQAAVGVVQKGLRPTIPKHTYAMLSELLQKCWQQDPAQRPDFSEILETLQRIAEEVGDEHEGKHKDRTLGGFFSALRGRSH

SEQ ID NO: 36395 - protein, 120 aa, Zea mays subsp. mays
  peptide (1)..(120): Ceres Seq. ID no. 3628347
  misc_feature (1)..(88): Pfam Name: Pfam Description:  Protein kinase domain
  misc_feature (1)..(120): NCBI GI NO: 32490474 NR Description: putative serine/threonine-protein kinase ctr1
  misc_feature (1)..(116): NCBI GI NO: 18420244 NR Description: protein kinase like protein; protein id:At4g38470
  misc_feature (1)..(120): NCBI GI NO: 33772207 NR Description: protein kinase [Malus x domestica]
  misc_feature (1)..(120): NCBI GI NO: 22329194 NR Description: putative protein; protein id: At4g35780
  misc_feature (1)..(120): NCBI GI NO: 7486654 NR Description: hypothetical protein F8D20
  misc_feature (1)..(107): NCBI GI NO: 34393850 NR Description: putative serine/threonine protein kinase
  misc_feature (1)..(93): NCBI GI NO: 34901608 NR Description: P0571D04.18
  misc_feature (1)..(95): NCBI GI NO: 15227883 NR Description: putative protein kinase; protein id: At2g17700
  misc_feature (1)..(101): NCBI GI NO: 38637045 NR Description: serine/threonine protein kinase-like
  misc_feature (1)..(95): NCBI GI NO: 27085278 NR Description: serine/threonine protein kinase
MAPEVIEHKPYDQKADVFSFGILMWELLTGKIPYEYLTPLQAAVGVVQKGLRPTIPKHTYAMLSELLQKCWQQDPAQRPDFSEILETLQRIAEEVGDEHEGKHKDRTLGGFFSALRGRSH

SEQ ID NO: 36396 - DNA, 645 bp, Zea mays subsp. mays
  misc_feature (1)..(645): Ceres Seq. ID no. 11415217
agcgccaacggccaacctcacgcagtcccgccgcatcgaatggcatccctccggcttgtggcaacgctagcgccctccggtcctccgccgccacctcgacgtaagcagcggagaccgtcctccgcagtccgtctgacaggtgggatgggcctggcggcagctgctgccgtggcggcggccgcggccgcctcaccaccggcgctcgccgcgctgtccgagccggcgaacgcgctctcgctgcccacctgggccgtccacgtctccagcgtcgccgagtgggtgacggcgatgtggctggtttgggactacggcgagaagacggggctcaagggttggaaaggcctctcgtgggggatggttccacttctaggtggagcaatgtgtgcttgcacgtggcatttcttctacaattcagagtctcttgaagttcttgtagcccttcaaggtgctctgacagtgattggtaacataacaatgtgcatagctgcataccgcatcttcaaagcatcccaggaaggctcaaaaacttcgtaggctgcaagattggatcttacagccggtttggcaagggatgctcagccgcatttgaagattgacgttgctgagagcctgagacgatgataggagaagatacagatagccggt

SEQ ID NO: 36397 - protein, 177 aa, Zea mays subsp. mays
  peptide (1)..(177): Ceres Seq. ID no. 11415218
  misc_feature (18)..(172): NCBI GI NO: 30685952 NR Description: expressed protein [Arabidopsis thaliana]
  misc_feature (76)..(171): NCBI GI NO: 17232000 NR Description: hypothetical protein [Nostoc sp. PCC 7120]
  misc_feature (76)..(174): NCBI GI NO: 16331563 NR Description: hypothetical protein [Synechocystis sp. PCC 6803]
  misc_feature (76)..(172): NCBI GI NO: 23041345 NR Description: hypothetical protein
  misc_feature (77)..(173): NCBI GI NO: 37521445 NR Description: hypothetical protein glr1876
  misc_feature (76)..(171): NCBI GI NO: 22298980 NR Description: ORF_ID:tlr1437~hypothetical protein
  misc_feature (78)..(171): NCBI GI NO: 33861461 NR Description: conserved hypothetical protein
  misc_feature (76)..(168): NCBI GI NO: 33865822 NR Description: conserved hypothetical protein
  misc_feature (76)..(174): NCBI GI NO: 33862961 NR Description: conserved hypothetical protein
  misc_feature (76)..(174): NCBI GI NO: 33240381 NR Description: Uncharacterized conserved membrane protein
SANGQPHAVPPHRMASLRLVATLAPSGPPPPPRRKQRRPSSAVRLTGGMGLAAAAAVAAAAAASPPALAALSEPANALSLPTWAVHVSSVAEWVTAMWLVWDYGEKTGLKGWKGLSWGMVPLLGGAMCACTWHFFYNSESLEVLVALQGALTVIGNITMCIAAYRIFKASQEGSKTS

SEQ ID NO: 36398 - protein, 164 aa, Zea mays subsp. mays
  peptide (1)..(164): Ceres Seq. ID no. 11415219
  misc_feature (5)..(159): NCBI GI NO: 30685952 NR Description: expressed protein [Arabidopsis thaliana]
  misc_feature (63)..(158): NCBI GI NO: 17232000 NR Description: hypothetical protein [Nostoc sp. PCC 7120]
  misc_feature (63)..(161): NCBI GI NO: 16331563 NR Description: hypothetical protein [Synechocystis sp. PCC 6803]
  misc_feature (63)..(159): NCBI GI NO: 23041345 NR Description: hypothetical protein
  misc_feature (64)..(160): NCBI GI NO: 37521445 NR Description: hypothetical protein glr1876
  misc_feature (63)..(158): NCBI GI NO: 22298980 NR Description: ORF_ID:tlr1437~hypothetical protein
  misc_feature (65)..(158): NCBI GI NO: 33861461 NR Description: conserved hypothetical protein
  misc_feature (63)..(155): NCBI GI NO: 33865822 NR Description: conserved hypothetical protein
  misc_feature (63)..(161): NCBI GI NO: 33862961 NR Description: conserved hypothetical protein
  misc_feature (63)..(161): NCBI GI NO: 33240381 NR Description: Uncharacterized conserved membrane protein
MASLRLVATLAPSGPPPPPRRKQRRPSSAVRLTGGMGLAAAAAVAAAAAASPPALAALSEPANALSLPTWAVHVSSVAEWVTAMWLVWDYGEKTGLKGWKGLSWGMVPLLGGAMCACTWHFFYNSESLEVLVALQGALTVIGNITMCIAAYRIFKASQEGSKTS

SEQ ID NO: 36399 - protein, 129 aa, Zea mays subsp. mays
  peptide (1)..(129): Ceres Seq. ID no. 11415220
  misc_feature (1)..(124): NCBI GI NO: 30685952 NR Description: expressed protein [Arabidopsis thaliana]
  misc_feature (28)..(123): NCBI GI NO: 17232000 NR Description: hypothetical protein [Nostoc sp. PCC 7120]
  misc_feature (28)..(126): NCBI GI NO: 16331563 NR Description: hypothetical protein [Synechocystis sp. PCC 6803]
  misc_feature (28)..(124): NCBI GI NO: 23041345 NR Description: hypothetical protein
  misc_feature (29)..(125): NCBI GI NO: 37521445 NR Description: hypothetical protein glr1876
  misc_feature (28)..(123): NCBI GI NO: 22298980 NR Description: ORF_ID:tlr1437~hypothetical protein
  misc_feature (30)..(123): NCBI GI NO: 33861461 NR Description: conserved hypothetical protein
  misc_feature (28)..(120): NCBI GI NO: 33865822 NR Description: conserved hypothetical protein
  misc_feature (28)..(126): NCBI GI NO: 33862961 NR Description: conserved hypothetical protein
  misc_feature (28)..(126): NCBI GI NO: 33240381 NR Description: Uncharacterized conserved membrane protein
MGLAAAAAVAAAAAASPPALAALSEPANALSLPTWAVHVSSVAEWVTAMWLVWDYGEKTGLKGWKGLSWGMVPLLGGAMCACTWHFFYNSESLEVLVALQGALTVIGNITMCIAAYRIFKASQEGSKTS

SEQ ID NO: 36400 - DNA, 423 bp, Zea mays subsp. mays
  misc_feature (1)..(423): Ceres Seq. ID no. 12468033
ttctttcaggtgcccggcatgtttcagatggcatgcttcaagcagcagctgagtgcctggcatcatacatcacagacgacgaaattcgaaaaggaatcctcttcccttcggtctccagtattaggcacatcaccgcacgtgtcggcgcagcagtcgtccgtgccgctgttgctgaagacctggctgaggggtgctgtgatgtgggtcctagggagcttgggagtatgtcagagtcggaagcagtggactacgtcgctcggaagatgtggtaccctatttacagccctcttgtgagcgacaaataataaatccgaagatctcgatgcctgcgcagaagcagatgttccattgaaggaatgtatcggatttgatatttttcttaaccatctctaaattagctgctcatctagaaagcatttcggc

SEQ ID NO: 36401 - protein, 100 aa, Zea mays subsp. mays
  peptide (1)..(100): Ceres Seq. ID no. 12468034
  misc_feature (1)..(56): Pfam Name: Pfam Description:  Malic enzyme, NAD binding domain
  misc_feature (1)..(100): NCBI GI NO: 22758336 NR Description: putative malate oxidoreductase, 5'-partial
  misc_feature (1)..(100): NCBI GI NO: 6382043 NR Description: F6N23.16 gene product [Arabidopsis thaliana]
  misc_feature (1)..(100): NCBI GI NO: 7431221 NR Description: malate dehydrogenase (decarboxylating) (EC1
  misc_feature (1)..(100): NCBI GI NO: 30678679 NR Description: malate oxidoreductase -related
  misc_feature (1)..(100): NCBI GI NO: 8894554 NR Description: NAD-dependent malic enzyme (malate oxidoreductase)
  misc_feature (1)..(99): NCBI GI NO: 585452 NR Description: NAD-DEPENDENT MALIC ENZYME 59 KDA ISOFORM
  misc_feature (1)..(100): NCBI GI NO: 34393731 NR Description: putative malate dehydrogenase
  misc_feature (1)..(100): NCBI GI NO: 585451 NR Description: NAD-DEPENDENT MALIC ENZYME 62 KDA ISOFORM
  misc_feature (1)..(100): NCBI GI NO: 34901810 NR Description: putative NAD-dependent malic enzyme 62 KDA isoform
  misc_feature (1)..(100): NCBI GI NO: 585450 NR Description: NAD-DEPENDENT MALIC ENZYME 65 KDA ISOFORM
LSGARHVSDGMLQAAAECLASYITDDEIRKGILFPSVSSIRHITARVGAAVVRAAVAEDLAEGCCDVGPRELGSMSESEAVDYVARKMWYPIYSPLVSDK

SEQ ID NO: 36402 - protein, 97 aa, Zea mays subsp. mays
  peptide (1)..(97): Ceres Seq. ID no. 12468035
FFQVPGMFQMACFKQQLSAWHHTSQTTKFEKESSSLRSPVLGTSPHVSAQQSSVPLLLKTWLRGAVMWVLGSLGVCQSRKQWTTSLGRCGTLFTALL

SEQ ID NO: 36403 - protein, 91 aa, Zea mays subsp. mays
  peptide (1)..(91): Ceres Seq. ID no. 12468036
MFQMACFKQQLSAWHHTSQTTKFEKESSSLRSPVLGTSPHVSAQQSSVPLLLKTWLRGAVMWVLGSLGVCQSRKQWTTSLGRCGTLFTALL

SEQ ID NO: 36404 - DNA, 621 bp, Zea mays subsp. mays
  misc_feature (1)..(621): Ceres Seq. ID no. 13567830
attcccggcactgcagcgaggcaggagggcgaccggaatttcccatctctccttctcatcattcctttcgggatttcccctcctggttcccatcgatcagagggcccggcgctgttgcctttcgcattcgattcctttcgggtcggatttgtggcggagctcttgatttgctccgtccctgccagcggaggagggcttgctggatcagggatcgagcaaggaagcagccatgagcggcggcggaagcgtgagtttcctcgagatccagccgtcggagctcgcattcccctttgagataatgaggcagagctcgtgttccatgcaactgaccaataagactgaccattatgtagcattcaaggtcaaaacaaccaacccaaagcagtactgtgtgcgtcctaatattggtgttgtattacctggctcaacttgcgatgttacagtgacaatgcaagcacagaaggcttcaccacctgacatgcagtgcaaggacaagttcctagttcaaagcgttgtggccgagaatggtgtgacagctcaagatattaatgcagcaatgttcaataaggagccagggaaagttgkcgatgaattcaagctgcgtgtgggttatgtgccaac

SEQ ID NO: 36405 - protein, 130 aa, Zea mays subsp. mays
  peptide (1)..(130): Ceres Seq. ID no. 13567831
  misc_feature (1)..(129): NCBI GI NO: 11288307 NR Description: 27k vesicle-associated membrane protein-associatedprotein
  misc_feature (10)..(129): NCBI GI NO: 18411240 NR Description: VAMP
  misc_feature (10)..(129): NCBI GI NO: 21592874 NR Description: putative proline-rich protein
  misc_feature (3)..(129): NCBI GI NO: 18411661 NR Description: VAMP
  misc_feature (10)..(129): NCBI GI NO: 21554053 NR Description: putative VAMP-associated protein
  misc_feature (10)..(129): NCBI GI NO: 7486542 NR Description: hypothetical protein F6N15
  misc_feature (6)..(129): NCBI GI NO: 15225415 NR Description: VAMP
  misc_feature (3)..(129): NCBI GI NO: 11288305 NR Description: hypothetical protein T4C21
  misc_feature (10)..(129): NCBI GI NO: 15224067 NR Description: VAMP
  misc_feature (11)..(126): NCBI GI NO: 34907216 NR Description: P0504E02.2
  misc_feature (119)..(119): Xaa is any aa, unknown or other
MSGGGSVSFLEIQPSELAFPFEIMRQSSCSMQLTNKTDHYVAFKVKTTNPKQYCVRPNIGVVLPGSTCDVTVTMQAQKASPPDMQCKDKFLVQSVVAENGVTAQDINAAMFNKEPGKVXDEFKLRVGYVP

SEQ ID NO: 36406 - protein, 107 aa, Zea mays subsp. mays
  peptide (1)..(107): Ceres Seq. ID no. 13567832
  misc_feature (1)..(106): NCBI GI NO: 11288307 NR Description: 27k vesicle-associated membrane protein-associatedprotein
  misc_feature (1)..(106): NCBI GI NO: 18411240 NR Description: VAMP
  misc_feature (1)..(106): NCBI GI NO: 21592874 NR Description: putative proline-rich protein
  misc_feature (1)..(106): NCBI GI NO: 18411661 NR Description: VAMP
  misc_feature (1)..(106): NCBI GI NO: 21554053 NR Description: putative VAMP-associated protein
  misc_feature (1)..(106): NCBI GI NO: 7486542 NR Description: hypothetical protein F6N15
  misc_feature (1)..(106): NCBI GI NO: 15225415 NR Description: VAMP
  misc_feature (1)..(106): NCBI GI NO: 11288305 NR Description: hypothetical protein T4C21
  misc_feature (1)..(106): NCBI GI NO: 15224067 NR Description: VAMP
  misc_feature (1)..(103): NCBI GI NO: 34907216 NR Description: P0504E02.2
  misc_feature (96)..(96): Xaa is any aa, unknown or other
MRQSSCSMQLTNKTDHYVAFKVKTTNPKQYCVRPNIGVVLPGSTCDVTVTMQAQKASPPDMQCKDKFLVQSVVAENGVTAQDINAAMFNKEPGKVXDEFKLRVGYVP

SEQ ID NO: 36407 - protein, 100 aa, Zea mays subsp. mays
  peptide (1)..(100): Ceres Seq. ID no. 13567833
  misc_feature (1)..(99): NCBI GI NO: 11288307 NR Description: 27k vesicle-associated membrane protein-associatedprotein
  misc_feature (1)..(99): NCBI GI NO: 18411240 NR Description: VAMP
  misc_feature (1)..(99): NCBI GI NO: 21592874 NR Description: putative proline-rich protein
  misc_feature (1)..(99): NCBI GI NO: 18411661 NR Description: VAMP
  misc_feature (1)..(99): NCBI GI NO: 21554053 NR Description: putative VAMP-associated protein
  misc_feature (1)..(99): NCBI GI NO: 7486542 NR Description: hypothetical protein F6N15
  misc_feature (1)..(99): NCBI GI NO: 15225415 NR Description: VAMP
  misc_feature (1)..(99): NCBI GI NO: 11288305 NR Description: hypothetical protein T4C21
  misc_feature (1)..(99): NCBI GI NO: 15224067 NR Description: VAMP
  misc_feature (1)..(96): NCBI GI NO: 34907216 NR Description: P0504E02.2
  misc_feature (89)..(89): Xaa is any aa, unknown or other
MQLTNKTDHYVAFKVKTTNPKQYCVRPNIGVVLPGSTCDVTVTMQAQKASPPDMQCKDKFLVQSVVAENGVTAQDINAAMFNKEPGKVXDEFKLRVGYVP

SEQ ID NO: 36408 - DNA, 551 bp, Zea mays subsp. mays
  misc_feature (1)..(551): Ceres Seq. ID no. 3623404
attttaagcctggagaagccatcctggattggctttcaaggaaacgggtggctataggtacagctcgtggactggagtatctgcatgaacactgcaaccccaagatcatacaccgtgatgttaaagctgcaaatgtattgcttgacgaggatttcgagcctgttgtcggcgattttggcctagcaaagctagtagatgtgcagaagacgtctgtgacaacacaagtccgcggaaccatgggtcacatagcacccgagtacctgtccacagggaagtcttccgagaggacagatgtttttggatatgggatcatgcttcttgaacttgtgactggtcaacgggctattgacttctcacggctggaagacgaagatgatgtgctattgcttgatcatgtaaagaagctacagagagaaggggagctggactccatcgtggacagcaaccttaaccagaattatgacggcgaggatatcgagatgataatacagatagcgctgctctgcactcaggcatcacctgaggaccgtccatcgatgtctgaagtggtt

SEQ ID NO: 36409 - protein, 183 aa, Zea mays subsp. mays
  peptide (1)..(183): Ceres Seq. ID no. 3623405
  misc_feature (2)..(182): NCBI GI NO: 11358729 NR Description: protein serine/threonine kinase-like protein -Arabidopsis thaliana
  misc_feature (2)..(182): NCBI GI NO: 22326703 NR Description: protein serine/threonine kinase-like protein
  misc_feature (2)..(182): NCBI GI NO: 15238386 NR Description: receptor-like protein kinase; protein id:At5g65240
  misc_feature (2)..(182): NCBI GI NO: 16648949 NR Description: receptor-like protein kinase
  misc_feature (2)..(182): NCBI GI NO: 20260260 NR Description: protein serine/threonine kinase-like protein
  misc_feature (2)..(182): NCBI GI NO: 10177052 NR Description: receptor-like protein kinase
  misc_feature (2)..(182): NCBI GI NO: 18424740 NR Description: leucine-rich repeat transmembrane protein kinase
  misc_feature (3)..(182): NCBI GI NO: 15081616 NR Description: At1g71830/F14O23_24 [Arabidopsis thaliana]
  misc_feature (3)..(182): NCBI GI NO: 25406123 NR Description: hypothetical protein F14O23.21
  misc_feature (3)..(182): NCBI GI NO: 15217584 NR Description: protein kinase, putative; protein id: At1g71830
FKPGEAILDWLSRKRVAIGTARGLEYLHEHCNPKIIHRDVKAANVLLDEDFEPVVGDFGLAKLVDVQKTSVTTQVRGTMGHIAPEYLSTGKSSERTDVFGYGIMLLELVTGQRAIDFSRLEDEDDVLLLDHVKKLQREGELDSIVDSNLNQNYDGEDIEMIIQIALLCTQASPEDRPSMSEVV

SEQ ID NO: 36410 - protein, 105 aa, Zea mays subsp. mays
  peptide (1)..(105): Ceres Seq. ID no. 3623406
  misc_feature (1)..(104): NCBI GI NO: 11358729 NR Description: protein serine/threonine kinase-like protein -Arabidopsis thaliana
  misc_feature (1)..(104): NCBI GI NO: 22326703 NR Description: protein serine/threonine kinase-like protein
  misc_feature (1)..(104): NCBI GI NO: 15238386 NR Description: receptor-like protein kinase; protein id:At5g65240
  misc_feature (1)..(104): NCBI GI NO: 16648949 NR Description: receptor-like protein kinase
  misc_feature (1)..(104): NCBI GI NO: 20260260 NR Description: protein serine/threonine kinase-like protein
  misc_feature (1)..(104): NCBI GI NO: 10177052 NR Description: receptor-like protein kinase
  misc_feature (1)..(104): NCBI GI NO: 18424740 NR Description: leucine-rich repeat transmembrane protein kinase
  misc_feature (1)..(104): NCBI GI NO: 15081616 NR Description: At1g71830/F14O23_24 [Arabidopsis thaliana]
  misc_feature (1)..(104): NCBI GI NO: 25406123 NR Description: hypothetical protein F14O23.21
  misc_feature (1)..(104): NCBI GI NO: 15217584 NR Description: protein kinase, putative; protein id: At1g71830
MGHIAPEYLSTGKSSERTDVFGYGIMLLELVTGQRAIDFSRLEDEDDVLLLDHVKKLQREGELDSIVDSNLNQNYDGEDIEMIIQIALLCTQASPEDRPSMSEVV

SEQ ID NO: 36411 - DNA, 600 bp, Zea mays subsp. mays
  misc_feature (1)..(600): Ceres Seq. ID no. 3623648
ttggttccgtttacaagggacagctcaggaatggtacagttattgctgtcaaggtcctttcgtcggagtcaagacaaggagtaagggagtttctgaatgaactcgtggcaatttccgacatctcacatgataatcttgtgaaactttatgggtattgtgcggaaggagaccaaagaatccttgtttacaatcatcttgaaaataatagccttgcacaaacacttctaggctccagccacagcaatatccagtttgattggaaaacacgagtaaatatttgccttggcattgcacggggattagcatacctccatcatggtgtcagtccccacattgttcatcgagacattaaagcaagcaatatacttcttgatagggaccttaccccaaaaatctctgattttggtctagcaaagcttcttccaccaaacgcaacacatgttagcacaagagttgcaggaacactgggttatttggctcctgagtatgctattcgaggacaggtgacacgcaaatcagatgtgtacagctttggcgtgctgcttctggaaattggttgcgggagatcaaacagcgatacaagattagcatacggagatc

SEQ ID NO: 36412 - protein, 199 aa, Zea mays subsp. mays
  peptide (1)..(199): Ceres Seq. ID no. 3623649
  misc_feature (1)..(198): NCBI GI NO: 38344329 NR Description: OSJNBa0058K23.11
  misc_feature (6)..(198): NCBI GI NO: 5679843 NR Description: Putitive Ser/Thr protein kinase
  misc_feature (1)..(195): NCBI GI NO: 18394385 NR Description: receptor-like serine/threonine kinase, putative
  misc_feature (1)..(195): NCBI GI NO: 25287648 NR Description: hypothetical protein F19K19.4
  misc_feature (1)..(92): NCBI GI NO: 5852099 NR Description: zwh22.1 [Oryza sativa (indica cultivar-group)]
  misc_feature (116)..(198): NCBI GI NO: 5852099 NR Description: zwh22.1 [Oryza sativa (indica cultivar-group)]
  misc_feature (1)..(198): NCBI GI NO: 5923666 NR Description: putative receptor ser/thr protein kinase
  misc_feature (1)..(198): NCBI GI NO: 6403501 NR Description: putative protein kinase [Arabidopsis thaliana]
  misc_feature (1)..(198): NCBI GI NO: 18398327 NR Description: putative receptor ser/thr protein kinase
  misc_feature (1)..(196): NCBI GI NO: 38344039 NR Description: OSJNBb0017I01.6
GSVYKGQLRNGTVIAVKVLSSESRQGVREFLNELVAISDISHDNLVKLYGYCAEGDQRILVYNHLENNSLAQTLLGSSHSNIQFDWKTRVNICLGIARGLAYLHHGVSPHIVHRDIKASNILLDRDLTPKISDFGLAKLLPPNATHVSTRVAGTLGYLAPEYAIRGQVTRKSDVYSFGVLLLEIGCGRSNSDTRLAYGD

SEQ ID NO: 36413 - DNA, 1243 bp, Zea mays subsp. mays
  misc_feature (1)..(1243): Ceres Seq. ID no. 13577632
ggcacgaggcttgctgctgcagtgctgcctccccctcgcccagcagcagggagcagccatgccaggggaccacggctccaagggcgacatctccttcgccggacgcttcacggccagcgccatcgcagcatgcttcgcagagatatgtaccatcccgctcgacacggccaaggtcaggctccagctgcagaagaacgtcgtcgccgccgccgcctccggggacgccgcgccagcgcttcccaagtaccgcggcctgctcggaactgccgccaccatcgctagggaggaaggggccgcagcgctctggaagggcatcgtcccgggcctccaccgacagtgcatctacggggggctccgcattggcctctacgagcctgtcaaatccttctacgtcggcaaagaccacgttggggatgtccctttgtccaagaagatagccgccggcttcacaactggtgccatcgctatcagcatcgccaaccctactgaccttgtcaaggtcaggctccaggccgagggcaagcttgcgcctggtgtgccacgccgctacactggcgcaatggatgcttattccaagattgctagacaggaaggggttgccgctctgtggactggccttggaccaaatgtagcgcggaatgctatcatcaatgctgctgagttggccagttatgatcaagtcaagcagtcaattttgaaactccctgggttcaaagatgatgtggtcacccacctttttgctggtcttggtgctggcttctttgctgtttgtgttggttccccagttgatgtggttaagtcgagaatgatgggtgactcagcctacaaaagcactctcgattgttttgtgaagacgctaaagaatgatggccctttggcattttacaaaggcttcctgccaaactttgcaagactgggatcttggaatgtgattatgttcttgacattggagcaggttcaaaagctgtttgtgaggaaagcgacaagctgaagatagagtttttgcagtcaggtggcgtacaattgacgcacagggtttttcttctatagacaaaaggggagaaatgacacctcccccctcgagaattggggaacaaggacagatctgacacctcaattgcgagaaataaaaataacagccgacagttgcatgatccctgaacgaataaattcagaactagaaaacagatgtcagtaaacaacatgtggtgaatgttggaacttgaactggtcagttaggggc

SEQ ID NO: 36414 - protein, 329 aa, Zea mays subsp. mays
  peptide (1)..(329): Ceres Seq. ID no. 13577633
  misc_feature (20)..(329): NCBI GI NO: 19401698 NR Description: uncoupling protein [Zea mays]
  misc_feature (20)..(329): NCBI GI NO: 13537347 NR Description: uncoupling protein
  misc_feature (22)..(329): NCBI GI NO: 7489287 NR Description: uncoupling protein
  misc_feature (22)..(327): NCBI GI NO: 22002462 NR Description: mitochondrial uncoupling protein
  misc_feature (22)..(329): NCBI GI NO: 18921040 NR Description: putative uncoupling protein
  misc_feature (22)..(326): NCBI GI NO: 7106157 NR Description: SfUCPa [Symplocarpus foetidus]
  misc_feature (27)..(326): NCBI GI NO: 15232420 NR Description: uncoupling protein (ucp/PUMP)
  misc_feature (27)..(326): NCBI GI NO: 25295878 NR Description: uncoupling protein
  misc_feature (29)..(326): NCBI GI NO: 18424178 NR Description: uncoupling protein (AtUCP2) [Arabidopsis thaliana]
  misc_feature (22)..(236): NCBI GI NO: 7106159 NR Description: SfUCPb [Symplocarpus foetidus]
ARGLLLQCCLPLAQQQGAAMPGDHGSKGDISFAGRFTASAIAACFAEICTIPLDTAKVRLQLQKNVVAAAASGDAAPALPKYRGLLGTAATIAREEGAAALWKGIVPGLHRQCIYGGLRIGLYEPVKSFYVGKDHVGDVPLSKKIAAGFTTGAIAISIANPTDLVKVRLQAEGKLAPGVPRRYTGAMDAYSKIARQEGVAALWTGLGPNVARNAIINAAELASYDQVKQSILKLPGFKDDVVTHLFAGLGAGFFAVCVGSPVDVVKSRMMGDSAYKSTLDCFVKTLKNDGPLAFYKGFLPNFARLGSWNVIMFLTLEQVQKLFVRKATS

SEQ ID NO: 36415 - protein, 310 aa, Zea mays subsp. mays
  peptide (1)..(310): Ceres Seq. ID no. 13577634
  misc_feature (1)..(310): NCBI GI NO: 19401698 NR Description: uncoupling protein [Zea mays]
  misc_feature (1)..(310): NCBI GI NO: 13537347 NR Description: uncoupling protein
  misc_feature (3)..(310): NCBI GI NO: 7489287 NR Description: uncoupling protein
  misc_feature (3)..(308): NCBI GI NO: 22002462 NR Description: mitochondrial uncoupling protein
  misc_feature (3)..(310): NCBI GI NO: 18921040 NR Description: putative uncoupling protein
  misc_feature (3)..(307): NCBI GI NO: 7106157 NR Description: SfUCPa [Symplocarpus foetidus]
  misc_feature (8)..(307): NCBI GI NO: 15232420 NR Description: uncoupling protein (ucp/PUMP)
  misc_feature (8)..(307): NCBI GI NO: 25295878 NR Description: uncoupling protein
  misc_feature (10)..(307): NCBI GI NO: 18424178 NR Description: uncoupling protein (AtUCP2) [Arabidopsis thaliana]
  misc_feature (3)..(217): NCBI GI NO: 7106159 NR Description: SfUCPb [Symplocarpus foetidus]
MPGDHGSKGDISFAGRFTASAIAACFAEICTIPLDTAKVRLQLQKNVVAAAASGDAAPALPKYRGLLGTAATIAREEGAAALWKGIVPGLHRQCIYGGLRIGLYEPVKSFYVGKDHVGDVPLSKKIAAGFTTGAIAISIANPTDLVKVRLQAEGKLAPGVPRRYTGAMDAYSKIARQEGVAALWTGLGPNVARNAIINAAELASYDQVKQSILKLPGFKDDVVTHLFAGLGAGFFAVCVGSPVDVVKSRMMGDSAYKSTLDCFVKTLKNDGPLAFYKGFLPNFARLGSWNVIMFLTLEQVQKLFVRKATS

SEQ ID NO: 36416 - DNA, 337 bp, Zea mays subsp. mays
  misc_feature (1)..(337): Ceres Seq. ID no. 15178947
gcatactatgcagggaaactgtgaatagggactctgagattgaggtcatcattcaggaagcagaggatgctgttctcccatggtccagtgaaaacatgttcttagaaactttatctgaaatcatggaccgtcacctccacaaggaatgagtttagaaattcagaataacttatctagttgctccagctgtatccggtttgttgtaagtattgtagacaaggggtgtcaagggactaatgatttcatttgtttgtatcctctcaaatgatttcacttggttgtaattgctcgagtactttgcttatgcacattttgtgaataatatatttgtttggtt

SEQ ID NO: 36417 - protein, 48 aa, Zea mays subsp. mays
  peptide (1)..(48): Ceres Seq. ID no. 15178948
  misc_feature (1)..(45): NCBI GI NO: 15217655 NR Description: phosphatidylinositol 3- and 4-kinase family
  misc_feature (1)..(45): NCBI GI NO: 6633833 NR Description: F1N19.4 [Arabidopsis thaliana]
  misc_feature (1)..(48): NCBI GI NO: 18407090 NR Description: ubiquitin family [Arabidopsis thaliana]
ILCRETVNRDSEIEVIIQEAEDAVLPWSSENMFLETLSEIMDRHLHKE

SEQ ID NO: 36418 - protein, 40 aa, Zea mays subsp. mays
  peptide (1)..(40): Ceres Seq. ID no. 15178949
MSLEIQNNLSSCSSCIRFVVSIVDKGCQGTNDFICLYPLK

SEQ ID NO: 36419 - DNA, 658 bp, Zea mays subsp. mays
  misc_feature (1)..(658): Ceres Seq. ID no. 12467996
  misc_feature (643)..(643): n is a, c, t, g, unknown, or other
ttttatgattatatggagagtggcagcttatgggatgttttacatgaaggctcatccaagaagaacaaacttgactgggtgactcgcctacggatcgctcttggtgcagctcaaggcctcgcttaccttcaccatgactgcagcccacgaataattcaccgggacgtaaaatcaaagaatatactcctcgacaaagattatgaggcgcatcttacagacttcggcatcgctaagagcttatgtgtctcgaagactcacacgtcaacctacgtcatgggcactattggttacattgatcctgagtacgcccgcacctcccgcctcaacgagaagtctgatgtctacagctacggcatcgttctgctggagctgctgaccggcaagaagccagtggacaacgagtgcaatctccatcacttggtaactattcttcagtctcctgcatttgtcgagttagaagtcggaagtcgcttccttctctttacatcgctttggattccagcagtgcccaataattgctgaacaacgaaccattaggcttgtgttcctacaaggggaccagcgacactaaacctagcatgtgagtagatctatctgcactgcagaccagctgtggactgatgcgctgatccattggattggnggctgaaagctccat

SEQ ID NO: 36420 - protein, 173 aa, Zea mays subsp. mays
  peptide (1)..(173): Ceres Seq. ID no. 12467997
  misc_feature (1)..(115): NCBI GI NO: 18390097 NR Description: putative receptor protein kinase [Sorghum bicolor]
  misc_feature (1)..(141): NCBI GI NO: 15225286 NR Description: putative receptor-like protein kinase, ERECTA
  misc_feature (1)..(141): NCBI GI NO: 26451159 NR Description: unknown protein [Arabidopsis thaliana]
  misc_feature (1)..(141): NCBI GI NO: 15241760 NR Description: putative protein; protein id: At5g62230.1
  misc_feature (1)..(140): NCBI GI NO: 8809636 NR Description: receptor-like protein kinase
  misc_feature (1)..(141): NCBI GI NO: 28140043 NR Description: receptor-like protein kinase [Elaeis guineensis]
  misc_feature (1)..(141): NCBI GI NO: 34898088 NR Description: ESTs C22657
  misc_feature (1)..(141): NCBI GI NO: 15240720 NR Description: receptor-like protein kinase; protein id:At5g07180
  misc_feature (2)..(132): NCBI GI NO: 37530386 NR Description: putative protein kinase
  misc_feature (2)..(132): NCBI GI NO: 10177448 NR Description: receptor-like protein kinase
FYDYMESGSLWDVLHEGSSKKNKLDWVTRLRIALGAAQGLAYLHHDCSPRIIHRDVKSKNILLDKDYEAHLTDFGIAKSLCVSKTHTSTYVMGTIGYIDPEYARTSRLNEKSDVYSYGIVLLELLTGKKPVDNECNLHHLVTILQSPAFVELEVGSRFLLFTSLWIPAVPNNC

SEQ ID NO: 36421 - protein, 169 aa, Zea mays subsp. mays
  peptide (1)..(169): Ceres Seq. ID no. 12467998
  misc_feature (1)..(111): NCBI GI NO: 18390097 NR Description: putative receptor protein kinase [Sorghum bicolor]
  misc_feature (1)..(137): NCBI GI NO: 15225286 NR Description: putative receptor-like protein kinase, ERECTA
  misc_feature (1)..(137): NCBI GI NO: 26451159 NR Description: unknown protein [Arabidopsis thaliana]
  misc_feature (1)..(137): NCBI GI NO: 15241760 NR Description: putative protein; protein id: At5g62230.1
  misc_feature (1)..(136): NCBI GI NO: 8809636 NR Description: receptor-like protein kinase
  misc_feature (1)..(137): NCBI GI NO: 28140043 NR Description: receptor-like protein kinase [Elaeis guineensis]
  misc_feature (1)..(137): NCBI GI NO: 34898088 NR Description: ESTs C22657
  misc_feature (1)..(137): NCBI GI NO: 15240720 NR Description: receptor-like protein kinase; protein id:At5g07180
  misc_feature (1)..(128): NCBI GI NO: 37530386 NR Description: putative protein kinase
  misc_feature (1)..(128): NCBI GI NO: 10177448 NR Description: receptor-like protein kinase
MESGSLWDVLHEGSSKKNKLDWVTRLRIALGAAQGLAYLHHDCSPRIIHRDVKSKNILLDKDYEAHLTDFGIAKSLCVSKTHTSTYVMGTIGYIDPEYARTSRLNEKSDVYSYGIVLLELLTGKKPVDNECNLHHLVTILQSPAFVELEVGSRFLLFTSLWIPAVPNNC

SEQ ID NO: 36422 - DNA, 657 bp, Zea mays subsp. mays
  misc_feature (1)..(657): Ceres Seq. ID no. 3632567
aacattcacagtccgcaggccgcagcagctgaatttcgaaggagactgtttcataaacaggagccaggcaccggactttccaggaggataccacctcccgaacatggtgcgtcgacgacccgccaccggggcagccccgagaccccacctcgccgccgtcggtcgcgggctgctcctcgcgtccgtcctcgcggccgctgcctcctccctcccagtagccgagtcgtcctgcccgcgagacaactcactggtgagagacataagccgaatgcagcagcgcaactacgggagggaaggattctcgcatataactgtcacaggtgctcttgctcacgggacgaaggaggtggaagtgtggctacaaacatttggtccaggtcaaaggaccccaatccacaggcattcttgtgaagaggttttcattgtcctcaaggggaaaggcacgctcttactcgggtcgagctcgctgaagtacccaggacagccgcaggaagttcctgtctttcagaataccacattttcgatccctgtaaatgatccacatcaggtctggaattctaatgagcacgaagatttgcaagttcttgtgatcatatcgcgcccaccggtcaagattggcatctcctgttacagatttatatacgatgattggagtat

SEQ ID NO: 36423 - protein, 218 aa, Zea mays subsp. mays
  peptide (1)..(218): Ceres Seq. ID no. 3632568
  misc_feature (73)..(217): Pfam Name: Pfam Description:  Auxin binding protein
  misc_feature (35)..(217): NCBI GI NO: 461451 NR Description: AUXIN-BINDING PROTEIN 4 PRECURSOR (ABP)
  misc_feature (35)..(184): NCBI GI NO: 461452 NR Description: Auxin-binding protein 5 precursor (ABP) (ERABP5)
  misc_feature (51)..(217): NCBI GI NO: 113003 NR Description: Auxin-binding protein 1 precursor (ABP) (ERABP1)
  misc_feature (51)..(217): NCBI GI NO: 168397 NR Description: auxin-binding protein
  misc_feature (51)..(217): NCBI GI NO: 168422 NR Description: auxin-binding protein precursor
  misc_feature (39)..(217): NCBI GI NO: 7442016 NR Description: auxin-binding protein - oat
  misc_feature (76)..(217): NCBI GI NO: 21730833 NR Description: Chain A
  misc_feature (48)..(217): NCBI GI NO: 33317307 NR Description: auxin binding protein-1 [Helianthus annuus]
  misc_feature (62)..(217): NCBI GI NO: 461449 NR Description: AUXIN-BINDING PROTEIN T85 PRECURSOR (ABP)
  misc_feature (70)..(217): NCBI GI NO: 1050443 NR Description: auxin binding protein 1 [Capsicum annuum]
TFTVRRPQQLNFEGDCFINRSQAPDFPGGYHLPNMVRRRPATGAAPRPHLAAVGRGLLLASVLAAAASSLPVAESSCPRDNSLVRDISRMQQRNYGREGFSHITVTGALAHGTKEVEVWLQTFGPGQRTPIHRHSCEEVFIVLKGKGTLLLGSSSLKYPGQPQEVPVFQNTTFSIPVNDPHQVWNSNEHEDLQVLVIISRPPVKIGISCYRFIYDDWS

SEQ ID NO: 36424 - protein, 184 aa, Zea mays subsp. mays
  peptide (1)..(184): Ceres Seq. ID no. 3632569
  misc_feature (39)..(183): Pfam Name: Pfam Description:  Auxin binding protein
  misc_feature (1)..(183): NCBI GI NO: 461451 NR Description: AUXIN-BINDING PROTEIN 4 PRECURSOR (ABP)
  misc_feature (1)..(150): NCBI GI NO: 461452 NR Description: Auxin-binding protein 5 precursor (ABP) (ERABP5)
  misc_feature (17)..(183): NCBI GI NO: 113003 NR Description: Auxin-binding protein 1 precursor (ABP) (ERABP1)
  misc_feature (17)..(183): NCBI GI NO: 168397 NR Description: auxin-binding protein
  misc_feature (17)..(183): NCBI GI NO: 168422 NR Description: auxin-binding protein precursor
  misc_feature (5)..(183): NCBI GI NO: 7442016 NR Description: auxin-binding protein - oat
  misc_feature (42)..(183): NCBI GI NO: 21730833 NR Description: Chain A
  misc_feature (14)..(183): NCBI GI NO: 33317307 NR Description: auxin binding protein-1 [Helianthus annuus]
  misc_feature (28)..(183): NCBI GI NO: 461449 NR Description: AUXIN-BINDING PROTEIN T85 PRECURSOR (ABP)
  misc_feature (36)..(183): NCBI GI NO: 1050443 NR Description: auxin binding protein 1 [Capsicum annuum]
MVRRRPATGAAPRPHLAAVGRGLLLASVLAAAASSLPVAESSCPRDNSLVRDISRMQQRNYGREGFSHITVTGALAHGTKEVEVWLQTFGPGQRTPIHRHSCEEVFIVLKGKGTLLLGSSSLKYPGQPQEVPVFQNTTFSIPVNDPHQVWNSNEHEDLQVLVIISRPPVKIGISCYRFIYDDWS

SEQ ID NO: 36425 - protein, 136 aa, Zea mays subsp. mays
  peptide (1)..(136): Ceres Seq. ID no. 3632570
NIHSPQAAAAEFRRRLFHKQEPGTGLSRRIPPPEHGASTTRHRGSPETPPRRRRSRAAPRVRPRGRCLLPPSSRVVLPARQLTGERHKPNAAAQLREGRILAYNCHRCSCSRDEGGGSVATNIWSRSKDPNPQAFL

SEQ ID NO: 36426 - DNA, 483 bp, Zea mays subsp. mays
  misc_feature (1)..(483): Ceres Seq. ID no. 5761972
aatgaagatcctcacggaaaggggttattccttcaccacgacggcagaacgggaaatcgtgagagacataaaggagaagctggcctttgtcgccctagactacgagcaggagctggagaccgctaagagcagctcctccgtcgagaagagctacgagctgcccgatgggcaggtcatcacgatcggcgcggagaggttcagatgcccagaggtgcttttccagccgtcgctgatcgggatggaagctcccggcatccacgagaccacctacaactcgatcatgaaatgtgacgttgatatcargaaggacctgtacgggaacatcgtcctcagtggagggacgaccatgttccctggcatcgctgacaggatgagcaaggagattactgccctcgcaccgagcagcatgaagatcaaggtcgtggcgcctcctgagagaaaatacagtgtctggattggtggctcgatccttgcgtcgctcag

SEQ ID NO: 36427 - protein, 160 aa, Zea mays subsp. mays
  peptide (1)..(160): Ceres Seq. ID no. 5761973
  misc_feature (1)..(159): Pfam Name: Pfam Description:  Actin
  misc_feature (1)..(159): NCBI GI NO: 40714662 NR Description: actin [Oryza sativa (japonica cultivar-group)]
  misc_feature (1)..(159): NCBI GI NO: 1498382 NR Description: actin [Zea mays]
  misc_feature (1)..(159): NCBI GI NO: 37535954 NR Description: actin [Oryza sativa (japonica cultivar-group)]
  misc_feature (1)..(159): NCBI GI NO: 1498388 NR Description: actin [Zea mays]
  misc_feature (1)..(159): NCBI GI NO: 15242516 NR Description: ACTIN 2/7 (sp|P53492); protein id: At5g09810
  misc_feature (1)..(159): NCBI GI NO: 11276972 NR Description: actin [imported] - rape
  misc_feature (1)..(159): NCBI GI NO: 15076949 NR Description: actin [Musa x paradisiaca]
  misc_feature (1)..(159): NCBI GI NO: 9965319 NR Description: actin [Setaria italica]
  misc_feature (1)..(159): NCBI GI NO: 3219761 NR Description: ACTIN 66
  misc_feature (1)..(159): NCBI GI NO: 11276968 NR Description: actin [imported] - Picea rubens
  misc_feature (101)..(101): Xaa is any aa, unknown or other
MKILTERGYSFTTTAEREIVRDIKEKLAFVALDYEQELETAKSSSSVEKSYELPDGQVITIGAERFRCPEVLFQPSLIGMEAPGIHETTYNSIMKCDVDIXKDLYGNIVLSGGTTMFPGIADRMSKEITALAPSSMKIKVVAPPERKYSVWIGGSILASL

SEQ ID NO: 36428 - protein, 81 aa, Zea mays subsp. mays
  peptide (1)..(81): Ceres Seq. ID no. 5761974
  misc_feature (1)..(80): Pfam Name: Pfam Description:  Actin
  misc_feature (1)..(80): NCBI GI NO: 40714662 NR Description: actin [Oryza sativa (japonica cultivar-group)]
  misc_feature (1)..(80): NCBI GI NO: 1498382 NR Description: actin [Zea mays]
  misc_feature (1)..(80): NCBI GI NO: 37535954 NR Description: actin [Oryza sativa (japonica cultivar-group)]
  misc_feature (1)..(80): NCBI GI NO: 1498388 NR Description: actin [Zea mays]
  misc_feature (1)..(80): NCBI GI NO: 15242516 NR Description: ACTIN 2/7 (sp|P53492); protein id: At5g09810
  misc_feature (1)..(80): NCBI GI NO: 11276972 NR Description: actin [imported] - rape
  misc_feature (1)..(80): NCBI GI NO: 15076949 NR Description: actin [Musa x paradisiaca]
  misc_feature (1)..(80): NCBI GI NO: 9965319 NR Description: actin [Setaria italica]
  misc_feature (1)..(80): NCBI GI NO: 3219761 NR Description: ACTIN 66
  misc_feature (1)..(80): NCBI GI NO: 11276968 NR Description: actin [imported] - Picea rubens
  misc_feature (22)..(22): Xaa is any aa, unknown or other
MEAPGIHETTYNSIMKCDVDIXKDLYGNIVLSGGTTMFPGIADRMSKEITALAPSSMKIKVVAPPERKYSVWIGGSILASL

SEQ ID NO: 36429 - DNA, 505 bp, Zea mays subsp. mays
  misc_feature (1)..(505): Ceres Seq. ID no. 3632665
tgcgcatcgcacagttccaccagcatctggcagagaagctggacctggacatgtcggccctgcaatacatgatgaaggaataccctgggaacgaagaagagcggatgagagccgcagttggtaagtttgggctgtcagggaaggctcaggtgatgccgatgaggaatctgtctgacgggcagaggagccgtgtcatctttgcgtggctggcatacaggcagccgcagctattgctgctggacgagccgacgaaccatcttgatatcgagaccatcgactccctagcggaggcgctgaacgagtgggacggcggtctggtcctggtgagccatgacttcaggctgatcaaccaggttgctcatgagatctgggtttgtgagaatcaggcagtgacaaggtgggaaggcgatatcmtggatttcaaggagcacttgrraagcaaggcttgkctatcggattaaagggaavgccttggctttccttaccttctctttggagatgkatt

SEQ ID NO: 36430 - protein, 152 aa, Zea mays subsp. mays
  peptide (1)..(152): Ceres Seq. ID no. 3632666
  misc_feature (1)..(128): Pfam Name: Pfam Description:  ABC transporter
  misc_feature (1)..(152): NCBI GI NO: 28071305 NR Description: putative ABC transporter
  misc_feature (1)..(152): NCBI GI NO: 15239436 NR Description: ABC transporter family protein
  misc_feature (1)..(147): NCBI GI NO: 17861928 NR Description: GM14873p [Drosophila melanogaster]
  misc_feature (1)..(147): NCBI GI NO: 18859989 NR Description: CG9281-PB [Drosophila melanogaster]
  misc_feature (1)..(147): NCBI GI NO: 3005931 NR Description: ABC transporter [Homo sapiens]
  misc_feature (1)..(147): NCBI GI NO: 10179834 NR Description: iron inhibited ABC transporter 2 [Homo sapiens]
  misc_feature (1)..(147): NCBI GI NO: 27707592 NR Description: similar to ATP-binding cassette
  misc_feature (1)..(147): NCBI GI NO: 27881506 NR Description: ATP-binding cassette
  misc_feature (1)..(147): NCBI GI NO: 23956078 NR Description: ATP-binding cassette, sub-family F
  misc_feature (1)..(147): NCBI GI NO: 10947137 NR Description: ATP-binding cassette
  misc_feature (138)..(138): Xaa is any aa, unknown or other
  misc_feature (145)..(145): Xaa is any aa, unknown or other
  misc_feature (149)..(149): Xaa is any aa, unknown or other
RIAQFHQHLAEKLDLDMSALQYMMKEYPGNEEERMRAAVGKFGLSGKAQVMPMRNLSDGQRSRVIFAWLAYRQPQLLLLDEPTNHLDIETIDSLAEALNEWDGGLVLVSHDFRLINQVAHEIWVCENQAVTRWEGDIXDFKEHLXSKAXLSD

SEQ ID NO: 36431 - protein, 136 aa, Zea mays subsp. mays
  peptide (1)..(136): Ceres Seq. ID no. 3632667
  misc_feature (1)..(112): Pfam Name: Pfam Description:  ABC transporter
  misc_feature (1)..(136): NCBI GI NO: 28071305 NR Description: putative ABC transporter
  misc_feature (1)..(136): NCBI GI NO: 15239436 NR Description: ABC transporter family protein
  misc_feature (1)..(131): NCBI GI NO: 17861928 NR Description: GM14873p [Drosophila melanogaster]
  misc_feature (1)..(131): NCBI GI NO: 18859989 NR Description: CG9281-PB [Drosophila melanogaster]
  misc_feature (1)..(131): NCBI GI NO: 3005931 NR Description: ABC transporter [Homo sapiens]
  misc_feature (1)..(131): NCBI GI NO: 10947137 NR Description: ATP-binding cassette
  misc_feature (1)..(131): NCBI GI NO: 10179834 NR Description: iron inhibited ABC transporter 2 [Homo sapiens]
  misc_feature (1)..(131): NCBI GI NO: 27881506 NR Description: ATP-binding cassette
  misc_feature (1)..(131): NCBI GI NO: 27707592 NR Description: similar to ATP-binding cassette
  misc_feature (1)..(131): NCBI GI NO: 23956078 NR Description: ATP-binding cassette, sub-family F
  misc_feature (122)..(122): Xaa is any aa, unknown or other
  misc_feature (129)..(129): Xaa is any aa, unknown or other
  misc_feature (133)..(133): Xaa is any aa, unknown or other
MSALQYMMKEYPGNEEERMRAAVGKFGLSGKAQVMPMRNLSDGQRSRVIFAWLAYRQPQLLLLDEPTNHLDIETIDSLAEALNEWDGGLVLVSHDFRLINQVAHEIWVCENQAVTRWEGDIXDFKEHLXSKAXLSD

SEQ ID NO: 36432 - protein, 130 aa, Zea mays subsp. mays
  peptide (1)..(130): Ceres Seq. ID no. 3632668
  misc_feature (1)..(106): Pfam Name: Pfam Description:  ABC transporter
  misc_feature (1)..(130): NCBI GI NO: 28071305 NR Description: putative ABC transporter
  misc_feature (1)..(130): NCBI GI NO: 15239436 NR Description: ABC transporter family protein
  misc_feature (1)..(125): NCBI GI NO: 17861928 NR Description: GM14873p [Drosophila melanogaster]
  misc_feature (1)..(125): NCBI GI NO: 18859989 NR Description: CG9281-PB [Drosophila melanogaster]
  misc_feature (1)..(125): NCBI GI NO: 3005931 NR Description: ABC transporter [Homo sapiens]
  misc_feature (1)..(125): NCBI GI NO: 27881506 NR Description: ATP-binding cassette
  misc_feature (1)..(125): NCBI GI NO: 27707592 NR Description: similar to ATP-binding cassette
  misc_feature (1)..(125): NCBI GI NO: 23956078 NR Description: ATP-binding cassette, sub-family F
  misc_feature (1)..(125): NCBI GI NO: 10179834 NR Description: iron inhibited ABC transporter 2 [Homo sapiens]
  misc_feature (1)..(125): NCBI GI NO: 10947137 NR Description: ATP-binding cassette
  misc_feature (116)..(116): Xaa is any aa, unknown or other
  misc_feature (123)..(123): Xaa is any aa, unknown or other
  misc_feature (127)..(127): Xaa is any aa, unknown or other
MMKEYPGNEEERMRAAVGKFGLSGKAQVMPMRNLSDGQRSRVIFAWLAYRQPQLLLLDEPTNHLDIETIDSLAEALNEWDGGLVLVSHDFRLINQVAHEIWVCENQAVTRWEGDIXDFKEHLXSKAXLSD

SEQ ID NO: 36433 - DNA, 966 bp, Zea mays subsp. mays
  misc_feature (1)..(966): Ceres Seq. ID no. 12467954
tctactttgattttgagcatttgaagcaatctgcgtccgtgattgaccagagccagttctggcaagattggggacagtggcacaagaaagataggctcaagaacttctacactgaagacatcaggatgaccccaatgaaacttcgtgacatcaaggacacattgatcatgaggaagtttgggaatgttgagcctgataactattggtcacgtgtgtgcgagggtgagactgagggaataatcaagcgcccatggcatttcctgtggaaatctcgtcgcttgatggagattgtatctgccattgcctcacggatgaactgggactttgactcggtccatgttgtcagaggggagaaagcgcagaacacacaactttggccaaaccttgacagagatacctcaccagacagtctccttatggcacttaatgataaggttggtgctggccggtatttgtacattgctaccaatgaacctgacaaatcgttctttaacccactcaaggaaaagtataaaacacacttccttgatgatttcaagtacctgtgggatgagaatagtgagtggttcactgaaactaaggagctgagcaatggtcagccagtagaatttgatggctatatgaggattgcagttgacactgaggtattcttgagggggaagaggcatgtggagacattcaacgagcttacacgtgattgcaaggatggcgtgaatacatgctcagcttcttcctgaacatttggtgggctaaggtgagctgatactatgaaatattatgcttcagaggatattttcgactgtgttattggtgtctcttatgccacgcctagtcttgttgtagctaagtagctggtatcactttttgttataccactgttttgtgtttccagattacattagtacattcagttcatgcattgggcttgtgctgtttagttgaacatgcattattgcagttgtcttc

SEQ ID NO: 36434 - protein, 244 aa, Zea mays subsp. mays
  peptide (1)..(244): Ceres Seq. ID no. 12467955
  misc_feature (1)..(244): NCBI GI NO: 37534994 NR Description: unknown protein
  misc_feature (1)..(244): NCBI GI NO: 15235454 NR Description: putative protein; protein id: At4g12700.1
  misc_feature (1)..(244): NCBI GI NO: 18395698 NR Description: expressed protein; protein id: At2g04280
  misc_feature (1)..(240): NCBI GI NO: 15236611 NR Description: putative protein; protein id: At4g08810
  misc_feature (1)..(241): NCBI GI NO: 34913308 NR Description: P0519E12.32
  misc_feature (1)..(224): NCBI GI NO: 34909040 NR Description: P0034E02.33
  misc_feature (68)..(198): NCBI GI NO: 33146641 NR Description: unknown protein
  misc_feature (68)..(183): NCBI GI NO: 15229000 NR Description: putative protein; protein id: At3g56750
  misc_feature (68)..(183): NCBI GI NO: 15226842 NR Description: hypothetical protein; protein id: At2g41150.1
  misc_feature (68)..(183): NCBI GI NO: 21805729 NR Description: hypothetical protein [Arabidopsis thaliana]
YFDFEHLKQSASVIDQSQFWQDWGQWHKKDRLKNFYTEDIRMTPMKLRDIKDTLIMRKFGNVEPDNYWSRVCEGETEGIIKRPWHFLWKSRRLMEIVSAIASRMNWDFDSVHVVRGEKAQNTQLWPNLDRDTSPDSLLMALNDKVGAGRYLYIATNEPDKSFFNPLKEKYKTHFLDDFKYLWDENSEWFTETKELSNGQPVEFDGYMRIAVDTEVFLRGKRHVETFNELTRDCKDGVNTCSASS

SEQ ID NO: 36435 - protein, 203 aa, Zea mays subsp. mays
  peptide (1)..(203): Ceres Seq. ID no. 12467956
  misc_feature (1)..(203): NCBI GI NO: 37534994 NR Description: unknown protein
  misc_feature (1)..(203): NCBI GI NO: 15235454 NR Description: putative protein; protein id: At4g12700.1
  misc_feature (1)..(203): NCBI GI NO: 18395698 NR Description: expressed protein; protein id: At2g04280
  misc_feature (1)..(199): NCBI GI NO: 15236611 NR Description: putative protein; protein id: At4g08810
  misc_feature (1)..(200): NCBI GI NO: 34913308 NR Description: P0519E12.32
  misc_feature (1)..(183): NCBI GI NO: 34909040 NR Description: P0034E02.33
  misc_feature (27)..(157): NCBI GI NO: 33146641 NR Description: unknown protein
  misc_feature (27)..(142): NCBI GI NO: 15229000 NR Description: putative protein; protein id: At3g56750
  misc_feature (27)..(142): NCBI GI NO: 15226842 NR Description: hypothetical protein; protein id: At2g41150.1
  misc_feature (27)..(142): NCBI GI NO: 21805729 NR Description: hypothetical protein [Arabidopsis thaliana]
MTPMKLRDIKDTLIMRKFGNVEPDNYWSRVCEGETEGIIKRPWHFLWKSRRLMEIVSAIASRMNWDFDSVHVVRGEKAQNTQLWPNLDRDTSPDSLLMALNDKVGAGRYLYIATNEPDKSFFNPLKEKYKTHFLDDFKYLWDENSEWFTETKELSNGQPVEFDGYMRIAVDTEVFLRGKRHVETFNELTRDCKDGVNTCSASS

SEQ ID NO: 36436 - protein, 200 aa, Zea mays subsp. mays
  peptide (1)..(200): Ceres Seq. ID no. 12467957
  misc_feature (1)..(200): NCBI GI NO: 37534994 NR Description: unknown protein
  misc_feature (1)..(200): NCBI GI NO: 15235454 NR Description: putative protein; protein id: At4g12700.1
  misc_feature (1)..(200): NCBI GI NO: 18395698 NR Description: expressed protein; protein id: At2g04280
  misc_feature (1)..(196): NCBI GI NO: 15236611 NR Description: putative protein; protein id: At4g08810
  misc_feature (1)..(197): NCBI GI NO: 34913308 NR Description: P0519E12.32
  misc_feature (1)..(180): NCBI GI NO: 34909040 NR Description: P0034E02.33
  misc_feature (24)..(154): NCBI GI NO: 33146641 NR Description: unknown protein
  misc_feature (24)..(139): NCBI GI NO: 15229000 NR Description: putative protein; protein id: At3g56750
  misc_feature (24)..(139): NCBI GI NO: 15226842 NR Description: hypothetical protein; protein id: At2g41150.1
  misc_feature (24)..(139): NCBI GI NO: 21805729 NR Description: hypothetical protein [Arabidopsis thaliana]
MKLRDIKDTLIMRKFGNVEPDNYWSRVCEGETEGIIKRPWHFLWKSRRLMEIVSAIASRMNWDFDSVHVVRGEKAQNTQLWPNLDRDTSPDSLLMALNDKVGAGRYLYIATNEPDKSFFNPLKEKYKTHFLDDFKYLWDENSEWFTETKELSNGQPVEFDGYMRIAVDTEVFLRGKRHVETFNELTRDCKDGVNTCSASS

SEQ ID NO: 36437 - DNA, 638 bp, Zea mays subsp. mays
  misc_feature (1)..(638): Ceres Seq. ID no. 12468946
  misc_feature (599)..(599): n is a, c, t, g, unknown, or other
aaaccgcagaagccagatctgcctctcctttttcgacgagaaacacagacaccctggttggtttgtcaacaaaacagagcgcatctattgggagcaatggttcatcaatttgcaagtcatgttccccaaaagatacagcaagtcaaacagctccaaagggctgacaaacatccaagcaaatgccgtggaggagaccagcacaaggcgtgctgcattggaggcgtcgattaacgaagtgctgttccagatcataaagttcgccaacgagaaaaaggaccacattcctgctatccctgacaggattttcaatcacgagatcatgatcccaagctcggattctgtatttggatggaacacggacgtcattcgcagagttctgaatagcgggcacccatactcgctttaactgaagacgacatctcagtgggcgcccgtattcagtttattagcgtgctgccgccctgtttggaagacggctctgttaaccatcgtggtgaaccatataatatgcctaaggaaaaacctagttctgtgtacatcaccctgctcatctggcatgtacatactgtgttgggatcttgctcatcggtcaaacattnttaagttcgattaagtttataaataacaatattatgatt

SEQ ID NO: 36438 - protein, 134 aa, Zea mays subsp. mays
  peptide (1)..(134): Ceres Seq. ID no. 12468947
  misc_feature (1)..(134): NCBI GI NO: 30698268 NR Description: expressed protein [Arabidopsis thaliana]
  misc_feature (1)..(109): NCBI GI NO: 9758143 NR Description: gene_id:MUD21
  misc_feature (1)..(52): NCBI GI NO: 30698266 NR Description: expressed protein [Arabidopsis thaliana]
  misc_feature (1)..(52): NCBI GI NO: 15810345 NR Description: unknown protein [Arabidopsis thaliana]
NRRSQICLSFFDEKHRHPGWFVNKTERIYWEQWFINLQVMFPKRYSKSNSSKGLTNIQANAVEETSTRRAALEASINEVLFQIIKFANEKKDHIPAIPDRIFNHEIMIPSSDSVFGWNTDVIRRVLNSGHPYSL

SEQ ID NO: 36439 - protein, 95 aa, Zea mays subsp. mays
  peptide (1)..(95): Ceres Seq. ID no. 12468948
  misc_feature (1)..(95): NCBI GI NO: 30698268 NR Description: expressed protein [Arabidopsis thaliana]
  misc_feature (1)..(70): NCBI GI NO: 9758143 NR Description: gene_id:MUD21
  misc_feature (1)..(13): NCBI GI NO: 30698266 NR Description: expressed protein [Arabidopsis thaliana]
  misc_feature (1)..(13): NCBI GI NO: 15810345 NR Description: unknown protein [Arabidopsis thaliana]
MFPKRYSKSNSSKGLTNIQANAVEETSTRRAALEASINEVLFQIIKFANEKKDHIPAIPDRIFNHEIMIPSSDSVFGWNTDVIRRVLNSGHPYSL

SEQ ID NO: 36440 - protein, 76 aa, Zea mays subsp. mays
  peptide (1)..(76): Ceres Seq. ID no. 12468949
KPQKPDLPLLFRRETQTPWLVCQQNRAHLLGAMVHQFASHVPQKIQQVKQLQRADKHPSKCRGGDQHKACCIGGVD

SEQ ID NO: 36441 - DNA, 693 bp, Zea mays subsp. mays
  misc_feature (1)..(693): Ceres Seq. ID no. 12462542
  misc_feature (679)..(679): n is a, c, t, g, unknown, or other
  misc_feature (649)..(649): n is a, c, t, g, unknown, or other
gctcgcctctgatctctgcgtcatcgaggagatcaggatacgcccgttcgaagctacttttcagcatggccatccgatttactcttcgaaggcggtgagaatccggctgggtcattccaagcttgaccctggaagagagacttttgtttcggatgaggatgagaacctgactgcgatcgctgatgagaactacatgtggacatacacgtcgccagagtttcctatgcttcaggaaaatgtgttgcaaaccttcaagcttccacgcccggctctttgcattggtggtatagtgaagattgaactactggggaggatacagaaacaatttacagatgataagtattacatatgtgtctgccatgtccaagtgacggggcgctcgctctcaccagatttaatgatagacctctccgatcctgctggttactcgaacctcaagtatctgccgggtgccggtaacttgcgcccagaagacctaatcagcattgacgccaaggactcaccggactggcgctcgcttgtttccaggtacaggcagatgaggcaactggctatggtgtacatgctgcttggacccgtgcagttgcagtttatggatgaagacgaagctgacttgcagatgtaggctttgttttccctgaatccgatnttgtgtatcctaattgaacagagcttgctntgataaatatagcg

SEQ ID NO: 36442 - protein, 207 aa, Zea mays subsp. mays
  peptide (1)..(207): Ceres Seq. ID no. 12462543
  misc_feature (1)..(204): NCBI GI NO: 18411435 NR Description: F-box protein family; protein id: At4g00755
  misc_feature (1)..(204): NCBI GI NO: 28393062 NR Description: putative F-box protein [Arabidopsis thaliana]
  misc_feature (69)..(135): NCBI GI NO: 18308222 NR Description: unknown protein [Oryza sativa]
  misc_feature (68)..(148): NCBI GI NO: 28850404 NR Description: hypothetical protein [Dictyostelium discoideum]
  misc_feature (1)..(39): NCBI GI NO: 28850404 NR Description: hypothetical protein [Dictyostelium discoideum]
LASDLCVIEEIRIRPFEATFQHGHPIYSSKAVRIRLGHSKLDPGRETFVSDEDENLTAIADENYMWTYTSPEFPMLQENVLQTFKLPRPALCIGGIVKIELLGRIQKQFTDDKYYICVCHVQVTGRSLSPDLMIDLSDPAGYSNLKYLPGAGNLRPEDLISIDAKDSPDWRSLVSRYRQMRQLAMVYMLLGPVQLQFMDEDEADLQM

SEQ ID NO: 36443 - protein, 143 aa, Zea mays subsp. mays
  peptide (1)..(143): Ceres Seq. ID no. 12462544
  misc_feature (1)..(140): NCBI GI NO: 18411435 NR Description: F-box protein family; protein id: At4g00755
  misc_feature (1)..(140): NCBI GI NO: 28393062 NR Description: putative F-box protein [Arabidopsis thaliana]
  misc_feature (5)..(71): NCBI GI NO: 18308222 NR Description: unknown protein [Oryza sativa]
  misc_feature (4)..(84): NCBI GI NO: 28850404 NR Description: hypothetical protein [Dictyostelium discoideum]
MWTYTSPEFPMLQENVLQTFKLPRPALCIGGIVKIELLGRIQKQFTDDKYYICVCHVQVTGRSLSPDLMIDLSDPAGYSNLKYLPGAGNLRPEDLISIDAKDSPDWRSLVSRYRQMRQLAMVYMLLGPVQLQFMDEDEADLQM

SEQ ID NO: 36444 - protein, 133 aa, Zea mays subsp. mays
  peptide (1)..(133): Ceres Seq. ID no. 12462545
  misc_feature (1)..(130): NCBI GI NO: 18411435 NR Description: F-box protein family; protein id: At4g00755
  misc_feature (1)..(130): NCBI GI NO: 28393062 NR Description: putative F-box protein [Arabidopsis thaliana]
  misc_feature (1)..(61): NCBI GI NO: 18308222 NR Description: unknown protein [Oryza sativa]
  misc_feature (1)..(74): NCBI GI NO: 28850404 NR Description: hypothetical protein [Dictyostelium discoideum]
MLQENVLQTFKLPRPALCIGGIVKIELLGRIQKQFTDDKYYICVCHVQVTGRSLSPDLMIDLSDPAGYSNLKYLPGAGNLRPEDLISIDAKDSPDWRSLVSRYRQMRQLAMVYMLLGPVQLQFMDEDEADLQM

SEQ ID NO: 36445 - DNA, 552 bp, Zea mays subsp. mays
  misc_feature (1)..(552): Ceres Seq. ID no. 12469663
  misc_feature (537)..(537): n is a, c, t, g, unknown, or other
cagaggttgaagcactctctatggcacaacatgagaatcttgtgccactatggggttattgtatccagggaaactcgaggctcctcatatattctttcatggagaatgggagtcttgatgattggcttcacaacacggacaatgccaactcatttctagattggccaacaagactcaagattgcacaaggagcaggacggggcctttcttatatccacaacacctgcaaccctaacattgttcaccgtgacgtcaagtccagcaacatcttacttgatagagaattcaatgcttatgtcgctgattttggccttgcaagattgatccttccttacaacacacatgtcacgacagagctagtaggcactcttggttacattcctcccgagtatggacaagcctgggtggccaccctgagaggtgatatatatagttttggagtggtcttgcttgagctgctcacagggaagaggcctgtccaggttttgaccaagacgaaagaacttgtccaatgggtaagagagatgaggtcccaangggaaggatattgag

SEQ ID NO: 36446 - protein, 182 aa, Zea mays subsp. mays
  peptide (1)..(182): Ceres Seq. ID no. 12469664
  misc_feature (1)..(176): Pfam Name: Pfam Description:  Protein kinase domain
  misc_feature (1)..(176): NCBI GI NO: 15218425 NR Description: leucine-rich repeat transmembrane protein kinase
  misc_feature (1)..(178): NCBI GI NO: 15238872 NR Description: leucine-rich repeat transmembrane protein kinase
  misc_feature (1)..(178): NCBI GI NO: 34899380 NR Description: contains ESTsAU056601
  misc_feature (1)..(178): NCBI GI NO: 20197485 NR Description: putative receptor-like protein kinase
  misc_feature (1)..(178): NCBI GI NO: 29427830 NR Description: Phytosulfokine receptor precursor
  misc_feature (1)..(178): NCBI GI NO: 15227264 NR Description: leucine-rich repeat transmembrane protein kinase
  misc_feature (1)..(175): NCBI GI NO: 38423989 NR Description: putative brassinosteroid receptor
  misc_feature (1)..(175): NCBI GI NO: 34906992 NR Description: putative receptor-like protein
  misc_feature (1)..(182): NCBI GI NO: 13620226 NR Description: hypothetical protein [Lycopersicon esculentum]
  misc_feature (1)..(133): NCBI GI NO: 20197335 NR Description: putative protein kinase [Arabidopsis thaliana]
  misc_feature (179)..(179): Xaa is any aa, unknown or other
EVEALSMAQHENLVPLWGYCIQGNSRLLIYSFMENGSLDDWLHNTDNANSFLDWPTRLKIAQGAGRGLSYIHNTCNPNIVHRDVKSSNILLDREFNAYVADFGLARLILPYNTHVTTELVGTLGYIPPEYGQAWVATLRGDIYSFGVVLLELLTGKRPVQVLTKTKELVQWVREMRSQXEGY

SEQ ID NO: 36447 - protein, 176 aa, Zea mays subsp. mays
  peptide (1)..(176): Ceres Seq. ID no. 12469665
  misc_feature (1)..(170): Pfam Name: Pfam Description:  Protein kinase domain
  misc_feature (1)..(170): NCBI GI NO: 15218425 NR Description: leucine-rich repeat transmembrane protein kinase
  misc_feature (1)..(172): NCBI GI NO: 15238872 NR Description: leucine-rich repeat transmembrane protein kinase
  misc_feature (1)..(172): NCBI GI NO: 34899380 NR Description: contains ESTsAU056601
  misc_feature (1)..(172): NCBI GI NO: 20197485 NR Description: putative receptor-like protein kinase
  misc_feature (1)..(172): NCBI GI NO: 29427830 NR Description: Phytosulfokine receptor precursor
  misc_feature (1)..(172): NCBI GI NO: 15227264 NR Description: leucine-rich repeat transmembrane protein kinase
  misc_feature (1)..(169): NCBI GI NO: 38423989 NR Description: putative brassinosteroid receptor
  misc_feature (1)..(169): NCBI GI NO: 34906992 NR Description: putative receptor-like protein
  misc_feature (1)..(176): NCBI GI NO: 13620226 NR Description: hypothetical protein [Lycopersicon esculentum]
  misc_feature (1)..(127): NCBI GI NO: 20197335 NR Description: putative protein kinase [Arabidopsis thaliana]
  misc_feature (173)..(173): Xaa is any aa, unknown or other
MAQHENLVPLWGYCIQGNSRLLIYSFMENGSLDDWLHNTDNANSFLDWPTRLKIAQGAGRGLSYIHNTCNPNIVHRDVKSSNILLDREFNAYVADFGLARLILPYNTHVTTELVGTLGYIPPEYGQAWVATLRGDIYSFGVVLLELLTGKRPVQVLTKTKELVQWVREMRSQXEGY

SEQ ID NO: 36448 - protein, 150 aa, Zea mays subsp. mays
  peptide (1)..(150): Ceres Seq. ID no. 12469666
  misc_feature (1)..(144): Pfam Name: Pfam Description:  Protein kinase domain
  misc_feature (1)..(144): NCBI GI NO: 15218425 NR Description: leucine-rich repeat transmembrane protein kinase
  misc_feature (1)..(146): NCBI GI NO: 15238872 NR Description: leucine-rich repeat transmembrane protein kinase
  misc_feature (1)..(146): NCBI GI NO: 34899380 NR Description: contains ESTsAU056601
  misc_feature (1)..(146): NCBI GI NO: 20197485 NR Description: putative receptor-like protein kinase
  misc_feature (1)..(146): NCBI GI NO: 29427830 NR Description: Phytosulfokine receptor precursor
  misc_feature (1)..(146): NCBI GI NO: 15227264 NR Description: leucine-rich repeat transmembrane protein kinase
  misc_feature (1)..(143): NCBI GI NO: 38423989 NR Description: putative brassinosteroid receptor
  misc_feature (1)..(143): NCBI GI NO: 34906992 NR Description: putative receptor-like protein
  misc_feature (1)..(150): NCBI GI NO: 13620226 NR Description: hypothetical protein [Lycopersicon esculentum]
  misc_feature (1)..(101): NCBI GI NO: 20197335 NR Description: putative protein kinase [Arabidopsis thaliana]
  misc_feature (147)..(147): Xaa is any aa, unknown or other
MENGSLDDWLHNTDNANSFLDWPTRLKIAQGAGRGLSYIHNTCNPNIVHRDVKSSNILLDREFNAYVADFGLARLILPYNTHVTTELVGTLGYIPPEYGQAWVATLRGDIYSFGVVLLELLTGKRPVQVLTKTKELVQWVREMRSQXEGY

SEQ ID NO: 36449 - DNA, 383 bp, Zea mays subsp. mays
  misc_feature (1)..(383): Ceres Seq. ID no. 4356909
tttgaaatgggtgatcatcggccacctcctgtacattcgatggaatatatgggtgctgatagaatgccatacttgtatggtgttgaacaaggaggtcctcgcccttttctagaacagccttcgccaagaacctgccctcctgaggcaccaaggacaaacagtgaagttcccagaaacatgtctgatgcagtgccagctacagatttcagaaagggaccagtggcaattgaaaaccaagtggctacaccaacaggcacaactgaagttatcattccttgcaattatataggctttgtctgtggaaacaatggcagtgaaattgaagaaatagagaagatgtcaggtgcttcaattacagttcatgatcctaaagctggcgacgc

SEQ ID NO: 36450 - protein, 127 aa, Zea mays subsp. mays
  peptide (1)..(127): Ceres Seq. ID no. 4356910
  misc_feature (88)..(126): Pfam Name: Pfam Description:  KH domain
  misc_feature (33)..(126): NCBI GI NO: 15217969 NR Description: KH domain protein; protein id: At1g51580.1
FEMGDHRPPPVHSMEYMGADRMPYLYGVEQGGPRPFLEQPSPRTCPPEAPRTNSEVPRNMSDAVPATDFRKGPVAIENQVATPTGTTEVIIPCNYIGFVCGNNGSEIEEIEKMSGASITVHDPKAGD

SEQ ID NO: 36451 - protein, 125 aa, Zea mays subsp. mays
  peptide (1)..(125): Ceres Seq. ID no. 4356911
  misc_feature (86)..(124): Pfam Name: Pfam Description:  KH domain
  misc_feature (31)..(124): NCBI GI NO: 15217969 NR Description: KH domain protein; protein id: At1g51580.1
MGDHRPPPVHSMEYMGADRMPYLYGVEQGGPRPFLEQPSPRTCPPEAPRTNSEVPRNMSDAVPATDFRKGPVAIENQVATPTGTTEVIIPCNYIGFVCGNNGSEIEEIEKMSGASITVHDPKAGD

SEQ ID NO: 36452 - protein, 114 aa, Zea mays subsp. mays
  peptide (1)..(114): Ceres Seq. ID no. 4356912
  misc_feature (75)..(113): Pfam Name: Pfam Description:  KH domain
  misc_feature (20)..(113): NCBI GI NO: 15217969 NR Description: KH domain protein; protein id: At1g51580.1
MEYMGADRMPYLYGVEQGGPRPFLEQPSPRTCPPEAPRTNSEVPRNMSDAVPATDFRKGPVAIENQVATPTGTTEVIIPCNYIGFVCGNNGSEIEEIEKMSGASITVHDPKAGD

SEQ ID NO: 36453 - DNA, 739 bp, Zea mays subsp. mays
  misc_feature (1)..(739): Ceres Seq. ID no. 13504114
  misc_feature (653)..(653): n is a, c, t, g, unknown, or other
  misc_feature (634)..(634): n is a, c, t, g, unknown, or other
actttcttcgagcgtcgacaggctttccggctgccgaccccacccgggcggctcgccggggtcctctacagacgcagcgggtcgacttctgtcagggtgctacgatgatgcggcgtgcgtccctgtcctgctcgagcacaagctccggcggggaggggaggctaacgtacaaggatggtggcgtggacatagacgccgacgccgagcttgtccgccgcatagctaggatggcacccgggattggcggcttcggcggtctctttccctacaatgacgattaccttgttgttagcaccgacggggtcgggacgaagctgaagcttgctttcgaaagtggtattcatgacacaatcggcattgacctggtggcaatgaacgtcaatgacattgttactttaggtgcaaaaccactgttcttcctagattactatgcaacaagcaagcttgatgttgatcttgcagagaaggttatcaatgggattagggatgggtgtgaacaatcagtcggaggagatgtaagatttctgaaatcgaattaccatgacttagcaattcaaccatgcggtattgcgccattatccttgagaaggatgcccggtccttgtaccctgtgcattgatcgggtagagagccnaggccagggtcggaggctngaatgcgtacccgagcctgtcctatagatgagatgtttgagttgtagcagttgaaacaacgctcaacatggtaaaaagttcttggt

SEQ ID NO: 36454 - protein, 225 aa, Zea mays subsp. mays
  peptide (1)..(225): Ceres Seq. ID no. 13504115
  misc_feature (54)..(179): Pfam Name: Pfam Description:  AIR synthase related protein, N-terminal domain
  misc_feature (2)..(183): NCBI GI NO: 34897250 NR Description: putative 5'-phosphoribosyl-5-aminoimidazolesynthetase
  misc_feature (54)..(179): NCBI GI NO: 541885 NR Description: phosphoribosylformylglycinamidine cyclo-ligase
  misc_feature (54)..(179): NCBI GI NO: 15233161 NR Description: phosphoribosylformylglycinamidine cyclo-ligaseprecursor
  misc_feature (37)..(181): NCBI GI NO: 1709925 NR Description: Phosphoribosylformylglycinamidine cyclo-ligase
  misc_feature (45)..(183): NCBI GI NO: 23029993 NR Description: hypothetical protein
  misc_feature (54)..(180): NCBI GI NO: 16123025 NR Description: putative phosphoribosylaminoimidazole synthetase
  misc_feature (54)..(193): NCBI GI NO: 33383759 NR Description: phosphoribosylaminoimidazole sythetase
  misc_feature (48)..(179): NCBI GI NO: 27365246 NR Description: Phosphoribosylaminoimidazole synthetase
  misc_feature (48)..(179): NCBI GI NO: 28899059 NR Description: phosphoribosylformylglycinamidine cyclo-ligase
  misc_feature (53)..(181): NCBI GI NO: 16273334 NR Description: phosphoribosylaminoimidazole synthetase
  misc_feature (211)..(211): Xaa is any aa, unknown or other
  misc_feature (217)..(217): Xaa is any aa, unknown or other
FLRASTGFPAADPTRAARRGPLQTQRVDFCQGATMMRRASLSCSSTSSGGEGRLTYKDGGVDIDADAELVRRIARMAPGIGGFGGLFPYNDDYLVVSTDGVGTKLKLAFESGIHDTIGIDLVAMNVNDIVTLGAKPLFFLDYYATSKLDVDLAEKVINGIRDGCEQSVGGDVRFLKSNYHDLAIQPCGIAPLSLRRMPGPCTLCIDRVESXGQGRRXECVPEPVL

SEQ ID NO: 36455 - protein, 191 aa, Zea mays subsp. mays
  peptide (1)..(191): Ceres Seq. ID no. 13504116
  misc_feature (20)..(145): Pfam Name: Pfam Description:  AIR synthase related protein, N-terminal domain
  misc_feature (1)..(149): NCBI GI NO: 34897250 NR Description: putative 5'-phosphoribosyl-5-aminoimidazolesynthetase
  misc_feature (20)..(145): NCBI GI NO: 541885 NR Description: phosphoribosylformylglycinamidine cyclo-ligase
  misc_feature (20)..(145): NCBI GI NO: 15233161 NR Description: phosphoribosylformylglycinamidine cyclo-ligaseprecursor
  misc_feature (3)..(147): NCBI GI NO: 1709925 NR Description: Phosphoribosylformylglycinamidine cyclo-ligase
  misc_feature (11)..(149): NCBI GI NO: 23029993 NR Description: hypothetical protein
  misc_feature (20)..(146): NCBI GI NO: 16123025 NR Description: putative phosphoribosylaminoimidazole synthetase
  misc_feature (20)..(159): NCBI GI NO: 33383759 NR Description: phosphoribosylaminoimidazole sythetase
  misc_feature (14)..(145): NCBI GI NO: 27365246 NR Description: Phosphoribosylaminoimidazole synthetase
  misc_feature (14)..(145): NCBI GI NO: 28899059 NR Description: phosphoribosylformylglycinamidine cyclo-ligase
  misc_feature (19)..(147): NCBI GI NO: 16273334 NR Description: phosphoribosylaminoimidazole synthetase
  misc_feature (177)..(177): Xaa is any aa, unknown or other
  misc_feature (183)..(183): Xaa is any aa, unknown or other
MMRRASLSCSSTSSGGEGRLTYKDGGVDIDADAELVRRIARMAPGIGGFGGLFPYNDDYLVVSTDGVGTKLKLAFESGIHDTIGIDLVAMNVNDIVTLGAKPLFFLDYYATSKLDVDLAEKVINGIRDGCEQSVGGDVRFLKSNYHDLAIQPCGIAPLSLRRMPGPCTLCIDRVESXGQGRRXECVPEPVL

SEQ ID NO: 36456 - protein, 190 aa, Zea mays subsp. mays
  peptide (1)..(190): Ceres Seq. ID no. 13504117
  misc_feature (19)..(144): Pfam Name: Pfam Description:  AIR synthase related protein, N-terminal domain
  misc_feature (1)..(148): NCBI GI NO: 34897250 NR Description: putative 5'-phosphoribosyl-5-aminoimidazolesynthetase
  misc_feature (19)..(144): NCBI GI NO: 541885 NR Description: phosphoribosylformylglycinamidine cyclo-ligase
  misc_feature (19)..(144): NCBI GI NO: 15233161 NR Description: phosphoribosylformylglycinamidine cyclo-ligaseprecursor
  misc_feature (2)..(146): NCBI GI NO: 1709925 NR Description: Phosphoribosylformylglycinamidine cyclo-ligase
  misc_feature (10)..(148): NCBI GI NO: 23029993 NR Description: hypothetical protein
  misc_feature (19)..(145): NCBI GI NO: 16123025 NR Description: putative phosphoribosylaminoimidazole synthetase
  misc_feature (19)..(158): NCBI GI NO: 33383759 NR Description: phosphoribosylaminoimidazole sythetase
  misc_feature (13)..(144): NCBI GI NO: 27365246 NR Description: Phosphoribosylaminoimidazole synthetase
  misc_feature (13)..(144): NCBI GI NO: 28899059 NR Description: phosphoribosylformylglycinamidine cyclo-ligase
  misc_feature (18)..(146): NCBI GI NO: 16273334 NR Description: phosphoribosylaminoimidazole synthetase
  misc_feature (176)..(176): Xaa is any aa, unknown or other
  misc_feature (182)..(182): Xaa is any aa, unknown or other
MRRASLSCSSTSSGGEGRLTYKDGGVDIDADAELVRRIARMAPGIGGFGGLFPYNDDYLVVSTDGVGTKLKLAFESGIHDTIGIDLVAMNVNDIVTLGAKPLFFLDYYATSKLDVDLAEKVINGIRDGCEQSVGGDVRFLKSNYHDLAIQPCGIAPLSLRRMPGPCTLCIDRVESXGQGRRXECVPEPVL

SEQ ID NO: 36457 - DNA, 901 bp, Zea mays subsp. mays
  misc_feature (1)..(901): Ceres Seq. ID no. 12455262
ctcccctcctccgcacaaacgcgtcgcatccgctccacaggatcctcggcgccgagtccaagatcttctacctcaagatgaagggtgactaccacaggtaccttgctgagttcaagtcaggtgcagagaggaaggatgctgcggagagcaccatgaatgcctacaaagctgctcaggatattgctcttgctgatctggccccaacccaccccatcaggctcgggcttgctctcaacttctcagtgttctactacgagatcctcaactcccctgaccgtgcttgcaaccttgcaaagcaggcctttgatgaggcaatctccgaactagacagcctgggagaggagtcctacaaggacagcactctgatcatgcagctcctgcgtgacaacttgaccctatggacttccgacaccaacgaggacgccggagatgagatcaaggaagcagctgctgcccccaaagaatccgcccccgagggccagtaagacggatccgatctcccgacctgatgcgtgtctgctgatgtcggggagtttaccaggactgtgccgttcttgatttctgatagcttatcttctagtacacctcgtgttgttctcttcgtcacggcgccggtgcgtgtgcgctgaagctgcctgccattgccattgccgctgtttttaattaagcacacactctagatgttatgcccgcatgctatgtttcgattctcaaagttgataaatgatggctggatgctggttttcgtgctccaagcctgctgcttcttccagggaaaaaaagacctgcccttgttgcagcgttgttgtttagaatgacctatatttgactggtattctgttacggtggctttgcaaagctgtttgtttggtttaatgtctcggaataatatgaattggct

SEQ ID NO: 36458 - protein, 160 aa, Zea mays subsp. mays
  peptide (1)..(160): Ceres Seq. ID no. 12455263
  misc_feature (8)..(140): Pfam Name: Pfam Description:  14-3-3 protein
  misc_feature (8)..(160): NCBI GI NO: 9798603 NR Description: TaWIN1 [Triticum aestivum]
  misc_feature (8)..(154): NCBI GI NO: 7435023 NR Description: GF14-d protein - rice
  misc_feature (2)..(160): NCBI GI NO: 7435022 NR Description: GF14-c protein - rice
  misc_feature (2)..(151): NCBI GI NO: 2921512 NR Description: GF14 protein [Fritillaria agrestis]
  misc_feature (2)..(151): NCBI GI NO: 12229593 NR Description: 14-3-3-like protein
  misc_feature (2)..(158): NCBI GI NO: 3023187 NR Description: 14-3-3-LIKE PROTEIN (G-BOX BINDING FACTOR)
  misc_feature (2)..(153): NCBI GI NO: 100554 NR Description: 14-3-3 protein homolog - barley
  misc_feature (2)..(153): NCBI GI NO: 112684 NR Description: 14-3-3-LIKE PROTEIN A (14-3-3A)
  misc_feature (2)..(160): NCBI GI NO: 37903393 NR Description: 14-3-3-like protein
  misc_feature (17)..(157): NCBI GI NO: 18396217 NR Description: 14-3-3 protein GF14 nu
PLLRTNASHPLHRILGAESKIFYLKMKGDYHRYLAEFKSGAERKDAAESTMNAYKAAQDIALADLAPTHPIRLGLALNFSVFYYEILNSPDRACNLAKQAFDEAISELDSLGEESYKDSTLIMQLLRDNLTLWTSDTNEDAGDEIKEAAAAPKESAPEGQ

SEQ ID NO: 36459 - protein, 135 aa, Zea mays subsp. mays
  peptide (1)..(135): Ceres Seq. ID no. 12455264
  misc_feature (1)..(115): Pfam Name: Pfam Description:  14-3-3 protein
  misc_feature (1)..(135): NCBI GI NO: 9798603 NR Description: TaWIN1 [Triticum aestivum]
  misc_feature (1)..(129): NCBI GI NO: 7435023 NR Description: GF14-d protein - rice
  misc_feature (1)..(135): NCBI GI NO: 7435022 NR Description: GF14-c protein - rice
  misc_feature (1)..(126): NCBI GI NO: 2921512 NR Description: GF14 protein [Fritillaria agrestis]
  misc_feature (1)..(126): NCBI GI NO: 12229593 NR Description: 14-3-3-like protein
  misc_feature (1)..(133): NCBI GI NO: 3023187 NR Description: 14-3-3-LIKE PROTEIN (G-BOX BINDING FACTOR)
  misc_feature (1)..(128): NCBI GI NO: 100554 NR Description: 14-3-3 protein homolog - barley
  misc_feature (1)..(128): NCBI GI NO: 112684 NR Description: 14-3-3-LIKE PROTEIN A (14-3-3A)
  misc_feature (1)..(135): NCBI GI NO: 37903393 NR Description: 14-3-3-like protein
  misc_feature (1)..(132): NCBI GI NO: 18396217 NR Description: 14-3-3 protein GF14 nu
MKGDYHRYLAEFKSGAERKDAAESTMNAYKAAQDIALADLAPTHPIRLGLALNFSVFYYEILNSPDRACNLAKQAFDEAISELDSLGEESYKDSTLIMQLLRDNLTLWTSDTNEDAGDEIKEAAAAPKESAPEGQ

SEQ ID NO: 36460 - protein, 110 aa, Zea mays subsp. mays
  peptide (1)..(110): Ceres Seq. ID no. 12455265
  misc_feature (1)..(90): Pfam Name: Pfam Description:  14-3-3 protein
  misc_feature (1)..(110): NCBI GI NO: 9798603 NR Description: TaWIN1 [Triticum aestivum]
  misc_feature (1)..(104): NCBI GI NO: 7435023 NR Description: GF14-d protein - rice
  misc_feature (1)..(110): NCBI GI NO: 7435022 NR Description: GF14-c protein - rice
  misc_feature (1)..(101): NCBI GI NO: 2921512 NR Description: GF14 protein [Fritillaria agrestis]
  misc_feature (1)..(101): NCBI GI NO: 12229593 NR Description: 14-3-3-like protein
  misc_feature (1)..(108): NCBI GI NO: 3023187 NR Description: 14-3-3-LIKE PROTEIN (G-BOX BINDING FACTOR)
  misc_feature (1)..(103): NCBI GI NO: 100554 NR Description: 14-3-3 protein homolog - barley
  misc_feature (1)..(103): NCBI GI NO: 112684 NR Description: 14-3-3-LIKE PROTEIN A (14-3-3A)
  misc_feature (1)..(110): NCBI GI NO: 37903393 NR Description: 14-3-3-like protein
  misc_feature (1)..(107): NCBI GI NO: 18396217 NR Description: 14-3-3 protein GF14 nu
MNAYKAAQDIALADLAPTHPIRLGLALNFSVFYYEILNSPDRACNLAKQAFDEAISELDSLGEESYKDSTLIMQLLRDNLTLWTSDTNEDAGDEIKEAAAAPKESAPEGQ

SEQ ID NO: 36461 - DNA, 1144 bp, Zea mays subsp. mays; identical to SEQ ID NO: 34580
  misc_feature (1)..(1144): Ceres Seq. ID no. 12340675

SEQ ID NO: 36462 - protein, 257 aa, Zea mays subsp. mays; identical to SEQ ID NO: 34581
  peptide (1)..(257): Ceres Seq. ID no. 12340676
  misc_feature (1)..(257): NCBI GI NO: 34897418 NR Description: unknown protein
  misc_feature (4)..(257): NCBI GI NO: 18404496 NR Description: expressed protein; protein id: At2g37660
  misc_feature (1)..(257): NCBI GI NO: 14719331 NR Description: putative 3-beta hydroxysteroiddehydrogenase/isomerase protein
  misc_feature (9)..(257): NCBI GI NO: 18413869 NR Description: putative protein; protein id: At5g02240
  misc_feature (4)..(257): NCBI GI NO: 7485430 NR Description: hypothetical protein At2g37660
  misc_feature (9)..(252): NCBI GI NO: 11358410 NR Description: hypothetical protein T7H20
  misc_feature (96)..(253): NCBI GI NO: 16330694 NR Description: hypothetical protein [Synechocystis sp. PCC 6803]
  misc_feature (96)..(253): NCBI GI NO: 23130188 NR Description: hypothetical protein [Nostoc punctiforme]
  misc_feature (1)..(250): NCBI GI NO: 30689062 NR Description: expressed protein [Arabidopsis thaliana]
  misc_feature (96)..(252): NCBI GI NO: 17230243 NR Description: hypothetical protein [Nostoc sp. PCC 7120]

SEQ ID NO: 36463 - protein, 171 aa, Zea mays subsp. mays; identical to SEQ ID NO: 34582
  peptide (1)..(171): Ceres Seq. ID no. 12340677
  misc_feature (1)..(171): NCBI GI NO: 34897418 NR Description: unknown protein
  misc_feature (1)..(171): NCBI GI NO: 18404496 NR Description: expressed protein; protein id: At2g37660
  misc_feature (1)..(171): NCBI GI NO: 14719331 NR Description: putative 3-beta hydroxysteroiddehydrogenase/isomerase protein
  misc_feature (1)..(171): NCBI GI NO: 18413869 NR Description: putative protein; protein id: At5g02240
  misc_feature (1)..(171): NCBI GI NO: 7485430 NR Description: hypothetical protein At2g37660
  misc_feature (1)..(166): NCBI GI NO: 11358410 NR Description: hypothetical protein T7H20
  misc_feature (10)..(167): NCBI GI NO: 16330694 NR Description: hypothetical protein [Synechocystis sp. PCC 6803]
  misc_feature (10)..(167): NCBI GI NO: 23130188 NR Description: hypothetical protein [Nostoc punctiforme]
  misc_feature (1)..(164): NCBI GI NO: 30689062 NR Description: expressed protein [Arabidopsis thaliana]
  misc_feature (10)..(166): NCBI GI NO: 17230243 NR Description: hypothetical protein [Nostoc sp. PCC 7120]

SEQ ID NO: 36464 - protein, 151 aa, Zea mays subsp. mays; identical to SEQ ID NO: 34583
  peptide (1)..(151): Ceres Seq. ID no. 12340678
  misc_feature (1)..(151): NCBI GI NO: 34897418 NR Description: unknown protein
  misc_feature (1)..(151): NCBI GI NO: 18404496 NR Description: expressed protein; protein id: At2g37660
  misc_feature (1)..(151): NCBI GI NO: 14719331 NR Description: putative 3-beta hydroxysteroiddehydrogenase/isomerase protein
  misc_feature (1)..(151): NCBI GI NO: 18413869 NR Description: putative protein; protein id: At5g02240
  misc_feature (1)..(151): NCBI GI NO: 7485430 NR Description: hypothetical protein At2g37660
  misc_feature (1)..(146): NCBI GI NO: 11358410 NR Description: hypothetical protein T7H20
  misc_feature (1)..(147): NCBI GI NO: 16330694 NR Description: hypothetical protein [Synechocystis sp. PCC 6803]
  misc_feature (1)..(147): NCBI GI NO: 23130188 NR Description: hypothetical protein [Nostoc punctiforme]
  misc_feature (1)..(144): NCBI GI NO: 30689062 NR Description: expressed protein [Arabidopsis thaliana]
  misc_feature (1)..(146): NCBI GI NO: 17230243 NR Description: hypothetical protein [Nostoc sp. PCC 7120]

SEQ ID NO: 36465 - DNA, 978 bp, Zea mays subsp. mays
  misc_feature (1)..(978): Ceres Seq. ID no. 12469570
  misc_feature (675)..(675): n is a, c, t, g, unknown, or other
  misc_feature (493)..(493): n is a, c, t, g, unknown, or other
  misc_feature (557)..(557): n is a, c, t, g, unknown, or other
cccgttgctcgtcgtcgtcctctgcatccgtcccctatttatccgtcccctcctctcccgcactagctcccaagttccatcccatcccgccacgaaattctccacgctccgatccaatcgcaacaatgaagttcggcaagagcctcaacaaccagatcgtggagacgctcccggactggcgcgacaagttcctgtcctacaaggacctcaagaagcggctgaagcagatcggcgccggctctggcgagcggcggagcaagcgccagcgggtgggggacgggcgcggcggatcctcgccgcctgcgatgaccccggaggaggccggattcgtcgcgctcctcgacgccgagctcgacaagttcaacgccttcttcctcgagaaggaggaggactacgtcatccggctgaagggctggtcaagatcctcaagaagtacgacaagaggaccggcgcgctgatccgcctgcccttcatccggaacgtgatgcagganccgttctgcgccaccgacgtgctgtacaagctcgtcaaggggtgcgaggagatgctggaccagntcctcctgccccggaaccagcagcggcccgtgccgagcgacaacggcggggaaggagacagcgacggcgacgacgacaagcaacgaccggcggagccaggcgcctcatcgctgcccancggcggcggcggtggcgctggcgacatggagctggaggagatcgaggacatggagagcatgtacatgaagagtacggtggccgcgctcagggcgctcagggagatcaggagcgggagctccacggtgagcgcgttctccctgccgccactacggtgattgacacgttgtgttcggttcagtagcgaagcgagacagaacggggccgactgcgctgttgctgtaggtagtgtttggttcaaagaagacacgaacaaaatgaaagaaaatctgtaaaatgatagtaatattcatctagtattctc

SEQ ID NO: 36466 - protein, 276 aa, Zea mays subsp. mays
  peptide (1)..(276): Ceres Seq. ID no. 12469571
  misc_feature (137)..(192): NCBI GI NO: 15241275 NR Description: ids4-like protein; protein id: At5g20150
  misc_feature (235)..(276): NCBI GI NO: 15241275 NR Description: ids4-like protein; protein id: At5g20150
  misc_feature (137)..(192): NCBI GI NO: 21592813 NR Description: ids4-like protein [Arabidopsis thaliana]
  misc_feature (235)..(276): NCBI GI NO: 21592813 NR Description: ids4-like protein [Arabidopsis thaliana]
  misc_feature (137)..(275): NCBI GI NO: 15225770 NR Description: unknown protein; protein id: At2g26660.1
  misc_feature (137)..(276): NCBI GI NO: 16506648 NR Description: IDS-4-like protein [Castanea sativa]
  misc_feature (137)..(275): NCBI GI NO: 26452101 NR Description: unknown protein [Arabidopsis thaliana]
  misc_feature (229)..(275): NCBI GI NO: 37533962 NR Description: hypothetical protein
  misc_feature (137)..(206): NCBI GI NO: 18417630 NR Description: ids-4 protein - like; protein id: At5g15330
  misc_feature (137)..(206): NCBI GI NO: 11358467 NR Description: ids-4 protein-like - Arabidopsis thaliana
  misc_feature (164)..(164): Xaa is any aa, unknown or other
  misc_feature (186)..(186): Xaa is any aa, unknown or other
  misc_feature (225)..(225): Xaa is any aa, unknown or other
PLLVVVLCIRPLFIRPLLSRTSSQVPSHPATKFSTLRSNRNNEVRQEPQQPDRGDAPGLARQVPVLQGPQEAAEADRRRLWRAAEQAPAGGGRARRILAACDDPGGGRIRRAPRRRARQVQRLLPREGGGLRHPAEGLVKILKKYDKRTGALIRLPFIRNVMQXPFCATDVLYKLVKGCEEMLDQXLLPRNQQRPVPSDNGGEGDSDGDDDKQRPAEPGASSLPXGGGGGAGDMELEEIEDMESMYMKSTVAALRALREIRSGSSTVSAFSLPPLR

SEQ ID NO: 36467 - protein, 151 aa, Zea mays subsp. mays
  peptide (1)..(151): Ceres Seq. ID no. 12469572
  misc_feature (42)..(136): Pfam Name: Pfam Description:  SPX domain
  misc_feature (42)..(136): NCBI GI NO: 15241275 NR Description: ids4-like protein; protein id: At5g20150
  misc_feature (42)..(136): NCBI GI NO: 21592813 NR Description: ids4-like protein [Arabidopsis thaliana]
  misc_feature (42)..(136): NCBI GI NO: 15225770 NR Description: unknown protein; protein id: At2g26660.1
  misc_feature (105)..(136): NCBI GI NO: 16506648 NR Description: IDS-4-like protein [Castanea sativa]
  misc_feature (42)..(134): NCBI GI NO: 37533962 NR Description: hypothetical protein
  misc_feature (96)..(136): NCBI GI NO: 18417630 NR Description: ids-4 protein - like; protein id: At5g15330
  misc_feature (42)..(74): NCBI GI NO: 18417630 NR Description: ids-4 protein - like; protein id: At5g15330
  misc_feature (96)..(136): NCBI GI NO: 11358467 NR Description: ids-4 protein-like - Arabidopsis thaliana
  misc_feature (42)..(74): NCBI GI NO: 11358467 NR Description: ids-4 protein-like - Arabidopsis thaliana
  misc_feature (71)..(136): NCBI GI NO: 15225414 NR Description: hypothetical protein; protein id: At2g45130.1
RCSSSSSASVPYLSVPSSPALAPKFHPIPPRNSPRSDPIATMKFGKSLNNQIVETLPDWRDKFLSYKDLKKRLKQIGAGSGERRSKRQRVGDGRGGSSPPAMTPEEAGFVALLDAELDKFNAFFLEKEEDYVIRLKGWSRSSRSTTRGPAR

SEQ ID NO: 36468 - DNA, 1315 bp, Zea mays subsp. mays; identical to SEQ ID NO: 35930
  misc_feature (1)..(1315): Ceres Seq. ID no. 13635214
  misc_feature (398)..(398): n is a, c, t, g, unknown, or other
  misc_feature (397)..(397): n is a, c, t, g, unknown, or other
  misc_feature (399)..(399): n is a, c, t, g, unknown, or other

SEQ ID NO: 36469 - protein, 153 aa, Zea mays subsp. mays; identical to SEQ ID NO: 35931
  peptide (1)..(153): Ceres Seq. ID no. 15220341
  misc_feature (38)..(152): Pfam Name: Pfam Description:  lactate/malate dehydrogenase
  misc_feature (36)..(152): NCBI GI NO: 18202485 NR Description: Malate dehydrogenase, cytoplasmic
  misc_feature (36)..(152): NCBI GI NO: 37535388 NR Description: cytoplasmic malate dehydrogenase
  misc_feature (36)..(152): NCBI GI NO: 10334493 NR Description: cytosolic malate dehydrogenase [Cicer arietinum]
  misc_feature (36)..(152): NCBI GI NO: 15982948 NR Description: NAD-dependent malate dehydrogenase
  misc_feature (36)..(152): NCBI GI NO: 10798652 NR Description: malate dehydrogenase [Nicotiana tabacum]
  misc_feature (36)..(152): NCBI GI NO: 11133373 NR Description: Malate dehydrogenase, cytoplasmic
  misc_feature (36)..(152): NCBI GI NO: 12229778 NR Description: Malate dehydrogenase, cytoplasmic
  misc_feature (36)..(152): NCBI GI NO: 15219721 NR Description: malate dehydrogenase, cytosolic, putative
  misc_feature (36)..(152): NCBI GI NO: 15239843 NR Description: malate dehydrogenase, cytosolic, putative
  misc_feature (36)..(152): NCBI GI NO: 21593565 NR Description: cytosolic malate dehydrogenase
  misc_feature (10)..(10): Xaa is any aa, unknown or other
  misc_feature (11)..(11): Xaa is any aa, unknown or other
  misc_feature (26)..(26): Xaa is any aa, unknown or other
  misc_feature (27)..(27): Xaa is any aa, unknown or other
  misc_feature (29)..(29): Xaa is any aa, unknown or other
  misc_feature (30)..(30): Xaa is any aa, unknown or other
  misc_feature (32)..(32): Xaa is any aa, unknown or other
  misc_feature (33)..(33): Xaa is any aa, unknown or other
  misc_feature (34)..(34): Xaa is any aa, unknown or other
  misc_feature (40)..(40): Xaa is any aa, unknown or other
  misc_feature (47)..(47): Xaa is any aa, unknown or other
  misc_feature (50)..(50): Xaa is any aa, unknown or other
  misc_feature (55)..(55): Xaa is any aa, unknown or other
  misc_feature (56)..(56): Xaa is any aa, unknown or other
  misc_feature (63)..(63): Xaa is any aa, unknown or other
  misc_feature (78)..(78): Xaa is any aa, unknown or other
  misc_feature (87)..(87): Xaa is any aa, unknown or other
  misc_feature (93)..(93): Xaa is any aa, unknown or other
  misc_feature (97)..(97): Xaa is any aa, unknown or other
  misc_feature (104)..(104): Xaa is any aa, unknown or other
  misc_feature (106)..(106): Xaa is any aa, unknown or other
  misc_feature (117)..(117): Xaa is any aa, unknown or other
  misc_feature (118)..(118): Xaa is any aa, unknown or other
  misc_feature (123)..(123): Xaa is any aa, unknown or other
  misc_feature (132)..(132): Xaa is any aa, unknown or other
  misc_feature (133)..(133): Xaa is any aa, unknown or other
  misc_feature (140)..(140): Xaa is any aa, unknown or other
  misc_feature (148)..(148): Xaa is any aa, unknown or other

SEQ ID NO: 36470 - protein, 143 aa, Zea mays subsp. mays; identical to SEQ ID NO: 35932
  peptide (1)..(143): Ceres Seq. ID no. 15220342
  misc_feature (85)..(142): Pfam Name: Pfam Description:  lactate/malate dehydrogenase
  misc_feature (6)..(142): NCBI GI NO: 18202485 NR Description: Malate dehydrogenase, cytoplasmic
  misc_feature (6)..(142): NCBI GI NO: 37535388 NR Description: cytoplasmic malate dehydrogenase
  misc_feature (6)..(142): NCBI GI NO: 21593565 NR Description: cytosolic malate dehydrogenase
  misc_feature (6)..(142): NCBI GI NO: 15239843 NR Description: malate dehydrogenase, cytosolic, putative
  misc_feature (6)..(142): NCBI GI NO: 15982948 NR Description: NAD-dependent malate dehydrogenase
  misc_feature (6)..(142): NCBI GI NO: 10798652 NR Description: malate dehydrogenase [Nicotiana tabacum]
  misc_feature (6)..(142): NCBI GI NO: 10334493 NR Description: cytosolic malate dehydrogenase [Cicer arietinum]
  misc_feature (6)..(142): NCBI GI NO: 15219721 NR Description: malate dehydrogenase, cytosolic, putative
  misc_feature (6)..(142): NCBI GI NO: 11133373 NR Description: Malate dehydrogenase, cytoplasmic
  misc_feature (6)..(142): NCBI GI NO: 12229778 NR Description: Malate dehydrogenase, cytoplasmic
  misc_feature (8)..(8): Xaa is any aa, unknown or other
  misc_feature (9)..(9): Xaa is any aa, unknown or other
  misc_feature (15)..(15): Xaa is any aa, unknown or other
  misc_feature (24)..(24): Xaa is any aa, unknown or other
  misc_feature (25)..(25): Xaa is any aa, unknown or other
  misc_feature (32)..(32): Xaa is any aa, unknown or other
  misc_feature (39)..(39): Xaa is any aa, unknown or other
  misc_feature (49)..(49): Xaa is any aa, unknown or other
  misc_feature (50)..(50): Xaa is any aa, unknown or other
  misc_feature (62)..(62): Xaa is any aa, unknown or other
  misc_feature (75)..(75): Xaa is any aa, unknown or other
  misc_feature (77)..(77): Xaa is any aa, unknown or other
  misc_feature (78)..(78): Xaa is any aa, unknown or other
  misc_feature (79)..(79): Xaa is any aa, unknown or other
  misc_feature (86)..(86): Xaa is any aa, unknown or other
  misc_feature (101)..(101): Xaa is any aa, unknown or other
  misc_feature (104)..(104): Xaa is any aa, unknown or other
  misc_feature (119)..(119): Xaa is any aa, unknown or other

SEQ ID NO: 36471 - protein, 130 aa, Zea mays subsp. mays; identical to SEQ ID NO: 35933
  peptide (1)..(130): Ceres Seq. ID no. 15220343
  misc_feature (72)..(129): Pfam Name: Pfam Description:  lactate/malate dehydrogenase
  misc_feature (1)..(129): NCBI GI NO: 18202485 NR Description: Malate dehydrogenase, cytoplasmic
  misc_feature (1)..(129): NCBI GI NO: 37535388 NR Description: cytoplasmic malate dehydrogenase
  misc_feature (1)..(129): NCBI GI NO: 21593565 NR Description: cytosolic malate dehydrogenase
  misc_feature (1)..(129): NCBI GI NO: 15239843 NR Description: malate dehydrogenase, cytosolic, putative
  misc_feature (1)..(129): NCBI GI NO: 15982948 NR Description: NAD-dependent malate dehydrogenase
  misc_feature (1)..(129): NCBI GI NO: 10798652 NR Description: malate dehydrogenase [Nicotiana tabacum]
  misc_feature (1)..(129): NCBI GI NO: 10334493 NR Description: cytosolic malate dehydrogenase [Cicer arietinum]
  misc_feature (1)..(129): NCBI GI NO: 15219721 NR Description: malate dehydrogenase, cytosolic, putative
  misc_feature (1)..(129): NCBI GI NO: 11133373 NR Description: Malate dehydrogenase, cytoplasmic
  misc_feature (1)..(129): NCBI GI NO: 12229778 NR Description: Malate dehydrogenase, cytoplasmic
  misc_feature (2)..(2): Xaa is any aa, unknown or other
  misc_feature (11)..(11): Xaa is any aa, unknown or other
  misc_feature (12)..(12): Xaa is any aa, unknown or other
  misc_feature (19)..(19): Xaa is any aa, unknown or other
  misc_feature (26)..(26): Xaa is any aa, unknown or other
  misc_feature (36)..(36): Xaa is any aa, unknown or other
  misc_feature (37)..(37): Xaa is any aa, unknown or other
  misc_feature (49)..(49): Xaa is any aa, unknown or other
  misc_feature (62)..(62): Xaa is any aa, unknown or other
  misc_feature (64)..(64): Xaa is any aa, unknown or other
  misc_feature (65)..(65): Xaa is any aa, unknown or other
  misc_feature (66)..(66): Xaa is any aa, unknown or other
  misc_feature (73)..(73): Xaa is any aa, unknown or other
  misc_feature (88)..(88): Xaa is any aa, unknown or other
  misc_feature (91)..(91): Xaa is any aa, unknown or other
  misc_feature (106)..(106): Xaa is any aa, unknown or other

SEQ ID NO: 36472 - DNA, 1015 bp, Zea mays subsp. mays; identical to SEQ ID NO: 25467
  misc_feature (1)..(1015): Ceres Seq. ID no. 12595679

SEQ ID NO: 36473 - protein, 143 aa, Zea mays subsp. mays; identical to SEQ ID NO: 25468
  peptide (1)..(143): Ceres Seq. ID no. 12595680
  misc_feature (76)..(100): Pfam Name: Pfam Description:  A20-like zinc finger
  misc_feature (63)..(143): NCBI GI NO: 35187687 NR Description: zinc-finger protein
  misc_feature (63)..(143): NCBI GI NO: 11361253 NR Description: hypothetical protein p85RF
  misc_feature (63)..(143): NCBI GI NO: 18403408 NR Description: expressed protein; protein id: At1g51200
  misc_feature (63)..(143): NCBI GI NO: 25082726 NR Description: expressed protein [Arabidopsis thaliana]
  misc_feature (62)..(143): NCBI GI NO: 15231686 NR Description: zinc finger - like protein; protein id:At3g52800
  misc_feature (62)..(143): NCBI GI NO: 14596167 NR Description: zinc finger-like protein [Arabidopsis thaliana]
  misc_feature (64)..(136): NCBI GI NO: 28269431 NR Description: putative zinc finger protein
  misc_feature (67)..(103): NCBI GI NO: 30908921 NR Description: putative zinc finger transcription factor ZFP33
  misc_feature (62)..(143): NCBI GI NO: 18404102 NR Description: expressed protein; protein id: At2g36320
  misc_feature (71)..(143): NCBI GI NO: 29791559 NR Description: Unknown (protein for MGC:56057) [Danio rerio]

SEQ ID NO: 36474 - protein, 91 aa, Zea mays subsp. mays; identical to SEQ ID NO: 25469
  peptide (1)..(91): Ceres Seq. ID no. 12595681

SEQ ID NO: 36475 - protein, 82 aa, Zea mays subsp. mays; identical to SEQ ID NO: 25470
  peptide (1)..(82): Ceres Seq. ID no. 12595682
  misc_feature (23)..(63): Pfam Name: Pfam Description:  AN1-like Zinc finger
  misc_feature (1)..(82): NCBI GI NO: 35187687 NR Description: zinc-finger protein
  misc_feature (1)..(82): NCBI GI NO: 11361253 NR Description: hypothetical protein p85RF
  misc_feature (1)..(82): NCBI GI NO: 18403408 NR Description: expressed protein; protein id: At1g51200
  misc_feature (1)..(82): NCBI GI NO: 25082726 NR Description: expressed protein [Arabidopsis thaliana]
  misc_feature (1)..(82): NCBI GI NO: 15231686 NR Description: zinc finger - like protein; protein id:At3g52800
  misc_feature (1)..(82): NCBI GI NO: 14596167 NR Description: zinc finger-like protein [Arabidopsis thaliana]
  misc_feature (6)..(82): NCBI GI NO: 28269431 NR Description: putative zinc finger protein
  misc_feature (3)..(82): NCBI GI NO: 30908921 NR Description: putative zinc finger transcription factor ZFP33
  misc_feature (1)..(82): NCBI GI NO: 18404102 NR Description: expressed protein; protein id: At2g36320
  misc_feature (3)..(82): NCBI GI NO: 29791559 NR Description: Unknown (protein for MGC:56057) [Danio rerio]

SEQ ID NO: 36476 - protein, 81 aa, Zea mays subsp. mays; identical to SEQ ID NO: 25471
  peptide (1)..(81): Ceres Seq. ID no. 12595683
  misc_feature (14)..(38): Pfam Name: Pfam Description:  A20-like zinc finger
  misc_feature (1)..(81): NCBI GI NO: 35187687 NR Description: zinc-finger protein
  misc_feature (1)..(81): NCBI GI NO: 11361253 NR Description: hypothetical protein p85RF
  misc_feature (1)..(81): NCBI GI NO: 18403408 NR Description: expressed protein; protein id: At1g51200
  misc_feature (1)..(81): NCBI GI NO: 25082726 NR Description: expressed protein [Arabidopsis thaliana]
  misc_feature (1)..(81): NCBI GI NO: 15231686 NR Description: zinc finger - like protein; protein id:At3g52800
  misc_feature (1)..(81): NCBI GI NO: 14596167 NR Description: zinc finger-like protein [Arabidopsis thaliana]
  misc_feature (2)..(74): NCBI GI NO: 28269431 NR Description: putative zinc finger protein
  misc_feature (5)..(41): NCBI GI NO: 30908921 NR Description: putative zinc finger transcription factor ZFP33
  misc_feature (1)..(81): NCBI GI NO: 18404102 NR Description: expressed protein; protein id: At2g36320
  misc_feature (9)..(81): NCBI GI NO: 29791559 NR Description: Unknown (protein for MGC:56057) [Danio rerio]

SEQ ID NO: 36477 - DNA, 1610 bp, Zea mays subsp. mays
  misc_feature (1)..(1610): Ceres Seq. ID no. 13504118
gttgctctgaaatcatccgtgcattttctttctttttatttggcaagggactttccttctcttttctttctcctaatttatagtggtgaccaaacagataagggacctgcgcgtcgctgagagggaggaagacattggattctacgctggtttcctcggcgcagcatacatgatcggcagaggcgtcgcgtcggtcttctggggcgtggtggcggaccgcgttggccggaagcccgtcatcgcgttctccgtcctctcggtcgtggtgttcaacaccctgttcgggctgagcgccaagtactggatggctatcgctacgaggtttctcctgggcgccctcaacggcttccttgcgccagcgaaggcgtactccatcgaggtctgccggcctgagcagcaggctctgggtatatcggtcgtaagcacagcgtgggggatgggcgtcataatcggcccggccatcggtggctacctcgcgcagcctgccaaacagtatccgcacctgttccatgagaaatcagtgtttggaaggttcccgtacctgttgccatgcctgtgcatctcgttcttcgccgccttggttgtcataagctgcgcatggctcccggagaccctacacaagcacagaggcctggagagagcagcagctgaagtggcagaaggcacgacagcagcagcagcagctcaagaaagcaccccggagccggagccggagccacctaagagcagcctgctcaggaaccggccactcatgtcctccatcgtcacgtactgcgtcttctccctccacgacaccgcgtacgtcgagatattttctctgtggaccgtgagtggcagagatcacggcggcctcagcttcgcgtccaaggacgtcggccaagtcctcaccgtcgctggcgccagtctcctggtgtaccaaatcttcgcctaccgttgggtcaacaagatcctcggcccagtcaactcaacccgagtttcgtcggcgctatccataccgataatcgccgcttaccccttcatgacgcgcttgtcgggaataaggcttggtgtgcctctctacgtcgcggcgatgctcaaaagcgtcctcgccatcaccagagtcaccggcacatcgctcctgcagaacaacgctgtgccacaggagcagaggggcgctgcgaacgggatagctacgacggcgatgtctctgtccaaggcgttcgctccggccgtggccggcatcttgttctcgtgggcacagaagcgccagcatgccgcgttctttccaggtgaccagatggtgtttctgctcctgaatctgacggaggtcatcgggctcgtgctcaccttcaagcctttcctcgcggttccccagcagtacaaacagtgaaagcggtgctgcgtgcgtgcgtgctctgcatggatactatagagaggtagctagctgctagccagtgtgtgtgggcgagagcgagacgagggagatggacatgtcaagtagaagcagaggatatgatgtcattatacatatttactttgcgagatatgtagttcctcatgagtcttcgctgtgcggttttctaaaaaaaaattgagataaagttggtctctcaattatatggtgcattccg

SEQ ID NO: 36478 - protein, 399 aa, Zea mays subsp. mays
  peptide (1)..(399): Ceres Seq. ID no. 13504119
  misc_feature (1)..(399): NCBI GI NO: 23452819 NR Description: major facilitator superfamily antiporter
  misc_feature (1)..(398): NCBI GI NO: 23452823 NR Description: major facilitator superfamily antiporter
  misc_feature (1)..(396): NCBI GI NO: 30684565 NR Description: transporter-related protein [Arabidopsis thaliana]
  misc_feature (1)..(394): NCBI GI NO: 23452821 NR Description: major facilitator superfamily antiporter
  misc_feature (1)..(396): NCBI GI NO: 20260160 NR Description: transporter-like protein [Arabidopsis thaliana]
  misc_feature (1)..(396): NCBI GI NO: 22326785 NR Description: transporter - related [Arabidopsis thaliana]
  misc_feature (1)..(392): NCBI GI NO: 15229781 NR Description: transporter - related [Arabidopsis thaliana]
  misc_feature (1)..(396): NCBI GI NO: 30684567 NR Description: transporter-related protein [Arabidopsis thaliana]
  misc_feature (1)..(368): NCBI GI NO: 10177340 NR Description: transporter-like protein [Arabidopsis thaliana]
  misc_feature (1)..(396): NCBI GI NO: 21555230 NR Description: transporter-like protein [Arabidopsis thaliana]
MIGRGVASVFWGVVADRVGRKPVIAFSVLSVVVFNTLFGLSAKYWMAIATRFLLGALNGFLAPAKAYSIEVCRPEQQALGISVVSTAWGMGVIIGPAIGGYLAQPAKQYPHLFHEKSVFGRFPYLLPCLCISFFAALVVISCAWLPETLHKHRGLERAAAEVAEGTTAAAAAQESTPEPEPEPPKSSLLRNRPLMSSIVTYCVFSLHDTAYVEIFSLWTVSGRDHGGLSFASKDVGQVLTVAGASLLVYQIFAYRWVNKILGPVNSTRVSSALSIPIIAAYPFMTRLSGIRLGVPLYVAAMLKSVLAITRVTGTSLLQNNAVPQEQRGAANGIATTAMSLSKAFAPAVAGILFSWAQKRQHAAFFPGDQMVFLLLNLTEVIGLVLTFKPFLAVPQQYKQ

SEQ ID NO: 36479 - protein, 354 aa, Zea mays subsp. mays
  peptide (1)..(354): Ceres Seq. ID no. 13504120
  misc_feature (1)..(354): NCBI GI NO: 23452819 NR Description: major facilitator superfamily antiporter
  misc_feature (1)..(353): NCBI GI NO: 23452823 NR Description: major facilitator superfamily antiporter
  misc_feature (1)..(351): NCBI GI NO: 30684565 NR Description: transporter-related protein [Arabidopsis thaliana]
  misc_feature (1)..(349): NCBI GI NO: 23452821 NR Description: major facilitator superfamily antiporter
  misc_feature (1)..(351): NCBI GI NO: 20260160 NR Description: transporter-like protein [Arabidopsis thaliana]
  misc_feature (1)..(351): NCBI GI NO: 22326785 NR Description: transporter - related [Arabidopsis thaliana]
  misc_feature (1)..(347): NCBI GI NO: 15229781 NR Description: transporter - related [Arabidopsis thaliana]
  misc_feature (1)..(351): NCBI GI NO: 30684567 NR Description: transporter-related protein [Arabidopsis thaliana]
  misc_feature (1)..(323): NCBI GI NO: 10177340 NR Description: transporter-like protein [Arabidopsis thaliana]
  misc_feature (1)..(351): NCBI GI NO: 21555230 NR Description: transporter-like protein [Arabidopsis thaliana]
MAIATRFLLGALNGFLAPAKAYSIEVCRPEQQALGISVVSTAWGMGVIIGPAIGGYLAQPAKQYPHLFHEKSVFGRFPYLLPCLCISFFAALVVISCAWLPETLHKHRGLERAAAEVAEGTTAAAAAQESTPEPEPEPPKSSLLRNRPLMSSIVTYCVFSLHDTAYVEIFSLWTVSGRDHGGLSFASKDVGQVLTVAGASLLVYQIFAYRWVNKILGPVNSTRVSSALSIPIIAAYPFMTRLSGIRLGVPLYVAAMLKSVLAITRVTGTSLLQNNAVPQEQRGAANGIATTAMSLSKAFAPAVAGILFSWAQKRQHAAFFPGDQMVFLLLNLTEVIGLVLTFKPFLAVPQQYKQ

SEQ ID NO: 36480 - protein, 310 aa, Zea mays subsp. mays
  peptide (1)..(310): Ceres Seq. ID no. 13504121
  misc_feature (1)..(310): NCBI GI NO: 23452819 NR Description: major facilitator superfamily antiporter
  misc_feature (1)..(309): NCBI GI NO: 23452823 NR Description: major facilitator superfamily antiporter
  misc_feature (1)..(307): NCBI GI NO: 30684565 NR Description: transporter-related protein [Arabidopsis thaliana]
  misc_feature (1)..(305): NCBI GI NO: 23452821 NR Description: major facilitator superfamily antiporter
  misc_feature (1)..(307): NCBI GI NO: 20260160 NR Description: transporter-like protein [Arabidopsis thaliana]
  misc_feature (1)..(307): NCBI GI NO: 22326785 NR Description: transporter - related [Arabidopsis thaliana]
  misc_feature (1)..(303): NCBI GI NO: 15229781 NR Description: transporter - related [Arabidopsis thaliana]
  misc_feature (1)..(307): NCBI GI NO: 30684567 NR Description: transporter-related protein [Arabidopsis thaliana]
  misc_feature (1)..(279): NCBI GI NO: 10177340 NR Description: transporter-like protein [Arabidopsis thaliana]
  misc_feature (1)..(307): NCBI GI NO: 21555230 NR Description: transporter-like protein [Arabidopsis thaliana]
MGVIIGPAIGGYLAQPAKQYPHLFHEKSVFGRFPYLLPCLCISFFAALVVISCAWLPETLHKHRGLERAAAEVAEGTTAAAAAQESTPEPEPEPPKSSLLRNRPLMSSIVTYCVFSLHDTAYVEIFSLWTVSGRDHGGLSFASKDVGQVLTVAGASLLVYQIFAYRWVNKILGPVNSTRVSSALSIPIIAAYPFMTRLSGIRLGVPLYVAAMLKSVLAITRVTGTSLLQNNAVPQEQRGAANGIATTAMSLSKAFAPAVAGILFSWAQKRQHAAFFPGDQMVFLLLNLTEVIGLVLTFKPFLAVPQQYKQ

SEQ ID NO: 36481 - DNA, 903 bp, Zea mays subsp. mays
  misc_feature (1)..(903): Ceres Seq. ID no. 12469489
  misc_feature (857)..(857): n is a, c, t, g, unknown, or other
  misc_feature (599)..(599): n is a, c, t, g, unknown, or other
  misc_feature (596)..(596): n is a, c, t, g, unknown, or other
  misc_feature (717)..(717): n is a, c, t, g, unknown, or other
gtggcgggatcggatcggatcggatcgacacccagccagcgcgtggtgagtagaacacccccaagaggccaggactgagactgaccatgggagaagcgtgcagggacgcggcggctgcgggccagcagctgcggcaggacgaagagggcggaggaggagggcgtcacgcggagaaggagctcgtcggtgacccaataacccacgactcggtcgtctcggcgaagctgtacgaggacgtgccggcgacgccgatgatggcgctcaaccacatctcccgcctgtgcgaatccgtcgacgcgtccgtccggttctacgtcaaggcgctcggcttcgtgctcatccagcgcccgccggcgctcgacttctccggcgcatggctcttcaactacggcgtgggtatccacttcgtgcagcgcgacgacgcgcggcgggcccccaacgtgaggccggaggaggcggagctggaccccatggacaaccacgtgtcgttccagtgcgaggacatgggcgccatggagcggcggctgcgggagatgcgcgtgcggtacatgaagcggaccatcaacgaggaggaagggtcgcccatcgaccagctnttnttcagggacccggacggcttcatgatcgagatctgcaactgcgagaacctggagctcgtccccgccggcgccttcggccgcctcagactgccccgcgaccgccacaacccgcccgtgngcatggtcgccggcagcgacgagtagagggggagggggctttcgcgtccacgtgaccctccgccctacaaggccagcaccacaggccgggggaaatagtttgtggctcatataatcgccgcgggcgcttatgctggattntgggccgagttccagttttgaattcgaatttgtgctagttttggtt

SEQ ID NO: 36482 - protein, 218 aa, Zea mays subsp. mays
  peptide (1)..(218): Ceres Seq. ID no. 12469490
  misc_feature (1)..(218): NCBI GI NO: 34395261 NR Description: glyoxalase family-like protein
  misc_feature (1)..(218): NCBI GI NO: 34899038 NR Description: hypothetical protein~similar to Arabidopsisthaliana chromosome 2
  misc_feature (55)..(217): NCBI GI NO: 15529260 NR Description: At2g28420/T1B3.6 [Arabidopsis thaliana]
  misc_feature (55)..(217): NCBI GI NO: 18401734 NR Description: expressed protein; protein id: At2g28420
  misc_feature (53)..(209): NCBI GI NO: 34910246 NR Description: OSJNBa0089K24.9
  misc_feature (56)..(198): NCBI GI NO: 18394235 NR Description: expressed protein; protein id: At1g15380
  misc_feature (49)..(198): NCBI GI NO: 18412683 NR Description: expressed protein; protein id: At1g80160
  misc_feature (49)..(198): NCBI GI NO: 25406639 NR Description: hypothetical protein F18B13.24
  misc_feature (170)..(170): Xaa is any aa, unknown or other
  misc_feature (171)..(171): Xaa is any aa, unknown or other
  misc_feature (211)..(211): Xaa is any aa, unknown or other
MGEACRDAAAAGQQLRQDEEGGGGGRHAEKELVGDPITHDSVVSAKLYEDVPATPMMALNHISRLCESVDASVRFYVKALGFVLIQRPPALDFSGAWLFNYGVGIHFVQRDDARRAPNVRPEEAELDPMDNHVSFQCEDMGAMERRLREMRVRYMKRTINEEEGSPIDQXXFRDPDGFMIEICNCENLELVPAGAFGRLRLPRDRHNPPVXMVAGSDE

SEQ ID NO: 36483 - protein, 163 aa, Zea mays subsp. mays
  peptide (1)..(163): Ceres Seq. ID no. 12469491
  misc_feature (1)..(163): NCBI GI NO: 34395261 NR Description: glyoxalase family-like protein
  misc_feature (1)..(163): NCBI GI NO: 34899038 NR Description: hypothetical protein~similar to Arabidopsisthaliana chromosome 2
  misc_feature (1)..(162): NCBI GI NO: 15529260 NR Description: At2g28420/T1B3.6 [Arabidopsis thaliana]
  misc_feature (1)..(162): NCBI GI NO: 18401734 NR Description: expressed protein; protein id: At2g28420
  misc_feature (1)..(154): NCBI GI NO: 34910246 NR Description: OSJNBa0089K24.9
  misc_feature (1)..(143): NCBI GI NO: 18394235 NR Description: expressed protein; protein id: At1g15380
  misc_feature (1)..(143): NCBI GI NO: 18412683 NR Description: expressed protein; protein id: At1g80160
  misc_feature (1)..(143): NCBI GI NO: 25406639 NR Description: hypothetical protein F18B13.24
  misc_feature (115)..(115): Xaa is any aa, unknown or other
  misc_feature (116)..(116): Xaa is any aa, unknown or other
  misc_feature (156)..(156): Xaa is any aa, unknown or other
MMALNHISRLCESVDASVRFYVKALGFVLIQRPPALDFSGAWLFNYGVGIHFVQRDDARRAPNVRPEEAELDPMDNHVSFQCEDMGAMERRLREMRVRYMKRTINEEEGSPIDQXXFRDPDGFMIEICNCENLELVPAGAFGRLRLPRDRHNPPVXMVAGSDE

SEQ ID NO: 36484 - protein, 162 aa, Zea mays subsp. mays
  peptide (1)..(162): Ceres Seq. ID no. 12469492
  misc_feature (1)..(162): NCBI GI NO: 34395261 NR Description: glyoxalase family-like protein
  misc_feature (1)..(162): NCBI GI NO: 34899038 NR Description: hypothetical protein~similar to Arabidopsisthaliana chromosome 2
  misc_feature (1)..(161): NCBI GI NO: 15529260 NR Description: At2g28420/T1B3.6 [Arabidopsis thaliana]
  misc_feature (1)..(161): NCBI GI NO: 18401734 NR Description: expressed protein; protein id: At2g28420
  misc_feature (1)..(153): NCBI GI NO: 34910246 NR Description: OSJNBa0089K24.9
  misc_feature (1)..(142): NCBI GI NO: 18394235 NR Description: expressed protein; protein id: At1g15380
  misc_feature (1)..(142): NCBI GI NO: 18412683 NR Description: expressed protein; protein id: At1g80160
  misc_feature (1)..(142): NCBI GI NO: 25406639 NR Description: hypothetical protein F18B13.24
  misc_feature (114)..(114): Xaa is any aa, unknown or other
  misc_feature (115)..(115): Xaa is any aa, unknown or other
  misc_feature (155)..(155): Xaa is any aa, unknown or other
MALNHISRLCESVDASVRFYVKALGFVLIQRPPALDFSGAWLFNYGVGIHFVQRDDARRAPNVRPEEAELDPMDNHVSFQCEDMGAMERRLREMRVRYMKRTINEEEGSPIDQXXFRDPDGFMIEICNCENLELVPAGAFGRLRLPRDRHNPPVXMVAGSDE

SEQ ID NO: 36485 - DNA, 505 bp, Zea mays subsp. mays
  misc_feature (1)..(505): Ceres Seq. ID no. 11415248
agaagtttagaagaacggggagggaagcacgcccccaaacgttccgaggtttcgcctctcggagcgcaccaacgccacccggagcgactcgccaccggcgcggagaaggagggcggaggctaggcgatggcggacgagaatgaggctgggaagaaagaggaagaggaatttagcacaggccctctgtcagtactaatgatgagtgttaagaacaacacccaggttctcatcaattgccgcaacaacaagaagctgcttggccgggttcgtgcttttgatcgccactgtaacatggtgctcgagaacgtgcgggagatgtggacagaggtccccaagactggcaagggcaaaaagaaggctctgcctgtgaacaaggatagattcatcagcaagatgttcctcaggggcgactcggtcatcatcgtgctgaggaaccccaagtgacagcccaaccggaagccaggtctctgttgaaaactgtagcttatgatgtatgttggggatg

SEQ ID NO: 36486 - protein, 105 aa, Zea mays subsp. mays
  peptide (1)..(105): Ceres Seq. ID no. 11415249
  misc_feature (23)..(102): Pfam Name: Pfam Description:  LSM domain
  misc_feature (1)..(105): NCBI GI NO: 18407411 NR Description: putative small nuclear ribonucleoprotein D2
  misc_feature (1)..(105): NCBI GI NO: 21554692 NR Description: small nuclear ribonucleoprotein-like protein
  misc_feature (3)..(105): NCBI GI NO: 30690747 NR Description: small nuclear ribonucleo protein D2 -related
  misc_feature (6)..(104): NCBI GI NO: 4759158 NR Description: small nuclear ribonucleoprotein polypeptide D2
  misc_feature (6)..(104): NCBI GI NO: 21357623 NR Description: CG1249-PA [Drosophila melanogaster]
  misc_feature (6)..(104): NCBI GI NO: 26337731 NR Description: unnamed protein product [Mus musculus]
  misc_feature (6)..(104): NCBI GI NO: 22203734 NR Description: small nuclear ribonucleoprotein D2-like protein
  misc_feature (6)..(104): NCBI GI NO: 27677236 NR Description: similar to Small nuclear ribonucleoprotein Sm D2
  misc_feature (6)..(104): NCBI GI NO: 39592141 NR Description: Hypothetical protein CBG23345
  misc_feature (9)..(104): NCBI GI NO: 34881247 NR Description: similar to SNF2/RAD54 family protein
MADENEAGKKEEEEFSTGPLSVLMMSVKNNTQVLINCRNNKKLLGRVRAFDRHCNMVLENVREMWTEVPKTGKGKKKALPVNKDRFISKMFLRGDSVIIVLRNPK

SEQ ID NO: 36487 - protein, 82 aa, Zea mays subsp. mays; identical to SEQ ID NO: 34174
  peptide (1)..(82): Ceres Seq. ID no. 11415250
  misc_feature (1)..(79): Pfam Name: Pfam Description:  LSM domain
  misc_feature (1)..(82): NCBI GI NO: 18407411 NR Description: putative small nuclear ribonucleoprotein D2
  misc_feature (1)..(82): NCBI GI NO: 21554692 NR Description: small nuclear ribonucleoprotein-like protein
  misc_feature (1)..(82): NCBI GI NO: 30690747 NR Description: small nuclear ribonucleo protein D2 -related
  misc_feature (1)..(81): NCBI GI NO: 4759158 NR Description: small nuclear ribonucleoprotein polypeptide D2
  misc_feature (1)..(81): NCBI GI NO: 21357623 NR Description: CG1249-PA [Drosophila melanogaster]
  misc_feature (1)..(81): NCBI GI NO: 26337731 NR Description: unnamed protein product [Mus musculus]
  misc_feature (1)..(81): NCBI GI NO: 22203734 NR Description: small nuclear ribonucleoprotein D2-like protein
  misc_feature (1)..(81): NCBI GI NO: 27677236 NR Description: similar to Small nuclear ribonucleoprotein Sm D2
  misc_feature (1)..(81): NCBI GI NO: 39592141 NR Description: Hypothetical protein CBG23345
  misc_feature (1)..(81): NCBI GI NO: 34881247 NR Description: similar to SNF2/RAD54 family protein

SEQ ID NO: 36488 - protein, 81 aa, Zea mays subsp. mays; identical to SEQ ID NO: 12232
  peptide (1)..(81): Ceres Seq. ID no. 11415251
  misc_feature (1)..(78): Pfam Name: Pfam Description:  LSM domain
  misc_feature (1)..(81): NCBI GI NO: 18407411 NR Description: putative small nuclear ribonucleoprotein D2
  misc_feature (1)..(81): NCBI GI NO: 21554692 NR Description: small nuclear ribonucleoprotein-like protein
  misc_feature (1)..(81): NCBI GI NO: 30690747 NR Description: small nuclear ribonucleo protein D2 -related
  misc_feature (1)..(80): NCBI GI NO: 4759158 NR Description: small nuclear ribonucleoprotein polypeptide D2
  misc_feature (1)..(80): NCBI GI NO: 21357623 NR Description: CG1249-PA [Drosophila melanogaster]
  misc_feature (1)..(80): NCBI GI NO: 26337731 NR Description: unnamed protein product [Mus musculus]
  misc_feature (1)..(80): NCBI GI NO: 22203734 NR Description: small nuclear ribonucleoprotein D2-like protein
  misc_feature (1)..(80): NCBI GI NO: 27677236 NR Description: similar to Small nuclear ribonucleoprotein Sm D2
  misc_feature (1)..(80): NCBI GI NO: 39592141 NR Description: Hypothetical protein CBG23345
  misc_feature (1)..(80): NCBI GI NO: 34881247 NR Description: similar to SNF2/RAD54 family protein

SEQ ID NO: 36489 - DNA, 431 bp, Zea mays subsp. mays
  misc_feature (1)..(431): Ceres Seq. ID no. 4489669
acaacaagctcgacggaacaactgactagaactagtacgtagaaatccaacactcgggacgaaattaaaagagacgagacgacgcatcatccggsgtggcggcgcaggagggcggcatgaggctggtgtcgcacccgatcgcggcgcacgacgggcggctgccgcggcagtacacggcggaggggcagggcgccaagaaggacatgtcgccgccgctggaatggtacggcgtgcccgagggcgcgcggtcgctggcgctgctggtgcaggacatcgacgccgaccccatcgtgccgtggacgcactgggtggtggccaacatcccgcccgccaccaggggcctccccgaggggttctccggcgccgcgggggcggggccggggcgcgaccagctcggcggactgcaggagggggtcaacgactggaagcag

SEQ ID NO: 36490 - protein, 105 aa, Zea mays subsp. mays
  peptide (1)..(105): Ceres Seq. ID no. 4489670
  misc_feature (1)..(104): NCBI GI NO: 10799810 NR Description: cold-regulated protein
  misc_feature (1)..(104): NCBI GI NO: 26017213 NR Description: cold regulated protein [Triticum aestivum]
  misc_feature (1)..(104): NCBI GI NO: 15240946 NR Description: putative protein; protein id: At5g01300
  misc_feature (13)..(104): NCBI GI NO: 21673435 NR Description: conserved hypothetical protein
  misc_feature (4)..(104): NCBI GI NO: 17548245 NR Description: CONSERVED HYPOTHETICAL PROTEIN
  misc_feature (1)..(102): NCBI GI NO: 15678301 NR Description: conserved protein
  misc_feature (28)..(104): NCBI GI NO: 30248206 NR Description: conserved hypothetical protein
  misc_feature (1)..(104): NCBI GI NO: 23054005 NR Description: hypothetical protein [Geobacter metallireducens]
  misc_feature (15)..(103): NCBI GI NO: 15606477 NR Description: hypothetical protein [Aquifex aeolicus]
  misc_feature (1)..(88): NCBI GI NO: 455168 NR Description: ORF 1
MRLVSHPIAAHDGRLPRQYTAEGQGAKKDMSPPLEWYGVPEGARSLALLVQDIDADPIVPWTHWVVANIPPATRGLPEGFSGAAGAGPGRDQLGGLQEGVNDWKQ

SEQ ID NO: 36491 - protein, 76 aa, Zea mays subsp. mays
  peptide (1)..(76): Ceres Seq. ID no. 4489671
  misc_feature (1)..(75): NCBI GI NO: 10799810 NR Description: cold-regulated protein
  misc_feature (1)..(75): NCBI GI NO: 26017213 NR Description: cold regulated protein [Triticum aestivum]
  misc_feature (1)..(75): NCBI GI NO: 15240946 NR Description: putative protein; protein id: At5g01300
  misc_feature (1)..(75): NCBI GI NO: 21673435 NR Description: conserved hypothetical protein
  misc_feature (1)..(75): NCBI GI NO: 17548245 NR Description: CONSERVED HYPOTHETICAL PROTEIN
  misc_feature (1)..(73): NCBI GI NO: 15678301 NR Description: conserved protein
  misc_feature (1)..(75): NCBI GI NO: 30248206 NR Description: conserved hypothetical protein
  misc_feature (1)..(75): NCBI GI NO: 23054005 NR Description: hypothetical protein [Geobacter metallireducens]
  misc_feature (1)..(74): NCBI GI NO: 15606477 NR Description: hypothetical protein [Aquifex aeolicus]
  misc_feature (1)..(59): NCBI GI NO: 455168 NR Description: ORF 1
MSPPLEWYGVPEGARSLALLVQDIDADPIVPWTHWVVANIPPATRGLPEGFSGAAGAGPGRDQLGGLQEGVNDWKQ

SEQ ID NO: 36492 - protein, 70 aa, Zea mays subsp. mays
  peptide (1)..(70): Ceres Seq. ID no. 4489672
MVRRARGRAVAGAAGAGHRRRPHRAVDALGGGQHPARHQGPPRGVLRRRGGGAGARPARRTAGGGQRLEA

SEQ ID NO: 36493 - DNA, 516 bp, Zea mays subsp. mays
  misc_feature (1)..(516): Ceres Seq. ID no. 13635370
attatcgcgctcaggctcgtgccgctcgtggtcgtacgctgcagcaggcgatcggagcaaactaagaagcgaacaggccgcccgtcgacgccatggcgccggatctggtgaacggcgtgctcaactgggtggggacgccggccatggtggccagcctgctgctcttctacccgccctactatctcttcaagacatgctactccttcctttcctggctcttccccgaggacctcgccggcaaggtcgtcctcatcactggcgcttcctccggcatcggcgagcaactggcctaccagtacgcgctgaatcgggcgtccctcgccctcgtcgcgagaagggagtcgagcctccggcacgtcgccgaccgagcactcgagctcggcgcgcgcgacgtcgtcgtcctcccaggcgacgtctccacccccgacgactgcgacaggttcgttcggaccgcgatcagtcactacgaccgattggaccatctcgtgtgcyatgctggcgtcgcgagcgtcggcg

SEQ ID NO: 36494 - protein, 171 aa, Zea mays subsp. mays
  peptide (1)..(171): Ceres Seq. ID no. 13635371
  misc_feature (164)..(164): Xaa is any aa, unknown or other
LSRSGSCRSWSYAAAGDRSKLRSEQAARRRHGAGSGERRAQLGGDAGHGGQPAALLPALLSLQDMLLLPFLALPRGPRRQGRPHHWRFLRHRRATGLPVRAESGVPRPRREKGVEPPARRRPSTRARRARRRRPPRRRLHPRRLRQVRSDRDQSLRPIGPSRVXCWRRERR

SEQ ID NO: 36495 - protein, 141 aa, Zea mays subsp. mays
  peptide (1)..(141): Ceres Seq. ID no. 13635372
  misc_feature (2)..(140): NCBI GI NO: 21742781 NR Description: OSJNBa0055C08.3
  misc_feature (4)..(140): NCBI GI NO: 15824408 NR Description: steroleosin [Sesamum indicum]
  misc_feature (4)..(140): NCBI GI NO: 18423187 NR Description: short-chain dehydrogenase/reductase family protein
  misc_feature (4)..(137): NCBI GI NO: 15232777 NR Description: short-chain dehydrogenase/reductase family protein
  misc_feature (4)..(137): NCBI GI NO: 15232779 NR Description: short-chain dehydrogenase/reductase family protein
  misc_feature (4)..(132): NCBI GI NO: 21311775 NR Description: steroleosin-B [Sesamum indicum]
  misc_feature (4)..(138): NCBI GI NO: 8777392 NR Description: 11-beta-hydroxysteroid dehydrogenase-like
  misc_feature (4)..(138): NCBI GI NO: 15241203 NR Description: short-chain dehydrogenase/reductase family protein
  misc_feature (4)..(138): NCBI GI NO: 15241261 NR Description: short-chain dehydrogenase/reductase family protein
  misc_feature (4)..(137): NCBI GI NO: 15234888 NR Description: short-chain dehydrogenase/reductase family protein
  misc_feature (134)..(134): Xaa is any aa, unknown or other
MAPDLVNGVLNWVGTPAMVASLLLFYPPYYLFKTCYSFLSWLFPEDLAGKVVLITGASSGIGEQLAYQYALNRASLALVARRESSLRHVADRALELGARDVVVLPGDVSTPDDCDRFVRTAISHYDRLDHLVCXAGVASVG

SEQ ID NO: 36496 - protein, 124 aa, Zea mays subsp. mays
  peptide (1)..(124): Ceres Seq. ID no. 13635373
  misc_feature (1)..(123): NCBI GI NO: 21742781 NR Description: OSJNBa0055C08.3
  misc_feature (1)..(123): NCBI GI NO: 15824408 NR Description: steroleosin [Sesamum indicum]
  misc_feature (1)..(123): NCBI GI NO: 18423187 NR Description: short-chain dehydrogenase/reductase family protein
  misc_feature (1)..(120): NCBI GI NO: 15232777 NR Description: short-chain dehydrogenase/reductase family protein
  misc_feature (1)..(120): NCBI GI NO: 15232779 NR Description: short-chain dehydrogenase/reductase family protein
  misc_feature (1)..(115): NCBI GI NO: 21311775 NR Description: steroleosin-B [Sesamum indicum]
  misc_feature (1)..(121): NCBI GI NO: 8777392 NR Description: 11-beta-hydroxysteroid dehydrogenase-like
  misc_feature (1)..(121): NCBI GI NO: 15241203 NR Description: short-chain dehydrogenase/reductase family protein
  misc_feature (1)..(121): NCBI GI NO: 15241261 NR Description: short-chain dehydrogenase/reductase family protein
  misc_feature (1)..(120): NCBI GI NO: 15234888 NR Description: short-chain dehydrogenase/reductase family protein
  misc_feature (117)..(117): Xaa is any aa, unknown or other
MVASLLLFYPPYYLFKTCYSFLSWLFPEDLAGKVVLITGASSGIGEQLAYQYALNRASLALVARRESSLRHVADRALELGARDVVVLPGDVSTPDDCDRFVRTAISHYDRLDHLVCXAGVASVG

SEQ ID NO: 36497 - DNA, 846 bp, Zea mays subsp. mays
  misc_feature (1)..(846): Ceres Seq. ID no. 12348321
atccgtagcgttccattccattccatcccatctccctcctcgcctacggcttcttccaccgcggcatcgtgcccggcctctgcttcggcgcgggcctggggattacgctgttcggcatggcctacatgttcgtccacgacggcctggtccaccgccgctttccggtcggccccatcgccgacgtgccctacttccgccgagtggctgcctcgcacaagatacaccacatggacaagttcggcggcgtcccgtatgggctcttcctgggaccaaaggagctggaggaggttggtggcctggacgagcttgttagcagtccggtgagtgaagctactgatactgaagacgcaggagaagaaaagacgcgtccagttgtatgcgttgtccgaacaagcgtgttcatgggccagagtgtgccaaatgagttctagctttaggcgagtgggccaaatgagtgtgggctgcgtcccagggtagtataagtactatgagtctgtaataatcaggacaagaagaatttagcatccagtagctaacagagctggaaaaggagctcgcgcgaaccagaagggccatctgatggattcgtacatggagctggaggaggttgtgagtccggcgcggcgagctcctccgcgcgctccgtggtttttgttttttgttttggtcgcttttttgttgatttcattgtcttgtttggtactggagggttggcgaatcgattttggatgcactggcgtagatgttggctgtccacttgccctgcatttcgaatggtctgggaaggcacggttcgtacatggaaaatgtccggtgccgtggaattactattgttttgtttgctgc

SEQ ID NO: 36498 - protein, 107 aa, Zea mays subsp. mays
  peptide (1)..(107): Ceres Seq. ID no. 12348322
IRSVPFHSIPSPSSPTASSTAASCPASASARAWGLRCSAWPTCSSTTAWSTAAFRSAPSPTCPTSAEWLPRTRYTTWTSSAASRMGSSWDQRSWRRLVAWTSLLAVR

SEQ ID NO: 36499 - protein, 104 aa, Zea mays subsp. mays
  peptide (1)..(104): Ceres Seq. ID no. 12348323
  misc_feature (1)..(64): Pfam Name: Pfam Description:  Carotene hydroxylase
  misc_feature (1)..(64): NCBI GI NO: 32488500 NR Description: OSJNBa0011J08.7
  misc_feature (1)..(64): NCBI GI NO: 5870600 NR Description: beta-carotene hydroxylase
  misc_feature (1)..(64): NCBI GI NO: 9988836 NR Description: beta-carotene hydroxylase [Citrus unshiu]
  misc_feature (1)..(64): NCBI GI NO: 11245486 NR Description: beta-carotene hydroxylase [Citrus unshiu]
  misc_feature (1)..(64): NCBI GI NO: 9968545 NR Description: beta-carotene hydroxylase
  misc_feature (1)..(83): NCBI GI NO: 33145986 NR Description: beta-carotene hydroxylase [Crocus sativus]
  misc_feature (1)..(64): NCBI GI NO: 37536402 NR Description: putative beta-carotene hydroxylase
  misc_feature (1)..(64): NCBI GI NO: 2956717 NR Description: beta-carotene hydroxylase 2 [Capsicum annuum]
  misc_feature (1)..(64): NCBI GI NO: 9971820 NR Description: beta hydroxylase [Tagetes erecta]
  misc_feature (1)..(64): NCBI GI NO: 1575296 NR Description: beta-carotene hydroxylase [Arabidopsis thaliana]
MAYMFVHDGLVHRRFPVGPIADVPYFRRVAASHKIHHMDKFGGVPYGLFLGPKELEEVGGLDELVSSPVSEATDTEDAGEEKTRPVVCVVRTSVFMGQSVPNEF

SEQ ID NO: 36500 - protein, 103 aa, Zea mays subsp. mays
  peptide (1)..(103): Ceres Seq. ID no. 12348324
SVAFHSIPSHLPPRLRLLPPRHRARPLLRRGPGDYAVRHGLHVRPRRPGPPPLSGRPHRRRALLPPSGCLAQDTPHGQVRRRPVWALPGTKGAGGGWWPGRAC

SEQ ID NO: 36501 - DNA, 2328 bp, Zea mays subsp. mays; identical to SEQ ID NO: 36126
  misc_feature (1)..(2328): Ceres Seq. ID no. 13635296
  misc_feature (2299)..(2299): n is a, c, t, g, unknown, or other

SEQ ID NO: 36502 - protein, 676 aa, Zea mays subsp. mays; identical to SEQ ID NO: 36127
  peptide (1)..(676): Ceres Seq. ID no. 15220344
  misc_feature (324)..(517): Pfam Name: Pfam Description:  ATP synthase alpha/beta family
  misc_feature (107)..(674): NCBI GI NO: 137460 NR Description: Vacuolar ATP synthase catalytic subunit A
  misc_feature (107)..(675): NCBI GI NO: 11527563 NR Description: vacuolar proton-ATPase
  misc_feature (107)..(674): NCBI GI NO: 401322 NR Description: Vacuolar ATP synthase catalytic subunit A
  misc_feature (107)..(674): NCBI GI NO: 3169287 NR Description: vacuolar H+-ATPase catalytic subunit
  misc_feature (107)..(674): NCBI GI NO: 2506211 NR Description: Vacuolar ATP synthase catalytic subunit A
  misc_feature (107)..(674): NCBI GI NO: 2493122 NR Description: Vacuolar ATP synthase catalytic subunit A
  misc_feature (107)..(674): NCBI GI NO: 12585490 NR Description: Vacuolar ATP synthase catalytic subunit A
  misc_feature (107)..(674): NCBI GI NO: 15982954 NR Description: V-ATPase catalytic subunit A [Prunus persica]
  misc_feature (107)..(674): NCBI GI NO: 27883932 NR Description: vacuolar H+-ATPase A1 subunit isoform
  misc_feature (107)..(674): NCBI GI NO: 27884018 NR Description: vacuolar H+-ATPase A2 subunit isoform
  misc_feature (160)..(160): Xaa is any aa, unknown or other
  misc_feature (436)..(436): Xaa is any aa, unknown or other
  misc_feature (448)..(448): Xaa is any aa, unknown or other
  misc_feature (450)..(450): Xaa is any aa, unknown or other
  misc_feature (457)..(457): Xaa is any aa, unknown or other
  misc_feature (465)..(465): Xaa is any aa, unknown or other
  misc_feature (469)..(469): Xaa is any aa, unknown or other
  misc_feature (479)..(479): Xaa is any aa, unknown or other
  misc_feature (519)..(519): Xaa is any aa, unknown or other
  misc_feature (521)..(521): Xaa is any aa, unknown or other
  misc_feature (523)..(523): Xaa is any aa, unknown or other
  misc_feature (524)..(524): Xaa is any aa, unknown or other
  misc_feature (536)..(536): Xaa is any aa, unknown or other
  misc_feature (545)..(545): Xaa is any aa, unknown or other
  misc_feature (555)..(555): Xaa is any aa, unknown or other
  misc_feature (564)..(564): Xaa is any aa, unknown or other
  misc_feature (570)..(570): Xaa is any aa, unknown or other
  misc_feature (571)..(571): Xaa is any aa, unknown or other
  misc_feature (581)..(581): Xaa is any aa, unknown or other
  misc_feature (649)..(649): Xaa is any aa, unknown or other
  misc_feature (660)..(660): Xaa is any aa, unknown or other
  misc_feature (661)..(661): Xaa is any aa, unknown or other
  misc_feature (662)..(662): Xaa is any aa, unknown or other
  misc_feature (676)..(676): Xaa is any aa, unknown or other

SEQ ID NO: 36503 - protein, 601 aa, Zea mays subsp. mays; identical to SEQ ID NO: 36128
  peptide (1)..(601): Ceres Seq. ID no. 15220345
  misc_feature (249)..(442): Pfam Name: Pfam Description:  ATP synthase alpha/beta family
  misc_feature (32)..(599): NCBI GI NO: 137460 NR Description: Vacuolar ATP synthase catalytic subunit A
  misc_feature (32)..(600): NCBI GI NO: 11527563 NR Description: vacuolar proton-ATPase
  misc_feature (32)..(599): NCBI GI NO: 401322 NR Description: Vacuolar ATP synthase catalytic subunit A
  misc_feature (32)..(599): NCBI GI NO: 3169287 NR Description: vacuolar H+-ATPase catalytic subunit
  misc_feature (32)..(599): NCBI GI NO: 2506211 NR Description: Vacuolar ATP synthase catalytic subunit A
  misc_feature (32)..(599): NCBI GI NO: 2493122 NR Description: Vacuolar ATP synthase catalytic subunit A
  misc_feature (32)..(599): NCBI GI NO: 12585490 NR Description: Vacuolar ATP synthase catalytic subunit A
  misc_feature (32)..(599): NCBI GI NO: 15982954 NR Description: V-ATPase catalytic subunit A [Prunus persica]
  misc_feature (32)..(599): NCBI GI NO: 27883932 NR Description: vacuolar H+-ATPase A1 subunit isoform
  misc_feature (32)..(599): NCBI GI NO: 27884018 NR Description: vacuolar H+-ATPase A2 subunit isoform
  misc_feature (85)..(85): Xaa is any aa, unknown or other
  misc_feature (361)..(361): Xaa is any aa, unknown or other
  misc_feature (373)..(373): Xaa is any aa, unknown or other
  misc_feature (375)..(375): Xaa is any aa, unknown or other
  misc_feature (382)..(382): Xaa is any aa, unknown or other
  misc_feature (390)..(390): Xaa is any aa, unknown or other
  misc_feature (394)..(394): Xaa is any aa, unknown or other
  misc_feature (404)..(404): Xaa is any aa, unknown or other
  misc_feature (444)..(444): Xaa is any aa, unknown or other
  misc_feature (446)..(446): Xaa is any aa, unknown or other
  misc_feature (448)..(448): Xaa is any aa, unknown or other
  misc_feature (449)..(449): Xaa is any aa, unknown or other
  misc_feature (461)..(461): Xaa is any aa, unknown or other
  misc_feature (470)..(470): Xaa is any aa, unknown or other
  misc_feature (480)..(480): Xaa is any aa, unknown or other
  misc_feature (489)..(489): Xaa is any aa, unknown or other
  misc_feature (495)..(495): Xaa is any aa, unknown or other
  misc_feature (496)..(496): Xaa is any aa, unknown or other
  misc_feature (506)..(506): Xaa is any aa, unknown or other
  misc_feature (574)..(574): Xaa is any aa, unknown or other
  misc_feature (585)..(585): Xaa is any aa, unknown or other
  misc_feature (586)..(586): Xaa is any aa, unknown or other
  misc_feature (587)..(587): Xaa is any aa, unknown or other
  misc_feature (601)..(601): Xaa is any aa, unknown or other

SEQ ID NO: 36504 - protein, 589 aa, Zea mays subsp. mays; identical to SEQ ID NO: 36129
  peptide (1)..(589): Ceres Seq. ID no. 15220346
  misc_feature (237)..(430): Pfam Name: Pfam Description:  ATP synthase alpha/beta family
  misc_feature (20)..(587): NCBI GI NO: 137460 NR Description: Vacuolar ATP synthase catalytic subunit A
  misc_feature (20)..(588): NCBI GI NO: 11527563 NR Description: vacuolar proton-ATPase
  misc_feature (20)..(587): NCBI GI NO: 401322 NR Description: Vacuolar ATP synthase catalytic subunit A
  misc_feature (20)..(587): NCBI GI NO: 3169287 NR Description: vacuolar H+-ATPase catalytic subunit
  misc_feature (20)..(587): NCBI GI NO: 2506211 NR Description: Vacuolar ATP synthase catalytic subunit A
  misc_feature (20)..(587): NCBI GI NO: 2493122 NR Description: Vacuolar ATP synthase catalytic subunit A
  misc_feature (20)..(587): NCBI GI NO: 12585490 NR Description: Vacuolar ATP synthase catalytic subunit A
  misc_feature (20)..(587): NCBI GI NO: 15982954 NR Description: V-ATPase catalytic subunit A [Prunus persica]
  misc_feature (20)..(587): NCBI GI NO: 27883932 NR Description: vacuolar H+-ATPase A1 subunit isoform
  misc_feature (20)..(587): NCBI GI NO: 27884018 NR Description: vacuolar H+-ATPase A2 subunit isoform
  misc_feature (73)..(73): Xaa is any aa, unknown or other
  misc_feature (349)..(349): Xaa is any aa, unknown or other
  misc_feature (361)..(361): Xaa is any aa, unknown or other
  misc_feature (363)..(363): Xaa is any aa, unknown or other
  misc_feature (370)..(370): Xaa is any aa, unknown or other
  misc_feature (378)..(378): Xaa is any aa, unknown or other
  misc_feature (382)..(382): Xaa is any aa, unknown or other
  misc_feature (392)..(392): Xaa is any aa, unknown or other
  misc_feature (432)..(432): Xaa is any aa, unknown or other
  misc_feature (434)..(434): Xaa is any aa, unknown or other
  misc_feature (436)..(436): Xaa is any aa, unknown or other
  misc_feature (437)..(437): Xaa is any aa, unknown or other
  misc_feature (449)..(449): Xaa is any aa, unknown or other
  misc_feature (458)..(458): Xaa is any aa, unknown or other
  misc_feature (468)..(468): Xaa is any aa, unknown or other
  misc_feature (477)..(477): Xaa is any aa, unknown or other
  misc_feature (483)..(483): Xaa is any aa, unknown or other
  misc_feature (484)..(484): Xaa is any aa, unknown or other
  misc_feature (494)..(494): Xaa is any aa, unknown or other
  misc_feature (562)..(562): Xaa is any aa, unknown or other
  misc_feature (573)..(573): Xaa is any aa, unknown or other
  misc_feature (574)..(574): Xaa is any aa, unknown or other
  misc_feature (575)..(575): Xaa is any aa, unknown or other
  misc_feature (589)..(589): Xaa is any aa, unknown or other

SEQ ID NO: 36505 - DNA, 549 bp, Zea mays subsp. mays
  misc_feature (1)..(549): Ceres Seq. ID no. 13504101
accagagtcaccgcggtcggagttcaaatcccacaatcttcttgtagcacaccactgtcttcgtccaactcggcggcgatgtctgggcgcggcaagggcggcaaggggctgggcaagggcggcgcgaaacgccaccgtaaggttctccgcgacaacatccagggtatcacgaagccggcaatccggaggctggcgaggaggggcggcgtgaagcgtatctccgggcttatctacgaggaaacccgcggcgtgctcaagatcttcctcgagaatgtcatccgcgacgcggtcacctacaccgagcacgctcgccgcaagaccgtcaccgccatggatgttgtgtacgccctcaagcgccagggccgcactctgtacgggttcggtggttgagcgcatctcttccctcgtctgcagcggctgccggtggcgtttcctcagttccctctgccttgcttggcttgatgtagagagttatcagattaaaatatctctgatgtgcttcgttattgggtggaatcatgtgtcccagcagtgctgggaaatcaagat

SEQ ID NO: 36506 - protein, 129 aa, Zea mays subsp. mays
  peptide (1)..(129): Ceres Seq. ID no. 13504102
  misc_feature (21)..(129): NCBI GI NO: 34876368 NR Description: similar to germinal histone H4 gene
  misc_feature (27)..(129): NCBI GI NO: 15226944 NR Description: histone H4 [Arabidopsis thaliana]
  misc_feature (21)..(129): NCBI GI NO: 17540668 NR Description: Histone H4 family member [Caenorhabditis elegans]
  misc_feature (27)..(129): NCBI GI NO: 462243 NR Description: Histone H4
  misc_feature (27)..(129): NCBI GI NO: 1806283 NR Description: Histone H4 homologue [Sesbania rostrata]
  misc_feature (27)..(129): NCBI GI NO: 4504301 NR Description: H4 histone family, member A [Homo sapiens]
  misc_feature (27)..(129): NCBI GI NO: 27692960 NR Description: Similar to germinal histone H4 gene [Mus musculus]
  misc_feature (27)..(129): NCBI GI NO: 27692935 NR Description: Hist1h4i protein [Mus musculus]
  misc_feature (27)..(129): NCBI GI NO: 37590121 NR Description: Hist1h4h protein [Mus musculus]
  misc_feature (27)..(129): NCBI GI NO: 17352498 NR Description: histone H4; Bicoid interacting protein 2; histone
TRVTAVGVQIPQSSCSTPLSSSNSAAMSGRGKGGKGLGKGGAKRHRKVLRDNIQGITKPAIRRLARRGGVKRISGLIYEETRGVLKIFLENVIRDAVTYTEHARRKTVTAMDVVYALKRQGRTLYGFGG

SEQ ID NO: 36507 - protein, 103 aa, Zea mays subsp. mays; identical to SEQ ID NO: 1499
  peptide (1)..(103): Ceres Seq. ID no. 13504103
  misc_feature (1)..(103): NCBI GI NO: 34876368 NR Description: similar to germinal histone H4 gene
  misc_feature (1)..(103): NCBI GI NO: 15226944 NR Description: histone H4 [Arabidopsis thaliana]
  misc_feature (1)..(103): NCBI GI NO: 17540668 NR Description: Histone H4 family member [Caenorhabditis elegans]
  misc_feature (1)..(103): NCBI GI NO: 462243 NR Description: Histone H4
  misc_feature (1)..(103): NCBI GI NO: 1806283 NR Description: Histone H4 homologue [Sesbania rostrata]
  misc_feature (1)..(103): NCBI GI NO: 4504301 NR Description: H4 histone family, member A [Homo sapiens]
  misc_feature (1)..(103): NCBI GI NO: 27692960 NR Description: Similar to germinal histone H4 gene [Mus musculus]
  misc_feature (1)..(103): NCBI GI NO: 27692935 NR Description: Hist1h4i protein [Mus musculus]
  misc_feature (1)..(103): NCBI GI NO: 37590121 NR Description: Hist1h4h protein [Mus musculus]
  misc_feature (1)..(103): NCBI GI NO: 17352498 NR Description: histone H4; Bicoid interacting protein 2; histone

SEQ ID NO: 36508 - protein, 92 aa, Zea mays subsp. mays
  peptide (1)..(92): Ceres Seq. ID no. 13504104
MSSATRSPTPSTLAARPSPPWMLCTPSSARAALCTGSVVERISSLVCSGCRWRFLSSLCLAWLDVESYQIKISLMCFVIGWNHVSQQCWEIK

SEQ ID NO: 36509 - DNA, 924 bp, Zea mays subsp. mays
  misc_feature (1)..(924): Ceres Seq. ID no. 13502490
tcccagctccgcctccctttcctaccttcttccctccgtctcccagctcgcgcaggcaggcgacacagcgacgctaaaaaccctagagcgaggaggcgtgccaggccagcggtttgcgatgacggcaccggcggacaaggggaagaaggccaagaccgatgccgacggcggcgaggagaacgagcaaatcgacggcgcccttgtcttctccatcgagaagctccaggagattcaggacgagctcgagaaggttaatgaggaagcaagtgacaaggttatggaggtggagcagaaatacagtgagattcgcagacctgtctatctcaagaggggtgacattatcaagaccatcccggacttttggctcacagcgtttttgagccatcctctactaagtgagcttctgactgaagaggatcagaagatattcaagtacttggactccattgatgtcgatgattctgatgttaaggcaggatattccatttaccttaacttctctgagaacccgtactttgaagacacaaagcttacaaagacctattcctttgttgatgatggaacaaccacaataaaagcttctcaaattaagtggaaggatggaatgggacctgcaaatggaaatggtattaacaagaagggaaacaagcggccattagtagtggaaagttttttctcctggtttagtgatacagagctcaagagtcttgctgatggtgtgcaagatgaggtggcggagatcatcaaggaagacttgtggcctaatcctttgaagtacttcaacaatgaggttgaagatgaatttgaaggagatgaagaagatgatgacgacgacgacgacgatgataatttggatggtgatgacaatgacgatgatggggaccaggagaactgagccctcgcgtttaggcggggaattatgtg

SEQ ID NO: 36510 - protein, 297 aa, Zea mays subsp. mays
  peptide (1)..(297): Ceres Seq. ID no. 13502491
  misc_feature (71)..(266): Pfam Name: NAP Pfam Description: Nucleosome assembly protein
  misc_feature (40)..(297): NCBI GI NO: 14550112 NR Description: nucleosome/chromatin assembly factor A [Zea mays]
  misc_feature (40)..(288): NCBI GI NO: 14550110 NR Description: nucleosome/chromatin assembly factor A [Zea mays]
  misc_feature (40)..(295): NCBI GI NO: 21739223 NR Description: OSJNBa0072F16.2
  misc_feature (45)..(296): NCBI GI NO: 25354177 NR Description: hypothetical protein F6A14.10
  misc_feature (45)..(296): NCBI GI NO: 18394656 NR Description: expressed protein [Arabidopsis thaliana]
  misc_feature (44)..(295): NCBI GI NO: 15221298 NR Description: SET protein, phospatase 2A inhibitor -related
  misc_feature (45)..(267): NCBI GI NO: 26451105 NR Description: unknown protein [Arabidopsis thaliana]
  misc_feature (40)..(296): NCBI GI NO: 2144100 NR Description: Set beta isoform - rat
  misc_feature (40)..(296): NCBI GI NO: 1711383 NR Description: SET protein
  misc_feature (40)..(297): NCBI GI NO: 28279779 NR Description: Similar to SET translocation
PSSASLSYLLPSVSQLAQAGDTATLKTLERGGVPGQRFAMTAPADKGKKAKTDADGGEENEQIDGALVFSIEKLQEIQDELEKVNEEASDKVMEVEQKYSEIRRPVYLKRGDIIKTIPDFWLTAFLSHPLLSELLTEEDQKIFKYLDSIDVDDSDVKAGYSIYLNFSENPYFEDTKLTKTYSFVDDGTTTIKASQIKWKDGMGPANGNGINKKGNKRPLVVESFFSWFSDTELKSLADGVQDEVAEIIKEDLWPNPLKYFNNEVEDEFEGDEEDDDDDDDDDNLDGDDNDDDGDQEN

SEQ ID NO: 36511 - protein, 258 aa, Zea mays subsp. mays
  peptide (1)..(258): Ceres Seq. ID no. 13502492
  misc_feature (32)..(227): Pfam Name: NAP Pfam Description: Nucleosome assembly protein
  misc_feature (1)..(258): NCBI GI NO: 14550112 NR Description: nucleosome/chromatin assembly factor A [Zea mays]
  misc_feature (1)..(249): NCBI GI NO: 14550110 NR Description: nucleosome/chromatin assembly factor A [Zea mays]
  misc_feature (1)..(256): NCBI GI NO: 21739223 NR Description: OSJNBa0072F16.2
  misc_feature (6)..(257): NCBI GI NO: 25354177 NR Description: hypothetical protein F6A14.10
  misc_feature (6)..(257): NCBI GI NO: 18394656 NR Description: expressed protein [Arabidopsis thaliana]
  misc_feature (5)..(256): NCBI GI NO: 15221298 NR Description: SET protein, phospatase 2A inhibitor -related
  misc_feature (6)..(228): NCBI GI NO: 26451105 NR Description: unknown protein [Arabidopsis thaliana]
  misc_feature (1)..(257): NCBI GI NO: 2144100 NR Description: Set beta isoform - rat
  misc_feature (1)..(257): NCBI GI NO: 1711383 NR Description: SET protein
  misc_feature (1)..(258): NCBI GI NO: 28279779 NR Description: Similar to SET translocation
MTAPADKGKKAKTDADGGEENEQIDGALVFSIEKLQEIQDELEKVNEEASDKVMEVEQKYSEIRRPVYLKRGDIIKTIPDFWLTAFLSHPLLSELLTEEDQKIFKYLDSIDVDDSDVKAGYSIYLNFSENPYFEDTKLTKTYSFVDDGTTTIKASQIKWKDGMGPANGNGINKKGNKRPLVVESFFSWFSDTELKSLADGVQDEVAEIIKEDLWPNPLKYFNNEVEDEFEGDEEDDDDDDDDDNLDGDDNDDDGDQEN

SEQ ID NO: 36512 - protein, 205 aa, Zea mays subsp. mays
  peptide (1)..(205): Ceres Seq. ID no. 13502493
  misc_feature (1)..(174): Pfam Name: NAP Pfam Description: Nucleosome assembly protein
  misc_feature (1)..(205): NCBI GI NO: 14550112 NR Description: nucleosome/chromatin assembly factor A [Zea mays]
  misc_feature (1)..(196): NCBI GI NO: 14550110 NR Description: nucleosome/chromatin assembly factor A [Zea mays]
  misc_feature (1)..(203): NCBI GI NO: 21739223 NR Description: OSJNBa0072F16.2
  misc_feature (1)..(204): NCBI GI NO: 25354177 NR Description: hypothetical protein F6A14.10
  misc_feature (1)..(204): NCBI GI NO: 18394656 NR Description: expressed protein [Arabidopsis thaliana]
  misc_feature (1)..(203): NCBI GI NO: 15221298 NR Description: SET protein, phospatase 2A inhibitor -related
  misc_feature (1)..(175): NCBI GI NO: 26451105 NR Description: unknown protein [Arabidopsis thaliana]
  misc_feature (1)..(204): NCBI GI NO: 2144100 NR Description: Set beta isoform - rat
  misc_feature (1)..(204): NCBI GI NO: 1711383 NR Description: SET protein
  misc_feature (1)..(205): NCBI GI NO: 28279779 NR Description: Similar to SET translocation
MEVEQKYSEIRRPVYLKRGDIIKTIPDFWLTAFLSHPLLSELLTEEDQKIFKYLDSIDVDDSDVKAGYSIYLNFSENPYFEDTKLTKTYSFVDDGTTTIKASQIKWKDGMGPANGNGINKKGNKRPLVVESFFSWFSDTELKSLADGVQDEVAEIIKEDLWPNPLKYFNNEVEDEFEGDEEDDDDDDDDDNLDGDDNDDDGDQEN

SEQ ID NO: 36513 - DNA, 414 bp, Zea mays subsp. mays
  misc_feature (1)..(414): Ceres Seq. ID no. 4489390
actcacctctcgccaaacttcctcttccgagaatgccagattatccactgcggcctcttcctcgtgctcctcctccagtcctcccttcccaccatgattaccacccacctctccccagccctcaagcaccgctccccgtccccgctccactccacctaccactcccaccaccacctccccgtgcacctcccgctccccctcccccgccgccactgccacctcgctaagcccgccgccgccgcctcgccagaccttctcgcgagcatcgagyccgtggcctccgcggcctccgtgctggccgccatcgtgctggtccacgagtcgggccacttcctcgccgcggcgtcccggggcatccacgtctcccagttctccatcggcttcggcccggcgctggcccgcttccgcctcggc

SEQ ID NO: 36514 - protein, 138 aa, Zea mays subsp. mays
  peptide (1)..(138): Ceres Seq. ID no. 4489391
  misc_feature (33)..(137): NCBI GI NO: 29837756 NR Description: unknown protein
  misc_feature (86)..(135): NCBI GI NO: 18402981 NR Description: expressed protein; protein id: At2g32480
  misc_feature (88)..(135): NCBI GI NO: 15010610 NR Description: At1g05140/YUP8H12_25 [Arabidopsis thaliana]
  misc_feature (91)..(91): Xaa is any aa, unknown or other
THLSPNFLFRECQIIHCGLFLVLLLQSSLPTMITTHLSPALKHRSPSPLHSTYHSHHHLPVHLPLPLPRRHCHLAKPAAAASPDLLASIEXVASAASVLAAIVLVHESGHFLAAASRGIHVSQFSIGFGPALARFRLG

SEQ ID NO: 36515 - protein, 107 aa, Zea mays subsp. mays
  peptide (1)..(107): Ceres Seq. ID no. 4489392
  misc_feature (2)..(106): NCBI GI NO: 29837756 NR Description: unknown protein
  misc_feature (55)..(104): NCBI GI NO: 18402981 NR Description: expressed protein; protein id: At2g32480
  misc_feature (57)..(104): NCBI GI NO: 15010610 NR Description: At1g05140/YUP8H12_25 [Arabidopsis thaliana]
  misc_feature (60)..(60): Xaa is any aa, unknown or other
MITTHLSPALKHRSPSPLHSTYHSHHHLPVHLPLPLPRRHCHLAKPAAAASPDLLASIEXVASAASVLAAIVLVHESGHFLAAASRGIHVSQFSIGFGPALARFRLG

SEQ ID NO: 36516 - protein, 74 aa, Zea mays subsp. mays
  peptide (1)..(74): Ceres Seq. ID no. 4489393
  misc_feature (5)..(74): Pfam Name: Pfam Description:  Extensin-like region
  misc_feature (2)..(74): NCBI GI NO: 14017929 NR Description: KIAA1856 protein [Homo sapiens]
  misc_feature (2)..(74): NCBI GI NO: 37538336 NR Description: KIAA1856 protein [Homo sapiens]
  misc_feature (6)..(73): NCBI GI NO: 7484420 NR Description: pherophorin-S - Volvox carteri
  misc_feature (1)..(73): NCBI GI NO: 6523547 NR Description: hydroxyproline-rich glycoprotein DZ-HRGP
  misc_feature (1)..(73): NCBI GI NO: 7484420 NR Description: pherophorin-S - Volvox carteri
  misc_feature (1)..(74): NCBI GI NO: 6523547 NR Description: hydroxyproline-rich glycoprotein DZ-HRGP
  misc_feature (2)..(74): NCBI GI NO: 19263450 NR Description: putative glycine-rich protein
  misc_feature (1)..(74): NCBI GI NO: 226743 NR Description: sulfated surface glycoprotein SSG185
  misc_feature (7)..(73): NCBI GI NO: 6523547 NR Description: hydroxyproline-rich glycoprotein DZ-HRGP
  misc_feature (1)..(73): NCBI GI NO: 21322711 NR Description: pherophorin-dz1 protein
SPLAKLPLPRMPDYPLRPLPRAPPPVLPSHHDYHPPLPSPQAPLPVPAPLHLPLPPPPPRAPPAPPPPPPLPPR

SEQ ID NO: 36517 - DNA, 1864 bp, Zea mays subsp. mays
  misc_feature (1)..(1864): Ceres Seq. ID no. 13502421
tggccatggtgcaaggcgaggagagttcttggaggatggagagggcagcgctgcctctcaaccaggcgctcgcgtacggagtccaagcccacgccgccgccgccgctgcaccgccgacctgcttcctggacttccagcctgcggccgcatccgctgcctacttcgggttcggtgagctggaggaggccctcatccacggtggtggcgccgccagcgccggcggcggcgtcgatccgggcgtgatcatcaagaacgacgtcgcgcaggcaaagtcagcggcaggatatctcgcgggcgctggcaccggcaggccccccacgctggagatcttcccttcgtggccaatgaggcaccaacagcagctgcacagtgggaattcgcagtcagtagggagcaccggcactgactcgagctcagctcagaacacaatgtctcagatggagttggtgtccccagcctcctctgcgccgcggcaggaggtcatgatggtgaccactgatgattacagctacaagccaggcctcgccgctgcgcccgctgctgccgccccgccgagctttcagcagcaccacccgctcccgctgcagctgcacggaggagagggagggggagaccatgacaagaggaagcatggatccacaagaaaagatggcaagttggtagatgccaagacggaacggcggctggcgcagaacagagaggctgcgaggaagagcaggctgaggaagaaggcttacgtgcagcagctcgagactagcaggatcaggcttcagcaggtcgagcatgagctccagagagcacggtcacagggcctgttcgttggagggtgcagcgccgccggggacatgagctctggcgccgccatgttcgacatggagtacgcgcggtggcttgacgacgacaccaagcggctggcggagctccgaggcgggctgcaggcgcacctgctggacggcaacctgggactcatcgtggaggagtgcatgcagcactacgacgagctgttccagctcaaggcggcgctcgcgcgctccgacgtcttccacctcctcaccggctcctgggccacccccgccgagcgctgcttcttctggatgggcggcttccgcccgtccgagctgctcaagatcctgataccgcagctggacccgctgacggagcagcagctgctggggatctgcaatctgcagcagtcgtcggagcaagcggaggaagctctcgcccagggcctgcaccagctgcaccagtccctggccgacacagtcgccgcgggcacgctcaacgacggcgccgccgcccccaactacatgaacatcatggccgtcgcacttgagaagctcgccagcctcgaaaatttctatcaacaggccgacaatctaaggcaccagacgttgcatcagatgcgccggatcctgaccactcggcaggctgcgcggtgcttcctctccattggggagtactacagccgcctcagagctctcagcaacctctgggcttcccgtccccgcgacaacttcatcgggacagagagcctcagccccacagcaacggaactgcaagccctgcaccaccagcagcagaaccagttcgccggattttgaggcctcacctggtgagggagggtgtaaaactttggccgcgagggtggtgttacaaagattagaggttttgagagggagatgcattgtaatgttctatcattaaagtactgagaaagcaacatcactaggcgaaaagggcggggagaaggaattgctgtagtgcgatgttgggtggctcacctgttcatatggctcttgaactgattgaagggttagcaccgcagaatttttgtgcgtgtcaggagagaacaaatcagttacac

SEQ ID NO: 36518 - protein, 532 aa, Zea mays subsp. mays
  peptide (1)..(532): Ceres Seq. ID no. 13502422
  misc_feature (221)..(279): Pfam Name: Pfam Description:  bZIP transcription factor
  misc_feature (2)..(532): NCBI GI NO: 7489717 NR Description: basic leucine zipper protein - maize
  misc_feature (2)..(532): NCBI GI NO: 28630433 NR Description: liguleless2-like protein [Zea mays]
  misc_feature (43)..(458): NCBI GI NO: 34908472 NR Description: putative basic leucine zipper protein
  misc_feature (444)..(532): NCBI GI NO: 34908472 NR Description: putative basic leucine zipper protein
  misc_feature (100)..(532): NCBI GI NO: 30680599 NR Description: bZIP protein [Arabidopsis thaliana]
  misc_feature (217)..(524): NCBI GI NO: 6664324 NR Description: T27G7.2 [Arabidopsis thaliana]
  misc_feature (100)..(524): NCBI GI NO: 6579203 NR Description: T23G18.19 [Arabidopsis thaliana]
  misc_feature (218)..(504): NCBI GI NO: 9759540 NR Description: bZIP transcription factor-like protein
  misc_feature (195)..(503): NCBI GI NO: 17025920 NR Description: bZIP transcription factor [Oryza sativa]
  misc_feature (151)..(504): NCBI GI NO: 30681632 NR Description: bZIP transcription factor family protein
AMVQGEESSWRMERAALPLNQALAYGVQAHAAAAAAPPTCFLDFQPAAASAAYFGFGELEEALIHGGGAASAGGGVDPGVIIKNDVAQAKSAAGYLAGAGTGRPPTLEIFPSWPMRHQQQLHSGNSQSVGSTGTDSSSAQNTMSQMELVSPASSAPRQEVMMVTTDDYSYKPGLAAAPAAAAPPSFQQHHPLPLQLHGGEGGGDHDKRKHGSTRKDGKLVDAKTERRLAQNREAARKSRLRKKAYVQQLETSRIRLQQVEHELQRARSQGLFVGGCSAAGDMSSGAAMFDMEYARWLDDDTKRLAELRGGLQAHLLDGNLGLIVEECMQHYDELFQLKAALARSDVFHLLTGSWATPAERCFFWMGGFRPSELLKILIPQLDPLTEQQLLGICNLQQSSEQAEEALAQGLHQLHQSLADTVAAGTLNDGAAAPNYMNIMAVALEKLASLENFYQQADNLRHQTLHQMRRILTTRQAARCFLSIGEYYSRLRALSNLWASRPRDNFIGTESLSPTATELQALHHQQQNQFAGF

SEQ ID NO: 36519 - protein, 531 aa, Zea mays subsp. mays
  peptide (1)..(531): Ceres Seq. ID no. 13502423
  misc_feature (220)..(278): Pfam Name: Pfam Description:  bZIP transcription factor
  misc_feature (1)..(531): NCBI GI NO: 7489717 NR Description: basic leucine zipper protein - maize
  misc_feature (1)..(531): NCBI GI NO: 28630433 NR Description: liguleless2-like protein [Zea mays]
  misc_feature (42)..(457): NCBI GI NO: 34908472 NR Description: putative basic leucine zipper protein
  misc_feature (443)..(531): NCBI GI NO: 34908472 NR Description: putative basic leucine zipper protein
  misc_feature (99)..(531): NCBI GI NO: 30680599 NR Description: bZIP protein [Arabidopsis thaliana]
  misc_feature (216)..(523): NCBI GI NO: 6664324 NR Description: T27G7.2 [Arabidopsis thaliana]
  misc_feature (99)..(523): NCBI GI NO: 6579203 NR Description: T23G18.19 [Arabidopsis thaliana]
  misc_feature (217)..(503): NCBI GI NO: 9759540 NR Description: bZIP transcription factor-like protein
  misc_feature (194)..(502): NCBI GI NO: 17025920 NR Description: bZIP transcription factor [Oryza sativa]
  misc_feature (150)..(503): NCBI GI NO: 30681632 NR Description: bZIP transcription factor family protein
MVQGEESSWRMERAALPLNQALAYGVQAHAAAAAAPPTCFLDFQPAAASAAYFGFGELEEALIHGGGAASAGGGVDPGVIIKNDVAQAKSAAGYLAGAGTGRPPTLEIFPSWPMRHQQQLHSGNSQSVGSTGTDSSSAQNTMSQMELVSPASSAPRQEVMMVTTDDYSYKPGLAAAPAAAAPPSFQQHHPLPLQLHGGEGGGDHDKRKHGSTRKDGKLVDAKTERRLAQNREAARKSRLRKKAYVQQLETSRIRLQQVEHELQRARSQGLFVGGCSAAGDMSSGAAMFDMEYARWLDDDTKRLAELRGGLQAHLLDGNLGLIVEECMQHYDELFQLKAALARSDVFHLLTGSWATPAERCFFWMGGFRPSELLKILIPQLDPLTEQQLLGICNLQQSSEQAEEALAQGLHQLHQSLADTVAAGTLNDGAAAPNYMNIMAVALEKLASLENFYQQADNLRHQTLHQMRRILTTRQAARCFLSIGEYYSRLRALSNLWASRPRDNFIGTESLSPTATELQALHHQQQNQFAGF

SEQ ID NO: 36520 - protein, 521 aa, Zea mays subsp. mays
  peptide (1)..(521): Ceres Seq. ID no. 13502424
  misc_feature (210)..(268): Pfam Name: Pfam Description:  bZIP transcription factor
  misc_feature (1)..(521): NCBI GI NO: 7489717 NR Description: basic leucine zipper protein - maize
  misc_feature (1)..(521): NCBI GI NO: 28630433 NR Description: liguleless2-like protein [Zea mays]
  misc_feature (32)..(447): NCBI GI NO: 34908472 NR Description: putative basic leucine zipper protein
  misc_feature (433)..(521): NCBI GI NO: 34908472 NR Description: putative basic leucine zipper protein
  misc_feature (89)..(521): NCBI GI NO: 30680599 NR Description: bZIP protein [Arabidopsis thaliana]
  misc_feature (206)..(513): NCBI GI NO: 6664324 NR Description: T27G7.2 [Arabidopsis thaliana]
  misc_feature (89)..(513): NCBI GI NO: 6579203 NR Description: T23G18.19 [Arabidopsis thaliana]
  misc_feature (207)..(493): NCBI GI NO: 9759540 NR Description: bZIP transcription factor-like protein
  misc_feature (184)..(492): NCBI GI NO: 17025920 NR Description: bZIP transcription factor [Oryza sativa]
  misc_feature (140)..(493): NCBI GI NO: 30681632 NR Description: bZIP transcription factor family protein
MERAALPLNQALAYGVQAHAAAAAAPPTCFLDFQPAAASAAYFGFGELEEALIHGGGAASAGGGVDPGVIIKNDVAQAKSAAGYLAGAGTGRPPTLEIFPSWPMRHQQQLHSGNSQSVGSTGTDSSSAQNTMSQMELVSPASSAPRQEVMMVTTDDYSYKPGLAAAPAAAAPPSFQQHHPLPLQLHGGEGGGDHDKRKHGSTRKDGKLVDAKTERRLAQNREAARKSRLRKKAYVQQLETSRIRLQQVEHELQRARSQGLFVGGCSAAGDMSSGAAMFDMEYARWLDDDTKRLAELRGGLQAHLLDGNLGLIVEECMQHYDELFQLKAALARSDVFHLLTGSWATPAERCFFWMGGFRPSELLKILIPQLDPLTEQQLLGICNLQQSSEQAEEALAQGLHQLHQSLADTVAAGTLNDGAAAPNYMNIMAVALEKLASLENFYQQADNLRHQTLHQMRRILTTRQAARCFLSIGEYYSRLRALSNLWASRPRDNFIGTESLSPTATELQALHHQQQNQFAGF

SEQ ID NO: 36521 - DNA, 377 bp, Zea mays subsp. mays
  misc_feature (1)..(377): Ceres Seq. ID no. 13635381
aagaaccctagcgcccgtcctgccgccgctgcagccgccatcgcacggccatgggtatcgatctcgtagccggcggccgcaacaagaagaccaagcgcacggcgcccaagtccgacgatgtctacctcaagctcctcgtcaagctctaccgcttccttgtgcgcaggacaaagagcaacttcaacgccgtgatcctcaagcgcctcttcatgagcaagaccaaccgcccgccgctctcgatgcgccgcctcgtcaggttcatggaggggaagggtgatcagatcgccgtgattgtgggcaccgtgaccgacgacaagaggatcagcgaggtgccggcgatgaaggtctgcgcgctcaggttcactgagacagcgagg

SEQ ID NO: 36522 - protein, 109 aa, Zea mays subsp. mays
  peptide (1)..(109): Ceres Seq. ID no. 13635382
  misc_feature (1)..(108): NCBI GI NO: 34393858 NR Description: putative cytoplasmic ribosomal protein L18
  misc_feature (1)..(108): NCBI GI NO: 34897628 NR Description: cytoplasmic ribosomal protein L18 [Oryza sativa]
  misc_feature (1)..(108): NCBI GI NO: 15241061 NR Description: 60S ribosomal protein L18 (RPL18C)
  misc_feature (1)..(108): NCBI GI NO: 606970 NR Description: cytoplasmic ribosomal protein L18
  misc_feature (1)..(108): NCBI GI NO: 15230011 NR Description: 60S ribosomal protein L18 (RPL18B)
  misc_feature (1)..(108): NCBI GI NO: 28798549 NR Description: 60S ribosomal protein [Medicago sativa]
  misc_feature (4)..(108): NCBI GI NO: 6094021 NR Description: 60S RIBOSOMAL PROTEIN L18
  misc_feature (2)..(108): NCBI GI NO: 7440855 NR Description: ribosomal protein L18
  misc_feature (1)..(108): NCBI GI NO: 4506607 NR Description: ribosomal protein L18; 60S ribosomal protein L18
  misc_feature (1)..(108): NCBI GI NO: 12840700 NR Description: unnamed protein product [Mus musculus]
MGIDLVAGGRNKKTKRTAPKSDDVYLKLLVKLYRFLVRRTKSNFNAVILKRLFMSKTNRPPLSMRRLVRFMEGKGDQIAVIVGTVTDDKRISEVPAMKVCALRFTETAR

SEQ ID NO: 36523 - protein, 91 aa, Zea mays subsp. mays
  peptide (1)..(91): Ceres Seq. ID no. 13635383
RTLAPVLPPLQPPSHGHGYRSRSRRPQQEDQAHGAQVRRCLPQAPRQALPLPCAQDKEQLQRRDPQAPLHEQDQPPAALDAPPRQVHGGEG

SEQ ID NO: 36524 - protein, 56 aa, Zea mays subsp. mays
  peptide (1)..(56): Ceres Seq. ID no. 13635384
  misc_feature (1)..(55): NCBI GI NO: 34393858 NR Description: putative cytoplasmic ribosomal protein L18
  misc_feature (1)..(55): NCBI GI NO: 34897628 NR Description: cytoplasmic ribosomal protein L18 [Oryza sativa]
  misc_feature (1)..(55): NCBI GI NO: 15241061 NR Description: 60S ribosomal protein L18 (RPL18C)
  misc_feature (1)..(55): NCBI GI NO: 606970 NR Description: cytoplasmic ribosomal protein L18
  misc_feature (1)..(55): NCBI GI NO: 15230011 NR Description: 60S ribosomal protein L18 (RPL18B)
  misc_feature (1)..(55): NCBI GI NO: 28798549 NR Description: 60S ribosomal protein [Medicago sativa]
  misc_feature (1)..(55): NCBI GI NO: 6094021 NR Description: 60S RIBOSOMAL PROTEIN L18
  misc_feature (1)..(55): NCBI GI NO: 7440855 NR Description: ribosomal protein L18
  misc_feature (1)..(55): NCBI GI NO: 4506607 NR Description: ribosomal protein L18; 60S ribosomal protein L18
  misc_feature (1)..(55): NCBI GI NO: 12840700 NR Description: unnamed protein product [Mus musculus]
MSKTNRPPLSMRRLVRFMEGKGDQIAVIVGTVTDDKRISEVPAMKVCALRFTETAR

SEQ ID NO: 36525 - DNA, 800 bp, Zea mays subsp. mays
  misc_feature (1)..(800): Ceres Seq. ID no. 13600565
cccaacattagcacaaagaacacaatagaccactgatttcacaatgaaaagggagacaatgccttcatggctagaactgttgcttgcaacacaattctttacgacttgtgctaaccatcttcttgctagtcgcaatgaatgtaacctattttgcacccagtgtgagaccaaaccagctgctttctgtaactattgtcgttcaagtgatcattccacccaccgtgtaatccagataaggcgttcatcgtaccatgacgttgtgagggtgtccgagattgaggatatctttgatgtcagcgatgtgcaaacttatgtaatcaatagtgcaaggattgtattcctgaatgagcggccacaactgcgtgcttctagtgtccccatttgtaaggcacccacatcatcaacacatagctgtgagacatgtagccgtgtgctacttgatgcatttcgcttctgctctcttggatgcaatcttagaggcttaaatatggaagctggtatgcaagctatggttggcaacaaccctcggtccaatggtatggatcatgtggctaggattgacaatgttggttcaagtactacaaatgaccaaaacagctgcaatgacaagaactacgaagaaccaccaccaaaaagggttgctcgtcacagacgcaagggaattccccaacgtgcgccattcttctaatctgaacatcatgacaatgtccagtaaatgttgtgggaaataagaagagataatatttgtcatgggtgaaatgaatgaatgaaataaataaaagaatgaatgaatggcccct

SEQ ID NO: 36526 - protein, 214 aa, Zea mays subsp. mays
  peptide (1)..(214): Ceres Seq. ID no. 13600566
  misc_feature (4)..(181): Pfam Name: Pfam Description:  Protein of unknown function, DUF597
  misc_feature (1)..(181): NCBI GI NO: 20805059 NR Description: B1108H10.20
  misc_feature (4)..(213): NCBI GI NO: 37537092 NR Description: unknown protein
  misc_feature (4)..(213): NCBI GI NO: 6714272 NR Description: F6N18.8 [Arabidopsis thaliana]
  misc_feature (4)..(213): NCBI GI NO: 18398555 NR Description: expressed protein [Arabidopsis thaliana]
  misc_feature (2)..(213): NCBI GI NO: 38346725 NR Description: OSJNBa0086O06.23
  misc_feature (4)..(213): NCBI GI NO: 21554139 NR Description: unknown [Arabidopsis thaliana]
  misc_feature (7)..(213): NCBI GI NO: 15217560 NR Description: hypothetical protein [Arabidopsis thaliana]
  misc_feature (62)..(214): NCBI GI NO: 20805062 NR Description: B1108H10.23
  misc_feature (5)..(190): NCBI GI NO: 18394936 NR Description: expressed protein [Arabidopsis thaliana]
  misc_feature (5)..(190): NCBI GI NO: 25337907 NR Description: hypothetical protein F9H16
MKRETMPSWLELLLATQFFTTCANHLLASRNECNLFCTQCETKPAAFCNYCRSSDHSTHRVIQIRRSSYHDVVRVSEIEDIFDVSDVQTYVINSARIVFLNERPQLRASSVPICKAPTSSTHSCETCSRVLLDAFRFCSLGCNLRGLNMEAGMQAMVGNNPRSNGMDHVARIDNVGSSTTNDQNSCNDKNYEEPPPKRVARHRRKGIPQRAPFF

SEQ ID NO: 36527 - protein, 209 aa, Zea mays subsp. mays
  peptide (1)..(209): Ceres Seq. ID no. 13600567
  misc_feature (1)..(176): Pfam Name: Pfam Description:  Protein of unknown function, DUF597
  misc_feature (1)..(176): NCBI GI NO: 20805059 NR Description: B1108H10.20
  misc_feature (1)..(208): NCBI GI NO: 37537092 NR Description: unknown protein
  misc_feature (1)..(208): NCBI GI NO: 6714272 NR Description: F6N18.8 [Arabidopsis thaliana]
  misc_feature (1)..(208): NCBI GI NO: 18398555 NR Description: expressed protein [Arabidopsis thaliana]
  misc_feature (1)..(208): NCBI GI NO: 38346725 NR Description: OSJNBa0086O06.23
  misc_feature (1)..(208): NCBI GI NO: 21554139 NR Description: unknown [Arabidopsis thaliana]
  misc_feature (2)..(208): NCBI GI NO: 15217560 NR Description: hypothetical protein [Arabidopsis thaliana]
  misc_feature (57)..(209): NCBI GI NO: 20805062 NR Description: B1108H10.23
  misc_feature (1)..(185): NCBI GI NO: 18394936 NR Description: expressed protein [Arabidopsis thaliana]
  misc_feature (1)..(185): NCBI GI NO: 25337907 NR Description: hypothetical protein F9H16
MPSWLELLLATQFFTTCANHLLASRNECNLFCTQCETKPAAFCNYCRSSDHSTHRVIQIRRSSYHDVVRVSEIEDIFDVSDVQTYVINSARIVFLNERPQLRASSVPICKAPTSSTHSCETCSRVLLDAFRFCSLGCNLRGLNMEAGMQAMVGNNPRSNGMDHVARIDNVGSSTTNDQNSCNDKNYEEPPPKRVARHRRKGIPQRAPFF

SEQ ID NO: 36528 - DNA, 2211 bp, Zea mays subsp. mays
  misc_feature (1)..(2211): Ceres Seq. ID no. 13635385
actgccgcgccgctcccgcctccctcttctccatccgacgagctcgagaagccaccatgatctccgcgcgcaccgccgcagcttcccccgcctccctgtggaagcggggaggacaaagtgagggcggcggcagttgcgacggatgtcggacctacaggaacactttgcggagggccgcagcagcgaaggtgcgtgccttgccgtcgagggcggtggaggcggtcaaaatgggctccgccgcggaggtggagcaggaggaggcggaggtagccgcggccgcggacggcgtcgtcgtcgaggaccactacggcgaggacagcgccaccgaggagctgcccatcatgccctgggccttctccgtcgcaagcggttacaccctcttgagggatccacatcacaacaagggtcttgctttcacggagaaggagagggatgcacaccacttgcgtgggctgcttcctcctgcagttgttcctcaagaactccaaattaagaagatcatgcacaacctgcggcagtaccaggtccctttgcagcgctatatggccatgatggaccttcaggagaggaacgagaggcttttctacaagcttttaattgataacgtggaggagctgcttcctgtggtttatacaccaactgtaggtgaggcctgccagaagtatgggtccatctttcgacaaccacagggtctgtatgtcagcttgagggacaaagggaaggtcctagaagttctaaggaactggccacataggaacattcaagttatctgtgttactgatggtgagcgaatcttgggacttggagatttgggttctcagggaatgggaattcctgtaggcaaacttgctctatacactgctcttggaggagttcgtccatcagcttgtttgcctatcacaatcgatgttggcacaaataatgagaaactgcttaatgatgagttttacattggactccggcaaaaacgtgcaactggcgaggagtatcatgagcttatggaagagttcatggctgctgttaagcaaatctacggcgagaaagtcctcattcagtttgaggacttcgcgaatcataatgcttttaatttgcttgcaaaatatagcaagagccatcttgttttcaatgatgacatccagggcacagcatcagtggtccttgcaggtttgttagcagcactcaaggtggttggtgggaccttggcagagcacacttatttattccttggtgctggggagggtggaactggtattgcagaactcattgctcttgagatttcaaaacagacgtcggctccaattgaagagtgccgcaagaagatttggttggtggactcaaagggtttgattgttgactctcgtaaaaactccgttcagtcattcaaaaaaccttgggcacatgagcatgagggcttgacaactttgtacgatgctgttcagtgcatcaaacctacagttctgattgggacgtctggagttggaagaacattcacaaaagaagttgttgaggccatggcttccttcaatgagaggcctatcatcttttcactgtcaaatccaacctctcattctgaatgtactgctgaagaagcatataactggactcagggtcgtgtaatatttgccagtggcagtccatttgaccctgtggagtacgatgggaaggtttttgtacctggacagtcgaacaacgcctacattttccctggatttggcctcggtcttgttatctctggagccatccgtgtccacgaggacatgcttcttgccgcctcggaagcactagctgctcaggccacacaggagaacttcgacaagggatcaatcttcccgcccttcaccaacattagaaagatctctgcgcgcattgcccgagccgtggctgcaaaagcttatgaactcggtttggcgacccgtctgcctcccccaagggacctggtgaaatatgcacagagctgcatgtacactcctgtctaccgtaactaccggtagtgctgctgggatcaattctgcagtaataaaatatgtcgacgcagatgatcctgcaatgttgtagtttattttttcatttgttggccctgctgctgaccacctttgtggctgctagacactgtacctgtctatgcatatatgatactggaacatttggcgcgctgtgggcgtccctgtcatgagatcaattgcagaaataaaatgcaatttagatttgagc

SEQ ID NO: 36529 - protein, 662 aa, Zea mays subsp. mays
  peptide (1)..(662): Ceres Seq. ID no. 13635386
  misc_feature (378)..(631): Pfam Name: Pfam Description:  Malic enzyme, NAD binding domain
  misc_feature (19)..(662): NCBI GI NO: 1170871 NR Description: NADP-DEPENDENT MALIC ENZYME, CHLOROPLAST PRECURSOR
  misc_feature (19)..(662): NCBI GI NO: 126737 NR Description: NADP-DEPENDENT MALIC ENZYME, CHLOROPLAST PRECURSOR
  misc_feature (19)..(662): NCBI GI NO: 30575690 NR Description: NADP-malic enzyme [Zea mays]
  misc_feature (19)..(662): NCBI GI NO: 30526303 NR Description: NADP-dependent malic enzyme [Sorghum bicolor]
  misc_feature (59)..(662): NCBI GI NO: 8118507 NR Description: NADP-dependent malic protein [Ricinus communis]
  misc_feature (93)..(662): NCBI GI NO: 7431234 NR Description: malate dehydrogenase
  misc_feature (57)..(662): NCBI GI NO: 1561774 NR Description: malate dehydrogenase [Vitis vinifera]
  misc_feature (78)..(662): NCBI GI NO: 15219980 NR Description: malate oxidoreductase -related
  misc_feature (86)..(662): NCBI GI NO: 7431231 NR Description: malate dehydrogenase
  misc_feature (91)..(662): NCBI GI NO: 7431235 NR Description: probable malate dehydrogenase
CRAAPASLFSIRRAREATMISARTAAASPASLWKRGGQSEGGGSCDGCRTYRNTLRRAAAAKVRALPSRAVEAVKMGSAAEVEQEEAEVAAAADGVVVEDHYGEDSATEELPIMPWAFSVASGYTLLRDPHHNKGLAFTEKERDAHHLRGLLPPAVVPQELQIKKIMHNLRQYQVPLQRYMAMMDLQERNERLFYKLLIDNVEELLPVVYTPTVGEACQKYGSIFRQPQGLYVSLRDKGKVLEVLRNWPHRNIQVICVTDGERILGLGDLGSQGMGIPVGKLALYTALGGVRPSACLPITIDVGTNNEKLLNDEFYIGLRQKRATGEEYHELMEEFMAAVKQIYGEKVLIQFEDFANHNAFNLLAKYSKSHLVFNDDIQGTASVVLAGLLAALKVVGGTLAEHTYLFLGAGEGGTGIAELIALEISKQTSAPIEECRKKIWLVDSKGLIVDSRKNSVQSFKKPWAHEHEGLTTLYDAVQCIKPTVLIGTSGVGRTFTKEVVEAMASFNERPIIFSLSNPTSHSECTAEEAYNWTQGRVIFASGSPFDPVEYDGKVFVPGQSNNAYIFPGFGLGLVISGAIRVHEDMLLAASEALAAQATQENFDKGSIFPPFTNIRKISARIARAVAAKAYELGLATRLPPPRDLVKYAQSCMYTPVYRNYR

SEQ ID NO: 36530 - protein, 644 aa, Zea mays subsp. mays
  peptide (1)..(644): Ceres Seq. ID no. 13635387
  misc_feature (360)..(613): Pfam Name: Pfam Description:  Malic enzyme, NAD binding domain
  misc_feature (1)..(644): NCBI GI NO: 1170871 NR Description: NADP-DEPENDENT MALIC ENZYME, CHLOROPLAST PRECURSOR
  misc_feature (1)..(644): NCBI GI NO: 126737 NR Description: NADP-DEPENDENT MALIC ENZYME, CHLOROPLAST PRECURSOR
  misc_feature (1)..(644): NCBI GI NO: 30575690 NR Description: NADP-malic enzyme [Zea mays]
  misc_feature (1)..(644): NCBI GI NO: 30526303 NR Description: NADP-dependent malic enzyme [Sorghum bicolor]
  misc_feature (41)..(644): NCBI GI NO: 8118507 NR Description: NADP-dependent malic protein [Ricinus communis]
  misc_feature (75)..(644): NCBI GI NO: 7431234 NR Description: malate dehydrogenase
  misc_feature (39)..(644): NCBI GI NO: 1561774 NR Description: malate dehydrogenase [Vitis vinifera]
  misc_feature (60)..(644): NCBI GI NO: 15219980 NR Description: malate oxidoreductase -related
  misc_feature (68)..(644): NCBI GI NO: 7431231 NR Description: malate dehydrogenase
  misc_feature (73)..(644): NCBI GI NO: 7431235 NR Description: probable malate dehydrogenase
MISARTAAASPASLWKRGGQSEGGGSCDGCRTYRNTLRRAAAAKVRALPSRAVEAVKMGSAAEVEQEEAEVAAAADGVVVEDHYGEDSATEELPIMPWAFSVASGYTLLRDPHHNKGLAFTEKERDAHHLRGLLPPAVVPQELQIKKIMHNLRQYQVPLQRYMAMMDLQERNERLFYKLLIDNVEELLPVVYTPTVGEACQKYGSIFRQPQGLYVSLRDKGKVLEVLRNWPHRNIQVICVTDGERILGLGDLGSQGMGIPVGKLALYTALGGVRPSACLPITIDVGTNNEKLLNDEFYIGLRQKRATGEEYHELMEEFMAAVKQIYGEKVLIQFEDFANHNAFNLLAKYSKSHLVFNDDIQGTASVVLAGLLAALKVVGGTLAEHTYLFLGAGEGGTGIAELIALEISKQTSAPIEECRKKIWLVDSKGLIVDSRKNSVQSFKKPWAHEHEGLTTLYDAVQCIKPTVLIGTSGVGRTFTKEVVEAMASFNERPIIFSLSNPTSHSECTAEEAYNWTQGRVIFASGSPFDPVEYDGKVFVPGQSNNAYIFPGFGLGLVISGAIRVHEDMLLAASEALAAQATQENFDKGSIFPPFTNIRKISARIARAVAAKAYELGLATRLPPPRDLVKYAQSCMYTPVYRNYR

SEQ ID NO: 36531 - protein, 587 aa, Zea mays subsp. mays
  peptide (1)..(587): Ceres Seq. ID no. 13635388
  misc_feature (303)..(556): Pfam Name: Pfam Description:  Malic enzyme, NAD binding domain
  misc_feature (1)..(587): NCBI GI NO: 1170871 NR Description: NADP-DEPENDENT MALIC ENZYME, CHLOROPLAST PRECURSOR
  misc_feature (1)..(587): NCBI GI NO: 126737 NR Description: NADP-DEPENDENT MALIC ENZYME, CHLOROPLAST PRECURSOR
  misc_feature (1)..(587): NCBI GI NO: 30575690 NR Description: NADP-malic enzyme [Zea mays]
  misc_feature (1)..(587): NCBI GI NO: 30526303 NR Description: NADP-dependent malic enzyme [Sorghum bicolor]
  misc_feature (1)..(587): NCBI GI NO: 8118507 NR Description: NADP-dependent malic protein [Ricinus communis]
  misc_feature (18)..(587): NCBI GI NO: 7431234 NR Description: malate dehydrogenase
  misc_feature (1)..(587): NCBI GI NO: 1561774 NR Description: malate dehydrogenase [Vitis vinifera]
  misc_feature (3)..(587): NCBI GI NO: 15219980 NR Description: malate oxidoreductase -related
  misc_feature (11)..(587): NCBI GI NO: 7431231 NR Description: malate dehydrogenase
  misc_feature (16)..(587): NCBI GI NO: 7431235 NR Description: probable malate dehydrogenase
MGSAAEVEQEEAEVAAAADGVVVEDHYGEDSATEELPIMPWAFSVASGYTLLRDPHHNKGLAFTEKERDAHHLRGLLPPAVVPQELQIKKIMHNLRQYQVPLQRYMAMMDLQERNERLFYKLLIDNVEELLPVVYTPTVGEACQKYGSIFRQPQGLYVSLRDKGKVLEVLRNWPHRNIQVICVTDGERILGLGDLGSQGMGIPVGKLALYTALGGVRPSACLPITIDVGTNNEKLLNDEFYIGLRQKRATGEEYHELMEEFMAAVKQIYGEKVLIQFEDFANHNAFNLLAKYSKSHLVFNDDIQGTASVVLAGLLAALKVVGGTLAEHTYLFLGAGEGGTGIAELIALEISKQTSAPIEECRKKIWLVDSKGLIVDSRKNSVQSFKKPWAHEHEGLTTLYDAVQCIKPTVLIGTSGVGRTFTKEVVEAMASFNERPIIFSLSNPTSHSECTAEEAYNWTQGRVIFASGSPFDPVEYDGKVFVPGQSNNAYIFPGFGLGLVISGAIRVHEDMLLAASEALAAQATQENFDKGSIFPPFTNIRKISARIARAVAAKAYELGLATRLPPPRDLVKYAQSCMYTPVYRNYR

SEQ ID NO: 36532 - DNA, 480 bp, Zea mays subsp. mays
  misc_feature (1)..(480): Ceres Seq. ID no. 4583495
accaagctggtggttgaggttagaagaggagctagagcgagagagtcccatcgcaacacacaaaaggaagaggaagaggaagaggaaggcgagaacgatgggcttgctcctgctgctcctcgtcgcggcggcggcgacagctcctgcggccgacgcatggggcaaggaggggcactacatggtgtgcaagatcgctgagagctttctgacgaaagaggcctcgacggcggtgaaggagctgctgccggggtgggccggcggcgagctcgcggagacgtgctcttgggcggacacgcagaggttccggtaccgctggtccagcccgctgcacttcgccgacacgccaggggactgcgagttcgactacgcccgggactgccacaacaccaaaggggagaagaacatgtgcgtggtcggagccatcaacaactacacggcggcgctgaaagactcatcaagtccttttgatccgacggagag

SEQ ID NO: 36533 - protein, 159 aa, Zea mays subsp. mays
  peptide (1)..(159): Ceres Seq. ID no. 4583496
  misc_feature (30)..(158): NCBI GI NO: 38345900 NR Description: OSJNBa0060D06.10
  misc_feature (33)..(158): NCBI GI NO: 7489371 NR Description: endonuclease (EC 3.1.30.-) precursor - barley
  misc_feature (33)..(158): NCBI GI NO: 5672692 NR Description: nuclease I [Hordeum vulgare]
  misc_feature (33)..(158): NCBI GI NO: 13274190 NR Description: putative nuclease [Hordeum vulgare subsp. vulgare]
  misc_feature (29)..(158): NCBI GI NO: 9558456 NR Description: unnamed protein product
  misc_feature (29)..(158): NCBI GI NO: 34895514 NR Description: putative bifunctional nuclease
  misc_feature (33)..(148): NCBI GI NO: 3551956 NR Description: senescence-associated protein 6
  misc_feature (35)..(148): NCBI GI NO: 15221343 NR Description: putative bifunctional nuclease
  misc_feature (35)..(148): NCBI GI NO: 21554516 NR Description: putative bifunctional nuclease
  misc_feature (48)..(148): NCBI GI NO: 4099835 NR Description: bifunctional nuclease [Zinnia elegans]
PSWWLRLEEELERESPIATHKRKRKRKRKARTMGLLLLLLVAAAATAPAADAWGKEGHYMVCKIAESFLTKEASTAVKELLPGWAGGELAETCSWADTQRFRYRWSSPLHFADTPGDCEFDYARDCHNTKGEKNMCVVGAINNYTAALKDSSSPFDPTE

SEQ ID NO: 36534 - protein, 127 aa, Zea mays subsp. mays
  peptide (1)..(127): Ceres Seq. ID no. 4583497
  misc_feature (1)..(126): NCBI GI NO: 38345900 NR Description: OSJNBa0060D06.10
  misc_feature (1)..(126): NCBI GI NO: 7489371 NR Description: endonuclease (EC 3.1.30.-) precursor - barley
  misc_feature (1)..(126): NCBI GI NO: 5672692 NR Description: nuclease I [Hordeum vulgare]
  misc_feature (1)..(126): NCBI GI NO: 13274190 NR Description: putative nuclease [Hordeum vulgare subsp. vulgare]
  misc_feature (1)..(126): NCBI GI NO: 9558456 NR Description: unnamed protein product
  misc_feature (1)..(126): NCBI GI NO: 34895514 NR Description: putative bifunctional nuclease
  misc_feature (1)..(116): NCBI GI NO: 3551956 NR Description: senescence-associated protein 6
  misc_feature (3)..(116): NCBI GI NO: 15221343 NR Description: putative bifunctional nuclease
  misc_feature (3)..(116): NCBI GI NO: 21554516 NR Description: putative bifunctional nuclease
  misc_feature (16)..(116): NCBI GI NO: 4099835 NR Description: bifunctional nuclease [Zinnia elegans]
MGLLLLLLVAAAATAPAADAWGKEGHYMVCKIAESFLTKEASTAVKELLPGWAGGELAETCSWADTQRFRYRWSSPLHFADTPGDCEFDYARDCHNTKGEKNMCVVGAINNYTAALKDSSSPFDPTE

SEQ ID NO: 36535 - protein, 100 aa, Zea mays subsp. mays
  peptide (1)..(100): Ceres Seq. ID no. 4583498
  misc_feature (1)..(99): NCBI GI NO: 38345900 NR Description: OSJNBa0060D06.10
  misc_feature (1)..(99): NCBI GI NO: 7489371 NR Description: endonuclease (EC 3.1.30.-) precursor - barley
  misc_feature (1)..(99): NCBI GI NO: 5672692 NR Description: nuclease I [Hordeum vulgare]
  misc_feature (1)..(99): NCBI GI NO: 13274190 NR Description: putative nuclease [Hordeum vulgare subsp. vulgare]
  misc_feature (1)..(99): NCBI GI NO: 9558456 NR Description: unnamed protein product
  misc_feature (1)..(99): NCBI GI NO: 34895514 NR Description: putative bifunctional nuclease
  misc_feature (1)..(89): NCBI GI NO: 3551956 NR Description: senescence-associated protein 6
  misc_feature (1)..(89): NCBI GI NO: 15221343 NR Description: putative bifunctional nuclease
  misc_feature (1)..(89): NCBI GI NO: 21554516 NR Description: putative bifunctional nuclease
  misc_feature (1)..(89): NCBI GI NO: 4099835 NR Description: bifunctional nuclease [Zinnia elegans]
MVCKIAESFLTKEASTAVKELLPGWAGGELAETCSWADTQRFRYRWSSPLHFADTPGDCEFDYARDCHNTKGEKNMCVVGAINNYTAALKDSSSPFDPTE

SEQ ID NO: 36536 - DNA, 756 bp, Zea mays subsp. mays
  misc_feature (1)..(756): Ceres Seq. ID no. 12469433
  misc_feature (492)..(492): n is a, c, t, g, unknown, or other
  misc_feature (591)..(591): n is a, c, t, g, unknown, or other
acggcatcgttgtccacgccgagtcgccgactgatcacttctcttccagcgagtacacacatcacacagcgaagggcagcgcatcgtgctgcggcggccggaggtgatcgacaagcacctctctaggaataataaataatggcgcagttggtggacaaggcgaaggggttcgtcgccgacaagctggccaacatccagaagccggaggcggagctggccgacgtcacggtggggcacgtgggccgcgatggcgccacgctggcggggcgcgtggacgtgcgcaacccgtactcgcacgccatcccggtgtgtgaggtgacctacacgctgcggagcgccgggcggacggtggcgtcagggacggtgcccgacccggggtcgctcgccggcgacggggctaccacgcgcctcgacgtgcccgtcaaggtgccctacgacttcctggttagcctcgccaaggacgccggcagggactgggacatcgactatganatgcgtgtcgggctcaccgttgacctccccgtcgtcggcaaactcacgctgccgctcaccaagtccggcgagctcaagctccccaccctctccagcatnttctgatcgatcgatctgcgtgctgctcgctcgatccgtaactgcggccttgcgtgttcatgactgatctgcctactcgataatatgtaaaccgctctcttgagtgttgttgttgtgctgcttgagtagtacgagacctaataataataaactacagtgatgtgt

SEQ ID NO: 36537 - protein, 152 aa, Zea mays subsp. mays
  peptide (1)..(152): Ceres Seq. ID no. 12469434
  misc_feature (2)..(152): Pfam Name: Pfam Description:  Late embryogenesis abundant protein
  misc_feature (1)..(152): NCBI GI NO: 34904186 NR Description: putative late embryogenesis abundant protein LEA14-A
  misc_feature (1)..(152): NCBI GI NO: 1170745 NR Description: Late embryogenesis abundant protein Lea14-A
  misc_feature (1)..(152): NCBI GI NO: 1170746 NR Description: Desiccation protectant protein Lea14 homolog
  misc_feature (4)..(147): NCBI GI NO: 34912834 NR Description: putative embryogenesis-abundant protein
  misc_feature (1)..(152): NCBI GI NO: 15225930 NR Description: putative desiccation related protein
  misc_feature (1)..(152): NCBI GI NO: 21555248 NR Description: putative desiccation related protein
  misc_feature (1)..(152): NCBI GI NO: 4585271 NR Description: seed maturation protein PM22
  misc_feature (5)..(152): NCBI GI NO: 7595792 NR Description: late-embryogenesis abundant protein
  misc_feature (1)..(152): NCBI GI NO: 15223413 NR Description: hypothetical protein; protein id: At1g01470
  misc_feature (4)..(149): NCBI GI NO: 23507177 NR Description: LEA1-like protein [Capsicum annuum]
  misc_feature (118)..(118): Xaa is any aa, unknown or other
  misc_feature (151)..(151): Xaa is any aa, unknown or other
MAQLVDKAKGFVADKLANIQKPEAELADVTVGHVGRDGATLAGRVDVRNPYSHAIPVCEVTYTLRSAGRTVASGTVPDPGSLAGDGATTRLDVPVKVPYDFLVSLAKDAGRDWDIDYXMRVGLTVDLPVVGKLTLPLTKSGELKLPTLSSXF

SEQ ID NO: 36538 - DNA, 497 bp, Zea mays subsp. mays
  misc_feature (1)..(497): Ceres Seq. ID no. 4488984
gtttggctatagagcctacatgccgcagatcaggcaacagggggagcacgagtgcctgcaccgggacatgatggtcgggttcggcaagtggagctggagcccgctgcagctggagaacccgttcgccgacgccgacgatggccagggggcggggaaggtgcacctgtggcacggcgccgaggacctcatcgtgccggtcagcctttccaggtacatcagccagaagctgccgtgggtcgtctaccacgagctccccaagtcgggacatctcttcccgatcgccgaggggatggctgacatcattgtcaagtccctgctgctcggagaccatcatccgtcgtcgtcggcctcacagcctcctcattctccatgaatccaggtcgtcacgtagtccgttcgcatctcgtggcccgtctctcactgtttctgtaaagggaccgaatgaccgatggtgcagctttctctagcgcgtagctaggatgctctgtctttttttt

SEQ ID NO: 36539 - protein, 123 aa, Zea mays subsp. mays
  peptide (1)..(123): Ceres Seq. ID no. 4488985
  misc_feature (9)..(104): Pfam Name: Pfam Description:  alpha/beta hydrolase fold
  misc_feature (1)..(114): NCBI GI NO: 38346334 NR Description: OSJNBa0073L04.5
  misc_feature (9)..(109): NCBI GI NO: 18404095 NR Description: expressed protein; protein id: At2g36290
  misc_feature (9)..(109): NCBI GI NO: 28416665 NR Description: At2g36290 [Arabidopsis thaliana]
  misc_feature (5)..(106): NCBI GI NO: 11357595 NR Description: hypothetical protein F24B22
  misc_feature (5)..(106): NCBI GI NO: 15232465 NR Description: putative protein (fragment); protein id:At3g54240
  misc_feature (4)..(109): NCBI GI NO: 18410575 NR Description: expressed protein; protein id: At1g74280
  misc_feature (4)..(106): NCBI GI NO: 18410582 NR Description: expressed protein; protein id: At1g74300
  misc_feature (4)..(106): NCBI GI NO: 21592662 NR Description: unknown [Arabidopsis thaliana]
  misc_feature (4)..(106): NCBI GI NO: 21537089 NR Description: unknown [Arabidopsis thaliana]
  misc_feature (2)..(109): NCBI GI NO: 15221193 NR Description: unknown protein; protein id: At1g74290.1
FGYRAYMPQIRQQGEHECLHRDMMVGFGKWSWSPLQLENPFADADDGQGAGKVHLWHGAEDLIVPVSLSRYISQKLPWVVYHELPKSGHLFPIAEGMADIIVKSLLLGDHHPSSSASQPPHSP

SEQ ID NO: 36540 - protein, 117 aa, Zea mays subsp. mays
  peptide (1)..(117): Ceres Seq. ID no. 4488986
  misc_feature (3)..(98): Pfam Name: Pfam Description:  alpha/beta hydrolase fold
  misc_feature (1)..(108): NCBI GI NO: 38346334 NR Description: OSJNBa0073L04.5
  misc_feature (3)..(103): NCBI GI NO: 18404095 NR Description: expressed protein; protein id: At2g36290
  misc_feature (3)..(103): NCBI GI NO: 28416665 NR Description: At2g36290 [Arabidopsis thaliana]
  misc_feature (1)..(100): NCBI GI NO: 11357595 NR Description: hypothetical protein F24B22
  misc_feature (1)..(100): NCBI GI NO: 15232465 NR Description: putative protein (fragment); protein id:At3g54240
  misc_feature (1)..(103): NCBI GI NO: 18410575 NR Description: expressed protein; protein id: At1g74280
  misc_feature (1)..(100): NCBI GI NO: 18410582 NR Description: expressed protein; protein id: At1g74300
  misc_feature (1)..(100): NCBI GI NO: 21592662 NR Description: unknown [Arabidopsis thaliana]
  misc_feature (1)..(100): NCBI GI NO: 21537089 NR Description: unknown [Arabidopsis thaliana]
  misc_feature (1)..(103): NCBI GI NO: 15221193 NR Description: unknown protein; protein id: At1g74290.1
MPQIRQQGEHECLHRDMMVGFGKWSWSPLQLENPFADADDGQGAGKVHLWHGAEDLIVPVSLSRYISQKLPWVVYHELPKSGHLFPIAEGMADIIVKSLLLGDHHPSSSASQPPHSP

SEQ ID NO: 36541 - protein, 109 aa, Zea mays subsp. mays
  peptide (1)..(109): Ceres Seq. ID no. 4488987
MARGRGRCTCGTAPRTSSCRSAFPGTSARSCRGSSTTSSPSRDISSRSPRGWLTSLSSPCCSETIIRRRRPHSLLILHESRSSRSPFASRGPSLTVSVKGPNDRWCSFL

SEQ ID NO: 36542 - DNA, 1113 bp, Zea mays subsp. mays; identical to SEQ ID NO: 36112
  misc_feature (1)..(1113): Ceres Seq. ID no. 13635288

SEQ ID NO: 36543 - protein, 253 aa, Zea mays subsp. mays; identical to SEQ ID NO: 36113
  peptide (1)..(253): Ceres Seq. ID no. 13635289
  misc_feature (32)..(253): NCBI GI NO: 4468796 NR Description: GST6 protein [Zea mays]
  misc_feature (40)..(251): NCBI GI NO: 7447304 NR Description: glutathione transferase (EC 2.5.1.18) - maize
  misc_feature (35)..(253): NCBI GI NO: 11177831 NR Description: putative glutathione S-transferase OsGSTU5
  misc_feature (32)..(251): NCBI GI NO: 6683765 NR Description: glutathione-S-transferase [Hordeum vulgare]
  misc_feature (32)..(251): NCBI GI NO: 20067419 NR Description: glutathione transferase [Triticum aestivum]
  misc_feature (32)..(251): NCBI GI NO: 20067417 NR Description: glutathione transferase [Triticum aestivum]
  misc_feature (32)..(251): NCBI GI NO: 20067415 NR Description: glutathione transferase [Triticum aestivum]
  misc_feature (32)..(253): NCBI GI NO: 33357806 NR Description: Chain A, Crystal Structure Solution Of Rice Gst1
  misc_feature (34)..(251): NCBI GI NO: 416652 NR Description: PROBABLE GLUTATHIONE S-TRANSFERASE
  misc_feature (34)..(251): NCBI GI NO: 1346215 NR Description: PROBABLE GLUTATHIONE S-TRANSFERASE PARC

SEQ ID NO: 36544 - protein, 222 aa, Zea mays subsp. mays; identical to SEQ ID NO: 36114
  peptide (1)..(222): Ceres Seq. ID no. 13635290
  misc_feature (1)..(222): NCBI GI NO: 4468796 NR Description: GST6 protein [Zea mays]
  misc_feature (9)..(220): NCBI GI NO: 7447304 NR Description: glutathione transferase (EC 2.5.1.18) - maize
  misc_feature (4)..(222): NCBI GI NO: 11177831 NR Description: putative glutathione S-transferase OsGSTU5
  misc_feature (1)..(220): NCBI GI NO: 6683765 NR Description: glutathione-S-transferase [Hordeum vulgare]
  misc_feature (1)..(220): NCBI GI NO: 20067419 NR Description: glutathione transferase [Triticum aestivum]
  misc_feature (1)..(220): NCBI GI NO: 20067417 NR Description: glutathione transferase [Triticum aestivum]
  misc_feature (1)..(220): NCBI GI NO: 20067415 NR Description: glutathione transferase [Triticum aestivum]
  misc_feature (1)..(222): NCBI GI NO: 33357806 NR Description: Chain A, Crystal Structure Solution Of Rice Gst1
  misc_feature (3)..(220): NCBI GI NO: 416652 NR Description: PROBABLE GLUTATHIONE S-TRANSFERASE
  misc_feature (3)..(220): NCBI GI NO: 1346215 NR Description: PROBABLE GLUTATHIONE S-TRANSFERASE PARC

SEQ ID NO: 36545 - protein, 141 aa, Zea mays subsp. mays; identical to SEQ ID NO: 36115
  peptide (1)..(141): Ceres Seq. ID no. 13635291

SEQ ID NO: 36546 - DNA, 892 bp, Zea mays subsp. mays
  misc_feature (1)..(892): Ceres Seq. ID no. 13504093
  misc_feature (656)..(656): n is a, c, t, g, unknown, or other
  misc_feature (756)..(756): n is a, c, t, g, unknown, or other
  misc_feature (565)..(565): n is a, c, t, g, unknown, or other
  misc_feature (397)..(397): n is a, c, t, g, unknown, or other
  misc_feature (599)..(599): n is a, c, t, g, unknown, or other
  misc_feature (536)..(536): n is a, c, t, g, unknown, or other
  misc_feature (450)..(450): n is a, c, t, g, unknown, or other
  misc_feature (528)..(528): n is a, c, t, g, unknown, or other
ccaccaaattaaaccgccggcgcctccacttcgcgttctcgcctcatctcctcccgctcagccgctgcaggatccggcggcgaaggtaaggcaagatgtacaccgcgaggaagaagatccagaaggataagggccttgagccctccgagttcgaggactccgtcgcccaggctttcttcgacctggagaacggtaaccaggagctcaagagcgacctcaaggacctttacatcaacggtgctatccagctggatgttgccgggagcaggaaggctgttgtgatccacgtcccataccgcttgcgtaaggccttcaggaagatccatgtcaggatcgtcagggagctggagaagaaattcagcggcaaggatgtggtaattgttgccacaaggaggancgtgaggccgcccaagaagggttcagctgttcagcgccctcgctccaggactntgactgctgtccacgatggcatcttggaggatgttgtcttcccagctgagattgtggggaagcgagtcaggtaccgtntggatggngccaagatcatcaaggtaacctacatgtnttattgaggaactgaaagatgccacatgatcttnttggacccaaaggagaggaacaaccccgaatacaagctggacacctacactacggtntaccgcaggctgtgtgggaaagatgtggtctttgagtaccctatgaccgaaaatgcataaatatgacgccccggatatccccatttcatttcgttgaatntgggtgtttctttggggtctcaactagactgctccgtatgtacttcaaaaaccatagttttgatgccaaagttgcctaggaatttggtactcgggaattggcagcggacgtgaacaatgttaagttttgagcattt

SEQ ID NO: 36547 - protein, 158 aa, Zea mays subsp. mays
  peptide (1)..(158): Ceres Seq. ID no. 13504094
  misc_feature (4)..(158): Pfam Name: Pfam Description:  Ribosomal protein S7e
  misc_feature (1)..(158): NCBI GI NO: 4588906 NR Description: ribosomal protein S7 [Secale cereale]
  misc_feature (1)..(158): NCBI GI NO: 22671664 NR Description: ribosomal protein S7
  misc_feature (1)..(158): NCBI GI NO: 14787424 NR Description: Ribosomal protein S7
  misc_feature (1)..(158): NCBI GI NO: 20139964 NR Description: 40S ribosomal protein S7
  misc_feature (1)..(158): NCBI GI NO: 20139962 NR Description: 40S ribosomal protein S7
  misc_feature (1)..(158): NCBI GI NO: 15221972 NR Description: 40S ribosomal protein S7 (RPS7A)
  misc_feature (1)..(158): NCBI GI NO: 15232926 NR Description: 40S ribosomal protein S7 (RPS7B)
  misc_feature (1)..(158): NCBI GI NO: 15237278 NR Description: 40S ribosomal protein S7 (RPS7C)
  misc_feature (1)..(158): NCBI GI NO: 21592413 NR Description: 40S ribosomal protein S7-like
  misc_feature (1)..(158): NCBI GI NO: 28630350 NR Description: ribosomal protein S7 [Petromyzon marinus]
  misc_feature (101)..(101): Xaa is any aa, unknown or other
  misc_feature (119)..(119): Xaa is any aa, unknown or other
  misc_feature (145)..(145): Xaa is any aa, unknown or other
  misc_feature (147)..(147): Xaa is any aa, unknown or other
  misc_feature (157)..(157): Xaa is any aa, unknown or other
MYTARKKIQKDKGLEPSEFEDSVAQAFFDLENGNQELKSDLKDLYINGAIQLDVAGSRKAVVIHVPYRLRKAFRKIHVRIVRELEKKFSGKDVVIVATRRXVRPPKKGSAVQRPRSRTXTAVHDGILEDVVFPAEIVGKRVRYRXDXAKIIKVTYMXY

SEQ ID NO: 36548 - DNA, 878 bp, Zea mays subsp. mays
  misc_feature (1)..(878): Ceres Seq. ID no. 12469416
  misc_feature (868)..(868): n is a, c, t, g, unknown, or other
  misc_feature (814)..(814): n is a, c, t, g, unknown, or other
  misc_feature (864)..(864): n is a, c, t, g, unknown, or other
  misc_feature (764)..(764): n is a, c, t, g, unknown, or other
  misc_feature (598)..(598): n is a, c, t, g, unknown, or other
  misc_feature (867)..(867): n is a, c, t, g, unknown, or other
  misc_feature (851)..(851): n is a, c, t, g, unknown, or other
  misc_feature (742)..(742): n is a, c, t, g, unknown, or other
  misc_feature (869)..(869): n is a, c, t, g, unknown, or other
  misc_feature (529)..(529): n is a, c, t, g, unknown, or other
cattagcatccctgaaagcgctctttcctaatttccatacaaaagaaacactatcaagccaagaggagcttgctcctttcctgaagttctcatctcgcatggctgcaatcgatttcattgtctgtgaggaaagtgatgcttttgtggctaacaacattgggaacatggccaaaattctggctgggcaaaggagatattttggacacaagagaacaatccggccaaatgctaaacagctctatcccttattcatgaagaggggaaatatgtcatgggatgcatttgcctcacaggtgcgaacaatccagaaaggatatatgggagagcccatggaaatcacaccaggaagaggcgaatttcatgcaaaccctgccgcctgtatatgtgaaaagaccagcagaaactcagcaatagtcaaatccatttctggaaataacctggaacctgtaactgacagtggaataaggaaaaccattggcattagtagaccaccatatcctgtttatactgatgaagaggcagatggatntgatacagaagaagatccggacagcagtgggagaggagaggtgattgacactgaacctgacgatgattntgcggtcagacaggaggatcctgagctagaggagatcctgtcagattagttcagttgtgcggctgtttcctccggttaagctatgcaaatctgactgcatatacatgtgttgtatgtggcagcaattttatggtttgggcatcnccgaactagcttagatctgcanccgctggtgtacatagattttgtggtgtgcagctgtccaccctctttttnttagctgaatgagggcatgatcatgtttgtcacctgngcaagccagattngcnnnccttttttt

SEQ ID NO: 36549 - protein, 214 aa, Zea mays subsp. mays
  peptide (1)..(214): Ceres Seq. ID no. 12469417
  misc_feature (1)..(94): Pfam Name: Pfam Description:  Plant protein family
  misc_feature (1)..(194): NCBI GI NO: 322752 NR Description: auxin-independent growth promoter - common tobacco
  misc_feature (1)..(146): NCBI GI NO: 38345930 NR Description: OSJNBb0078D11.5
  misc_feature (1)..(214): NCBI GI NO: 8778600 NR Description: F5M15.13 [Arabidopsis thaliana]
  misc_feature (1)..(214): NCBI GI NO: 8886957 NR Description: F2D10.3 [Arabidopsis thaliana]
  misc_feature (1)..(214): NCBI GI NO: 30686880 NR Description: axi 1 protein -related [Arabidopsis thaliana]
  misc_feature (1)..(214): NCBI GI NO: 6573718 NR Description: T23E18.20 [Arabidopsis thaliana]
  misc_feature (1)..(214): NCBI GI NO: 18411065 NR Description: putative auxin-independent growth promoter
  misc_feature (1)..(214): NCBI GI NO: 25406439 NR Description: hypothetical protein F15M4.23
  misc_feature (1)..(132): NCBI GI NO: 15233840 NR Description: putative growth regulator protein
  misc_feature (1)..(130): NCBI GI NO: 22328730 NR Description: growth regulator like protein
  misc_feature (176)..(176): Xaa is any aa, unknown or other
  misc_feature (199)..(199): Xaa is any aa, unknown or other
LASLKALFPNFHTKETLSSQEELAPFLKFSSRMAAIDFIVCEESDAFVANNIGNMAKILAGQRRYFGHKRTIRPNAKQLYPLFMKRGNMSWDAFASQVRTIQKGYMGEPMEITPGRGEFHANPAACICEKTSRNSAIVKSISGNNLEPVTDSGIRKTIGISRPPYPVYTDEEADGXDTEEDPDSSGRGEVIDTEPDDDXAVRQEDPELEEILSD

SEQ ID NO: 36550 - protein, 182 aa, Zea mays subsp. mays
  peptide (1)..(182): Ceres Seq. ID no. 12469418
  misc_feature (1)..(62): Pfam Name: Pfam Description:  Plant protein family
  misc_feature (1)..(162): NCBI GI NO: 322752 NR Description: auxin-independent growth promoter - common tobacco
  misc_feature (1)..(114): NCBI GI NO: 38345930 NR Description: OSJNBb0078D11.5
  misc_feature (1)..(182): NCBI GI NO: 8778600 NR Description: F5M15.13 [Arabidopsis thaliana]
  misc_feature (1)..(182): NCBI GI NO: 8886957 NR Description: F2D10.3 [Arabidopsis thaliana]
  misc_feature (1)..(182): NCBI GI NO: 30686880 NR Description: axi 1 protein -related [Arabidopsis thaliana]
  misc_feature (1)..(182): NCBI GI NO: 6573718 NR Description: T23E18.20 [Arabidopsis thaliana]
  misc_feature (1)..(182): NCBI GI NO: 18411065 NR Description: putative auxin-independent growth promoter
  misc_feature (1)..(182): NCBI GI NO: 25406439 NR Description: hypothetical protein F15M4.23
  misc_feature (1)..(100): NCBI GI NO: 15233840 NR Description: putative growth regulator protein
  misc_feature (1)..(98): NCBI GI NO: 22328730 NR Description: growth regulator like protein
  misc_feature (144)..(144): Xaa is any aa, unknown or other
  misc_feature (167)..(167): Xaa is any aa, unknown or other
MAAIDFIVCEESDAFVANNIGNMAKILAGQRRYFGHKRTIRPNAKQLYPLFMKRGNMSWDAFASQVRTIQKGYMGEPMEITPGRGEFHANPAACICEKTSRNSAIVKSISGNNLEPVTDSGIRKTIGISRPPYPVYTDEEADGXDTEEDPDSSGRGEVIDTEPDDDXAVRQEDPELEEILSD

SEQ ID NO: 36551 - protein, 160 aa, Zea mays subsp. mays
  peptide (1)..(160): Ceres Seq. ID no. 12469419
  misc_feature (1)..(140): NCBI GI NO: 322752 NR Description: auxin-independent growth promoter - common tobacco
  misc_feature (1)..(92): NCBI GI NO: 38345930 NR Description: OSJNBb0078D11.5
  misc_feature (1)..(160): NCBI GI NO: 8778600 NR Description: F5M15.13 [Arabidopsis thaliana]
  misc_feature (1)..(160): NCBI GI NO: 8886957 NR Description: F2D10.3 [Arabidopsis thaliana]
  misc_feature (1)..(160): NCBI GI NO: 30686880 NR Description: axi 1 protein -related [Arabidopsis thaliana]
  misc_feature (1)..(160): NCBI GI NO: 6573718 NR Description: T23E18.20 [Arabidopsis thaliana]
  misc_feature (1)..(160): NCBI GI NO: 25406439 NR Description: hypothetical protein F15M4.23
  misc_feature (1)..(160): NCBI GI NO: 18411065 NR Description: putative auxin-independent growth promoter
  misc_feature (1)..(78): NCBI GI NO: 15233840 NR Description: putative growth regulator protein
  misc_feature (1)..(76): NCBI GI NO: 22328730 NR Description: growth regulator like protein
  misc_feature (122)..(122): Xaa is any aa, unknown or other
  misc_feature (145)..(145): Xaa is any aa, unknown or other
MAKILAGQRRYFGHKRTIRPNAKQLYPLFMKRGNMSWDAFASQVRTIQKGYMGEPMEITPGRGEFHANPAACICEKTSRNSAIVKSISGNNLEPVTDSGIRKTIGISRPPYPVYTDEEADGXDTEEDPDSSGRGEVIDTEPDDDXAVRQEDPELEEILSD

SEQ ID NO: 36552 - DNA, 922 bp, Zea mays subsp. mays
  misc_feature (1)..(922): Ceres Seq. ID no. 13589090
acggagggcaaggaaactcgctcccactctactcctatccactgcggcctggacgcgtgcgagagacttgaccaagcagcagcagcagggatggcgcctctgaagctgtacgggatgccgctgtcccccaacgtggtgcgcgtggccaccgtgctcaacgagaagggcctcgacttcgagatcgtccccgtcgacctcaccaccggcgcccacaagcagcccgacttcctcgccctcaaccctttcggccagatcccggctctcgtcgacggagacgaagtcctcttcgagtcccgtgcgatcaaccggtacatcgccagcaagtacgcgtcggagggcacggacctgctccccgcgacggcgtcggcggcgaagctggaggtgtggctagaggtggagtcgcaccacttctacccgaaccgggtcgccgctggtgttccagctgctcgtgaggccgctcctgggcggcgccccgacgcggcggtggtggacaagcacgcggagcagctcgccaaggtgctcgacgtgtacgagcgcacctcgcccgcaacaagtacctcgccggggacgagttcacgctcgccgacgccaaccacgcgctcctacctgctctacctcagcaagaccccaaggccggctcgtcgccgcccgccccacgtcaaggcctggtgggaggccatcgtcgcccgccccgcgttccagaagaccgtcgccgccatccccttgcccccgccgccctcctcctcggcttgacctcgccttgcgttgcgccgttgcctgggtcgcggatgctcggagccccgagtcgaataaaagaggcagcatcctgtcttgcatttgctcgtgcgccatgtgttaacagcctgtgtaataaacactgttgcctttcgtgtgtgttcattgccttttggttggtctttgc

SEQ ID NO: 36553 - protein, 250 aa, Zea mays subsp. mays
  peptide (1)..(250): Ceres Seq. ID no. 13589091
  misc_feature (31)..(250): NCBI GI NO: 66616 NR Description: glutathione transferase (EC 2
  misc_feature (31)..(250): NCBI GI NO: 25287128 NR Description: glutathione transferase (EC 2.5.1.18) III(a)
  misc_feature (31)..(250): NCBI GI NO: 25287127 NR Description: glutathione transferase (EC 2.5.1.18) III(b)
  misc_feature (32)..(246): NCBI GI NO: 3891593 NR Description: Structure Of Glutathione S-Transferase Iii In ApoForm
  misc_feature (31)..(250): NCBI GI NO: 1170090 NR Description: GLUTATHIONE S-TRANSFERASE III
  misc_feature (34)..(244): NCBI GI NO: 34907162 NR Description: putative glutathione S-transferase
  misc_feature (34)..(244): NCBI GI NO: 11177843 NR Description: putative glutathione S-transferase OsGSTF4
  misc_feature (31)..(244): NCBI GI NO: 23504745 NR Description: glutathione transferase F5 [Triticum aestivum]
  misc_feature (34)..(236): NCBI GI NO: 18150415 NR Description: glutathione S-transferase [Allium cepa]
  misc_feature (31)..(244): NCBI GI NO: 25287121 NR Description: glutathione transferase (EC 2.5.1.18) GST2d
TEGKETRSHSTPIHCGLDACERLDQAAAAGMAPLKLYGMPLSPNVVRVATVLNEKGLDFEIVPVDLTTGAHKQPDFLALNPFGQIPALVDGDEVLFESRAINRYIASKYASEGTDLLPATASAAKLEVWLEVESHHFYPNRVAAGVPAAREAAPGRRPDAAVVDKHAEQLAKVLDVYERTSPATSTSPGTSSRSPTPTTRSYLLYLSKTPRPARRRPPHVKAWWEAIVARPAFQKTVAAIPLPPPPSSSA

SEQ ID NO: 36554 - protein, 220 aa, Zea mays subsp. mays
  peptide (1)..(220): Ceres Seq. ID no. 13589092
  misc_feature (1)..(220): NCBI GI NO: 66616 NR Description: glutathione transferase (EC 2
  misc_feature (1)..(220): NCBI GI NO: 25287128 NR Description: glutathione transferase (EC 2.5.1.18) III(a)
  misc_feature (1)..(220): NCBI GI NO: 25287127 NR Description: glutathione transferase (EC 2.5.1.18) III(b)
  misc_feature (2)..(216): NCBI GI NO: 3891593 NR Description: Structure Of Glutathione S-Transferase Iii In ApoForm
  misc_feature (1)..(220): NCBI GI NO: 1170090 NR Description: GLUTATHIONE S-TRANSFERASE III
  misc_feature (4)..(214): NCBI GI NO: 34907162 NR Description: putative glutathione S-transferase
  misc_feature (4)..(214): NCBI GI NO: 11177843 NR Description: putative glutathione S-transferase OsGSTF4
  misc_feature (1)..(214): NCBI GI NO: 23504745 NR Description: glutathione transferase F5 [Triticum aestivum]
  misc_feature (4)..(206): NCBI GI NO: 18150415 NR Description: glutathione S-transferase [Allium cepa]
  misc_feature (1)..(214): NCBI GI NO: 25287121 NR Description: glutathione transferase (EC 2.5.1.18) GST2d
MAPLKLYGMPLSPNVVRVATVLNEKGLDFEIVPVDLTTGAHKQPDFLALNPFGQIPALVDGDEVLFESRAINRYIASKYASEGTDLLPATASAAKLEVWLEVESHHFYPNRVAAGVPAAREAAPGRRPDAAVVDKHAEQLAKVLDVYERTSPATSTSPGTSSRSPTPTTRSYLLYLSKTPRPARRRPPHVKAWWEAIVARPAFQKTVAAIPLPPPPSSSA

SEQ ID NO: 36555 - protein, 212 aa, Zea mays subsp. mays
  peptide (1)..(212): Ceres Seq. ID no. 13589093
  misc_feature (1)..(212): NCBI GI NO: 66616 NR Description: glutathione transferase (EC 2
  misc_feature (1)..(212): NCBI GI NO: 25287128 NR Description: glutathione transferase (EC 2.5.1.18) III(a)
  misc_feature (1)..(212): NCBI GI NO: 25287127 NR Description: glutathione transferase (EC 2.5.1.18) III(b)
  misc_feature (1)..(208): NCBI GI NO: 3891593 NR Description: Structure Of Glutathione S-Transferase Iii In ApoForm
  misc_feature (1)..(212): NCBI GI NO: 1170090 NR Description: GLUTATHIONE S-TRANSFERASE III
  misc_feature (1)..(206): NCBI GI NO: 34907162 NR Description: putative glutathione S-transferase
  misc_feature (1)..(206): NCBI GI NO: 11177843 NR Description: putative glutathione S-transferase OsGSTF4
  misc_feature (1)..(206): NCBI GI NO: 23504745 NR Description: glutathione transferase F5 [Triticum aestivum]
  misc_feature (1)..(198): NCBI GI NO: 18150415 NR Description: glutathione S-transferase [Allium cepa]
  misc_feature (1)..(206): NCBI GI NO: 25287121 NR Description: glutathione transferase (EC 2.5.1.18) GST2d
MPLSPNVVRVATVLNEKGLDFEIVPVDLTTGAHKQPDFLALNPFGQIPALVDGDEVLFESRAINRYIASKYASEGTDLLPATASAAKLEVWLEVESHHFYPNRVAAGVPAAREAAPGRRPDAAVVDKHAEQLAKVLDVYERTSPATSTSPGTSSRSPTPTTRSYLLYLSKTPRPARRRPPHVKAWWEAIVARPAFQKTVAAIPLPPPPSSSA

SEQ ID NO: 36556 - DNA, 468 bp, Zea mays subsp. mays
  misc_feature (1)..(468): Ceres Seq. ID no. 4581778
gtttgttgagacaaccgttggctttgacaccatatgcaaggtgaacgcacaacttatcagcaatgtatgcactgatgctctatctgctgagaagtattactactttattcgcctgatgggacgcaaggcttctcatgtggcattggaatgtgctcttcaatcacatccaaacatggttatcctaggagaggaggtggctgcttccaaacttacaatttttgatattacgaagcagatttgtgatgcagttcaggcaagggctgaaaaagacaagaaccatggggttattcttattcctgagggccttgtggagagtattcctgaactatatgctctgcttcaggaaatccatggcctccatggcaaaggtgtttctgttgagaatatctcttctcagctttcaccttgggcatctgcactctttgagtttttgcccccttttatcaggaagcagctactactacatcc

SEQ ID NO: 36557 - protein, 155 aa, Zea mays subsp. mays
  peptide (1)..(155): Ceres Seq. ID no. 4581779
  misc_feature (1)..(142): Pfam Name: Pfam Description:  Phosphofructokinase
  misc_feature (1)..(154): NCBI GI NO: 3790102 NR Description: pyrophosphate-dependent phosphofructokinase alpha subunit
  misc_feature (1)..(154): NCBI GI NO: 2499488 NR Description: Pyrophosphate --fructose 6-phosphate 1-phosphotransferase alpha subunit
  misc_feature (1)..(154): NCBI GI NO: 129881 NR Description: Pyrophosphate --fructose 6-phosphate 1-phosphotransferase alpha subunit
  misc_feature (1)..(154): NCBI GI NO: 15223082 NR Description: putative pyrophosphate-dependentphosphofructokinase alpha subunit
  misc_feature (1)..(154): NCBI GI NO: 15218074 NR Description: putative pyrophosphate-dependentphosphofructokinase alpha subunit
  misc_feature (1)..(154): NCBI GI NO: 29647436 NR Description: putative pyrophosphate--fructose 6-phosphate 1-phosphotransferase alpha subunit
  misc_feature (1)..(154): NCBI GI NO: 29367525 NR Description: fructose-6-phosphate 1-phosphotransferase
  misc_feature (2)..(154): NCBI GI NO: 100462 NR Description: diphosphate -fructose-6-phosphate 1-phosphotransferase
  misc_feature (2)..(154): NCBI GI NO: 2507174 NR Description: PYROPHOSPHATE --FRUCTOSE 6-PHOSPHATE 1-PHOSPHOTRANSFERASE BETA SUBUNIT
  misc_feature (2)..(154): NCBI GI NO: 2499489 NR Description: Pyrophosphate --fructose 6-phosphate 1-phosphotransferase beta subunit
FVETTVGFDTICKVNAQLISNVCTDALSAEKYYYFIRLMGRKASHVALECALQSHPNMVILGEEVAASKLTIFDITKQICDAVQARAEKDKNHGVILIPEGLVESIPELYALLQEIHGLHGKGVSVENISSQLSPWASALFEFLPPFIRKQLLLH

SEQ ID NO: 36558 - protein, 117 aa, Zea mays subsp. mays
  peptide (1)..(117): Ceres Seq. ID no. 4581780
  misc_feature (1)..(104): Pfam Name: Pfam Description:  Phosphofructokinase
  misc_feature (1)..(116): NCBI GI NO: 3790102 NR Description: pyrophosphate-dependent phosphofructokinase alpha subunit
  misc_feature (1)..(116): NCBI GI NO: 2499488 NR Description: Pyrophosphate --fructose 6-phosphate 1-phosphotransferase alpha subunit
  misc_feature (1)..(116): NCBI GI NO: 129881 NR Description: Pyrophosphate --fructose 6-phosphate 1-phosphotransferase alpha subunit
  misc_feature (1)..(116): NCBI GI NO: 15223082 NR Description: putative pyrophosphate-dependentphosphofructokinase alpha subunit
  misc_feature (1)..(116): NCBI GI NO: 15218074 NR Description: putative pyrophosphate-dependentphosphofructokinase alpha subunit
  misc_feature (1)..(116): NCBI GI NO: 29647436 NR Description: putative pyrophosphate--fructose 6-phosphate 1-phosphotransferase alpha subunit
  misc_feature (1)..(116): NCBI GI NO: 29367525 NR Description: fructose-6-phosphate 1-phosphotransferase
  misc_feature (1)..(116): NCBI GI NO: 100462 NR Description: diphosphate -fructose-6-phosphate 1-phosphotransferase
  misc_feature (1)..(116): NCBI GI NO: 2507174 NR Description: PYROPHOSPHATE --FRUCTOSE 6-PHOSPHATE 1-PHOSPHOTRANSFERASE BETA SUBUNIT
  misc_feature (1)..(116): NCBI GI NO: 2499489 NR Description: Pyrophosphate --fructose 6-phosphate 1-phosphotransferase beta subunit
MGRKASHVALECALQSHPNMVILGEEVAASKLTIFDITKQICDAVQARAEKDKNHGVILIPEGLVESIPELYALLQEIHGLHGKGVSVENISSQLSPWASALFEFLPPFIRKQLLLH

SEQ ID NO: 36559 - protein, 98 aa, Zea mays subsp. mays
  peptide (1)..(98): Ceres Seq. ID no. 4581781
  misc_feature (1)..(85): Pfam Name: Pfam Description:  Phosphofructokinase
  misc_feature (1)..(97): NCBI GI NO: 3790102 NR Description: pyrophosphate-dependent phosphofructokinase alpha subunit
  misc_feature (1)..(97): NCBI GI NO: 2499488 NR Description: Pyrophosphate --fructose 6-phosphate 1-phosphotransferase alpha subunit
  misc_feature (1)..(97): NCBI GI NO: 129881 NR Description: Pyrophosphate --fructose 6-phosphate 1-phosphotransferase alpha subunit
  misc_feature (1)..(97): NCBI GI NO: 15223082 NR Description: putative pyrophosphate-dependentphosphofructokinase alpha subunit
  misc_feature (1)..(97): NCBI GI NO: 15218074 NR Description: putative pyrophosphate-dependentphosphofructokinase alpha subunit
  misc_feature (1)..(97): NCBI GI NO: 29647436 NR Description: putative pyrophosphate--fructose 6-phosphate 1-phosphotransferase alpha subunit
  misc_feature (1)..(97): NCBI GI NO: 29367525 NR Description: fructose-6-phosphate 1-phosphotransferase
  misc_feature (1)..(97): NCBI GI NO: 100462 NR Description: diphosphate -fructose-6-phosphate 1-phosphotransferase
  misc_feature (1)..(97): NCBI GI NO: 2507174 NR Description: PYROPHOSPHATE --FRUCTOSE 6-PHOSPHATE 1-PHOSPHOTRANSFERASE BETA SUBUNIT
  misc_feature (1)..(97): NCBI GI NO: 2499489 NR Description: Pyrophosphate --fructose 6-phosphate 1-phosphotransferase beta subunit
MVILGEEVAASKLTIFDITKQICDAVQARAEKDKNHGVILIPEGLVESIPELYALLQEIHGLHGKGVSVENISSQLSPWASALFEFLPPFIRKQLLLH

SEQ ID NO: 36560 - DNA, 626 bp, Zea mays subsp. mays
  misc_feature (1)..(626): Ceres Seq. ID no. 12469393
  misc_feature (557)..(557): n is a, c, t, g, unknown, or other
attatgtagagacatttcaagaaagataatgcgaggtatagccttggctttgggaggggcaattgatgcttttgaaggggatacagctggagatcctttctgggtgttaaggttgattggttatcccgtagatattccagaagagcagcgcactgatactggctgtggagctcatacagattatggacttctaacactggttaaccaggatgatgacatatgtgcccttgaggtgcaaaatcgttctggtgagtggatatatgcaacgccgattcccggaacctttgtttgtaacatcggtgacatgctgaaggtttggacaaatggaatatatcagcccacccttcacagagttgtcaacaattcccagcattaccgtgtatctgttgcattcttctacgagtccaacttcgatgctgcagtagagcctgttgagttctgccgggagaaaaccggcggcgctgctaagtacgaaaaggttgtgtacggggagcatttggttcagaaagtattgacgaacttcgtcatgtaaatttgctaagtacgacaaataaatntgcattgcagcatcagaactccagacctatttggtgtgtagtgctgtaccagaaaggtagtaacggact

SEQ ID NO: 36561 - protein, 176 aa, Zea mays subsp. mays
  peptide (1)..(176): Ceres Seq. ID no. 12469394
  misc_feature (32)..(134): Pfam Name: II Pfam Description: 2OG-Fe
  misc_feature (1)..(174): NCBI GI NO: 6984228 NR Description: putative flavonol synthase-like protein
  misc_feature (1)..(176): NCBI GI NO: 18409039 NR Description: flavonol synthase - like protein
  misc_feature (1)..(176): NCBI GI NO: 21554579 NR Description: flavonol synthase-like protein
  misc_feature (1)..(174): NCBI GI NO: 11255891 NR Description: hypothetical protein T9C5
  misc_feature (1)..(174): NCBI GI NO: 19423910 NR Description: unknown protein [Arabidopsis thaliana]
  misc_feature (1)..(174): NCBI GI NO: 22331716 NR Description: oxidoreductase
  misc_feature (1)..(174): NCBI GI NO: 15229181 NR Description: putative protein; protein id: At3g49630.1
  misc_feature (1)..(176): NCBI GI NO: 11255902 NR Description: flavonol synthase-like protein
  misc_feature (5)..(145): NCBI GI NO: 23130050 NR Description: hypothetical protein [Nostoc punctiforme]
  misc_feature (5)..(174): NCBI GI NO: 15599386 NR Description: probable iron/ascorbate oxidoreductase
LCRDISRKIMRGIALALGGAIDAFEGDTAGDPFWVLRLIGYPVDIPEEQRTDTGCGAHTDYGLLTLVNQDDDICALEVQNRSGEWIYATPIPGTFVCNIGDMLKVWTNGIYQPTLHRVVNNSQHYRVSVAFFYESNFDAAVEPVEFCREKTGGAAKYEKVVYGEHLVQKVLTNFVM

SEQ ID NO: 36562 - protein, 167 aa, Zea mays subsp. mays
  peptide (1)..(167): Ceres Seq. ID no. 12469395
  misc_feature (23)..(125): Pfam Name: II Pfam Description: 2OG-Fe
  misc_feature (1)..(165): NCBI GI NO: 6984228 NR Description: putative flavonol synthase-like protein
  misc_feature (1)..(167): NCBI GI NO: 18409039 NR Description: flavonol synthase - like protein
  misc_feature (1)..(167): NCBI GI NO: 21554579 NR Description: flavonol synthase-like protein
  misc_feature (1)..(165): NCBI GI NO: 11255891 NR Description: hypothetical protein T9C5
  misc_feature (1)..(165): NCBI GI NO: 19423910 NR Description: unknown protein [Arabidopsis thaliana]
  misc_feature (1)..(165): NCBI GI NO: 22331716 NR Description: oxidoreductase
  misc_feature (1)..(165): NCBI GI NO: 15229181 NR Description: putative protein; protein id: At3g49630.1
  misc_feature (1)..(167): NCBI GI NO: 11255902 NR Description: flavonol synthase-like protein
  misc_feature (1)..(136): NCBI GI NO: 23130050 NR Description: hypothetical protein [Nostoc punctiforme]
  misc_feature (1)..(165): NCBI GI NO: 15599386 NR Description: probable iron/ascorbate oxidoreductase
MRGIALALGGAIDAFEGDTAGDPFWVLRLIGYPVDIPEEQRTDTGCGAHTDYGLLTLVNQDDDICALEVQNRSGEWIYATPIPGTFVCNIGDMLKVWTNGIYQPTLHRVVNNSQHYRVSVAFFYESNFDAAVEPVEFCREKTGGAAKYEKVVYGEHLVQKVLTNFVM

SEQ ID NO: 36563 - DNA, 519 bp, Zea mays subsp. mays
  misc_feature (1)..(519): Ceres Seq. ID no. 4488403
agatcaggatccattaacacccctacgtacgcctttcctctggaaacccttctctcgcctgcctctcccccgccgcgccgccacttcccctctcccgtcaactccggcttccgcgcgaggtcgagctagcgtttggagttctcgagacctgctgtgatggcgacagagcaagcggcggagaactacacggtggaggacctcgtggccctgaacccctacaaccccgacatcctcmacgacctcgagaagttcgtcaatgagcaggtctcatctcagacatataacttggatgcaaatctcagccttcttcgcttgtaccagtttgagccagaaaggatgagcatacagattgtggcccacatactgattaagcaaatggaggagcaattcaaggtattgatagttctttctcactacctagagactgctaggttcagtcaattttgggatgaagcagcaaagaaccgccacatatcggaagcagtgccaggtttcgaacaagcaatccaatcctatgcg

SEQ ID NO: 36564 - protein, 121 aa, Zea mays subsp. mays
  peptide (1)..(121): Ceres Seq. ID no. 4488404
  misc_feature (5)..(74): Pfam Name: eIF-3 p25 Pfam Description: Eukaryotic translation initiation factor 3 subunit 11
  misc_feature (5)..(74): NCBI GI NO: 15234123 NR Description: putative protein; protein id: At4g33250
  misc_feature (73)..(120): NCBI GI NO: 15234123 NR Description: putative protein; protein id: At4g33250
  misc_feature (1)..(74): NCBI GI NO: 23396617 NR Description: Eukaryotic translation initiation factor 3 subunit11
  misc_feature (12)..(120): NCBI GI NO: 23396617 NR Description: Eukaryotic translation initiation factor 3 subunit11
  misc_feature (15)..(74): NCBI GI NO: 10801345 NR Description: muscle specific gene [Homo sapiens]
  misc_feature (15)..(74): NCBI GI NO: 21312044 NR Description: RIKEN cDNA 1200009C21 [Mus musculus]
  misc_feature (15)..(74): NCBI GI NO: 27730981 NR Description: similar to RIKEN cDNA 1200009C21
  misc_feature (73)..(120): NCBI GI NO: 10801345 NR Description: muscle specific gene [Homo sapiens]
  misc_feature (73)..(120): NCBI GI NO: 21312044 NR Description: RIKEN cDNA 1200009C21 [Mus musculus]
  misc_feature (73)..(120): NCBI GI NO: 27730981 NR Description: similar to RIKEN cDNA 1200009C21
  misc_feature (27)..(27): Xaa is any aa, unknown or other
MATEQAAENYTVEDLVALNPYNPDILXDLEKFVNEQVSSQTYNLDANLSLLRLYQFEPERMSIQIVAHILIKQMEEQFKVLIVLSHYLETARFSQFWDEAAKNRHISEAVPGFEQAIQSYA

SEQ ID NO: 36565 - protein, 61 aa, Zea mays subsp. mays
  peptide (1)..(61): Ceres Seq. ID no. 4488405
  misc_feature (1)..(14): NCBI GI NO: 15234123 NR Description: putative protein; protein id: At4g33250
  misc_feature (13)..(60): NCBI GI NO: 15234123 NR Description: putative protein; protein id: At4g33250
  misc_feature (1)..(14): NCBI GI NO: 23396617 NR Description: Eukaryotic translation initiation factor 3 subunit11
  misc_feature (1)..(60): NCBI GI NO: 23396617 NR Description: Eukaryotic translation initiation factor 3 subunit11
  misc_feature (1)..(14): NCBI GI NO: 10801345 NR Description: muscle specific gene [Homo sapiens]
  misc_feature (1)..(14): NCBI GI NO: 21312044 NR Description: RIKEN cDNA 1200009C21 [Mus musculus]
  misc_feature (1)..(14): NCBI GI NO: 27730981 NR Description: similar to RIKEN cDNA 1200009C21
  misc_feature (13)..(60): NCBI GI NO: 10801345 NR Description: muscle specific gene [Homo sapiens]
  misc_feature (13)..(60): NCBI GI NO: 21312044 NR Description: RIKEN cDNA 1200009C21 [Mus musculus]
  misc_feature (13)..(60): NCBI GI NO: 27730981 NR Description: similar to RIKEN cDNA 1200009C21
MSIQIVAHILIKQMEEQFKVLIVLSHYLETARFSQFWDEAAKNRHISEAVPGFEQAIQSYA

SEQ ID NO: 36566 - DNA, 487 bp, Zea mays subsp. mays
  misc_feature (1)..(487): Ceres Seq. ID no. 13586835
ataattttgggcattaattgcacgtctcctccccacctctccttccctccacccgtgccgtcgcctcgcctatccgatctgccacctcctcccgtctcgcacgttccttcccaactccgcagcgtagcctctccgcggcgcgatccagatccaggtttttcagcatgggcctggtgaaggaaggcatcgacatggaggagggaacccttgagatcggcatggagtacaggactgtatctggtgttgctgggcctctggtcatattggataaagtaaagggcccaaagtaccaagaaattgtaaacatccgacttggagatggcaccaatcgccgtggtcaagtcctggaagttgatggcgaaaaagctgttgtgcaggtctttgaaggaacttctggaatagacaacaaatacacaaccgtgcagtttacaggcgaggttttgaaaactcctgtctcacttgatatgcttgggcgcatttttaatgg

SEQ ID NO: 36567 - protein, 107 aa, Zea mays subsp. mays
  peptide (1)..(107): Ceres Seq. ID no. 13586836
  misc_feature (24)..(90): Pfam Name: Pfam Description:  ATP synthase alpha/beta family
  misc_feature (1)..(106): NCBI GI NO: 2493131 NR Description: Vacuolar ATP synthase subunit B isoform 1
  misc_feature (1)..(106): NCBI GI NO: 14150751 NR Description: vacuolar ATPase B subunit [Oryza sativa]
  misc_feature (1)..(106): NCBI GI NO: 6715512 NR Description: vacuolar H+-ATPase B subunit [Nicotiana tabacum]
  misc_feature (1)..(106): NCBI GI NO: 2493129 NR Description: Vacuolar ATP synthase subunit B isoform 1
  misc_feature (3)..(106): NCBI GI NO: 17065080 NR Description: Unknown protein [Arabidopsis thaliana]
  misc_feature (3)..(106): NCBI GI NO: 25290450 NR Description: hypothetical protein F14O10
  misc_feature (3)..(106): NCBI GI NO: 22329688 NR Description: vacuolar H+-ATPase subunit B -related
  misc_feature (3)..(106): NCBI GI NO: 34910488 NR Description: putative H+-transporting ATP synthase
  misc_feature (9)..(106): NCBI GI NO: 2493132 NR Description: Vacuolar ATP synthase subunit B isoform 2
  misc_feature (1)..(106): NCBI GI NO: 6721533 NR Description: vacuolar H+-ATPase B subunit [Citrus unshiu]
MGLVKEGIDMEEGTLEIGMEYRTVSGVAGPLVILDKVKGPKYQEIVNIRLGDGTNRRGQVLEVDGEKAVVQVFEGTSGIDNKYTTVQFTGEVLKTPVSLDMLGRIFN

SEQ ID NO: 36568 - protein, 98 aa, Zea mays subsp. mays
  peptide (1)..(98): Ceres Seq. ID no. 13586837
  misc_feature (15)..(81): Pfam Name: Pfam Description:  ATP synthase alpha/beta family
  misc_feature (1)..(97): NCBI GI NO: 2493131 NR Description: Vacuolar ATP synthase subunit B isoform 1
  misc_feature (1)..(97): NCBI GI NO: 14150751 NR Description: vacuolar ATPase B subunit [Oryza sativa]
  misc_feature (1)..(97): NCBI GI NO: 6715512 NR Description: vacuolar H+-ATPase B subunit [Nicotiana tabacum]
  misc_feature (1)..(97): NCBI GI NO: 2493129 NR Description: Vacuolar ATP synthase subunit B isoform 1
  misc_feature (1)..(97): NCBI GI NO: 17065080 NR Description: Unknown protein [Arabidopsis thaliana]
  misc_feature (1)..(97): NCBI GI NO: 25290450 NR Description: hypothetical protein F14O10
  misc_feature (1)..(97): NCBI GI NO: 22329688 NR Description: vacuolar H+-ATPase subunit B -related
  misc_feature (1)..(97): NCBI GI NO: 34910488 NR Description: putative H+-transporting ATP synthase
  misc_feature (1)..(97): NCBI GI NO: 2493132 NR Description: Vacuolar ATP synthase subunit B isoform 2
  misc_feature (1)..(97): NCBI GI NO: 6721533 NR Description: vacuolar H+-ATPase B subunit [Citrus unshiu]
MEEGTLEIGMEYRTVSGVAGPLVILDKVKGPKYQEIVNIRLGDGTNRRGQVLEVDGEKAVVQVFEGTSGIDNKYTTVQFTGEVLKTPVSLDMLGRIFN

SEQ ID NO: 36569 - protein, 89 aa, Zea mays subsp. mays
  peptide (1)..(89): Ceres Seq. ID no. 13586838
  misc_feature (6)..(72): Pfam Name: Pfam Description:  ATP synthase alpha/beta family
  misc_feature (1)..(88): NCBI GI NO: 2493131 NR Description: Vacuolar ATP synthase subunit B isoform 1
  misc_feature (1)..(88): NCBI GI NO: 14150751 NR Description: vacuolar ATPase B subunit [Oryza sativa]
  misc_feature (1)..(88): NCBI GI NO: 6715512 NR Description: vacuolar H+-ATPase B subunit [Nicotiana tabacum]
  misc_feature (1)..(88): NCBI GI NO: 2493129 NR Description: Vacuolar ATP synthase subunit B isoform 1
  misc_feature (1)..(88): NCBI GI NO: 17065080 NR Description: Unknown protein [Arabidopsis thaliana]
  misc_feature (1)..(88): NCBI GI NO: 22329688 NR Description: vacuolar H+-ATPase subunit B -related
  misc_feature (1)..(88): NCBI GI NO: 25290450 NR Description: hypothetical protein F14O10
  misc_feature (1)..(88): NCBI GI NO: 34910488 NR Description: putative H+-transporting ATP synthase
  misc_feature (1)..(88): NCBI GI NO: 2493132 NR Description: Vacuolar ATP synthase subunit B isoform 2
  misc_feature (1)..(88): NCBI GI NO: 6721533 NR Description: vacuolar H+-ATPase B subunit [Citrus unshiu]
MEYRTVSGVAGPLVILDKVKGPKYQEIVNIRLGDGTNRRGQVLEVDGEKAVVQVFEGTSGIDNKYTTVQFTGEVLKTPVSLDMLGRIFN

SEQ ID NO: 36570 - DNA, 828 bp, Zea mays subsp. mays
  misc_feature (1)..(828): Ceres Seq. ID no. 12595473
aaatccatgtactatgtttccacgtcatgcaacgcaacattccaaaaccatggatcatctataaatggctagctcccacatatgaactagtctctatcatcatccaatccagatcagcaaagcggcagtgcgtagagaggatcgtcgaacagaacagcatgaagatggtcatcgttctcgtcgtgtgcctggctctgtcagctgccagcgcctctgcaatgcagatgccctgcccctgcgcggggctgcagggcttgtacggcgctggcgccggcctgacgacgatgatgggcgccggcgggctgtacccctacgcggagtacctgaggcagccgcagtgcagcccgctggcggcggcgccctactacgccgggtgtgggcagccgagcgccatgttccagccgctccggcaacagtgctgccagcagcagatgaggatgatggacgtgcagtccgtcgcgcagcagctgcagatgatgatgcagcttgagcgtgccgctgccgccagcagcagcctgtacgagccagctctgatgcagcagcagcagcagctgctggcagcccagggtctcaaccccatggccatgatgatggcgcagaacatgccggccatgggtggactctaccagtaccagctgcccagctaccgcaccaacccctgtggcgtctccgctgccattccgccctactactgattcatgatatttgggaaatctcctctatccatctctctctatctatatatgtaataatgcagtaagacgacacacattatcatgtgtggtatgaccaataatatatgcatggtcataataaagttttggtttt

SEQ ID NO: 36571 - protein, 230 aa, Zea mays subsp. mays
  peptide (1)..(230): Ceres Seq. ID no. 12595474
  misc_feature (106)..(208): Pfam Name: Pfam Description:  Protease inhibitor/seed storage/LTP family
  misc_feature (53)..(230): NCBI GI NO: 16305115 NR Description: 15kD beta zein [Zea mays]
  misc_feature (53)..(230): NCBI GI NO: 419803 NR Description: zein protein - maize
  misc_feature (53)..(230): NCBI GI NO: 168664 NR Description: zein protein precursor
  misc_feature (53)..(230): NCBI GI NO: 141616 NR Description: ZEIN-BETA PRECURSOR (16 KD) (ZEIN 2) (CLONE 15A3)
  misc_feature (53)..(230): NCBI GI NO: 100552 NR Description: beta-coixin, 17K, precursor - Job's tears
IHVLCFHVMQRNIPKPWIIYKWLAPTYELVSIIIQSRSAKRQCVERIVEQNSMKMVIVLVVCLALSAASASAMQMPCPCAGLQGLYGAGAGLTTMMGAGGLYPYAEYLRQPQCSPLAAAPYYAGCGQPSAMFQPLRQQCCQQQMRMMDVQSVAQQLQMMMQLERAAAASSSLYEPALMQQQQQLLAAQGLNPMAMMMAQNMPAMGGLYQYQLPSYRTNPCGVSAAIPPYY

SEQ ID NO: 36572 - protein, 222 aa, Zea mays subsp. mays
  peptide (1)..(222): Ceres Seq. ID no. 12595475
  misc_feature (98)..(200): Pfam Name: Pfam Description:  Protease inhibitor/seed storage/LTP family
  misc_feature (45)..(222): NCBI GI NO: 16305115 NR Description: 15kD beta zein [Zea mays]
  misc_feature (45)..(222): NCBI GI NO: 419803 NR Description: zein protein - maize
  misc_feature (45)..(222): NCBI GI NO: 168664 NR Description: zein protein precursor
  misc_feature (45)..(222): NCBI GI NO: 141616 NR Description: ZEIN-BETA PRECURSOR (16 KD) (ZEIN 2) (CLONE 15A3)
  misc_feature (45)..(222): NCBI GI NO: 100552 NR Description: beta-coixin, 17K, precursor - Job's tears
MQRNIPKPWIIYKWLAPTYELVSIIIQSRSAKRQCVERIVEQNSMKMVIVLVVCLALSAASASAMQMPCPCAGLQGLYGAGAGLTTMMGAGGLYPYAEYLRQPQCSPLAAAPYYAGCGQPSAMFQPLRQQCCQQQMRMMDVQSVAQQLQMMMQLERAAAASSSLYEPALMQQQQQLLAAQGLNPMAMMMAQNMPAMGGLYQYQLPSYRTNPCGVSAAIPPYY

SEQ ID NO: 36573 - protein, 178 aa, Zea mays subsp. mays
  peptide (1)..(178): Ceres Seq. ID no. 12595476
  misc_feature (54)..(156): Pfam Name: Pfam Description:  Protease inhibitor/seed storage/LTP family
  misc_feature (1)..(178): NCBI GI NO: 16305115 NR Description: 15kD beta zein [Zea mays]
  misc_feature (1)..(178): NCBI GI NO: 419803 NR Description: zein protein - maize
  misc_feature (1)..(178): NCBI GI NO: 168664 NR Description: zein protein precursor
  misc_feature (1)..(178): NCBI GI NO: 141616 NR Description: ZEIN-BETA PRECURSOR (16 KD) (ZEIN 2) (CLONE 15A3)
  misc_feature (1)..(178): NCBI GI NO: 100552 NR Description: beta-coixin, 17K, precursor - Job's tears
MKMVIVLVVCLALSAASASAMQMPCPCAGLQGLYGAGAGLTTMMGAGGLYPYAEYLRQPQCSPLAAAPYYAGCGQPSAMFQPLRQQCCQQQMRMMDVQSVAQQLQMMMQLERAAAASSSLYEPALMQQQQQLLAAQGLNPMAMMMAQNMPAMGGLYQYQLPSYRTNPCGVSAAIPPYY

SEQ ID NO: 36574 - DNA, 1694 bp, Zea mays subsp. mays
  misc_feature (1)..(1694): Ceres Seq. ID no. 12344383
  misc_feature (695)..(695): n is a, c, t, g, unknown, or other
  misc_feature (520)..(520): n is a, c, t, g, unknown, or other
  misc_feature (893)..(893): n is a, c, t, g, unknown, or other
  misc_feature (494)..(494): n is a, c, t, g, unknown, or other
  misc_feature (581)..(581): n is a, c, t, g, unknown, or other
  misc_feature (258)..(258): n is a, c, t, g, unknown, or other
ttataaaacctagctcctcaagctccagacgcagtcgaccgccgcagaccgggagtagtcgacgcgccgtcactgaatcctcagatcacggctagccgtaatcacgccactctgctgactcccggcgagcagtgtaacattttccttcagccatgggcaaggagaagactcacatcaacattgtggtcattggacatgtcgactctggcaagtcgaccaccactggccacctgatctacaagctcggcggtattgacnagcgtgtgattgagaggttcgagaaagaggccgcggagatgaacaagcggtcattcaagtatgcctgggtgcttgacaagctcaagggcgagcgtgagagaggtatcacaattgatattgctttgtggaagttcgagaccaccaagtactactgcactgtcattgatgcccctggacaccgtgacttcatcaagaatatgattactggcacttcccaagctgactgcgctgttctnatcattgactccactactggtggttntgaggctggtatctccaaggatggacagacccgcgagcatgctctccttgctttcacgctnggagtgaagcagatgatttgctgttgcaacaagatggatgccaccacacccaagtactccaaggcccgttatgatgagattgtgaaggaagtctcttcctacctgaagaaggtnggatacaaccctgacaagatccactttgttcccatctctggtttcgaaggtgacaacatgattgagaggtccaccaaccttgactggtacaagggcccaaccctacttgaggctttggacttgatcaatgagccgaagaggccttcagacaagcccctgcgtctccccctacaggatgtgtacaagattggtggtatnggaactgttcctgttgggcgtgttgagactggtatcatcaagcctggtatggttgttacctttggtcctagtggccttactactgaggtgaagtctgttgaaatgcaccatgaggctctccaggaggcccttcctggtgacaatgttggcttcaatgttaagaatgttgctgtgaaggatctgaagcgtgggtatgtggcctccaactccaaggatgaccctgccaaggaggctgctagcttcacgtcccaggtcatcatcatgaaccaccctgggcagattggcaacggctatgccccagtgctggactgccacacctcgcacattgctgtcaagtttgcggagctcattaccaagattgataggcggtctggcaaagagcttgagaaggagcccaaattcctcaagaatggtgatgctggtatggtgaagatggttcccactaagcccatggtagtggagaccttttctgaatatcctcctcttggtcgctttgctgtccgtgacatgaggcaaacggtggctgtcggagtcatcaagagtgtggagaagaaggatccaactggagccaaggtgaccaaggctgccgcaaagaagaaatgatgtgtctggctggttctgtgtttgcttgagggaaacctagtggaaacataaaatatctcgtcttgttcacgtcattgtctgaactatgctcgcaacgtttgcctggtcgatttagaatggttattttcgttaaaaccagagtgttatttaagacttatccgaacatctggtgagccatatatggttactagttttgtt

SEQ ID NO: 36575 - protein, 447 aa, Zea mays subsp. mays
  peptide (1)..(447): Ceres Seq. ID no. 12344384
  misc_feature (5)..(227): Pfam Name: Pfam Description:  Elongation factor Tu GTP binding domain
  misc_feature (1)..(447): NCBI GI NO: 2282584 NR Description: elongation factor 1-alpha [Zea mays]
  misc_feature (1)..(447): NCBI GI NO: 3122071 NR Description: ELONGATION FACTOR 1-ALPHA (EF-1-ALPHA)
  misc_feature (1)..(447): NCBI GI NO: 18873725 NR Description: elongation factor 1 alpha
  misc_feature (1)..(447): NCBI GI NO: 2662341 NR Description: EF-1 alpha [Oryza sativa]
  misc_feature (1)..(447): NCBI GI NO: 2662343 NR Description: EF-1 alpha [Oryza sativa]
  misc_feature (1)..(447): NCBI GI NO: 6015059 NR Description: ELONGATION FACTOR 1-ALPHA (EF-1-ALPHA)
  misc_feature (7)..(447): NCBI GI NO: 18873727 NR Description: elongation factor 1 alpha
  misc_feature (1)..(447): NCBI GI NO: 7230387 NR Description: elongation factor 1 alpha [Zea mays]
  misc_feature (1)..(447): NCBI GI NO: 7230385 NR Description: elongation factor 1 alpha [Zea mays]
  misc_feature (1)..(447): NCBI GI NO: 1864017 NR Description: elongation factor-1 alpha [Nicotiana tabacum]
  misc_feature (36)..(36): Xaa is any aa, unknown or other
  misc_feature (114)..(114): Xaa is any aa, unknown or other
  misc_feature (123)..(123): Xaa is any aa, unknown or other
  misc_feature (143)..(143): Xaa is any aa, unknown or other
  misc_feature (181)..(181): Xaa is any aa, unknown or other
  misc_feature (247)..(247): Xaa is any aa, unknown or other
MGKEKTHINIVVIGHVDSGKSTTTGHLIYKLGGIDXRVIERFEKEAAEMNKRSFKYAWVLDKLKGERERGITIDIALWKFETTKYYCTVIDAPGHRDFIKNMITGTSQADCAVXIIDSTTGGXEAGISKDGQTREHALLAFTXGVKQMICCCNKMDATTPKYSKARYDEIVKEVSSYLKKXGYNPDKIHFVPISGFEGDNMIERSTNLDWYKGPTLLEALDLINEPKRPSDKPLRLPLQDVYKIGGXGTVPVGRVETGIIKPGMVVTFGPSGLTTEVKSVEMHHEALQEALPGDNVGFNVKNVAVKDLKRGYVASNSKDDPAKEAASFTSQVIIMNHPGQIGNGYAPVLDCHTSHIAVKFAELITKIDRRSGKELEKEPKFLKNGDAGMVKMVPTKPMVVETFSEYPPLGRFAVRDMRQTVAVGVIKSVEKKDPTGAKVTKAAAKKK

SEQ ID NO: 36576 - protein, 399 aa, Zea mays subsp. mays
  peptide (1)..(399): Ceres Seq. ID no. 12344385
  misc_feature (1)..(179): Pfam Name: Pfam Description:  Elongation factor Tu GTP binding domain
  misc_feature (1)..(399): NCBI GI NO: 2282584 NR Description: elongation factor 1-alpha [Zea mays]
  misc_feature (1)..(399): NCBI GI NO: 3122071 NR Description: ELONGATION FACTOR 1-ALPHA (EF-1-ALPHA)
  misc_feature (1)..(399): NCBI GI NO: 18873725 NR Description: elongation factor 1 alpha
  misc_feature (1)..(399): NCBI GI NO: 2662341 NR Description: EF-1 alpha [Oryza sativa]
  misc_feature (1)..(399): NCBI GI NO: 2662343 NR Description: EF-1 alpha [Oryza sativa]
  misc_feature (1)..(399): NCBI GI NO: 6015059 NR Description: ELONGATION FACTOR 1-ALPHA (EF-1-ALPHA)
  misc_feature (1)..(399): NCBI GI NO: 18873727 NR Description: elongation factor 1 alpha
  misc_feature (1)..(399): NCBI GI NO: 7230387 NR Description: elongation factor 1 alpha [Zea mays]
  misc_feature (1)..(399): NCBI GI NO: 7230385 NR Description: elongation factor 1 alpha [Zea mays]
  misc_feature (1)..(399): NCBI GI NO: 1864017 NR Description: elongation factor-1 alpha [Nicotiana tabacum]
  misc_feature (66)..(66): Xaa is any aa, unknown or other
  misc_feature (75)..(75): Xaa is any aa, unknown or other
  misc_feature (95)..(95): Xaa is any aa, unknown or other
  misc_feature (133)..(133): Xaa is any aa, unknown or other
  misc_feature (199)..(199): Xaa is any aa, unknown or other
MNKRSFKYAWVLDKLKGERERGITIDIALWKFETTKYYCTVIDAPGHRDFIKNMITGTSQADCAVXIIDSTTGGXEAGISKDGQTREHALLAFTXGVKQMICCCNKMDATTPKYSKARYDEIVKEVSSYLKKXGYNPDKIHFVPISGFEGDNMIERSTNLDWYKGPTLLEALDLINEPKRPSDKPLRLPLQDVYKIGGXGTVPVGRVETGIIKPGMVVTFGPSGLTTEVKSVEMHHEALQEALPGDNVGFNVKNVAVKDLKRGYVASNSKDDPAKEAASFTSQVIIMNHPGQIGNGYAPVLDCHTSHIAVKFAELITKIDRRSGKELEKEPKFLKNGDAGMVKMVPTKPMVVETFSEYPPLGRFAVRDMRQTVAVGVIKSVEKKDPTGAKVTKAAAKKK

SEQ ID NO: 36577 - protein, 346 aa, Zea mays subsp. mays
  peptide (1)..(346): Ceres Seq. ID no. 12344386
  misc_feature (1)..(126): Pfam Name: Pfam Description:  Elongation factor Tu GTP binding domain
  misc_feature (1)..(346): NCBI GI NO: 2282584 NR Description: elongation factor 1-alpha [Zea mays]
  misc_feature (1)..(346): NCBI GI NO: 3122071 NR Description: ELONGATION FACTOR 1-ALPHA (EF-1-ALPHA)
  misc_feature (1)..(346): NCBI GI NO: 18873725 NR Description: elongation factor 1 alpha
  misc_feature (1)..(346): NCBI GI NO: 2662341 NR Description: EF-1 alpha [Oryza sativa]
  misc_feature (1)..(346): NCBI GI NO: 2662343 NR Description: EF-1 alpha [Oryza sativa]
  misc_feature (1)..(346): NCBI GI NO: 6015059 NR Description: ELONGATION FACTOR 1-ALPHA (EF-1-ALPHA)
  misc_feature (1)..(346): NCBI GI NO: 18873727 NR Description: elongation factor 1 alpha
  misc_feature (1)..(346): NCBI GI NO: 7230387 NR Description: elongation factor 1 alpha [Zea mays]
  misc_feature (1)..(346): NCBI GI NO: 7230385 NR Description: elongation factor 1 alpha [Zea mays]
  misc_feature (1)..(346): NCBI GI NO: 1864017 NR Description: elongation factor-1 alpha [Nicotiana tabacum]
  misc_feature (13)..(13): Xaa is any aa, unknown or other
  misc_feature (22)..(22): Xaa is any aa, unknown or other
  misc_feature (42)..(42): Xaa is any aa, unknown or other
  misc_feature (80)..(80): Xaa is any aa, unknown or other
  misc_feature (146)..(146): Xaa is any aa, unknown or other
MITGTSQADCAVXIIDSTTGGXEAGISKDGQTREHALLAFTXGVKQMICCCNKMDATTPKYSKARYDEIVKEVSSYLKKXGYNPDKIHFVPISGFEGDNMIERSTNLDWYKGPTLLEALDLINEPKRPSDKPLRLPLQDVYKIGGXGTVPVGRVETGIIKPGMVVTFGPSGLTTEVKSVEMHHEALQEALPGDNVGFNVKNVAVKDLKRGYVASNSKDDPAKEAASFTSQVIIMNHPGQIGNGYAPVLDCHTSHIAVKFAELITKIDRRSGKELEKEPKFLKNGDAGMVKMVPTKPMVVETFSEYPPLGRFAVRDMRQTVAVGVIKSVEKKDPTGAKVTKAAAKKK

SEQ ID NO: 36578 - DNA, 874 bp, Zea mays subsp. mays
  misc_feature (1)..(874): Ceres Seq. ID no. 12469372
  misc_feature (672)..(672): n is a, c, t, g, unknown, or other
  misc_feature (788)..(788): n is a, c, t, g, unknown, or other
  misc_feature (805)..(805): n is a, c, t, g, unknown, or other
  misc_feature (757)..(757): n is a, c, t, g, unknown, or other
  misc_feature (675)..(675): n is a, c, t, g, unknown, or other
  misc_feature (711)..(711): n is a, c, t, g, unknown, or other
  misc_feature (624)..(624): n is a, c, t, g, unknown, or other
  misc_feature (611)..(611): n is a, c, t, g, unknown, or other
gggatctgacggcaattccccaattcgattccatcccatgggttggcgttggcacgacgacgacggtgacagcggccggggcctcggcggtgtccctgacctcgctggtggcgggggcgatggggcgcagtgcgccacgcgacgggtggtgcagtcccgctgccacacggaggaagtcgagcccggccgatttgtccgcaagtgcgagaagacggagcagctcctccgcgactgcgtcggcaggccctctgaactggtggaatccaaaactgaaaacactgaagaagatgtcacagaagaaatgaagagcggttcactttctcttgggtttccaagaaacgagcccttcgcattccctggactccgcagtgacatggaagcccttgagaaagacttctttgggagcctagggaacgtcctggatgaagctgagcggatggccaacagcttcgtcagatcttttggttttccacctgctcatgacagcggatcaagtccatttcgaagacagcctgcagacaggcatattgaggaagataccgcaaagaataagactgagagcgactactcagaattcaggagcaagatttcagatgtgtaagcagctgtanagctgcagttatntggcctgtgtccatgagctgaaacctgagaagtgagagctttgcaatntcncggtccttatatgtttctctttggaacaaaataggnacttgcggcctgcaggtgctgtttagcctcgcttagtatggtaatngtaatggtagatgaagtgatttgcctgtcanaggtgaggagtattatntgttatgttcggttttgcagggccattttgtacagtactttttgcagacccagcatttgaaatgtttgc

SEQ ID NO: 36579 - protein, 199 aa, Zea mays subsp. mays
  peptide (1)..(199): Ceres Seq. ID no. 12469373
  misc_feature (13)..(187): NCBI GI NO: 15227527 NR Description: hypothetical protein; protein id: At2g35900
  misc_feature (13)..(87): NCBI GI NO: 34909928 NR Description: P0665A11.24
  misc_feature (98)..(199): NCBI GI NO: 34909928 NR Description: P0665A11.24
GSDGNSPIRFHPMGWRWHDDDGDSGRGLGGVPDLAGGGGDGAQCATRRVVQSRCHTEEVEPGRFVRKCEKTEQLLRDCVGRPSELVESKTENTEEDVTEEMKSGSLSLGFPRNEPFAFPGLRSDMEALEKDFFGSLGNVLDEAERMANSFVRSFGFPPAHDSGSSPFRRQPADRHIEEDTAKNKTESDYSEFRSKISDV

SEQ ID NO: 36580 - protein, 187 aa, Zea mays subsp. mays
  peptide (1)..(187): Ceres Seq. ID no. 12469374
  misc_feature (1)..(175): NCBI GI NO: 15227527 NR Description: hypothetical protein; protein id: At2g35900
  misc_feature (1)..(75): NCBI GI NO: 34909928 NR Description: P0665A11.24
  misc_feature (86)..(187): NCBI GI NO: 34909928 NR Description: P0665A11.24
MGWRWHDDDGDSGRGLGGVPDLAGGGGDGAQCATRRVVQSRCHTEEVEPGRFVRKCEKTEQLLRDCVGRPSELVESKTENTEEDVTEEMKSGSLSLGFPRNEPFAFPGLRSDMEALEKDFFGSLGNVLDEAERMANSFVRSFGFPPAHDSGSSPFRRQPADRHIEEDTAKNKTESDYSEFRSKISDV

SEQ ID NO: 36581 - protein, 100 aa, Zea mays subsp. mays
  peptide (1)..(100): Ceres Seq. ID no. 12469375
DLTAIPQFDSIPWVGVGTTTTVTAAGASAVSLTSLVAGAMGRSAPRDGWCSPAATRRKSSPADLSASARRRSSSSATASAGPLNWWNPKLKTLKKMSQKK

SEQ ID NO: 36582 - DNA, 905 bp, Zea mays subsp. mays
  misc_feature (1)..(905): Ceres Seq. ID no. 12469368
  misc_feature (664)..(664): n is a, c, t, g, unknown, or other
tgttggactcggacctgttgctgcgtgcagccgcgtccgggtttgggttcatgatgcgcgacatgacggtggagaactgggcggggccggcggggcaccaggcggtggcgctgcgcgtgagcgccgaccgcgccgtcgtccaccgctgcagcatcgccgggtaccaggacacgctgtacgcgcattctaaccgccagttctaccgcgactgcgacatctacggcaccgtggacttcgtcttcggcaatgccgccgccgtgctccagcgctgcaacctctgggcgcgcgtgccgctgccgggccagaagaacaccgtcaccgcgcagagccggaacgattcgtgccagcgcaccggcatcgtcctccacgcctgccgcctcgtggcggccgcgccggcagaaggcctctcgcccgcggcggccccggcgcccgtcccggaccgttcgccgctgctcctctccccgacgacgtacctgggccggccatggaagtccttctccagggtggtggtgatgatgtcgtacatcggcccgcacgtgccgccgcagggatggatggagtggaacgccaccagcacctacgcactcgacaggctttacttcggcgagtacatgaactacgggcccggcgctgggttggccgggcgtgttgcgtggcctggccnccgcgtcatcaacagcaccgcggaagcggagagcttcacggtggcgcggttcatcgacggcgcgtcctggctgccggccgccggggtctccttcgttgccgggctctcgctgctgtaatcgtcttgatggaaatcccagggcacaccagggaccaggcaggctgagtgacaagtagacgtgataatgtacttttagtggcggcagttcgaatcaattcaaatcattttgctgtgagatttc

SEQ ID NO: 36583 - protein, 259 aa, Zea mays subsp. mays
  peptide (1)..(259): Ceres Seq. ID no. 12469369
  misc_feature (10)..(241): Pfam Name: Pfam Description:  Pectinesterase
  misc_feature (10)..(258): NCBI GI NO: 34904380 NR Description: unnamed protein product
  misc_feature (10)..(256): NCBI GI NO: 34908778 NR Description: putative pectin esterase
  misc_feature (10)..(254): NCBI GI NO: 6093744 NR Description: Pectinesterase PPE8B precursor
  misc_feature (10)..(131): NCBI GI NO: 34902864 NR Description: unnamed protein product
  misc_feature (156)..(257): NCBI GI NO: 34902864 NR Description: unnamed protein product
  misc_feature (10)..(126): NCBI GI NO: 14582864 NR Description: putative pectin methylesterase LuPME1
  misc_feature (156)..(256): NCBI GI NO: 14582864 NR Description: putative pectin methylesterase LuPME1
  misc_feature (10)..(256): NCBI GI NO: 29539387 NR Description: pectin methylesterase [Pisum sativum]
  misc_feature (11)..(131): NCBI GI NO: 15236734 NR Description: pectinesterase family; protein id: At4g00190.1
  misc_feature (156)..(256): NCBI GI NO: 15236734 NR Description: pectinesterase family; protein id: At4g00190.1
  misc_feature (221)..(221): Xaa is any aa, unknown or other
LDSDLLLRAAASGFGFMMRDMTVENWAGPAGHQAVALRVSADRAVVHRCSIAGYQDTLYAHSNRQFYRDCDIYGTVDFVFGNAAAVLQRCNLWARVPLPGQKNTVTAQSRNDSCQRTGIVLHACRLVAAAPAEGLSPAAAPAPVPDRSPLLLSPTTYLGRPWKSFSRVVVMMSYIGPHVPPQGWMEWNATSTYALDRLYFGEYMNYGPGAGLAGRVAWPGXRVINSTAEAESFTVARFIDGASWLPAAGVSFVAGLSLL

SEQ ID NO: 36584 - protein, 243 aa, Zea mays subsp. mays
  peptide (1)..(243): Ceres Seq. ID no. 12469370
  misc_feature (1)..(225): Pfam Name: Pfam Description:  Pectinesterase
  misc_feature (1)..(242): NCBI GI NO: 34904380 NR Description: unnamed protein product
  misc_feature (1)..(240): NCBI GI NO: 34908778 NR Description: putative pectin esterase
  misc_feature (1)..(238): NCBI GI NO: 6093744 NR Description: Pectinesterase PPE8B precursor
  misc_feature (1)..(115): NCBI GI NO: 34902864 NR Description: unnamed protein product
  misc_feature (140)..(241): NCBI GI NO: 34902864 NR Description: unnamed protein product
  misc_feature (1)..(110): NCBI GI NO: 14582864 NR Description: putative pectin methylesterase LuPME1
  misc_feature (140)..(240): NCBI GI NO: 14582864 NR Description: putative pectin methylesterase LuPME1
  misc_feature (1)..(240): NCBI GI NO: 29539387 NR Description: pectin methylesterase [Pisum sativum]
  misc_feature (1)..(115): NCBI GI NO: 15236734 NR Description: pectinesterase family; protein id: At4g00190.1
  misc_feature (140)..(240): NCBI GI NO: 15236734 NR Description: pectinesterase family; protein id: At4g00190.1
  misc_feature (205)..(205): Xaa is any aa, unknown or other
MMRDMTVENWAGPAGHQAVALRVSADRAVVHRCSIAGYQDTLYAHSNRQFYRDCDIYGTVDFVFGNAAAVLQRCNLWARVPLPGQKNTVTAQSRNDSCQRTGIVLHACRLVAAAPAEGLSPAAAPAPVPDRSPLLLSPTTYLGRPWKSFSRVVVMMSYIGPHVPPQGWMEWNATSTYALDRLYFGEYMNYGPGAGLAGRVAWPGXRVINSTAEAESFTVARFIDGASWLPAAGVSFVAGLSLL

SEQ ID NO: 36585 - protein, 242 aa, Zea mays subsp. mays
  peptide (1)..(242): Ceres Seq. ID no. 12469371
  misc_feature (1)..(224): Pfam Name: Pfam Description:  Pectinesterase
  misc_feature (1)..(241): NCBI GI NO: 34904380 NR Description: unnamed protein product
  misc_feature (1)..(239): NCBI GI NO: 34908778 NR Description: putative pectin esterase
  misc_feature (1)..(237): NCBI GI NO: 6093744 NR Description: Pectinesterase PPE8B precursor
  misc_feature (1)..(114): NCBI GI NO: 34902864 NR Description: unnamed protein product
  misc_feature (139)..(240): NCBI GI NO: 34902864 NR Description: unnamed protein product
  misc_feature (1)..(109): NCBI GI NO: 14582864 NR Description: putative pectin methylesterase LuPME1
  misc_feature (139)..(239): NCBI GI NO: 14582864 NR Description: putative pectin methylesterase LuPME1
  misc_feature (1)..(239): NCBI GI NO: 29539387 NR Description: pectin methylesterase [Pisum sativum]
  misc_feature (1)..(114): NCBI GI NO: 15236734 NR Description: pectinesterase family; protein id: At4g00190.1
  misc_feature (139)..(239): NCBI GI NO: 15236734 NR Description: pectinesterase family; protein id: At4g00190.1
  misc_feature (204)..(204): Xaa is any aa, unknown or other
MRDMTVENWAGPAGHQAVALRVSADRAVVHRCSIAGYQDTLYAHSNRQFYRDCDIYGTVDFVFGNAAAVLQRCNLWARVPLPGQKNTVTAQSRNDSCQRTGIVLHACRLVAAAPAEGLSPAAAPAPVPDRSPLLLSPTTYLGRPWKSFSRVVVMMSYIGPHVPPQGWMEWNATSTYALDRLYFGEYMNYGPGAGLAGRVAWPGXRVINSTAEAESFTVARFIDGASWLPAAGVSFVAGLSLL

SEQ ID NO: 36586 - DNA, 771 bp, Zea mays subsp. mays
  misc_feature (1)..(771): Ceres Seq. ID no. 14306082
accggatcaccagcctacagctcgtcacatctctctctccgcccggccggcctctagactcactctagccatatggccacggtgcacggcagcaggctcatcttcctcttcgaggccacgctcttctcggcgctgctgctcgtcccggcacgccctgcttccgccacagacggcagcgcgtacccggccggcgactgcccctacccgtgcctgccgccgcccgccgtcaccgccaactgcccgccgcctccgccggctgcggcgtcgtactcgtacccgccaccgccgggggcttacattccctacttccagcctgcggcgggtggcggtggtggcggcggtagtggggggtacggcggctacccggcgccgccgccgcccaaccccatcctgccgtggtacccatggtactacaagacgccgccgtcgtcctcggccgccacgtcgggcagggggagtcgcgttcttcttgggtcggccgccatggtagctgctgctgccctgctgatcatggcttagccgcagcccgcagcagtcgttctttttgcatcttcgatcttgtcctctcccccaggttttctttctttttttcttttgttgatttactgctcaggatttatattcagaggtatatatataacgaggcagcattatatatattgcttgtactcctaatttatcagctacatgtctctagttccatgattaaaatgattaccactcaactttgagtagtggagcaactatgggcgtgtttgccaccttggtccg

SEQ ID NO: 36587 - protein, 162 aa, Zea mays subsp. mays
  peptide (1)..(162): Ceres Seq. ID no. 14306083
PDHQPTARHISLSARPASRLTLAIWPRCTAAGSSSSSRPRSSRRCCSSRHALLPPQTAARTRPATAPTRACRRPPSPPTARRLRRLRRRTRTRHRRGLTFPTSSLRRVAVVAAVVGGTAATRRRRRPTPSCRGTHGTTRRRRRPRPPRRAGGVAFFLGRPPW

SEQ ID NO: 36588 - protein, 148 aa, Zea mays subsp. mays
  peptide (1)..(148): Ceres Seq. ID no. 14306084
  misc_feature (43)..(118): Pfam Name: Pfam Description:  Extensin-like region
  misc_feature (17)..(146): NCBI GI NO: 34894212 NR Description: P0439B06.27
  misc_feature (1)..(123): NCBI GI NO: 18423010 NR Description: proline-rich protein family [Arabidopsis thaliana]
  misc_feature (17)..(139): NCBI GI NO: 18397707 NR Description: proline-rich protein family [Arabidopsis thaliana]
  misc_feature (42)..(145): NCBI GI NO: 18409730 NR Description: proline-rich protein family [Arabidopsis thaliana]
  misc_feature (42)..(147): NCBI GI NO: 15220010 NR Description: expressed protein [Arabidopsis thaliana]
  misc_feature (1)..(131): NCBI GI NO: 15234820 NR Description: proline-rich protein family [Arabidopsis thaliana]
  misc_feature (58)..(143): NCBI GI NO: 34894480 NR Description: OJ1116_C07.3
  misc_feature (38)..(141): NCBI GI NO: 18422542 NR Description: proline-rich protein family [Arabidopsis thaliana]
  misc_feature (29)..(137): NCBI GI NO: 7510074 NR Description: hypothetical protein Y50E8A
MATVHGSRLIFLFEATLFSALLLVPARPASATDGSAYPAGDCPYPCLPPPAVTANCPPPPPAAASYSYPPPPGAYIPYFQPAAGGGGGGGSGGYGGYPAPPPPNPILPWYPWYYKTPPSSSAATSGRGSRVLLGSAAMVAAAALLIMA

SEQ ID NO: 36589 - protein, 108 aa, Zea mays subsp. mays
  peptide (1)..(108): Ceres Seq. ID no. 14306085
MVLQDAAVVLGRHVGQGESRSSWVGRHGSCCCPADHGLAAARSSRSFCIFDLVLSPRFSFFFSFVDLLLRIYIQRYIYNEAALYILLVLLIYQLHVSSSMIKMITTQL

SEQ ID NO: 36590 - DNA, 1114 bp, Zea mays subsp. mays
  misc_feature (1)..(1114): Ceres Seq. ID no. 14306124
aaaccggagcattccattgtaccccgcggtgacgcgtcccggccccggcggccggcgggtctgcctaccggtaccggccccgctcgctcgccgagtcaacggcttgactgcgcccgcccgccacgttcgtagtactatacaagtacatgcctttgccttccctttcctctcctctcctcctctcccacagtcccacccgtttcgcagtgcagaagccggcgaaacttccaagcccaaggaaggaaaaaaaaaactgtcacctttaactcgatcccctcttccccgcccgagtcagagcggcggcgccggagccggagccgacagcttccggcaagcgggggctacttggtgcggcgggctatttccgcggttttgtgccacagcgggactgaactgcccgcccaggctgccctatcagggtcaccaagattgaacaagactgaactgccgcgcttcaggatactgaactgccatctcagttaaatgatatactgcacaacagtgggcagcgatagtttgagacacattagcaatgagttgtttttctcaccttttcaagagaaaaagggggccacaacaacaagacgatccatctgacaattatttcactggttctgagaatataacaagattcagctacagggaactggttagagccacatcaaattttgaccaaggcaataagattggtgagggcggctatggacctgtctacaagggaacactcaaggatgggacacttattgccgtgaaggttctgtctttacattctagacaaggggcaaaggagtttcttaatgagcttcttgcaatctctgatgtaacacatgagaatcttgtcaaactctatggctgctgtgtagaaggaaaccacaggatccttatctacaattatcttgaaaataatagtcttgcacatacccttctagattcgcgacacagcaacatccagttcaactggagaactcgggtaaatatctgcatcggtgttgcccaaggattagctttcctccatggcagtgtcagccctcacattgttcaccgtgacatcaaggcgagcaatatacttcttgataaggatatgacgccaaaaatatctgattttggtctggca

SEQ ID NO: 36591 - protein, 194 aa, Zea mays subsp. mays
  peptide (1)..(194): Ceres Seq. ID no. 14306125
  misc_feature (3)..(193): NCBI GI NO: 38344329 NR Description: OSJNBa0058K23.11
  misc_feature (22)..(193): NCBI GI NO: 18394385 NR Description: protein kinase family [Arabidopsis thaliana]
  misc_feature (29)..(193): NCBI GI NO: 25287648 NR Description: hypothetical protein F19K19.4
  misc_feature (28)..(193): NCBI GI NO: 5923666 NR Description: putative receptor ser/thr protein kinase
  misc_feature (28)..(193): NCBI GI NO: 18398327 NR Description: protein kinase family [Arabidopsis thaliana]
  misc_feature (28)..(193): NCBI GI NO: 6403501 NR Description: putative protein kinase [Arabidopsis thaliana]
  misc_feature (27)..(193): NCBI GI NO: 34901978 NR Description: putative receptor ser/thr protein
  misc_feature (1)..(193): NCBI GI NO: 38344039 NR Description: OSJNBb0017I01.6
  misc_feature (63)..(193): NCBI GI NO: 5679843 NR Description: Putitive Ser/Thr protein kinase
  misc_feature (10)..(149): NCBI GI NO: 5852099 NR Description: zwh22.1 [Oryza sativa (indica cultivar-group)]
MSCFSHLFKRKRGPQQQDDPSDNYFTGSENITRFSYRELVRATSNFDQGNKIGEGGYGPVYKGTLKDGTLIAVKVLSLHSRQGAKEFLNELLAISDVTHENLVKLYGCCVEGNHRILIYNYLENNSLAHTLLDSRHSNIQFNWRTRVNICIGVAQGLAFLHGSVSPHIVHRDIKASNILLDKDMTPKISDFGLA

SEQ ID NO: 36592 - protein, 143 aa, Zea mays subsp. mays
  peptide (1)..(143): Ceres Seq. ID no. 14306126
  misc_feature (80)..(143): NCBI GI NO: 15219817 NR Description: receptor-related kinase [Arabidopsis thaliana]
NRSIPLYPAVTRPGPGGRRVCLPVPAPLARRVNGLTAPARHVRSTIQVHAFAFPFLSSPPLPQSHPFRSAEAGETSKPKEGKKKLSPLTRSPLPRPSQSGGAGAGADSFRQAGATWCGGLFPRFCATAGLNCPPRLPYQGHQD

SEQ ID NO: 36593 - DNA, 854 bp, Zea mays subsp. mays
  misc_feature (1)..(854): Ceres Seq. ID no. 13635448
acccacccccacacccacgcgcccggcggcgtgctctctgctctctgctgtctgctctgcacccaggaccttcggccacaggagctcagccctatccctcgacggagctcgcggcggctcgacccttccccatctccagctgcacgcggtctccaccgcctggaatccagggcctccgacgccaccccacctacaccgactggaatcgaggaccgtcggcgccgccgtcccctgcctgctgcctcgactcaactgtgtcagggtattcgcaaacggtgacaaaggttctgtcttgccttgctgtggagccatggctgcaaagatacgcgtggtgatgaagtcttttatgagccaaagcaaccaggtcgtagggcttctgccattcacaaagaaggtcggactacctgaatcgcgagccttgtacaccgtgctgcggtcgccgcatatcgataagaagtccagggaacagttctcgatgcatgtcaagaaacagtttgtggaactgacagccaaaccgcacgagctccacaagaagttcttctggctaaaacgcctgcgcatacctggggcccagtacgaggtgcagatttctttcaagacacgcctggatatggcgagcctaaggtcccaggctccttgatggctcacgatgatcgttcttatcgtcccgcgaaagtttgaagtgctgagactggtactcagaacttgtatccatcaacatttcatatgaagacatgcttattttgatgactttcgaaaaatgtagctgctaactatttccagtgcagttttgagtgcttatggcttgattcacacaaatgtagctgctacgttcagaaataaaaaaattatgg

SEQ ID NO: 36594 - protein, 212 aa, Zea mays subsp. mays
  peptide (1)..(212): Ceres Seq. ID no. 13635449
  misc_feature (107)..(196): Pfam Name: Pfam Description:  Ribosomal protein S10p/S20e
  misc_feature (104)..(212): NCBI GI NO: 11177526 NR Description: ribosomal protein S10 [Zea mays]
  misc_feature (104)..(212): NCBI GI NO: 11528351 NR Description: ribosomal protein S10 [Zea mays]
  misc_feature (104)..(209): NCBI GI NO: 9229951 NR Description: mitochondrial ribosomal protein S10
  misc_feature (104)..(209): NCBI GI NO: 9229953 NR Description: mitochondrial ribosomal protein S10
  misc_feature (104)..(208): NCBI GI NO: 2119076 NR Description: ribosomal protein S10 - potato mitochondrion
  misc_feature (104)..(208): NCBI GI NO: 1362069 NR Description: ribosomal protein S10 - garden pea mitochondrion
  misc_feature (104)..(208): NCBI GI NO: 1710792 NR Description: MITOCHONDRIAL RIBOSOMAL PROTEIN S10
  misc_feature (104)..(208): NCBI GI NO: 11177522 NR Description: ribosomal protein S10 [Oxalis regnellii]
  misc_feature (107)..(207): NCBI GI NO: 2119078 NR Description: ribosomal protein S10 precursor
  misc_feature (107)..(207): NCBI GI NO: 15228720 NR Description: 40S ribosomal protein S10, mitochondrial precursor
PTPTPTRPAACSLLSAVCSAPRTFGHRSSALSLDGARGGSTLPHLQLHAVSTAWNPGPPTPPHLHRLESRTVGAAVPCLLPRLNCVRVFANGDKGSVLPCCGAMAAKIRVVMKSFMSQSNQVVGLLPFTKKVGLPESRALYTVLRSPHIDKKSREQFSMHVKKQFVELTAKPHELHKKFFWLKRLRIPGAQYEVQISFKTRLDMASLRSQAP

SEQ ID NO: 36595 - protein, 110 aa, Zea mays subsp. mays
  peptide (1)..(110): Ceres Seq. ID no. 13635450
PPPHPRARRRALCSLLSALHPGPSATGAQPYPSTELAAARPFPISSCTRSPPPGIQGLRRHPTYTDWNRGPSAPPSPACCLDSTVSGYSQTVTKVLSCLAVEPWLQRYAW

SEQ ID NO: 36596 - protein, 109 aa, Zea mays subsp. mays
  peptide (1)..(109): Ceres Seq. ID no. 13635451
  misc_feature (4)..(93): Pfam Name: Pfam Description:  Ribosomal protein S10p/S20e
  misc_feature (1)..(109): NCBI GI NO: 11177526 NR Description: ribosomal protein S10 [Zea mays]
  misc_feature (1)..(109): NCBI GI NO: 11528351 NR Description: ribosomal protein S10 [Zea mays]
  misc_feature (1)..(106): NCBI GI NO: 9229951 NR Description: mitochondrial ribosomal protein S10
  misc_feature (1)..(106): NCBI GI NO: 9229953 NR Description: mitochondrial ribosomal protein S10
  misc_feature (1)..(105): NCBI GI NO: 2119076 NR Description: ribosomal protein S10 - potato mitochondrion
  misc_feature (1)..(105): NCBI GI NO: 1362069 NR Description: ribosomal protein S10 - garden pea mitochondrion
  misc_feature (1)..(105): NCBI GI NO: 1710792 NR Description: MITOCHONDRIAL RIBOSOMAL PROTEIN S10
  misc_feature (1)..(105): NCBI GI NO: 11177522 NR Description: ribosomal protein S10 [Oxalis regnellii]
  misc_feature (4)..(104): NCBI GI NO: 2119078 NR Description: ribosomal protein S10 precursor
  misc_feature (4)..(104): NCBI GI NO: 15228720 NR Description: 40S ribosomal protein S10, mitochondrial precursor
MAAKIRVVMKSFMSQSNQVVGLLPFTKKVGLPESRALYTVLRSPHIDKKSREQFSMHVKKQFVELTAKPHELHKKFFWLKRLRIPGAQYEVQISFKTRLDMASLRSQAP

SEQ ID NO: 36597 - DNA, 456 bp, Zea mays subsp. mays
  misc_feature (1)..(456): Ceres Seq. ID no. 4487388
ccccgttcagtcgcagcccaggccgacgacggcagagagcgagccgacgccgccgcaccctcgtgccagaccttagctaaaagattggattcaaaggactgggttatgacatgtgaagctctcaacaatgttcgtcagttggcaatgtatcacaaggaacgattgcaggagcttctggagcctgtagttcctcttatcgtgaaatctgtgaagaacccaagaagtgctgtatgcaaaactgcactaatgacttgtgctgacatctttaaggcctatggtgacttaatggttcactcaatcgatccactgctagtacaactgtttctgaaggcttcacaagataagcgttttgtctgtgaagctgcagaggcagctcttatatcgatgacaagttggatctcccctttactactcttgccaagaatgctgccttacctcaagaacaagaatccacgg

SEQ ID NO: 36598 - protein, 152 aa, Zea mays subsp. mays
  peptide (1)..(152): Ceres Seq. ID no. 4487389
  misc_feature (10)..(151): NCBI GI NO: 15241493 NR Description: putative protein; protein id: At5g14790
  misc_feature (23)..(151): NCBI GI NO: 18395821 NR Description: expressed protein; protein id: At3g01450
  misc_feature (23)..(151): NCBI GI NO: 21537265 NR Description: unknown [Arabidopsis thaliana]
  misc_feature (21)..(151): NCBI GI NO: 21593517 NR Description: unknown [Arabidopsis thaliana]
  misc_feature (21)..(151): NCBI GI NO: 18414533 NR Description: expressed protein; protein id: At4g15830
  misc_feature (35)..(151): NCBI GI NO: 9294314 NR Description: gb|AAF24615
  misc_feature (62)..(151): NCBI GI NO: 15229670 NR Description: unknown protein; protein id: At3g18530.1
  misc_feature (62)..(151): NCBI GI NO: 7485173 NR Description: hypothetical protein - Arabidopsis thaliana
  misc_feature (29)..(135): NCBI GI NO: 40807213 NR Description: Unknown (protein for IMAGE:6161345) [Homo sapiens]
PRSVAAQADDGRERADAAAPSCQTLAKRLDSKDWVMTCEALNNVRQLAMYHKERLQELLEPVVPLIVKSVKNPRSAVCKTALMTCADIFKAYGDLMVHSIDPLLVQLFLKASQDKRFVCEAAEAALISMTSWISPLLLLPRMLPYLKNKNPR

SEQ ID NO: 36599 - protein, 117 aa, Zea mays subsp. mays
  peptide (1)..(117): Ceres Seq. ID no. 4487390
  misc_feature (1)..(116): NCBI GI NO: 15241493 NR Description: putative protein; protein id: At5g14790
  misc_feature (1)..(116): NCBI GI NO: 18395821 NR Description: expressed protein; protein id: At3g01450
  misc_feature (1)..(116): NCBI GI NO: 21537265 NR Description: unknown [Arabidopsis thaliana]
  misc_feature (1)..(116): NCBI GI NO: 21593517 NR Description: unknown [Arabidopsis thaliana]
  misc_feature (1)..(116): NCBI GI NO: 18414533 NR Description: expressed protein; protein id: At4g15830
  misc_feature (1)..(116): NCBI GI NO: 9294314 NR Description: gb|AAF24615
  misc_feature (27)..(116): NCBI GI NO: 15229670 NR Description: unknown protein; protein id: At3g18530.1
  misc_feature (27)..(116): NCBI GI NO: 7485173 NR Description: hypothetical protein - Arabidopsis thaliana
  misc_feature (1)..(100): NCBI GI NO: 40807213 NR Description: Unknown (protein for IMAGE:6161345) [Homo sapiens]
MTCEALNNVRQLAMYHKERLQELLEPVVPLIVKSVKNPRSAVCKTALMTCADIFKAYGDLMVHSIDPLLVQLFLKASQDKRFVCEAAEAALISMTSWISPLLLLPRMLPYLKNKNPR

SEQ ID NO: 36600 - protein, 104 aa, Zea mays subsp. mays
  peptide (1)..(104): Ceres Seq. ID no. 4487391
  misc_feature (1)..(103): NCBI GI NO: 15241493 NR Description: putative protein; protein id: At5g14790
  misc_feature (1)..(103): NCBI GI NO: 18395821 NR Description: expressed protein; protein id: At3g01450
  misc_feature (1)..(103): NCBI GI NO: 21537265 NR Description: unknown [Arabidopsis thaliana]
  misc_feature (1)..(103): NCBI GI NO: 21593517 NR Description: unknown [Arabidopsis thaliana]
  misc_feature (1)..(103): NCBI GI NO: 18414533 NR Description: expressed protein; protein id: At4g15830
  misc_feature (1)..(103): NCBI GI NO: 9294314 NR Description: gb|AAF24615
  misc_feature (14)..(103): NCBI GI NO: 15229670 NR Description: unknown protein; protein id: At3g18530.1
  misc_feature (14)..(103): NCBI GI NO: 7485173 NR Description: hypothetical protein - Arabidopsis thaliana
  misc_feature (1)..(87): NCBI GI NO: 40807213 NR Description: Unknown (protein for IMAGE:6161345) [Homo sapiens]
MYHKERLQELLEPVVPLIVKSVKNPRSAVCKTALMTCADIFKAYGDLMVHSIDPLLVQLFLKASQDKRFVCEAAEAALISMTSWISPLLLLPRMLPYLKNKNPR

SEQ ID NO: 36601 - DNA, 1094 bp, Zea mays subsp. mays; identical to SEQ ID NO: 36042
  misc_feature (1)..(1094): Ceres Seq. ID no. 13504098
  misc_feature (485)..(485): n is a, c, t, g, unknown, or other

SEQ ID NO: 36602 - protein, 214 aa, Zea mays subsp. mays; identical to SEQ ID NO: 36043
  peptide (1)..(214): Ceres Seq. ID no. 13504099
  misc_feature (1)..(208): Pfam Name: Pfam Description:  Eukaryotic aspartyl protease
  misc_feature (1)..(214): NCBI GI NO: 15231625 NR Description: expressed protein [Arabidopsis thaliana]
  misc_feature (1)..(214): NCBI GI NO: 15228044 NR Description: chloroplast nucleoid DNA binding protein -related
  misc_feature (1)..(214): NCBI GI NO: 25408826 NR Description: hypothetical protein At2g42980
  misc_feature (6)..(212): NCBI GI NO: 15223368 NR Description: chloroplast nucleoid DNA binding protein -related
  misc_feature (1)..(212): NCBI GI NO: 15230868 NR Description: expressed protein [Arabidopsis thaliana]
  misc_feature (6)..(212): NCBI GI NO: 21594980 NR Description: chloroplast nucleoid DNA binding protein, putative
  misc_feature (1)..(211): NCBI GI NO: 15228618 NR Description: expressed protein [Arabidopsis thaliana]
  misc_feature (1)..(211): NCBI GI NO: 15290061 NR Description: nucleoid DNA-binding protein cnd41-like protein
  misc_feature (1)..(211): NCBI GI NO: 15231010 NR Description: expressed protein [Arabidopsis thaliana]
  misc_feature (1)..(211): NCBI GI NO: 28392860 NR Description: unknown protein [Arabidopsis thaliana]
  misc_feature (161)..(161): Xaa is any aa, unknown or other

SEQ ID NO: 36603 - protein, 186 aa, Zea mays subsp. mays; identical to SEQ ID NO: 36044
  peptide (1)..(186): Ceres Seq. ID no. 13504100
  misc_feature (162)..(162): Xaa is any aa, unknown or other

SEQ ID NO: 36604 - DNA, 471 bp, Zea mays subsp. mays
  misc_feature (1)..(471): Ceres Seq. ID no. 4487301
  misc_feature (445)..(445): n is a, c, t, g, unknown, or other
attggcaagggtttagggcgcagcagagtctggtgtctcttgctccgaccccgttggcgactgagacgcgatccccttctcctgcactgccgtcctccgtcgctgcgatgcctcggtattactgtgactactgcgacacctacctgacccatgactcgccatctgtccggaaacaacataatgctggatacaaacacaaggcgaatgttcgaacctactatcagcaatttgaggagcagcaaactcaaagtttaattgatcaaagaatcaaggagcatcttggacaagctgcagctttccaagcaggtgcccctttcaaccaacatctgcttgcattcccaggagctatggcccgccctcgtcttccaattctgccaacccctggcatgcctcatgggtttcctcaagcacctggcgcaccattgatgccaggaattaggccccngattttaccagctccaggttatcctg

SEQ ID NO: 36605 - protein, 156 aa, Zea mays subsp. mays
  peptide (1)..(156): Ceres Seq. ID no. 4487302
  misc_feature (36)..(155): NCBI GI NO: 18412147 NR Description: putative C-type U1 snRNP; protein id: At4g03120
  misc_feature (36)..(155): NCBI GI NO: 28466929 NR Description: At4g03120 [Arabidopsis thaliana]
  misc_feature (36)..(143): NCBI GI NO: 25295939 NR Description: probable C-type U1 snRNP
  misc_feature (36)..(154): NCBI GI NO: 6755596 NR Description: U1 small nuclear ribonucleoprotein 1C
  misc_feature (36)..(154): NCBI GI NO: 34852241 NR Description: similar to U1 snRNP-specific protein C
  misc_feature (36)..(155): NCBI GI NO: 39580999 NR Description: Hypothetical protein CBG19656
  misc_feature (36)..(154): NCBI GI NO: 4507127 NR Description: small nuclear ribonucleoprotein polypeptide C
  misc_feature (36)..(155): NCBI GI NO: 17539712 NR Description: Small nuclear ribonucleoprotein polypeptide C like
  misc_feature (34)..(155): NCBI GI NO: 31242193 NR Description: ENSANGP00000018169 [Anopheles gambiae]
  misc_feature (36)..(154): NCBI GI NO: 24648101 NR Description: CG5454-PA [Drosophila melanogaster]
  misc_feature (148)..(148): Xaa is any aa, unknown or other
WQGFRAQQSLVSLAPTPLATETRSPSPALPSSVAAMPRYYCDYCDTYLTHDSPSVRKQHNAGYKHKANVRTYYQQFEEQQTQSLIDQRIKEHLGQAAAFQAGAPFNQHLLAFPGAMARPRLPILPTPGMPHGFPQAPGAPLMPGIRPXILPAPGYP

SEQ ID NO: 36606 - protein, 121 aa, Zea mays subsp. mays
  peptide (1)..(121): Ceres Seq. ID no. 4487303
  misc_feature (1)..(120): NCBI GI NO: 18412147 NR Description: putative C-type U1 snRNP; protein id: At4g03120
  misc_feature (1)..(120): NCBI GI NO: 28466929 NR Description: At4g03120 [Arabidopsis thaliana]
  misc_feature (1)..(108): NCBI GI NO: 25295939 NR Description: probable C-type U1 snRNP
  misc_feature (1)..(119): NCBI GI NO: 6755596 NR Description: U1 small nuclear ribonucleoprotein 1C
  misc_feature (1)..(119): NCBI GI NO: 34852241 NR Description: similar to U1 snRNP-specific protein C
  misc_feature (1)..(120): NCBI GI NO: 39580999 NR Description: Hypothetical protein CBG19656
  misc_feature (1)..(119): NCBI GI NO: 4507127 NR Description: small nuclear ribonucleoprotein polypeptide C
  misc_feature (1)..(120): NCBI GI NO: 17539712 NR Description: Small nuclear ribonucleoprotein polypeptide C like
  misc_feature (1)..(120): NCBI GI NO: 31242193 NR Description: ENSANGP00000018169 [Anopheles gambiae]
  misc_feature (1)..(119): NCBI GI NO: 24648101 NR Description: CG5454-PA [Drosophila melanogaster]
  misc_feature (113)..(113): Xaa is any aa, unknown or other
MPRYYCDYCDTYLTHDSPSVRKQHNAGYKHKANVRTYYQQFEEQQTQSLIDQRIKEHLGQAAAFQAGAPFNQHLLAFPGAMARPRLPILPTPGMPHGFPQAPGAPLMPGIRPXILPAPGYP

SEQ ID NO: 36607 - DNA, 1181 bp, Zea mays subsp. mays
  misc_feature (1)..(1181): Ceres Seq. ID no. 13622983
aaacgatacacgccgcgatagaaacactcagacacaccctctccatccgcccctccaccctcctcttcctcctcccgtcgcggcttcccccgattggcatccggggcgggcccatcccccacccggccgccgcgcgcgtccatggacggcctgcacggtacggacgcctgcttctcccccgcgagggccgtctcgccgcaggtgaggctaccggggccgccggacgtgggcagtcagtacctggcggagctgctgcaggagcaccagaagctgggacccttcatgcaggtgctcccaatctgcagcaggctgctgaatcaagagagtaggtgttccgcaaggagctatgggttggcaaggacccccacagagccctgcttcttatatcgtcaagaagattttgcggttggaagtaccgacagaaacataccctaatttcaattttatcggtcgtcttcttggaccaaggggaaattctttaaagaggattgaagcctgtacaggctgtcgtgtattcatcagagggaaaggctcaattaaagattctggcaaggaggaacaactcaagggaagacctggctatgaacacttgagtgaacccctccatatcttgattgaagctgagttacctgctaatgtgattgatgcaagacttgcaaaggcacaagagatccttgaagagttgttgaaaccagtggacgagtcacaagactactacaagagacagcaactccgagaacttgccatgttgaattcgccactccgagaggagagtccacgttcaggcggtgctcctccaagtcccttcagtaagactgtctccggtaggccgaataaaacaggggacacagaattgtagatgacactatttatcactgtttgaagagagaagtttgaaataggggatctactggagatagcctaacggcggcatgaaaagagtgaaacaatgacacccattcctccatcttgatcctccggcaaccccacttagtccatgccttcacatcctattttccatgagcaaagctttcatgatggtgttggtagtgtgtgacatcctttaatgtactagcaggtgaattttgatctcccatcccatgtgacattaaccttgagtgacagatgactatgcgtagtgtatcctctatgactgtataattagaacatttgatttatct

SEQ ID NO: 36608 - protein, 170 aa, Zea mays subsp. mays
  peptide (1)..(170): Ceres Seq. ID no. 13622984
  misc_feature (20)..(75): Pfam Name: Pfam Description:  KH domain
  misc_feature (1)..(166): NCBI GI NO: 12322716 NR Description: unknown protein; 28504-31237
  misc_feature (1)..(166): NCBI GI NO: 30680583 NR Description: KH domain protein [Arabidopsis thaliana]
  misc_feature (1)..(155): NCBI GI NO: 34900448 NR Description: contains EST C27129
  misc_feature (1)..(166): NCBI GI NO: 15224909 NR Description: KH domain protein [Arabidopsis thaliana]
  misc_feature (1)..(166): NCBI GI NO: 40645104 NR Description: hypothetical protein [Nicotiana tabacum]
  misc_feature (1)..(155): NCBI GI NO: 34909270 NR Description: P0454H12.18
  misc_feature (1)..(170): NCBI GI NO: 16930473 NR Description: At1g09660/F21M12_5 [Arabidopsis thaliana]
  misc_feature (1)..(170): NCBI GI NO: 22329449 NR Description: KH domain quaking protein, putative
  misc_feature (1)..(151): NCBI GI NO: 15236738 NR Description: KH domain protein [Arabidopsis thaliana]
  misc_feature (1)..(151): NCBI GI NO: 20268733 NR Description: unknown protein [Arabidopsis thaliana]
MGWQGPPQSPASYIVKKILRLEVPTETYPNFNFIGRLLGPRGNSLKRIEACTGCRVFIRGKGSIKDSGKEEQLKGRPGYEHLSEPLHILIEAELPANVIDARLAKAQEILEELLKPVDESQDYYKRQQLRELAMLNSPLREESPRSGGAPPSPFSKTVSGRPNKTGDTEL

SEQ ID NO: 36609 - protein, 108 aa, Zea mays subsp. mays
  peptide (1)..(108): Ceres Seq. ID no. 13622985
TIHAAIETLRHTLSIRPSTLLFLLPSRLPPIGIRGGPIPHPAAARVHGRPARYGRLLLPREGRLAAGEATGAAGRGQSVPGGAAAGAPEAGTLHAGAPNLQQAAESRE

SEQ ID NO: 36610 - protein, 97 aa, Zea mays subsp. mays
  peptide (1)..(97): Ceres Seq. ID no. 13622986
  misc_feature (1)..(61): NCBI GI NO: 12322716 NR Description: unknown protein; 28504-31237
  misc_feature (1)..(61): NCBI GI NO: 30680583 NR Description: KH domain protein [Arabidopsis thaliana]
  misc_feature (3)..(61): NCBI GI NO: 34900448 NR Description: contains EST C27129
  misc_feature (1)..(61): NCBI GI NO: 15224909 NR Description: KH domain protein [Arabidopsis thaliana]
  misc_feature (1)..(61): NCBI GI NO: 40645104 NR Description: hypothetical protein [Nicotiana tabacum]
  misc_feature (1)..(66): NCBI GI NO: 34909270 NR Description: P0454H12.18
  misc_feature (18)..(63): NCBI GI NO: 16930473 NR Description: At1g09660/F21M12_5 [Arabidopsis thaliana]
  misc_feature (18)..(63): NCBI GI NO: 22329449 NR Description: KH domain quaking protein, putative
  misc_feature (1)..(61): NCBI GI NO: 15236738 NR Description: KH domain protein [Arabidopsis thaliana]
  misc_feature (1)..(61): NCBI GI NO: 20268733 NR Description: unknown protein [Arabidopsis thaliana]
MDGLHGTDACFSPARAVSPQVRLPGPPDVGSQYLAELLQEHQKLGPFMQVLPICSRLLNQESRCSARSYGLARTPTEPCFLYRQEDFAVGSTDRNIP

SEQ ID NO: 36611 - DNA, 1863 bp, Zea mays subsp. mays
  misc_feature (1)..(1863): Ceres Seq. ID no. 13635478
gaattcgggaggcaagtgcgattttgatcttgcagccacctttttttgttctgttgtgtatctagtagttggaggagatatgcagtttgcacttgcattggacacgaactcaggtcctcaccagataagatcttgtgagggtgatgggattgacaggttggaaaaattaagtattgggggcagaaagcaggagaaagctttgagaaataggtgctttggtggtagagttgctgcaactacacaatgtattcttacctcagatgcttgtcctgaaactcttcattctcaaacacagtcctctaggaaaaattatgctgatgcaaaccgtgtatctgcgatcattttgggcggaggcactggatctcagctctttcctctgacaagcacaagagctacgcctgctgtacctgttggaggatgttacaggcttattgatatccctatgagtaactgcttcaacagtggtataaataagatatttgtgatgagtcagttcaattctacttcgcttaaccgccatattcatcgtacataccttgaaggcgggatcaactttgctgatggatctgtacaggtattagcggctacacaaatgcctgaagagccagctggatggttccagggtacagcagactctatcagaaaatttatctgggtactcgaggattattacagtcacaaatccattgacaacattgtaatcttgagtggcgatcagctttatcggatgaattacatggaacttgtgcagaaacatgtcgaggacgatgctgatatcactatatcatgtgctcctgttgatgagagccgagcttctaaaaatgggctagtgaagattgatcatactggacgtgtacttcaattctttgaaaaaccaaagggtgctgatttgaattctatgagagttgagaccaacttcctgagctatgctatagatgatgcacagaaatatccataccttgcatcaatgggcatttatgtcttcaagaaagatgcacttttagaccttctcaagtcaaaatatactcaattacatgactttggatctgaaatcctcccaagagctgtactagatcatagtgtgcaggcatgcatttttacgggctattgggaggatgttggaacaatcaaatcattctttgatgcaaacttggccctcactgagcagccttccaagtttgatttttacgatccaaaaacacctttcttcactgcaccccgatgcttgcctccgacgcaattggacaagtgcaagatgaaatatgcatttatctcagatggttgcttactgagagaatgcaacatcgagcattctgtgattggagtctgctcacgtgtcagctctggatgtgaactcaaggactccgtgatgatgggagcggacatctatgaaactgaagaagaagcttcaaagctactgttagctgggaaggtcccgattggaataggaaggaacacaaagataaggaactgtatcattgacatgaatgctaggattgggaagaacgtggtgatcacaaacagtaagggcatccaagaggctgatcacccggaagaaggcgtcatatagatcggctgcgtttgcgtctacaaaacaagaacctacaatggtattgcatcgatggatcgtgtaaccttggtatggtaagagccgcttgacaggaagtcgagcttcgggcgaagatgctagtctggcatgctgttccttgaccatttgtgctgctagtatgtacctgttataagctgccctagaagttgcagcaaacctttttatgaacctttgtatttccattaccctgctttggatcaactatatctgtcagtcctatatattactaaatttttaaacaaaccagattccgg

SEQ ID NO: 36612 - protein, 522 aa, Zea mays subsp. mays
  peptide (1)..(522): Ceres Seq. ID no. 13635479
  misc_feature (111)..(389): Pfam Name: Pfam Description:  Nucleotidyl transferase
  misc_feature (1)..(522): NCBI GI NO: 5705939 NR Description: endosperm ADP-glucose pyrophosphorylase subunithomolog
  misc_feature (1)..(522): NCBI GI NO: 322870 NR Description: glucose-1-phosphate adenylyltransferase (EC2
  misc_feature (27)..(522): NCBI GI NO: 1707924 NR Description: Glucose-1-phosphate adenylyltransferase large subunit 1
  misc_feature (27)..(522): NCBI GI NO: 7434892 NR Description: glucose-1-phosphate adenylyltransferase (EC2
  misc_feature (27)..(522): NCBI GI NO: 13540812 NR Description: ADP-glucose pyrophosphorylase large subunit isoform
  misc_feature (27)..(522): NCBI GI NO: 7434888 NR Description: glucose-1-phosphate adenylyltransferase (EC2
  misc_feature (43)..(522): NCBI GI NO: 7434891 NR Description: glucose-1-phosphate adenylyltransferase (EC2
  misc_feature (27)..(522): NCBI GI NO: 1707923 NR Description: Glucose-1-phosphate adenylyltransferase large subunit 1
  misc_feature (27)..(522): NCBI GI NO: 1707930 NR Description: Glucose-1-phosphate adenylyltransferase large subunit
  misc_feature (27)..(522): NCBI GI NO: 32812836 NR Description: ADP-glucose pyrophosphorylase large subunit
NSGGKCDFDLAATFFCSVVYLVVGGDMQFALALDTNSGPHQIRSCEGDGIDRLEKLSIGGRKQEKALRNRCFGGRVAATTQCILTSDACPETLHSQTQSSRKNYADANRVSAIILGGGTGSQLFPLTSTRATPAVPVGGCYRLIDIPMSNCFNSGINKIFVMSQFNSTSLNRHIHRTYLEGGINFADGSVQVLAATQMPEEPAGWFQGTADSIRKFIWVLEDYYSHKSIDNIVILSGDQLYRMNYMELVQKHVEDDADITISCAPVDESRASKNGLVKIDHTGRVLQFFEKPKGADLNSMRVETNFLSYAIDDAQKYPYLASMGIYVFKKDALLDLLKSKYTQLHDFGSEILPRAVLDHSVQACIFTGYWEDVGTIKSFFDANLALTEQPSKFDFYDPKTPFFTAPRCLPPTQLDKCKMKYAFISDGCLLRECNIEHSVIGVCSRVSSGCELKDSVMMGADIYETEEEASKLLLAGKVPIGIGRNTKIRNCIIDMNARIGKNVVITNSKGIQEADHPEEGVI

SEQ ID NO: 36613 - protein, 496 aa, Zea mays subsp. mays
  peptide (1)..(496): Ceres Seq. ID no. 13635480
  misc_feature (85)..(363): Pfam Name: Pfam Description:  Nucleotidyl transferase
  misc_feature (1)..(496): NCBI GI NO: 5705939 NR Description: endosperm ADP-glucose pyrophosphorylase subunithomolog
  misc_feature (1)..(496): NCBI GI NO: 322870 NR Description: glucose-1-phosphate adenylyltransferase (EC2
  misc_feature (1)..(496): NCBI GI NO: 1707924 NR Description: Glucose-1-phosphate adenylyltransferase large subunit 1
  misc_feature (1)..(496): NCBI GI NO: 7434892 NR Description: glucose-1-phosphate adenylyltransferase (EC2
  misc_feature (1)..(496): NCBI GI NO: 13540812 NR Description: ADP-glucose pyrophosphorylase large subunit isoform
  misc_feature (1)..(496): NCBI GI NO: 7434888 NR Description: glucose-1-phosphate adenylyltransferase (EC2
  misc_feature (17)..(496): NCBI GI NO: 7434891 NR Description: glucose-1-phosphate adenylyltransferase (EC2
  misc_feature (1)..(496): NCBI GI NO: 1707923 NR Description: Glucose-1-phosphate adenylyltransferase large subunit 1
  misc_feature (1)..(496): NCBI GI NO: 1707930 NR Description: Glucose-1-phosphate adenylyltransferase large subunit
  misc_feature (1)..(496): NCBI GI NO: 32812836 NR Description: ADP-glucose pyrophosphorylase large subunit
MQFALALDTNSGPHQIRSCEGDGIDRLEKLSIGGRKQEKALRNRCFGGRVAATTQCILTSDACPETLHSQTQSSRKNYADANRVSAIILGGGTGSQLFPLTSTRATPAVPVGGCYRLIDIPMSNCFNSGINKIFVMSQFNSTSLNRHIHRTYLEGGINFADGSVQVLAATQMPEEPAGWFQGTADSIRKFIWVLEDYYSHKSIDNIVILSGDQLYRMNYMELVQKHVEDDADITISCAPVDESRASKNGLVKIDHTGRVLQFFEKPKGADLNSMRVETNFLSYAIDDAQKYPYLASMGIYVFKKDALLDLLKSKYTQLHDFGSEILPRAVLDHSVQACIFTGYWEDVGTIKSFFDANLALTEQPSKFDFYDPKTPFFTAPRCLPPTQLDKCKMKYAFISDGCLLRECNIEHSVIGVCSRVSSGCELKDSVMMGADIYETEEEASKLLLAGKVPIGIGRNTKIRNCIIDMNARIGKNVVITNSKGIQEADHPEEGVI

SEQ ID NO: 36614 - protein, 375 aa, Zea mays subsp. mays
  peptide (1)..(375): Ceres Seq. ID no. 13635481
  misc_feature (1)..(242): Pfam Name: Pfam Description:  Nucleotidyl transferase
  misc_feature (1)..(375): NCBI GI NO: 5705939 NR Description: endosperm ADP-glucose pyrophosphorylase subunithomolog
  misc_feature (1)..(375): NCBI GI NO: 322870 NR Description: glucose-1-phosphate adenylyltransferase (EC2
  misc_feature (1)..(375): NCBI GI NO: 1707924 NR Description: Glucose-1-phosphate adenylyltransferase large subunit 1
  misc_feature (1)..(375): NCBI GI NO: 7434892 NR Description: glucose-1-phosphate adenylyltransferase (EC2
  misc_feature (1)..(375): NCBI GI NO: 13540812 NR Description: ADP-glucose pyrophosphorylase large subunit isoform
  misc_feature (1)..(375): NCBI GI NO: 7434888 NR Description: glucose-1-phosphate adenylyltransferase (EC2
  misc_feature (1)..(375): NCBI GI NO: 7434891 NR Description: glucose-1-phosphate adenylyltransferase (EC2
  misc_feature (1)..(375): NCBI GI NO: 1707923 NR Description: Glucose-1-phosphate adenylyltransferase large subunit 1
  misc_feature (1)..(375): NCBI GI NO: 1707930 NR Description: Glucose-1-phosphate adenylyltransferase large subunit
  misc_feature (1)..(375): NCBI GI NO: 32812836 NR Description: ADP-glucose pyrophosphorylase large subunit
MSNCFNSGINKIFVMSQFNSTSLNRHIHRTYLEGGINFADGSVQVLAATQMPEEPAGWFQGTADSIRKFIWVLEDYYSHKSIDNIVILSGDQLYRMNYMELVQKHVEDDADITISCAPVDESRASKNGLVKIDHTGRVLQFFEKPKGADLNSMRVETNFLSYAIDDAQKYPYLASMGIYVFKKDALLDLLKSKYTQLHDFGSEILPRAVLDHSVQACIFTGYWEDVGTIKSFFDANLALTEQPSKFDFYDPKTPFFTAPRCLPPTQLDKCKMKYAFISDGCLLRECNIEHSVIGVCSRVSSGCELKDSVMMGADIYETEEEASKLLLAGKVPIGIGRNTKIRNCIIDMNARIGKNVVITNSKGIQEADHPEEGVI

SEQ ID NO: 36615 - DNA, 1486 bp, Zea mays subsp. mays; identical to SEQ ID NO: 34293
  misc_feature (1)..(1486): Ceres Seq. ID no. 13573960

SEQ ID NO: 36616 - protein, 404 aa, Zea mays subsp. mays; identical to SEQ ID NO: 34294
  peptide (1)..(404): Ceres Seq. ID no. 13573961
  misc_feature (139)..(390): Pfam Name: Pfam Description:  Glutamine synthetase, catalytic domain
  misc_feature (37)..(404): NCBI GI NO: 585202 NR Description: GLUTAMINE SYNTHETASE ROOT ISOZYME 2
  misc_feature (38)..(399): NCBI GI NO: 13324800 NR Description: putative glutamine synthetase [Oryza sativa]
  misc_feature (37)..(391): NCBI GI NO: 2213877 NR Description: glutamine synthetase [Hevea brasiliensis]
  misc_feature (37)..(391): NCBI GI NO: 1084350 NR Description: glutamate-ammonia ligase (EC 6.3.1.2) - rape
  misc_feature (37)..(391): NCBI GI NO: 1707959 NR Description: GLUTAMINE SYNTHETASE CYTOSOLIC ISOZYME 2
  misc_feature (37)..(391): NCBI GI NO: 417060 NR Description: Glutamine synthetase nodule isozyme
  misc_feature (37)..(391): NCBI GI NO: 1076474 NR Description: Gln 1.2 protein - radish
  misc_feature (37)..(391): NCBI GI NO: 15240288 NR Description: glutamate--ammonia ligase [Arabidopsis thaliana]
  misc_feature (37)..(391): NCBI GI NO: 1934756 NR Description: cytosolic glutamine synthetase [Brassica napus]
  misc_feature (37)..(391): NCBI GI NO: 121349 NR Description: Glutamine synthetase shoot isozyme

SEQ ID NO: 36617 - protein, 368 aa, Zea mays subsp. mays; identical to SEQ ID NO: 34295
  peptide (1)..(368): Ceres Seq. ID no. 13573962
  misc_feature (103)..(354): Pfam Name: Pfam Description:  Glutamine synthetase, catalytic domain
  misc_feature (1)..(368): NCBI GI NO: 585202 NR Description: GLUTAMINE SYNTHETASE ROOT ISOZYME 2
  misc_feature (2)..(363): NCBI GI NO: 13324800 NR Description: putative glutamine synthetase [Oryza sativa]
  misc_feature (1)..(355): NCBI GI NO: 2213877 NR Description: glutamine synthetase [Hevea brasiliensis]
  misc_feature (1)..(355): NCBI GI NO: 1084350 NR Description: glutamate-ammonia ligase (EC 6.3.1.2) - rape
  misc_feature (1)..(355): NCBI GI NO: 1707959 NR Description: GLUTAMINE SYNTHETASE CYTOSOLIC ISOZYME 2
  misc_feature (1)..(355): NCBI GI NO: 417060 NR Description: Glutamine synthetase nodule isozyme
  misc_feature (1)..(355): NCBI GI NO: 1076474 NR Description: Gln 1.2 protein - radish
  misc_feature (1)..(355): NCBI GI NO: 15240288 NR Description: glutamate--ammonia ligase [Arabidopsis thaliana]
  misc_feature (1)..(355): NCBI GI NO: 1934756 NR Description: cytosolic glutamine synthetase [Brassica napus]
  misc_feature (1)..(355): NCBI GI NO: 121349 NR Description: Glutamine synthetase shoot isozyme

SEQ ID NO: 36618 - protein, 338 aa, Zea mays subsp. mays; identical to SEQ ID NO: 34296
  peptide (1)..(338): Ceres Seq. ID no. 13573963
  misc_feature (73)..(324): Pfam Name: Pfam Description:  Glutamine synthetase, catalytic domain
  misc_feature (1)..(338): NCBI GI NO: 585202 NR Description: GLUTAMINE SYNTHETASE ROOT ISOZYME 2
  misc_feature (1)..(333): NCBI GI NO: 13324800 NR Description: putative glutamine synthetase [Oryza sativa]
  misc_feature (1)..(325): NCBI GI NO: 2213877 NR Description: glutamine synthetase [Hevea brasiliensis]
  misc_feature (1)..(325): NCBI GI NO: 1084350 NR Description: glutamate-ammonia ligase (EC 6.3.1.2) - rape
  misc_feature (1)..(325): NCBI GI NO: 1707959 NR Description: GLUTAMINE SYNTHETASE CYTOSOLIC ISOZYME 2
  misc_feature (1)..(325): NCBI GI NO: 417060 NR Description: Glutamine synthetase nodule isozyme
  misc_feature (1)..(325): NCBI GI NO: 1076474 NR Description: Gln 1.2 protein - radish
  misc_feature (1)..(325): NCBI GI NO: 15240288 NR Description: glutamate--ammonia ligase [Arabidopsis thaliana]
  misc_feature (1)..(325): NCBI GI NO: 1934756 NR Description: cytosolic glutamine synthetase [Brassica napus]
  misc_feature (1)..(325): NCBI GI NO: 121349 NR Description: Glutamine synthetase shoot isozyme

SEQ ID NO: 36619 - DNA, 503 bp, Zea mays subsp. mays
  misc_feature (1)..(503): Ceres Seq. ID no. 4486968
gactcaaagtttgatacatcatgtgtttaggaaactgtgttcttctatatgcactggtttttccttgacaatacctacatgttcttgtgtgyccaagcgtgaagtgaaaagattcgccgatctmagttctgatgagattagtgacttatgggttactgcaaaggaagttggtgcacgtcttgagcagtaccacaaagcatcgtcacttacctttgctatccaggatggtcctcaagctggccaaacagttgcacatgtccacatccacctcatcccaaggaagaaaggggattttgagaaaaatgatgaaatatatgatgcgattgatgtgaaggagaaagaattgaaggagaagcttgacctggacattgagaggaaagataggagcatggaagagatggctaatgaggccaatgagtaccgtgctctttttagttagtttctaagctgagctgactgtttgctagaaataaggtttgctacctgttcttcattgttgcagt

SEQ ID NO: 36620 - protein, 145 aa, Zea mays subsp. mays
  peptide (1)..(145): Ceres Seq. ID no. 4486969
  misc_feature (32)..(145): NCBI GI NO: 27542770 NR Description: ATPase-like protein [Sorghum bicolor]
  misc_feature (32)..(144): NCBI GI NO: 27808510 NR Description: At5g58240 [Arabidopsis thaliana]
  misc_feature (32)..(144): NCBI GI NO: 8777325 NR Description: bis(5'-adenosyl)-triphosphatase-like protein
  misc_feature (32)..(144): NCBI GI NO: 30697031 NR Description: bis
  misc_feature (33)..(145): NCBI GI NO: 37589828 NR Description: Unknown (protein for MGC:73176) [Danio rerio]
  misc_feature (33)..(144): NCBI GI NO: 11120730 NR Description: fragile histidine triad protein
  misc_feature (33)..(144): NCBI GI NO: 4503719 NR Description: fragile histidine triad gene; bis
  misc_feature (32)..(144): NCBI GI NO: 28828402 NR Description: similar to diadenosine tetraphosphatase
  misc_feature (33)..(144): NCBI GI NO: 15215093 NR Description: Similar to fragile histidine triad gene
  misc_feature (33)..(144): NCBI GI NO: 3318791 NR Description: Substrate Analog
  misc_feature (31)..(31): Xaa is any aa, unknown or other
  misc_feature (41)..(41): Xaa is any aa, unknown or other
TQSLIHHVFRKLCSSICTGFSLTIPTCSCVXKREVKRFADXSSDEISDLWVTAKEVGARLEQYHKASSLTFAIQDGPQAGQTVAHVHIHLIPRKKGDFEKNDEIYDAIDVKEKELKEKLDLDIERKDRSMEEMANEANEYRALFS

SEQ ID NO: 36621 - DNA, 1047 bp, Zea mays subsp. mays
  misc_feature (1)..(1047): Ceres Seq. ID no. 12455278
aaagaggggagaagaagccaaggatgtactggttccagttcaacctccctgagctgtgatgggaatcgcattccctctataattcctataaataggggccctcccgctcccatcacaatcacccatcactcgctctattcccattccaagtccccgctcttggattcccgacgacgagctcggagcttcttcttccctgctcggtgctcgtcgcaacagctgccgccatgtctgccgcgaaccagctcgccgctctggtcagcaacatgtacgccacgggtttgcttgacgatcagttccagcagctccagctgctccaggaccccagcgcccctgacttcgtctccgaggtcgtcacgctcttctgtcaggacggcgagcggatcatcgaagagctggccaaactgctggagaagcccaacgtggattttgacagggttgacgcctttgtgcatcagctcaagggaagcagtgcaaatattggtgctcagaaggttaagaacacttgcattcagttccgcgaattctgtcagcagaagagcagagatgggtgcctcaaggtactggagacaatgaggattaacttctatgagctgcgtggcaagtttcagaccatgcttcagctggagcgtcaggtcaatggctttccccccaacaagtaaaccagatggtggagtggaccttcatgttaggatgatgcttgcacctttcaagtttcagaacattctgaatgagctcctcaattggtttctgggaagtcttgtaatagcttagcagcaagattagcgttgacaccaccgtagcagtagtcattgtcgtcaagtagttgtcctaaatgtctgtgctgggttatggatctcctgcaagcagttgcaggcttgcagctgttctatttactctagtagtttattttggagtagtcgctctcaataaatctgtcctaggagtctattggtggattattagtcagtcagtttctgggattcctggtggtgaagcaaaacaatgttatggctatcggttaataataatagtttgctgtgtttg

SEQ ID NO: 36622 - protein, 191 aa, Zea mays subsp. mays
  peptide (1)..(191): Ceres Seq. ID no. 12455279
KEGRRSQGCTGSSSTSLSCDGNRIPSIIPINRGPPAPITITHHSLYSHSKSPLLDSRRRARSFFFPARCSSQQLPPCLPRTSSPLWSATCTPRVCLTISSSSSSCSRTPAPLTSSPRSSRSSVRTASGSSKSWPNCWRSPTWILTGLTPLCISSREAVQILVLRRLRTLAFSSANSVSRRAEMGASRYWRQ

SEQ ID NO: 36623 - protein, 144 aa, Zea mays subsp. mays
  peptide (1)..(144): Ceres Seq. ID no. 12455280
  misc_feature (1)..(144): NCBI GI NO: 6009622 NR Description: histidine-containing phosphotransfer protein
  misc_feature (1)..(144): NCBI GI NO: 22036126 NR Description: his-containing phosphotransfer protein [Zea mays]
  misc_feature (1)..(142): NCBI GI NO: 33637786 NR Description: two-component phosphorelay mediator HP2
  misc_feature (1)..(144): NCBI GI NO: 33637784 NR Description: two-component phosphorelay mediator HP1
  misc_feature (1)..(137): NCBI GI NO: 5689238 NR Description: histidine-containing phosphotransfer protein
  misc_feature (13)..(137): NCBI GI NO: 15233079 NR Description: two-component phosphorelay mediator, putative
  misc_feature (13)..(137): NCBI GI NO: 13774348 NR Description: histidine-containing phosphotransfer protein
  misc_feature (1)..(137): NCBI GI NO: 18379097 NR Description: putative AHP2; protein id: At1g03430
  misc_feature (1)..(137): NCBI GI NO: 21593802 NR Description: putative AHP2 [Arabidopsis thaliana]
  misc_feature (13)..(137): NCBI GI NO: 15228686 NR Description: ATHP2, putative; protein id: At3g29350
MSAANQLAALVSNMYATGLLDDQFQQLQLLQDPSAPDFVSEVVTLFCQDGERIIEELAKLLEKPNVDFDRVDAFVHQLKGSSANIGAQKVKNTCIQFREFCQQKSRDGCLKVLETMRINFYELRGKFQTMLQLERQVNGFPPNK

SEQ ID NO: 36624 - protein, 131 aa, Zea mays subsp. mays
  peptide (1)..(131): Ceres Seq. ID no. 12455281
  misc_feature (1)..(131): NCBI GI NO: 6009622 NR Description: histidine-containing phosphotransfer protein
  misc_feature (1)..(131): NCBI GI NO: 22036126 NR Description: his-containing phosphotransfer protein [Zea mays]
  misc_feature (1)..(129): NCBI GI NO: 33637786 NR Description: two-component phosphorelay mediator HP2
  misc_feature (1)..(131): NCBI GI NO: 33637784 NR Description: two-component phosphorelay mediator HP1
  misc_feature (1)..(124): NCBI GI NO: 5689238 NR Description: histidine-containing phosphotransfer protein
  misc_feature (1)..(124): NCBI GI NO: 15233079 NR Description: two-component phosphorelay mediator, putative
  misc_feature (1)..(124): NCBI GI NO: 13774348 NR Description: histidine-containing phosphotransfer protein
  misc_feature (1)..(124): NCBI GI NO: 18379097 NR Description: putative AHP2; protein id: At1g03430
  misc_feature (1)..(124): NCBI GI NO: 21593802 NR Description: putative AHP2 [Arabidopsis thaliana]
  misc_feature (1)..(124): NCBI GI NO: 15228686 NR Description: ATHP2, putative; protein id: At3g29350
MYATGLLDDQFQQLQLLQDPSAPDFVSEVVTLFCQDGERIIEELAKLLEKPNVDFDRVDAFVHQLKGSSANIGAQKVKNTCIQFREFCQQKSRDGCLKVLETMRINFYELRGKFQTMLQLERQVNGFPPNK

SEQ ID NO: 36625 - DNA, 925 bp, Zea mays subsp. mays
  misc_feature (1)..(925): Ceres Seq. ID no. 12469239
  misc_feature (578)..(578): n is a, c, t, g, unknown, or other
  misc_feature (731)..(731): n is a, c, t, g, unknown, or other
  misc_feature (454)..(454): n is a, c, t, g, unknown, or other
  misc_feature (507)..(507): n is a, c, t, g, unknown, or other
tcccccgtcacctcaaaaacctctccaaccccaccggtccaccaccgccagccacctctccctcgctctcactcaggtcccccgcaacacgacgagaggcagcaggaccggaaggcgccatggccaccacccgcgacgtctccgccgcctccgcggccgccatgttccacgtgtaccagcccatgccgatgccatccacggcggcggcccccgcgaaggcgggcaagaaggagggcggcaaggaccggcacagcaaggtgaacgggcgcgggcggcgcgtgcggatgccgatcgtgtgcgcggcgcgcgtgttccagctgacccgcgagctggggctcaagtcggacgggcagaccatcgagtggctgctccgccaggccgagccctccatcgtggccgccacgggctccggcaccaccccggccgtcttcgtctcctcctccgcgccgtccangtcctcctcctcccactcccactaccagcagcagcagcagcagcagcaggccnccgtcgtcgtcctgggcaagcgcccgcgcgaggagggcggcgacgccgcggcggcgtccgtgccggcgttntgggcggcggcgccgcggacgacggcagcagcggacgccagctggggcttctcgccgctggaggcccagcaggcggcggcggggtacgtgcccatggcacaggcgcagcagcagcagcaccaccaccaccacctcaacctgctcgccgcgctntccggtgccgcgaggcgcgccgaggcggcggaggagacccgatgactgctagcctagtagctacatgcatccgccactcgcgcgcatgcattggtcctttgttgtccgtgtgctcgctcttggcagcgtaaacgttcttgatttttgtttgtgtgtgtgcccttgtgatcttggctcgttagctagagtaatcc

SEQ ID NO: 36626 - protein, 286 aa, Zea mays subsp. mays
  peptide (1)..(286): Ceres Seq. ID no. 12469240
  misc_feature (35)..(252): NCBI GI NO: 29247944 NR Description: GLP_26_54603_52153 [Giardia lamblia ATCC 50803]
  misc_feature (151)..(151): Xaa is any aa, unknown or other
  misc_feature (169)..(169): Xaa is any aa, unknown or other
  misc_feature (193)..(193): Xaa is any aa, unknown or other
  misc_feature (244)..(244): Xaa is any aa, unknown or other
PPSPQKPLQPHRSTTASHLSLALTQVPRNTTRGSRTGRRHGHHPRRLRRLRGRHVPRVPAHADAIHGGGPREGGQEGGRQGPAQQGERARAARADADRVRGARVPADPRAGAQVGRADHRVAAPPGRALHRGRHGLRHHPGRLRLLLRAVXVLLLPLPLPAAAAAAAGXRRRPGQAPARGGRRRRGGVRAGVXGGGAADDGSSGRQLGLLAAGGPAGGGGVRAHGTGAAAAAPPPPPQPARRAXRCREARRGGGGDPMTASLVATCIRHSRACIGPLLSVCSLLAA

SEQ ID NO: 36627 - protein, 257 aa, Zea mays subsp. mays
  peptide (1)..(257): Ceres Seq. ID no. 12469241
  misc_feature (70)..(234): Pfam Name: Pfam Description:  TCP family transcription factor
  misc_feature (44)..(184): NCBI GI NO: 38344439 NR Description: OSJNBa0038O10.11
  misc_feature (172)..(257): NCBI GI NO: 38344439 NR Description: OSJNBa0038O10.11
  misc_feature (70)..(234): NCBI GI NO: 15237274 NR Description: unknown protein; protein id: At5g23280.1
  misc_feature (70)..(234): NCBI GI NO: 26452377 NR Description: unknown protein [Arabidopsis thaliana]
  misc_feature (70)..(152): NCBI GI NO: 15241596 NR Description: putative protein; protein id: At5g08330
  misc_feature (67)..(172): NCBI GI NO: 20975251 NR Description: transcription factor PCF3
  misc_feature (2)..(156): NCBI GI NO: 15232059 NR Description: unknown protein; protein id: At3g27010.1
  misc_feature (64)..(244): NCBI GI NO: 5731257 NR Description: auxin-induced basic helix-loop-helix transcriptionfactor
  misc_feature (45)..(158): NCBI GI NO: 18409345 NR Description: expressed protein; protein id: At1g69690
  misc_feature (66)..(168): NCBI GI NO: 15218305 NR Description: unknown protein; protein id: At1g72010
  misc_feature (151)..(151): Xaa is any aa, unknown or other
  misc_feature (169)..(169): Xaa is any aa, unknown or other
  misc_feature (192)..(192): Xaa is any aa, unknown or other
  misc_feature (243)..(243): Xaa is any aa, unknown or other
PRHLKNLSNPTGPPPPATSPSLSLRSPATRREAAGPEGAMATTRDVSAASAAAMFHVYQPMPMPSTAAAPAKAGKKEGGKDRHSKVNGRGRRVRMPIVCAARVFQLTRELGLKSDGQTIEWLLRQAEPSIVAATGSGTTPAVFVSSSAPSXSSSSHSHYQQQQQQQQAXVVVLGKRPREEGGDAAAASVPAXWAAAPRTTAAADASWGFSPLEAQQAAAGYVPMAQAQQQQHHHHHLNLLAAXSGAARRAEAAEETR

SEQ ID NO: 36628 - protein, 218 aa, Zea mays subsp. mays
  peptide (1)..(218): Ceres Seq. ID no. 12469242
  misc_feature (31)..(195): Pfam Name: Pfam Description:  TCP family transcription factor
  misc_feature (5)..(145): NCBI GI NO: 38344439 NR Description: OSJNBa0038O10.11
  misc_feature (133)..(218): NCBI GI NO: 38344439 NR Description: OSJNBa0038O10.11
  misc_feature (31)..(195): NCBI GI NO: 15237274 NR Description: unknown protein; protein id: At5g23280.1
  misc_feature (31)..(195): NCBI GI NO: 26452377 NR Description: unknown protein [Arabidopsis thaliana]
  misc_feature (31)..(113): NCBI GI NO: 15241596 NR Description: putative protein; protein id: At5g08330
  misc_feature (28)..(133): NCBI GI NO: 20975251 NR Description: transcription factor PCF3
  misc_feature (1)..(117): NCBI GI NO: 15232059 NR Description: unknown protein; protein id: At3g27010.1
  misc_feature (25)..(205): NCBI GI NO: 5731257 NR Description: auxin-induced basic helix-loop-helix transcriptionfactor
  misc_feature (6)..(119): NCBI GI NO: 18409345 NR Description: expressed protein; protein id: At1g69690
  misc_feature (27)..(129): NCBI GI NO: 15218305 NR Description: unknown protein; protein id: At1g72010
  misc_feature (112)..(112): Xaa is any aa, unknown or other
  misc_feature (130)..(130): Xaa is any aa, unknown or other
  misc_feature (153)..(153): Xaa is any aa, unknown or other
  misc_feature (204)..(204): Xaa is any aa, unknown or other
MATTRDVSAASAAAMFHVYQPMPMPSTAAAPAKAGKKEGGKDRHSKVNGRGRRVRMPIVCAARVFQLTRELGLKSDGQTIEWLLRQAEPSIVAATGSGTTPAVFVSSSAPSXSSSSHSHYQQQQQQQQAXVVVLGKRPREEGGDAAAASVPAXWAAAPRTTAAADASWGFSPLEAQQAAAGYVPMAQAQQQQHHHHHLNLLAAXSGAARRAEAAEETR

SEQ ID NO: 36629 - DNA, 1617 bp, Zea mays subsp. mays
  misc_feature (1)..(1617): Ceres Seq. ID no. 13599123
catatggctcaatgctgaaaaatctgacatttgtcaagacttttgcctctggaatacttgttcccaaaagctatatctggcctgttacaccagataattacctgctgccttatacttcagtggttgatgatgctcacaaagcaggactagaaatctatgccgctgattttgcaaatgacttaaccatcagctataactacagctttgatccattagcggaatatcttttcttcattgataacggtgccttctctgttgatggtgtattgactgatttcccgattactccttcagaggcagttggttgctttagtaacctgaacaccagcaagattgatcatgctaaacctctagttatctcgcataatggtgctagtggtgactacccagactgcactgaccaagcttatgaaaaggcagttgccgatggtgcggatgtcattgactgtcctgttcaagtgactaaagatggcatactgatatgcatgagctctgttgacctaatggatgttactactgttgcaaaatcacaatttgcttcgcaagtaactaccatcaacagtctgaaggctgggtctggagtcttcaccttcaaccttacttgggatgatatttctaagaacctaaagcccatgatatcgaacccaatgagcacctataatctgtacagaaatcctagaaacaagaacgcaggaaacttcatgagattgtcagactttttgacctttgcaaatggaaaggatttgtcaggaatcatgataactgttgagcatgctgcattcatggcagaggagcttgggtttggtgtggtagatgcagtgatcaaagcacttgatgactctggttatagcaaacagactgcccagaatgttatgattcagtcaaccaacagctcagttctggtgaagttcaagcaggaaaccaagtacaaccttgtctacatgatcgaagaaagtgtccgagatgccgcaccttcctcccttgcggacattaagaagtttgctgatgctgtttctgttggcaccacatctgttttcccggaaacccattactatttgacgaaccagaccaataagcttgttccgacccttaagtctgccggcctccaagtttacgtttacgtgctcatgaatgagtttgcttcccagccaaatgacttcttcgcagacgccacttcacagatcaatgcttatgtgcaaagtgctaaggtggatggtgtcatcactgatttccctgggactgctcacagatacaaactgaactcctgcacgagcatgggaaagaacatgccactattcatgcagcctccgcaaccaggtggcctcctttcaaccattctcccagatgcacagccaccagcagcagcgccaatgccgctcttgacggacgctgacgtcgcagaaccagccctacctccggtcagcaacaccaccacggctgcatcgccttcgcatgccgccctcagaatgcgaacccatgtcttgagcatcgccacattgctgatgctatgtgcttccctcctcatctgaagatagtcttgcccaacatcatacgcggcgtggcgcattagagctgaggattttcacattgagctgctaatagcaattctttccacct

SEQ ID NO: 36630 - protein, 508 aa, Zea mays subsp. mays
  peptide (1)..(508): Ceres Seq. ID no. 13599124
  misc_feature (1)..(504): NCBI GI NO: 38344811 NR Description: OSJNBb0022F23.4
  misc_feature (4)..(430): NCBI GI NO: 4104060 NR Description: S222 [Triticum aestivum]
  misc_feature (1)..(508): NCBI GI NO: 7485338 NR Description: hypothetical protein F10M23
  misc_feature (1)..(508): NCBI GI NO: 18416801 NR Description: expressed protein [Arabidopsis thaliana]
  misc_feature (1)..(508): NCBI GI NO: 34395734 NR Description: Probable glycerophosphoryl diesterphosphodiesterase 2 precursor
  misc_feature (1)..(504): NCBI GI NO: 15240520 NR Description: expressed protein [Arabidopsis thaliana]
  misc_feature (1)..(486): NCBI GI NO: 30697435 NR Description: expressed protein [Arabidopsis thaliana]
  misc_feature (1)..(486): NCBI GI NO: 30794041 NR Description: unknown protein [Arabidopsis thaliana]
  misc_feature (1)..(507): NCBI GI NO: 15219803 NR Description: kinase -related [Arabidopsis thaliana]
  misc_feature (1)..(507): NCBI GI NO: 25404657 NR Description: hypothetical protein F1O19.6
YGSMLKNLTFVKTFASGILVPKSYIWPVTPDNYLLPYTSVVDDAHKAGLEIYAADFANDLTISYNYSFDPLAEYLFFIDNGAFSVDGVLTDFPITPSEAVGCFSNLNTSKIDHAKPLVISHNGASGDYPDCTDQAYEKAVADGADVIDCPVQVTKDGILICMSSVDLMDVTTVAKSQFASQVTTINSLKAGSGVFTFNLTWDDISKNLKPMISNPMSTYNLYRNPRNKNAGNFMRLSDFLTFANGKDLSGIMITVEHAAFMAEELGFGVVDAVIKALDDSGYSKQTAQNVMIQSTNSSVLVKFKQETKYNLVYMIEESVRDAAPSSLADIKKFADAVSVGTTSVFPETHYYLTNQTNKLVPTLKSAGLQVYVYVLMNEFASQPNDFFADATSQINAYVQSAKVDGVITDFPGTAHRYKLNSCTSMGKNMPLFMQPPQPGGLLSTILPDAQPPAAAPMPLLTDADVAEPALPPVSNTTTAASPSHAALRMRTHVLSIATLLMLCASLLI

SEQ ID NO: 36631 - protein, 505 aa, Zea mays subsp. mays
  peptide (1)..(505): Ceres Seq. ID no. 13599125
  misc_feature (1)..(501): NCBI GI NO: 38344811 NR Description: OSJNBb0022F23.4
  misc_feature (1)..(427): NCBI GI NO: 4104060 NR Description: S222 [Triticum aestivum]
  misc_feature (1)..(505): NCBI GI NO: 7485338 NR Description: hypothetical protein F10M23
  misc_feature (1)..(505): NCBI GI NO: 18416801 NR Description: expressed protein [Arabidopsis thaliana]
  misc_feature (1)..(505): NCBI GI NO: 34395734 NR Description: Probable glycerophosphoryl diesterphosphodiesterase 2 precursor
  misc_feature (1)..(501): NCBI GI NO: 15240520 NR Description: expressed protein [Arabidopsis thaliana]
  misc_feature (1)..(483): NCBI GI NO: 30697435 NR Description: expressed protein [Arabidopsis thaliana]
  misc_feature (1)..(483): NCBI GI NO: 30794041 NR Description: unknown protein [Arabidopsis thaliana]
  misc_feature (1)..(504): NCBI GI NO: 15219803 NR Description: kinase -related [Arabidopsis thaliana]
  misc_feature (1)..(504): NCBI GI NO: 25404657 NR Description: hypothetical protein F1O19.6
MLKNLTFVKTFASGILVPKSYIWPVTPDNYLLPYTSVVDDAHKAGLEIYAADFANDLTISYNYSFDPLAEYLFFIDNGAFSVDGVLTDFPITPSEAVGCFSNLNTSKIDHAKPLVISHNGASGDYPDCTDQAYEKAVADGADVIDCPVQVTKDGILICMSSVDLMDVTTVAKSQFASQVTTINSLKAGSGVFTFNLTWDDISKNLKPMISNPMSTYNLYRNPRNKNAGNFMRLSDFLTFANGKDLSGIMITVEHAAFMAEELGFGVVDAVIKALDDSGYSKQTAQNVMIQSTNSSVLVKFKQETKYNLVYMIEESVRDAAPSSLADIKKFADAVSVGTTSVFPETHYYLTNQTNKLVPTLKSAGLQVYVYVLMNEFASQPNDFFADATSQINAYVQSAKVDGVITDFPGTAHRYKLNSCTSMGKNMPLFMQPPQPGGLLSTILPDAQPPAAAPMPLLTDADVAEPALPPVSNTTTAASPSHAALRMRTHVLSIATLLMLCASLLI

SEQ ID NO: 36632 - protein, 347 aa, Zea mays subsp. mays
  peptide (1)..(347): Ceres Seq. ID no. 13599126
  misc_feature (1)..(343): NCBI GI NO: 38344811 NR Description: OSJNBb0022F23.4
  misc_feature (1)..(269): NCBI GI NO: 4104060 NR Description: S222 [Triticum aestivum]
  misc_feature (1)..(347): NCBI GI NO: 7485338 NR Description: hypothetical protein F10M23
  misc_feature (1)..(347): NCBI GI NO: 18416801 NR Description: expressed protein [Arabidopsis thaliana]
  misc_feature (1)..(347): NCBI GI NO: 34395734 NR Description: Probable glycerophosphoryl diesterphosphodiesterase 2 precursor
  misc_feature (1)..(343): NCBI GI NO: 15240520 NR Description: expressed protein [Arabidopsis thaliana]
  misc_feature (1)..(325): NCBI GI NO: 30697435 NR Description: expressed protein [Arabidopsis thaliana]
  misc_feature (1)..(325): NCBI GI NO: 30794041 NR Description: unknown protein [Arabidopsis thaliana]
  misc_feature (1)..(346): NCBI GI NO: 15219803 NR Description: kinase -related [Arabidopsis thaliana]
  misc_feature (1)..(346): NCBI GI NO: 25404657 NR Description: hypothetical protein F1O19.6
MSSVDLMDVTTVAKSQFASQVTTINSLKAGSGVFTFNLTWDDISKNLKPMISNPMSTYNLYRNPRNKNAGNFMRLSDFLTFANGKDLSGIMITVEHAAFMAEELGFGVVDAVIKALDDSGYSKQTAQNVMIQSTNSSVLVKFKQETKYNLVYMIEESVRDAAPSSLADIKKFADAVSVGTTSVFPETHYYLTNQTNKLVPTLKSAGLQVYVYVLMNEFASQPNDFFADATSQINAYVQSAKVDGVITDFPGTAHRYKLNSCTSMGKNMPLFMQPPQPGGLLSTILPDAQPPAAAPMPLLTDADVAEPALPPVSNTTTAASPSHAALRMRTHVLSIATLLMLCASLLI

SEQ ID NO: 36633 - DNA, 495 bp, Zea mays subsp. mays
  misc_feature (1)..(495): Ceres Seq. ID no. 4581901
  misc_feature (33)..(33): n is a, c, t, g, unknown, or other
ttgaagatgggtgactgtgatctttcagatctnattgggtttttccaaacctccaaagcattgcaagaattcgccggtggtgccttttttgaagttggagagtacaccaagtacgaaaaggtcattttcccacctaggctatgcttcttagggggtcttaccttcatgggtaaaaacgagatgccagttatctttccgtattccacaatgcttaagaaactggacttgcagttcactttcctcaccactgaagaccactgtcagcttattgctaaatgccccaacctaagtgttctcgaggtgaggaatgtgattggggatagaggactagaagttgttgctgctacatgcaagaagctacgaaggctcagaattgagcgtggcgacgatgatcctggccaagaagagcagggaggagtctctcagataggtttgacagccgtagccgttggctgccgcgaactagagtacatagctgcctatgtatctgatatc

SEQ ID NO: 36634 - protein, 165 aa, Zea mays subsp. mays
  peptide (1)..(165): Ceres Seq. ID no. 4581902
  misc_feature (1)..(164): NCBI GI NO: 34908378 NR Description: P0529E05.15
  misc_feature (1)..(164): NCBI GI NO: 34902000 NR Description: unknown protein
  misc_feature (1)..(164): NCBI GI NO: 18405209 NR Description: coronatine-insensitive 1
  misc_feature (1)..(164): NCBI GI NO: 40218003 NR Description: coronatine-insensitive 1 [Lycopersicon esculentum]
  misc_feature (47)..(158): NCBI GI NO: 18423092 NR Description: transport inhibitor response 1
  misc_feature (47)..(158): NCBI GI NO: 13249030 NR Description: F-box containing protein TIR1
  misc_feature (76)..(164): NCBI GI NO: 7487322 NR Description: hypothetical protein T22A6
  misc_feature (76)..(164): NCBI GI NO: 30686516 NR Description: F-box protein family, AtFBX14
  misc_feature (61)..(158): NCBI GI NO: 18391439 NR Description: transport inhibitor response 1
  misc_feature (61)..(158): NCBI GI NO: 18412567 NR Description: transport inhibitor response 1
  misc_feature (11)..(11): Xaa is any aa, unknown or other
LKMGDCDLSDXIGFFQTSKALQEFAGGAFFEVGEYTKYEKVIFPPRLCFLGGLTFMGKNEMPVIFPYSTMLKKLDLQFTFLTTEDHCQLIAKCPNLSVLEVRNVIGDRGLEVVAATCKKLRRLRIERGDDDPGQEEQGGVSQIGLTAVAVGCRELEYIAAYVSDI

SEQ ID NO: 36635 - protein, 163 aa, Zea mays subsp. mays
  peptide (1)..(163): Ceres Seq. ID no. 4581903
  misc_feature (1)..(162): NCBI GI NO: 34908378 NR Description: P0529E05.15
  misc_feature (1)..(162): NCBI GI NO: 34902000 NR Description: unknown protein
  misc_feature (1)..(162): NCBI GI NO: 18405209 NR Description: coronatine-insensitive 1
  misc_feature (1)..(162): NCBI GI NO: 40218003 NR Description: coronatine-insensitive 1 [Lycopersicon esculentum]
  misc_feature (45)..(156): NCBI GI NO: 18423092 NR Description: transport inhibitor response 1
  misc_feature (45)..(156): NCBI GI NO: 13249030 NR Description: F-box containing protein TIR1
  misc_feature (74)..(162): NCBI GI NO: 7487322 NR Description: hypothetical protein T22A6
  misc_feature (74)..(162): NCBI GI NO: 30686516 NR Description: F-box protein family, AtFBX14
  misc_feature (59)..(156): NCBI GI NO: 18391439 NR Description: transport inhibitor response 1
  misc_feature (59)..(156): NCBI GI NO: 18412567 NR Description: transport inhibitor response 1
  misc_feature (9)..(9): Xaa is any aa, unknown or other
MGDCDLSDXIGFFQTSKALQEFAGGAFFEVGEYTKYEKVIFPPRLCFLGGLTFMGKNEMPVIFPYSTMLKKLDLQFTFLTTEDHCQLIAKCPNLSVLEVRNVIGDRGLEVVAATCKKLRRLRIERGDDDPGQEEQGGVSQIGLTAVAVGCRELEYIAAYVSDI

SEQ ID NO: 36636 - protein, 110 aa, Zea mays subsp. mays
  peptide (1)..(110): Ceres Seq. ID no. 4581904
  misc_feature (1)..(109): NCBI GI NO: 34908378 NR Description: P0529E05.15
  misc_feature (1)..(109): NCBI GI NO: 34902000 NR Description: unknown protein
  misc_feature (1)..(109): NCBI GI NO: 18405209 NR Description: coronatine-insensitive 1
  misc_feature (1)..(109): NCBI GI NO: 40218003 NR Description: coronatine-insensitive 1 [Lycopersicon esculentum]
  misc_feature (1)..(103): NCBI GI NO: 18423092 NR Description: transport inhibitor response 1
  misc_feature (1)..(103): NCBI GI NO: 13249030 NR Description: F-box containing protein TIR1
  misc_feature (21)..(109): NCBI GI NO: 7487322 NR Description: hypothetical protein T22A6
  misc_feature (21)..(109): NCBI GI NO: 30686516 NR Description: F-box protein family, AtFBX14
  misc_feature (6)..(103): NCBI GI NO: 18391439 NR Description: transport inhibitor response 1
  misc_feature (6)..(103): NCBI GI NO: 18412567 NR Description: transport inhibitor response 1
MGKNEMPVIFPYSTMLKKLDLQFTFLTTEDHCQLIAKCPNLSVLEVRNVIGDRGLEVVAATCKKLRRLRIERGDDDPGQEEQGGVSQIGLTAVAVGCRELEYIAAYVSDI

SEQ ID NO: 36637 - DNA, 2065 bp, Zea mays subsp. mays
  misc_feature (1)..(2065): Ceres Seq. ID no. 13636855
ctttaaatgggacgcgcacctccgcctgggtctgtctgcgcagggacgcggacgcggcggcaccggcaagcaattgtctcatctgctccactccatctccatttaacgcactctccactccttcgcggcgggggtttaggcgcacggcggcaggccaattaacgccgctgcggcgagcgccgggggggaaatgggcggcgacggcacgagggcgctggaccagacgccgacgtgggccgtggccgccgtctgcgctgtcatcgtcgcggcgtccatactcctcgagggcttcctccaccacctcggtcagttgctcaacaagaagcggaagaaggcgctgtttgacgctctggagaaggttaaatcggagctgatgactctggggttcatatcgcctctgctgaccgtgacgggaaggtacatcgcgcgcatctgcatcccggagggagccgcaaacaccatgctgccctgccgcctgtccggtcactcggtggcggaagagcccaagggccatggccgacggcacctatctgaagatccaaccaaccttttttcctgccgcaaaggcatggtgtcgcttgtttcagccgacggcatgcatcagctgcacattttcgtgttcttcttggccgtcttccatgttaccttcagtttcttcacaatgtccttgggtagagcaaagactcgtatatggaaggtgtgggaaaaggaaacttgctcccctcagtataattatttaaatgacccctcaaagttcaggcttacgcaccaaacatcttttgtgaggcaacatgcaagttgttggagcaaaagcacaatcacgctctattttgtgagcttctttaggcagttcttcagatccgtccgtaagacagactactttactttgcgacatggattcatttcagctcatttatctccggggactaggttcaattttcgaaagtacattaaaaggtccttggaggatgatttcaagacagttgttggcattagtccaccactatgggcttctgctttggctgtcatgctgttcaatgttcatggatggcacaacttattctggttctctgcaattccccttgtagttattctagcagttggaacaaagctgcaggctataattgctatgatggctattgaaattgcagagaggcatacagttatccaaggcatgccggtggtaaaactaagtgatgatcatttctggttcgggaagcctcgtttggttctccacctcattcatttcgcatcatttcagaacgcatttgaaattacatatttcttttggatctggtacgaatttggcctgaggtcctgcttccatgacaactttgagtttatcattgcaagagtctgccttggggctatcgtccagtttatgtgcagctacatcacccttccactctatgcccttgtttctcagatgggttcagaaatgaagcgaacaattttcgacgagcagacagcgaaggccctgaagaaatggcacaaggccgtggtgaagaagaaacaccacaaggattcctcacacaattcttccgagactcctagcactgacacaacaggacctgcaggggaagcgggtgagtggcagcggctgcacgaggtgccggtccggcacctccaccggtacaagaccatcgcgcacgtcggcggcgtgaggagcccgttgtcggacccggactacagcgacacggacgacaccgagccgctgtcgttgcagactaggcacctgataccgccggcgaagcagcggagcctcgacaccgagcgcgcggaggtgcgcgtgaacgtcgtagagacagcggcggcgccaagcgacgtcctccaagacagcttctcgttcccaaggctgcttcctcctcgccatgtgccggacaagtaaagtggccagcagtctgcttagtactacagactgtcctatatagagatagtagaatagtagtttcaagttataagtcgatttggctagttatacaacttttgttatttatttagataaaggctatgtctatatagcaaaagttgtaaaactagaaaaatcaaaatgatttataatttg

SEQ ID NO: 36638 - protein, 565 aa, Zea mays subsp. mays
  peptide (1)..(565): Ceres Seq. ID no. 13636856
  misc_feature (4)..(488): Pfam Name: Pfam Description:  Mlo family
  misc_feature (1)..(565): NCBI GI NO: 13784977 NR Description: seven transmembrane protein Mlo2 [Zea mays]
  misc_feature (1)..(561): NCBI GI NO: 37536520 NR Description: putative Mlo (pathogen resistance) protein
  misc_feature (108)..(455): NCBI GI NO: 13784985 NR Description: seven transmembrane protein Mlo6 [Zea mays]
  misc_feature (1)..(110): NCBI GI NO: 13784985 NR Description: seven transmembrane protein Mlo6 [Zea mays]
  misc_feature (1)..(443): NCBI GI NO: 15217453 NR Description: seven transmembrane MLO protein family (MLO9)
  misc_feature (1)..(440): NCBI GI NO: 14091580 NR Description: membrane protein Mlo5 [Arabidopsis thaliana]
  misc_feature (1)..(440): NCBI GI NO: 15226140 NR Description: seven transmembrane MLO protein family (MLO5)
  misc_feature (1)..(510): NCBI GI NO: 15239213 NR Description: seven transmembrane MLO protein family (MLO10)
  misc_feature (7)..(558): NCBI GI NO: 18398444 NR Description: seven transmembrane MLO protein family (MLO8)
  misc_feature (1)..(507): NCBI GI NO: 33112635 NR Description: MLO-like protein 7 (AtMlo7)
MGGDGTRALDQTPTWAVAAVCAVIVAASILLEGFLHHLGQLLNKKRKKALFDALEKVKSELMTLGFISPLLTVTGRYIARICIPEGAANTMLPCRLSGHSVAEEPKGHGRRHLSEDPTNLFSCRKGMVSLVSADGMHQLHIFVFFLAVFHVTFSFFTMSLGRAKTRIWKVWEKETCSPQYNYLNDPSKFRLTHQTSFVRQHASCWSKSTITLYFVSFFRQFFRSVRKTDYFTLRHGFISAHLSPGTRFNFRKYIKRSLEDDFKTVVGISPPLWASALAVMLFNVHGWHNLFWFSAIPLVVILAVGTKLQAIIAMMAIEIAERHTVIQGMPVVKLSDDHFWFGKPRLVLHLIHFASFQNAFEITYFFWIWYEFGLRSCFHDNFEFIIARVCLGAIVQFMCSYITLPLYALVSQMGSEMKRTIFDEQTAKALKKWHKAVVKKKHHKDSSHNSSETPSTDTTGPAGEAGEWQRLHEVPVRHLHRYKTIAHVGGVRSPLSDPDYSDTDDTEPLSLQTRHLIPPAKQRSLDTERAEVRVNVVETAAAPSDVLQDSFSFPRLLPPRHVPDK

SEQ ID NO: 36639 - protein, 504 aa, Zea mays subsp. mays
  peptide (1)..(504): Ceres Seq. ID no. 13636857
  misc_feature (1)..(427): Pfam Name: Pfam Description:  Mlo family
  misc_feature (1)..(504): NCBI GI NO: 13784977 NR Description: seven transmembrane protein Mlo2 [Zea mays]
  misc_feature (1)..(500): NCBI GI NO: 37536520 NR Description: putative Mlo (pathogen resistance) protein
  misc_feature (47)..(394): NCBI GI NO: 13784985 NR Description: seven transmembrane protein Mlo6 [Zea mays]
  misc_feature (1)..(49): NCBI GI NO: 13784985 NR Description: seven transmembrane protein Mlo6 [Zea mays]
  misc_feature (1)..(382): NCBI GI NO: 15217453 NR Description: seven transmembrane MLO protein family (MLO9)
  misc_feature (1)..(379): NCBI GI NO: 14091580 NR Description: membrane protein Mlo5 [Arabidopsis thaliana]
  misc_feature (1)..(379): NCBI GI NO: 15226140 NR Description: seven transmembrane MLO protein family (MLO5)
  misc_feature (1)..(449): NCBI GI NO: 15239213 NR Description: seven transmembrane MLO protein family (MLO10)
  misc_feature (1)..(497): NCBI GI NO: 18398444 NR Description: seven transmembrane MLO protein family (MLO8)
  misc_feature (1)..(446): NCBI GI NO: 33112635 NR Description: MLO-like protein 7 (AtMlo7)
MTLGFISPLLTVTGRYIARICIPEGAANTMLPCRLSGHSVAEEPKGHGRRHLSEDPTNLFSCRKGMVSLVSADGMHQLHIFVFFLAVFHVTFSFFTMSLGRAKTRIWKVWEKETCSPQYNYLNDPSKFRLTHQTSFVRQHASCWSKSTITLYFVSFFRQFFRSVRKTDYFTLRHGFISAHLSPGTRFNFRKYIKRSLEDDFKTVVGISPPLWASALAVMLFNVHGWHNLFWFSAIPLVVILAVGTKLQAIIAMMAIEIAERHTVIQGMPVVKLSDDHFWFGKPRLVLHLIHFASFQNAFEITYFFWIWYEFGLRSCFHDNFEFIIARVCLGAIVQFMCSYITLPLYALVSQMGSEMKRTIFDEQTAKALKKWHKAVVKKKHHKDSSHNSSETPSTDTTGPAGEAGEWQRLHEVPVRHLHRYKTIAHVGGVRSPLSDPDYSDTDDTEPLSLQTRHLIPPAKQRSLDTERAEVRVNVVETAAAPSDVLQDSFSFPRLLPPRHVPDK

SEQ ID NO: 36640 - protein, 475 aa, Zea mays subsp. mays
  peptide (1)..(475): Ceres Seq. ID no. 13636858
  misc_feature (1)..(398): Pfam Name: Pfam Description:  Mlo family
  misc_feature (1)..(475): NCBI GI NO: 13784977 NR Description: seven transmembrane protein Mlo2 [Zea mays]
  misc_feature (1)..(471): NCBI GI NO: 37536520 NR Description: putative Mlo (pathogen resistance) protein
  misc_feature (18)..(365): NCBI GI NO: 13784985 NR Description: seven transmembrane protein Mlo6 [Zea mays]
  misc_feature (1)..(20): NCBI GI NO: 13784985 NR Description: seven transmembrane protein Mlo6 [Zea mays]
  misc_feature (1)..(353): NCBI GI NO: 15217453 NR Description: seven transmembrane MLO protein family (MLO9)
  misc_feature (1)..(350): NCBI GI NO: 14091580 NR Description: membrane protein Mlo5 [Arabidopsis thaliana]
  misc_feature (1)..(350): NCBI GI NO: 15226140 NR Description: seven transmembrane MLO protein family (MLO5)
  misc_feature (1)..(420): NCBI GI NO: 15239213 NR Description: seven transmembrane MLO protein family (MLO10)
  misc_feature (1)..(468): NCBI GI NO: 18398444 NR Description: seven transmembrane MLO protein family (MLO8)
  misc_feature (1)..(417): NCBI GI NO: 33112635 NR Description: MLO-like protein 7 (AtMlo7)
MLPCRLSGHSVAEEPKGHGRRHLSEDPTNLFSCRKGMVSLVSADGMHQLHIFVFFLAVFHVTFSFFTMSLGRAKTRIWKVWEKETCSPQYNYLNDPSKFRLTHQTSFVRQHASCWSKSTITLYFVSFFRQFFRSVRKTDYFTLRHGFISAHLSPGTRFNFRKYIKRSLEDDFKTVVGISPPLWASALAVMLFNVHGWHNLFWFSAIPLVVILAVGTKLQAIIAMMAIEIAERHTVIQGMPVVKLSDDHFWFGKPRLVLHLIHFASFQNAFEITYFFWIWYEFGLRSCFHDNFEFIIARVCLGAIVQFMCSYITLPLYALVSQMGSEMKRTIFDEQTAKALKKWHKAVVKKKHHKDSSHNSSETPSTDTTGPAGEAGEWQRLHEVPVRHLHRYKTIAHVGGVRSPLSDPDYSDTDDTEPLSLQTRHLIPPAKQRSLDTERAEVRVNVVETAAAPSDVLQDSFSFPRLLPPRHVPDK

SEQ ID NO: 36641 - DNA, 702 bp, Zea mays subsp. mays
  misc_feature (1)..(702): Ceres Seq. ID no. 12469805
  misc_feature (625)..(625): n is a, c, t, g, unknown, or other
ctcctgctcgtcaccggtgaccacggcggcctcgccagcctacagccaccaccagacgacgttccaggcacctgcaccgccgccgtcatgcggcgcaatgacgatggcggccgctgcgccgcatgtgcagggcttccacgtcggcgacgacgacactaccaccgcgatggcgatgcaccgtcatcagcagatgatgcgcgagctggcggaggcgcctctgcaccaggaggcagacgacttcgaggacttcgtgacgcggctgcccaaggcggaggacttcggcctgcagggcttccaggaggtggcccccgaggtgttcgacgacgccgccggcatctgggaccacgcggccgcctgggagcccccccaccatgatgatcgactctggcgcccagccccagcagcagctcgtcgtccctctttgactcgctcgtcgatgacgccgcgcgccctgcaccagctactgcttcgttcccagctgcatcgaactggccggtgtacgtggcggagtgatacgacgcgcgcgccatgcatgacaccactgcacaggtggttcctgcatgtgttgcttacgcctcgagacgtacgtacataataccagtatgtatgtaccggatggttactntgatatgactgtatttctcctagttattcgtgagtttcatttggataatgtttcaggttttgtaaaatatatacttt

SEQ ID NO: 36642 - protein, 197 aa, Zea mays subsp. mays
  peptide (1)..(197): Ceres Seq. ID no. 12469806
  misc_feature (36)..(114): NCBI GI NO: 28071316 NR Description: P0705A05.24
SCSSPVTTAASPAYSHHQTTFQAPAPPPSCGAMTMAAAAPHVQGFHVGDDDTTTAMAMHRHQQMMRELAEAPLHQEADDFEDFVTRLPKAEDFGLQGFQEVAPEVFDDAAGIWDHAAAWEPPHHDDRLWRPAPAAARRPSLTRSSMTPRALHQLLLRSQLHRTGRCTWRSDTTRAPCMTPLHRWFLHVLLTPRDVRT

SEQ ID NO: 36643 - protein, 165 aa, Zea mays subsp. mays
  peptide (1)..(165): Ceres Seq. ID no. 12469807
  misc_feature (4)..(82): NCBI GI NO: 28071316 NR Description: P0705A05.24
MTMAAAAPHVQGFHVGDDDTTTAMAMHRHQQMMRELAEAPLHQEADDFEDFVTRLPKAEDFGLQGFQEVAPEVFDDAAGIWDHAAAWEPPHHDDRLWRPAPAAARRPSLTRSSMTPRALHQLLLRSQLHRTGRCTWRSDTTRAPCMTPLHRWFLHVLLTPRDVRT

SEQ ID NO: 36644 - protein, 163 aa, Zea mays subsp. mays
  peptide (1)..(163): Ceres Seq. ID no. 12469808
  misc_feature (2)..(80): NCBI GI NO: 28071316 NR Description: P0705A05.24
MAAAAPHVQGFHVGDDDTTTAMAMHRHQQMMRELAEAPLHQEADDFEDFVTRLPKAEDFGLQGFQEVAPEVFDDAAGIWDHAAAWEPPHHDDRLWRPAPAAARRPSLTRSSMTPRALHQLLLRSQLHRTGRCTWRSDTTRAPCMTPLHRWFLHVLLTPRDVRT

SEQ ID NO: 36645 - DNA, 989 bp, Zea mays subsp. mays
  misc_feature (1)..(989): Ceres Seq. ID no. 12469861
cagagctcctggactaggcttagtctgcagtgatattgtgaaaggagttcctgcaatttttggtcattttctgacctcactccctgcgatacactcgataattgtatttgtgtgtatcaggaatgtgccagttccggtggttcctcaaagtgaaaggttccttttccaacgtgtatgctcaaggggctatcacttgttccgctgtatagcgagatacgggtataaagacaagaagcaggagcaccatagcgtatttgagcgtcttctgattgaaggccttgagaaattcatacaaagagaggcagtagagctatccctacaaagcgaagacgacattgactcggacgaagagcctccaacccctgtgaagatcatcacagcaccaaatggcagcctgtactcgctcgacgtccctctcctggcagactatgtgccttcaacagagctcattcatgaagccagctgctccacgcctcaacacgatcctgtactggattatgcacagaaccttgaactggagctggcgttcatcgagcagtccaagcggtctggggtcatctacctcatcgataatcccatcatcaaggccaggaaggactcatggttcttcaagaagctgatgataaactatttcttcgcgttcctgaggaacaactgccgccgggcgatcatgttgatgagcatcccgcattcaaacatgatgcaggtgcgcatgacttcttatgtctgattgctggaactgcactggttctgttcatggatgtctgatacaaaccacactgacagtaaaagaatgaacgtggcaaatgcaaagaggatatcggcacttttgtttttgttcataatttgatgatggcttaggttgttgtcggaatctatctcccctgtagttgtacaatgccaaaatatagttggaagttttagctggtacaccattagggtgctgtattaaccttttttactcttgtgcagtaaagattctttttgtc

SEQ ID NO: 36646 - protein, 242 aa, Zea mays subsp. mays
  peptide (1)..(242): Ceres Seq. ID no. 12469862
  misc_feature (1)..(242): Pfam Name: Pfam Description:  K+ potassium transporter
  misc_feature (1)..(242): NCBI GI NO: 18250714 NR Description: putative potasium transporter
  misc_feature (1)..(242): NCBI GI NO: 38345796 NR Description: OSJNBa0085I10.13
  misc_feature (1)..(242): NCBI GI NO: 9955527 NR Description: potassium transport protein-like
  misc_feature (1)..(242): NCBI GI NO: 22326688 NR Description: potassium transport protein-like
  misc_feature (1)..(242): NCBI GI NO: 7488157 NR Description: probable potassium transport protein KT5 -Arabidopsis thaliana
  misc_feature (1)..(242): NCBI GI NO: 22329125 NR Description: putative potassium transporter AtKT5p
  misc_feature (1)..(242): NCBI GI NO: 25345483 NR Description: probable potassium transporter AtKT5p (AtKT5)
  misc_feature (1)..(242): NCBI GI NO: 18138061 NR Description: putative potassium transporter [Vicia faba]
  misc_feature (1)..(242): NCBI GI NO: 15219006 NR Description: potassium transporter, putative
  misc_feature (1)..(242): NCBI GI NO: 38502862 NR Description: Putative potassium transporter 12 (AtPOT12)
RAPGLGLVCSDIVKGVPAIFGHFLTSLPAIHSIIVFVCIRNVPVPVVPQSERFLFQRVCSRGYHLFRCIARYGYKDKKQEHHSVFERLLIEGLEKFIQREAVELSLQSEDDIDSDEEPPTPVKIITAPNGSLYSLDVPLLADYVPSTELIHEASCSTPQHDPVLDYAQNLELELAFIEQSKRSGVIYLIDNPIIKARKDSWFFKKLMINYFFAFLRNNCRRAIMLMSIPHSNMMQVRMTSYV

SEQ ID NO: 36647 - DNA, 1159 bp, Zea mays subsp. mays
  misc_feature (1)..(1159): Ceres Seq. ID no. 13600661
tcttcttgagaaacactccgctctctctttcctcctgcgattctccatctctttccctgctccgtctcgtcgttgtcttcccctttttttcctcagccacctctctccctcgctagagcaaaaaccttgccacgaatcgccgacactccaacccggaagaggcaacgaggtgactccgcgcctcggtcatgggtgacagccaatactccttctcgcttaccactttcagcccgtcgggaaagcttgtgcagatagagcacgcgctcacggctgtcggatccgggcagacctccctagggatcaaagctgccaacggtgtagtgattgccactgagaagaaactgccttctattttggtggatgaaacatctgtgcaaaagattcaggcactaacaccaaatattggagttgtctatagtgggatgggtccagattttcgtgttctggtgagaaaaagtcgaaagcaggcacagcagtattatcggttgtacaaggagcatatacctgtaacacagcttgtgcgagagactgctgctgtgatgcaggagttcacacagtcaggtggtgtaagaccatttggagtatcgctgttgattgctgggtatgatgacaatggcccacagttgtatcaggttgatccctcaggatcatacttctcctggaaggcatcagccatgggaaaaaatgtgtcaaatgcaaagacatttcttgaaaagagatacacagaggatatggagcttgatgatgccatccacactgcaattttgactttgaaagaaggatatgaggggcaaatttcctccaacaacattgaaatcggaattattcgagctgaccgtgagttcaaagttctaagcccatcagagatcaaggatttcttggaagaggtggagtaagttgtctgttgatgatttactgtttcaaacaagaatagcagcatcacttatgagcagccagcctgaagcttgtcttggttttatcactctgtaaactgatttgctccagcgacatgtcttggttttatcactctgtaaactgatttgctccagcgacatgtggttcttacatttgaaaccctcctgagcgcatactgtagacaaatgagatacgtaagatggatgttgtatttgacagtctctgcagtttgtttatgtgatcc

SEQ ID NO: 36648 - protein, 235 aa, Zea mays subsp. mays
  peptide (1)..(235): Ceres Seq. ID no. 13600662
  misc_feature (1)..(235): NCBI GI NO: 12229921 NR Description: Proteasome subunit alpha type 2
  misc_feature (1)..(235): NCBI GI NO: 15219257 NR Description: 20S proteasome alpha subunit B (PAB1)
  misc_feature (1)..(228): NCBI GI NO: 7435868 NR Description: proteasome chain - rice
  misc_feature (1)..(235): NCBI GI NO: 15219317 NR Description: 20S proteasome alpha subunit B, putative
  misc_feature (1)..(198): NCBI GI NO: 7435867 NR Description: hypothetical protein YUP8H12R
  misc_feature (1)..(234): NCBI GI NO: 31241267 NR Description: ENSANGP00000011336 [Anopheles gambiae]
  misc_feature (1)..(234): NCBI GI NO: 130852 NR Description: Proteasome subunit alpha type 2
  misc_feature (1)..(234): NCBI GI NO: 6093780 NR Description: Proteasome subunit alpha type 2
  misc_feature (1)..(234): NCBI GI NO: 19168518 NR Description: PROSAg25 protein [Anopheles gambiae]
  misc_feature (1)..(234): NCBI GI NO: 4506181 NR Description: proteasome alpha 2 subunit
MGDSQYSFSLTTFSPSGKLVQIEHALTAVGSGQTSLGIKAANGVVIATEKKLPSILVDETSVQKIQALTPNIGVVYSGMGPDFRVLVRKSRKQAQQYYRLYKEHIPVTQLVRETAAVMQEFTQSGGVRPFGVSLLIAGYDDNGPQLYQVDPSGSYFSWKASAMGKNVSNAKTFLEKRYTEDMELDDAIHTAILTLKEGYEGQISSNNIEIGIIRADREFKVLSPSEIKDFLEEVE

SEQ ID NO: 36649 - protein, 157 aa, Zea mays subsp. mays
  peptide (1)..(157): Ceres Seq. ID no. 13600663
  misc_feature (1)..(157): NCBI GI NO: 12229921 NR Description: Proteasome subunit alpha type 2
  misc_feature (1)..(157): NCBI GI NO: 15219257 NR Description: 20S proteasome alpha subunit B (PAB1)
  misc_feature (1)..(150): NCBI GI NO: 7435868 NR Description: proteasome chain - rice
  misc_feature (1)..(157): NCBI GI NO: 15219317 NR Description: 20S proteasome alpha subunit B, putative
  misc_feature (1)..(120): NCBI GI NO: 7435867 NR Description: hypothetical protein YUP8H12R
  misc_feature (1)..(156): NCBI GI NO: 31241267 NR Description: ENSANGP00000011336 [Anopheles gambiae]
  misc_feature (1)..(156): NCBI GI NO: 130852 NR Description: Proteasome subunit alpha type 2
  misc_feature (1)..(156): NCBI GI NO: 6093780 NR Description: Proteasome subunit alpha type 2
  misc_feature (1)..(156): NCBI GI NO: 19168518 NR Description: PROSAg25 protein [Anopheles gambiae]
  misc_feature (1)..(156): NCBI GI NO: 4506181 NR Description: proteasome alpha 2 subunit
MGPDFRVLVRKSRKQAQQYYRLYKEHIPVTQLVRETAAVMQEFTQSGGVRPFGVSLLIAGYDDNGPQLYQVDPSGSYFSWKASAMGKNVSNAKTFLEKRYTEDMELDDAIHTAILTLKEGYEGQISSNNIEIGIIRADREFKVLSPSEIKDFLEEVE

SEQ ID NO: 36650 - protein, 118 aa, Zea mays subsp. mays
  peptide (1)..(118): Ceres Seq. ID no. 13600664
  misc_feature (1)..(118): NCBI GI NO: 12229921 NR Description: Proteasome subunit alpha type 2
  misc_feature (1)..(118): NCBI GI NO: 15219257 NR Description: 20S proteasome alpha subunit B (PAB1)
  misc_feature (1)..(111): NCBI GI NO: 7435868 NR Description: proteasome chain - rice
  misc_feature (1)..(118): NCBI GI NO: 15219317 NR Description: 20S proteasome alpha subunit B, putative
  misc_feature (1)..(81): NCBI GI NO: 7435867 NR Description: hypothetical protein YUP8H12R
  misc_feature (1)..(117): NCBI GI NO: 31241267 NR Description: ENSANGP00000011336 [Anopheles gambiae]
  misc_feature (1)..(117): NCBI GI NO: 130852 NR Description: Proteasome subunit alpha type 2
  misc_feature (1)..(117): NCBI GI NO: 6093780 NR Description: Proteasome subunit alpha type 2
  misc_feature (1)..(117): NCBI GI NO: 19168518 NR Description: PROSAg25 protein [Anopheles gambiae]
  misc_feature (1)..(117): NCBI GI NO: 4506181 NR Description: proteasome alpha 2 subunit
MQEFTQSGGVRPFGVSLLIAGYDDNGPQLYQVDPSGSYFSWKASAMGKNVSNAKTFLEKRYTEDMELDDAIHTAILTLKEGYEGQISSNNIEIGIIRADREFKVLSPSEIKDFLEEVE

SEQ ID NO: 36651 - DNA, 916 bp, Zea mays subsp. mays; identical to SEQ ID NO: 26909
  misc_feature (1)..(916): Ceres Seq. ID no. 13625767
  misc_feature (125)..(125): n is a, c, t, g, unknown, or other

SEQ ID NO: 36652 - protein, 269 aa, Zea mays subsp. mays; identical to SEQ ID NO: 26910
  peptide (1)..(269): Ceres Seq. ID no. 13625768
  misc_feature (201)..(269): Pfam Name: Pfam Description:  Ribosomal protein L7/L12 C-terminal domain
  misc_feature (87)..(269): NCBI GI NO: 34912074 NR Description: putative ribosomal protein L12
  misc_feature (87)..(269): NCBI GI NO: 464517 NR Description: 50S RIBOSOMAL PROTEIN L12-1, CHLOROPLAST PRECURSOR
  misc_feature (87)..(269): NCBI GI NO: 464518 NR Description: 50S RIBOSOMAL PROTEIN L12-2, CHLOROPLAST PRECURSOR
  misc_feature (73)..(260): NCBI GI NO: 1345575 NR Description: ribosomal protein L12 [Secale cereale]
  misc_feature (85)..(269): NCBI GI NO: 4176422 NR Description: ribosomal protein L12
  misc_feature (87)..(269): NCBI GI NO: 418872 NR Description: ribosomal protein L12
  misc_feature (87)..(269): NCBI GI NO: 548746 NR Description: 50S RIBOSOMAL PROTEIN L12, CHLOROPLAST PRECURSOR
  misc_feature (87)..(269): NCBI GI NO: 20020 NR Description: ribosomal protein L12-1a [Nicotiana tabacum]
  misc_feature (87)..(269): NCBI GI NO: 133088 NR Description: 50S RIBOSOMAL PROTEIN L12, CHLOROPLAST PRECURSOR
  misc_feature (87)..(268): NCBI GI NO: 133085 NR Description: 50S RIBOSOMAL PROTEIN L12, CHLOROPLAST PRECURSOR
  misc_feature (42)..(42): Xaa is any aa, unknown or other

SEQ ID NO: 36653 - protein, 183 aa, Zea mays subsp. mays; identical to SEQ ID NO: 26911
  peptide (1)..(183): Ceres Seq. ID no. 13625769
  misc_feature (115)..(183): Pfam Name: Pfam Description:  Ribosomal protein L7/L12 C-terminal domain
  misc_feature (1)..(183): NCBI GI NO: 34912074 NR Description: putative ribosomal protein L12
  misc_feature (1)..(183): NCBI GI NO: 464517 NR Description: 50S RIBOSOMAL PROTEIN L12-1, CHLOROPLAST PRECURSOR
  misc_feature (1)..(183): NCBI GI NO: 464518 NR Description: 50S RIBOSOMAL PROTEIN L12-2, CHLOROPLAST PRECURSOR
  misc_feature (1)..(174): NCBI GI NO: 1345575 NR Description: ribosomal protein L12 [Secale cereale]
  misc_feature (1)..(183): NCBI GI NO: 4176422 NR Description: ribosomal protein L12
  misc_feature (1)..(183): NCBI GI NO: 418872 NR Description: ribosomal protein L12
  misc_feature (1)..(183): NCBI GI NO: 548746 NR Description: 50S RIBOSOMAL PROTEIN L12, CHLOROPLAST PRECURSOR
  misc_feature (1)..(183): NCBI GI NO: 20020 NR Description: ribosomal protein L12-1a [Nicotiana tabacum]
  misc_feature (1)..(183): NCBI GI NO: 133088 NR Description: 50S RIBOSOMAL PROTEIN L12, CHLOROPLAST PRECURSOR
  misc_feature (1)..(182): NCBI GI NO: 133085 NR Description: 50S RIBOSOMAL PROTEIN L12, CHLOROPLAST PRECURSOR

SEQ ID NO: 36654 - DNA, 846 bp, Zea mays subsp. mays
  misc_feature (1)..(846): Ceres Seq. ID no. 12634889
attaaaaaccatatacgaggccacccagggtacggcggcgctcggttccgtggcggggagtgttttccaggcggcggcgcggtagcgtgaaaccgggcgaccgagcaagcgacggccatggcgttctggcagacgcgcgattttctcttctgtggcatatgcggcaccctcctcaccttcgactccgtccgctccgcctcctgccctctatgcggcttcaagcgcgatgccaaagaaattgaagggaaagaaatacagtacacgatgaccgccgaggatattcgaagagggttaaagacacaaacggaggacgttgttgggcaaagaccagtgacaaataaagcctgtccaaaatgcgaccatccaaaagctgaattttacaacatacaggttagcaactaatccttcagcattggatgaccaatccttccaggttttacgtatccaattattgctcttgacaccggaaattgcagatgcgttcagcagatgagggagagacgacgttctacatgtgtaaaggatgcggctgtaatttcaaagacgaatgaggagttatcctaccacttctacggatatatggcattggtgccgaagaaatttccagcgttgacagactagtactccctccgccctttttttatttatcatcgtctagttcaaaaatgaacggccgataaatattcgagaattgcaatctactccttgacattgttacattacatggatgcgcagatccatgcgttgtgcaaactttcttttgatggaacctgttttgtattttattcgagtgtgtagatgtctacttgcaacctttttacatttattccaaactataagacgttt

SEQ ID NO: 36655 - protein, 94 aa, Zea mays subsp. mays
  peptide (1)..(94): Ceres Seq. ID no. 12634890
  misc_feature (1)..(92): NCBI GI NO: 13324793 NR Description: putative RNA polymerase I subunit [Oryza sativa]
  misc_feature (8)..(84): NCBI GI NO: 18404735 NR Description: expressed protein; protein id: At3g25940
  misc_feature (8)..(59): NCBI GI NO: 26452990 NR Description: unknown protein [Arabidopsis thaliana]
  misc_feature (8)..(82): NCBI GI NO: 25518086 NR Description: T20H2.16 protein - Arabidopsis thaliana
MAFWQTRDFLFCGICGTLLTFDSVRSASCPLCGFKRDAKEIEGKEIQYTMTAEDIRRGLKTQTEDVVGQRPVTNKACPKCDHPKAEFYNIQVSN

SEQ ID NO: 36656 - DNA, 484 bp, Zea mays subsp. mays
  misc_feature (1)..(484): Ceres Seq. ID no. 4579105
aagtaaataatgtgccctgccgttccccccacctccacccacctcaaccgcagggctgcgacgccgccgtcctgatcgcgtccaagaacaacgacgccgagaaggacgcgccggacaacgagtcgctcgccggcgacggcttcgacaccatcaaccgggtcaaggcggccgtcgagaagaggtgccccggcgtggtgtcctgcgccgacatcatcgcgctcgccgccagagacgtcgtctacctggcggatggcccctactggcgcgtcgagctcggccgtctggacgggctcgattccagggccagcgacgtcaaggggaagctgccggacccggacatgcacgtcaaggacctcacgccggtgttccagcggaacggcttcacggaggtggacatggtcgcgctctccggcgcgcacaccgtcggcttcgcgcactgcagctgcttcaccgacaggctctacagctacggcggcgcgcggac

SEQ ID NO: 36657 - protein, 160 aa, Zea mays subsp. mays
  peptide (1)..(160): Ceres Seq. ID no. 4579106
  misc_feature (17)..(156): Pfam Name: Pfam Description:  Peroxidase
  misc_feature (17)..(156): NCBI GI NO: 15241315 NR Description: peroxidase, putative; protein id: At5g14130
  misc_feature (17)..(156): NCBI GI NO: 7433086 NR Description: peroxidase (EC 1
  misc_feature (17)..(156): NCBI GI NO: 4138647 NR Description: peroxidase [Trifolium repens]
  misc_feature (17)..(153): NCBI GI NO: 2117624 NR Description: peroxidase (EC 1.11.1.7) 2 precursor - alfalfa
  misc_feature (17)..(153): NCBI GI NO: 13992528 NR Description: peroxidase2 [Medicago sativa]
  misc_feature (18)..(156): NCBI GI NO: 7433082 NR Description: probable peroxidase (EC 1
  misc_feature (17)..(156): NCBI GI NO: 28629828 NR Description: peroxidase 1 [Artemisia annua]
  misc_feature (18)..(156): NCBI GI NO: 17027271 NR Description: putative peroxidase
  misc_feature (17)..(153): NCBI GI NO: 17027274 NR Description: putative peroxidase
  misc_feature (17)..(156): NCBI GI NO: 14485511 NR Description: putative peroxidase [Solanum tuberosum]
VNNVPCRSPHLHPPQPQGCDAAVLIASKNNDAEKDAPDNESLAGDGFDTINRVKAAVEKRCPGVVSCADIIALAARDVVYLADGPYWRVELGRLDGLDSRASDVKGKLPDPDMHVKDLTPVFQRNGFTEVDMVALSGAHTVGFAHCSCFTDRLYSYGGAR

SEQ ID NO: 36658 - DNA, 1071 bp, Zea mays subsp. mays
  misc_feature (1)..(1071): Ceres Seq. ID no. 13599122
ctaatcgaaaaaccgcaaggatccaccacaacagcgaaggagaaagcagaccaacctagccacccagggagaaagaggccaaaagggaggggagagtgtcgtcatggcttccattgtcgcttccaggagggccgttcctctagttcgcgctctggagaagctcatcgcagcgtcctccgctcccgggactggctccgccctcaggccggtggcagtcgccggcggcctccgcggctacaacaccggcgctccgctccgacgctacgagggggccgagtcggaagacgatagcgtccgcgagtacgatgggcggcacggcggccgggactacgctgtgcccagcctgttctcaggtagtcgtcatcttcgcttcatgccagacccatttgctttgctctctcaactctcaaatgagatggtggtgagactacatcgcttcgaaatggctgtgctgagtgctgacttcgtcttgttggtccctgtccagatattttccgtgatccgcttagtgcgccgcacagcattggccgcctgctgaaccttgtggacgacttggcggtggcggcgccaggtcgtgcggtgcgccgtggctggaacgcgaaggaggacgaggaggcgctgcacctgagggtggacatgccaggcctggggaaggagcacgtcaaggtgtgggcggagcagaacagcctggtgatcaagggcgagggcgagaaggaggatagcgaggacgaggccgccccgcctccgagatacagcggtcgcatcgagctcgcgccagaggtttacaggatggacaagatcaaggcggagatgaagaacggcgtgctcaaggtggtcgtgccgaaggtgaaggagcagcagcgcaaggacgtgttccaagtcaacgtcgagtagatgtttccaaatagaagcaagtgccggtacgggatggaggattggaggggcactgccaaactaggattcctctctctcaatctgatctggattctggaatcagatttctcttctttcatttttctcgtctatcttctatcagtatgaaataagcaacgtcgcttcagttttcgtgcc

SEQ ID NO: 36659 - protein, 144 aa, Zea mays subsp. mays
  peptide (1)..(144): Ceres Seq. ID no. 15222515
  misc_feature (1)..(83): NCBI GI NO: 7441311 NR Description: heat shock protein hsp22 precursor
  misc_feature (1)..(83): NCBI GI NO: 4138869 NR Description: small heat shock protein Hsp23.5
MASIVASRRAVPLVRALEKLIAASSAPGTGSALRPVAVAGGLRGYNTGAPLRRYEGAESEDDSVREYDGRHGGRDYAVPSLFSGSRHLRFMPDPFALLSQLSNEMVVRLHRFEMAVLSADFVLLVPVQIFSVIRLVRRTALAAC

SEQ ID NO: 36660 - protein, 96 aa, Zea mays subsp. mays
  peptide (1)..(96): Ceres Seq. ID no. 15222516
LIEKPQGSTTTAKEKADQPSHPGRKRPKGRGECRHGFHCRFQEGRSSSSRSGEAHRSVLRSRDWLRPQAGGSRRRPPRLQHRRSAPTLRGGRVGRR

SEQ ID NO: 36661 - protein, 85 aa, Zea mays subsp. mays
  peptide (1)..(85): Ceres Seq. ID no. 15222517
  misc_feature (1)..(85): NCBI GI NO: 7441311 NR Description: heat shock protein hsp22 precursor
  misc_feature (1)..(85): NCBI GI NO: 4138869 NR Description: small heat shock protein Hsp23.5
  misc_feature (1)..(85): NCBI GI NO: 123564 NR Description: Small heat shock protein, chloroplast precursor
  misc_feature (1)..(85): NCBI GI NO: 7441310 NR Description: heat shock protein MTSHP precursor
  misc_feature (1)..(85): NCBI GI NO: 21554988 NR Description: mitochondrial heat shock 22 kd protein-like
  misc_feature (1)..(85): NCBI GI NO: 15242086 NR Description: heat shock protein, putative
  misc_feature (1)..(85): NCBI GI NO: 1170368 NR Description: Heat shock 22 kDa protein, mitochondrial precursor
  misc_feature (1)..(85): NCBI GI NO: 7441313 NR Description: heat shock protein HSP23
  misc_feature (1)..(85): NCBI GI NO: 21068482 NR Description: small heat-shock protein [Picea glauca]
  misc_feature (1)..(85): NCBI GI NO: 4138871 NR Description: small heat shock protein Hsp23.6
MPGLGKEHVKVWAEQNSLVIKGEGEKEDSEDEAAPPPRYSGRIELAPEVYRMDKIKAEMKNGVLKVVVPKVKEQQRKDVFQVNVE

SEQ ID NO: 36662 - DNA, 896 bp, Zea mays subsp. mays
  misc_feature (1)..(896): Ceres Seq. ID no. 12469177
  misc_feature (560)..(560): n is a, c, t, g, unknown, or other
  misc_feature (654)..(654): n is a, c, t, g, unknown, or other
  misc_feature (717)..(717): n is a, c, t, g, unknown, or other
agcgcgacgaagcggcgccgccagctccccaaaacctccccagctgccacctcctctgcctccctgcgtcccccgagcaaagcagaacaaggggggaaaaagttgatatacgcttgcagcgatggcctttgccgcccgcgccgcgctcgtgcgcgtcctccctccgcgaccatcgccgacctcccaaccgaagcagctcaagcaaggtctaggcggccgcggcgggtcctcgctcgccgttcgggcgaaggactccgatgacttcggggcccttctgtcggagaagctcgatgcgcaggcgcctgagaagcgggatgggcgggatggttttgggagggaggcgagtagcgtggaggaggagaaggaggtgcagggcgagccggcttcgtggggtgtgctcaaccagatcggcgtcgagttggactctgacaaatcatattctgctctcatatatggcacatctgctcttgttgcaatttggatatcatcaattgtggtttctgcacttgattcagtccctttggttcctcaagtgatggaagttgttggtcttggcttcncaatttggttcacatcgagatacctgatatttaaggagaaccgtgatgaacttttcacgagagtcagctccatcaagaagcaaattttggggtntcatgagaactgagcgtctctcttacgttctgttctgttaactggtactgtgttttattgaanatgtttttttttggaataaacagtacatttttttgtttttcgcctgcatttttactaatcgaaaggtaagtgcactgtactcttttcgttgattccaactaattttaggtgagtgtagggctgcgatgacctaaagtgcgactttctttgcatgctttgcggggcccgctgaggcggct

SEQ ID NO: 36663 - protein, 181 aa, Zea mays subsp. mays
  peptide (1)..(181): Ceres Seq. ID no. 12469178
  misc_feature (62)..(177): NCBI GI NO: 7485852 NR Description: hypothetical protein F20D10
  misc_feature (62)..(177): NCBI GI NO: 18420175 NR Description: expressed protein; protein id: At4g38100
  misc_feature (73)..(180): NCBI GI NO: 38175474 NR Description: unknown protein
  misc_feature (73)..(177): NCBI GI NO: 687677 NR Description: unknown
  misc_feature (73)..(177): NCBI GI NO: 18411555 NR Description: expressed protein; protein id: At4g01150
  misc_feature (73)..(177): NCBI GI NO: 18407178 NR Description: expressed protein; protein id: At2g46820
  misc_feature (73)..(177): NCBI GI NO: 21555057 NR Description: unknown [Arabidopsis thaliana]
  misc_feature (68)..(177): NCBI GI NO: 34393236 NR Description: unknown protein
  misc_feature (93)..(176): NCBI GI NO: 37536446 NR Description: hypothetical protein
  misc_feature (72)..(177): NCBI GI NO: 18403896 NR Description: expressed protein; protein id: At1g52220
  misc_feature (147)..(147): Xaa is any aa, unknown or other
  misc_feature (178)..(178): Xaa is any aa, unknown or other
MAFAARAALVRVLPPRPSPTSQPKQLKQGLGGRGGSSLAVRAKDSDDFGALLSEKLDAQAPEKRDGRDGFGREASSVEEEKEVQGEPASWGVLNQIGVELDSDKSYSALIYGTSALVAIWISSIVVSALDSVPLVPQVMEVVGLGFXIWFTSRYLIFKENRDELFTRVSSIKKQILGXHEN

SEQ ID NO: 36664 - protein, 92 aa, Zea mays subsp. mays
  peptide (1)..(92): Ceres Seq. ID no. 12469179
MTSGPFCRRSSMRRRLRSGMGGMVLGGRRVAWRRRRRCRASRLRGVCSTRSASSWTLTNHILLSYMAHLLLLQFGYHQLWFLHLIQSLWFLK

SEQ ID NO: 36665 - DNA, 828 bp, Zea mays subsp. mays
  misc_feature (1)..(828): Ceres Seq. ID no. 12455151
acacagacacagcgcggagccgccacttctcttctcagcgctcccaatctggcggcggcggcacgccggcacccacccgcagttgacatgattaagtcaagtatcgaagaagagcttgatagctacatatttgatggacaaggtcatgatgattctattgacacaagtgacttagaaaaatatttggcagatccaatactaaaggttggtaaaagtaatcaacacacttttgacatattagcatggtggaaagcacacaaagaagaatatcctgtcttgggccagcttgctcgtgatgtcttagctatgcaagtgtcaacagtagcttcagaatcttcttttagtgttggtggtcgtgtacttaatccatttcgtactcgccttgaccctaccatggtagaagcgcttgtctgcaccaaagattggatagctggagcaagaaaaggttccaaggctaagagtgttgctattcctaatatggtttgtgaaatggaggaacttgaggctcttgatagaaatctttcacttgaggatgaagacctagatgatgatcatgatgatggaccagaggcatcgttgtaagcttgttgatgaagacctagatgatgataatgcaacatgaatgctctgaatgttttcattgtacttgttgcgtaatgctttgtgatcttgcgaacttgggacttgtggacttgtggttgtgtactttgtgatctgtgtgatgaacttgttatattgtgaacttgtgatctgtgtgatccacttattatattgtgaacttgtgatcaacttgttatattgtgaacttgtgatctgtgtgatccactt

SEQ ID NO: 36666 - protein, 193 aa, Zea mays subsp. mays
  peptide (1)..(193): Ceres Seq. ID no. 12455152
  misc_feature (57)..(143): Pfam Name: Pfam Description:  hAT family dimerisation domain
  misc_feature (13)..(155): NCBI GI NO: 1091678 NR Description: activator-like transposable element
  misc_feature (29)..(186): NCBI GI NO: 136125 NR Description: PUTATIVE AC TRANSPOSASE (ORFA)
  misc_feature (29)..(149): NCBI GI NO: 7489762 NR Description: hypothetical protein - maize transposable elementAc
  misc_feature (29)..(149): NCBI GI NO: 136140 NR Description: PUTATIVE AC9 TRANSPOSASE
  misc_feature (18)..(186): NCBI GI NO: 37532356 NR Description: putative activator-like transposable element
  misc_feature (54)..(187): NCBI GI NO: 38344876 NR Description: OSJNBa0020P07.19
  misc_feature (13)..(192): NCBI GI NO: 37532082 NR Description: putative transposase
  misc_feature (9)..(172): NCBI GI NO: 15234487 NR Description: putative transposase; protein id: At4g12260.1
  misc_feature (56)..(176): NCBI GI NO: 15228784 NR Description: putative protein; protein id: At3g62520.1
  misc_feature (45)..(178): NCBI GI NO: 37530608 NR Description: putative Tam3-like transposon protein
TQTQRGAATSLLSAPNLAAAARRHPPAVDMIKSSIEEELDSYIFDGQGHDDSIDTSDLEKYLADPILKVGKSNQHTFDILAWWKAHKEEYPVLGQLARDVLAMQVSTVASESSFSVGGRVLNPFRTRLDPTMVEALVCTKDWIAGARKGSKAKSVAIPNMVCEMEELEALDRNLSLEDEDLDDDHDDGPEASL

SEQ ID NO: 36667 - protein, 164 aa, Zea mays subsp. mays
  peptide (1)..(164): Ceres Seq. ID no. 12455153
  misc_feature (28)..(114): Pfam Name: Pfam Description:  hAT family dimerisation domain
  misc_feature (1)..(126): NCBI GI NO: 1091678 NR Description: activator-like transposable element
  misc_feature (1)..(157): NCBI GI NO: 136125 NR Description: PUTATIVE AC TRANSPOSASE (ORFA)
  misc_feature (1)..(120): NCBI GI NO: 7489762 NR Description: hypothetical protein - maize transposable elementAc
  misc_feature (1)..(120): NCBI GI NO: 136140 NR Description: PUTATIVE AC9 TRANSPOSASE
  misc_feature (1)..(157): NCBI GI NO: 37532356 NR Description: putative activator-like transposable element
  misc_feature (25)..(158): NCBI GI NO: 38344876 NR Description: OSJNBa0020P07.19
  misc_feature (1)..(163): NCBI GI NO: 37532082 NR Description: putative transposase
  misc_feature (1)..(143): NCBI GI NO: 15234487 NR Description: putative transposase; protein id: At4g12260.1
  misc_feature (27)..(147): NCBI GI NO: 15228784 NR Description: putative protein; protein id: At3g62520.1
  misc_feature (16)..(149): NCBI GI NO: 37530608 NR Description: putative Tam3-like transposon protein
MIKSSIEEELDSYIFDGQGHDDSIDTSDLEKYLADPILKVGKSNQHTFDILAWWKAHKEEYPVLGQLARDVLAMQVSTVASESSFSVGGRVLNPFRTRLDPTMVEALVCTKDWIAGARKGSKAKSVAIPNMVCEMEELEALDRNLSLEDEDLDDDHDDGPEASL

SEQ ID NO: 36668 - DNA, 489 bp, Zea mays subsp. mays
  misc_feature (1)..(489): Ceres Seq. ID no. 13622994
attccctactaactgctaactggcagcagcttctggatcgggccatcggggtcggtggatctcactgttttcttttcctgctgcttgctgcatttttcgcagggtgtgggagctgagttgggaggaggactgctgctgcagccatgaaggccctcattctcgtcggaggcttcggcacccgcctgcgcccgctcacgctcagcgtccccaagccgctcgtggatttcggcaacaagcccatgatcctgcaccagatcgaggctctgaaggaagttggtgttacagaggttgtcctggccatcaattaccagcctgaggtcatgctcaactttctcaaggacttcgagagcaagcttggcatcaagatcacctgctcgcaggagacggagcccctcgggaccgcaggcccgctggccctggcccgcgacaagctcgccgacggatccggcgaccctttcttcgtgctcaacagcgacgtgatcagcgagt

SEQ ID NO: 36669 - protein, 115 aa, Zea mays subsp. mays
  peptide (1)..(115): Ceres Seq. ID no. 13622995
  misc_feature (2)..(114): Pfam Name: Pfam Description:  Nucleotidyl transferase
  misc_feature (1)..(114): NCBI GI NO: 34902046 NR Description: COG1208
  misc_feature (1)..(114): NCBI GI NO: 40253523 NR Description: putative GDP-mannose pyrophosphorylase
  misc_feature (1)..(114): NCBI GI NO: 34908274 NR Description: putative GDP-mannose pyrophosphorylase
  misc_feature (1)..(114): NCBI GI NO: 13509287 NR Description: GDP-mannose pyrophosphorylase
  misc_feature (1)..(114): NCBI GI NO: 15225553 NR Description: GDP-mannose  pyrophosphorylase
  misc_feature (1)..(114): NCBI GI NO: 4103324 NR Description: GDP-mannose pyrophosphorylase [Solanum tuberosum]
  misc_feature (1)..(114): NCBI GI NO: 14971013 NR Description: GDP-D-mannose pyrophosphorylase
  misc_feature (1)..(114): NCBI GI NO: 25317396 NR Description: GDP-mannose pyrophosphorylase like protein
  misc_feature (1)..(114): NCBI GI NO: 15233308 NR Description: GDP-mannose pyrophosphorylase, putative
  misc_feature (1)..(114): NCBI GI NO: 7448161 NR Description: probable mannose-1-phosphate guanylyltransferase
MKALILVGGFGTRLRPLTLSVPKPLVDFGNKPMILHQIEALKEVGVTEVVLAINYQPEVMLNFLKDFESKLGIKITCSQETEPLGTAGPLALARDKLADGSGDPFFVLNSDVISE

SEQ ID NO: 36670 - protein, 83 aa, Zea mays subsp. mays
  peptide (1)..(83): Ceres Seq. ID no. 13622996
  misc_feature (1)..(82): Pfam Name: Pfam Description:  Nucleotidyl transferase
  misc_feature (1)..(82): NCBI GI NO: 34902046 NR Description: COG1208
  misc_feature (1)..(82): NCBI GI NO: 40253523 NR Description: putative GDP-mannose pyrophosphorylase
  misc_feature (1)..(82): NCBI GI NO: 34908274 NR Description: putative GDP-mannose pyrophosphorylase
  misc_feature (1)..(82): NCBI GI NO: 13509287 NR Description: GDP-mannose pyrophosphorylase
  misc_feature (1)..(82): NCBI GI NO: 15225553 NR Description: GDP-mannose  pyrophosphorylase
  misc_feature (1)..(82): NCBI GI NO: 4103324 NR Description: GDP-mannose pyrophosphorylase [Solanum tuberosum]
  misc_feature (1)..(82): NCBI GI NO: 14971013 NR Description: GDP-D-mannose pyrophosphorylase
  misc_feature (1)..(82): NCBI GI NO: 25317396 NR Description: GDP-mannose pyrophosphorylase like protein
  misc_feature (1)..(82): NCBI GI NO: 15233308 NR Description: GDP-mannose pyrophosphorylase, putative
  misc_feature (1)..(82): NCBI GI NO: 7448161 NR Description: probable mannose-1-phosphate guanylyltransferase
MILHQIEALKEVGVTEVVLAINYQPEVMLNFLKDFESKLGIKITCSQETEPLGTAGPLALARDKLADGSGDPFFVLNSDVISE

SEQ ID NO: 36671 - DNA, 772 bp, Zea mays subsp. mays; identical to SEQ ID NO: 33341
  misc_feature (1)..(772): Ceres Seq. ID no. 12379466

SEQ ID NO: 36672 - protein, 185 aa, Zea mays subsp. mays; identical to SEQ ID NO: 33342
  peptide (1)..(185): Ceres Seq. ID no. 12379467
  misc_feature (83)..(153): Pfam Name: Pfam Description:  Zn-finger in ubiquitin-hydrolases and other protein
  misc_feature (34)..(169): NCBI GI NO: 26984073 NR Description: hypothetical protein [Arabidopsis thaliana]
  misc_feature (1)..(165): NCBI GI NO: 34933421 NR Description: histone deacetylase 6 [Rattus norvegicus]
  misc_feature (59)..(160): NCBI GI NO: 27882614 NR Description: Similar to histone deacetylase 6 [Xenopus laevis]
  misc_feature (59)..(165): NCBI GI NO: 11360193 NR Description: hypothetical protein DKFZp566E044.1 - human
  misc_feature (59)..(165): NCBI GI NO: 15489272 NR Description: histone deacetylase 6 [Homo sapiens]
  misc_feature (59)..(165): NCBI GI NO: 7108921 NR Description: GR AF-1 specific histone deacetylase
  misc_feature (1)..(165): NCBI GI NO: 27370650 NR Description: histone deacetylase 6 [Mus musculus]
  misc_feature (59)..(165): NCBI GI NO: 10720024 NR Description: Histone deacetylase 6 (HD6)
  misc_feature (59)..(165): NCBI GI NO: 13128864 NR Description: histone deacetylase 6 [Homo sapiens]
  misc_feature (1)..(165): NCBI GI NO: 7513783 NR Description: probable histone deacetylase (EC 3

SEQ ID NO: 36673 - protein, 121 aa, Zea mays subsp. mays; identical to SEQ ID NO: 33343
  peptide (1)..(121): Ceres Seq. ID no. 12379468
  misc_feature (19)..(89): Pfam Name: Pfam Description:  Zn-finger in ubiquitin-hydrolases and other protein
  misc_feature (1)..(105): NCBI GI NO: 26984073 NR Description: hypothetical protein [Arabidopsis thaliana]
  misc_feature (1)..(101): NCBI GI NO: 34933421 NR Description: histone deacetylase 6 [Rattus norvegicus]
  misc_feature (1)..(96): NCBI GI NO: 27882614 NR Description: Similar to histone deacetylase 6 [Xenopus laevis]
  misc_feature (1)..(101): NCBI GI NO: 11360193 NR Description: hypothetical protein DKFZp566E044.1 - human
  misc_feature (1)..(101): NCBI GI NO: 15489272 NR Description: histone deacetylase 6 [Homo sapiens]
  misc_feature (1)..(101): NCBI GI NO: 7108921 NR Description: GR AF-1 specific histone deacetylase
  misc_feature (1)..(101): NCBI GI NO: 27370650 NR Description: histone deacetylase 6 [Mus musculus]
  misc_feature (1)..(101): NCBI GI NO: 10720024 NR Description: Histone deacetylase 6 (HD6)
  misc_feature (1)..(101): NCBI GI NO: 13128864 NR Description: histone deacetylase 6 [Homo sapiens]
  misc_feature (1)..(101): NCBI GI NO: 7513783 NR Description: probable histone deacetylase (EC 3

SEQ ID NO: 36674 - DNA, 845 bp, Zea mays subsp. mays
  misc_feature (1)..(845): Ceres Seq. ID no. 12469751
cattatgaatattgtagggagggaaggttcgtgatgcactttttcagattcttgaaaacgaggatgatgtaaccataaaacatggaacacaatcgagggagagtcggcgtgaagctacacaaggaatgcactcatctaaattttgcctgcatcctgccggagatactccctcagcatgcagattatttgatgcacttgtcagtctgtgtgttcctgttatagccagtgattacattgaacttccattcgaagatattatagactacaataaaatatcaatatttgttgggacaagcaaagcagtacagcctggatacttaacttcaactcttcgaagaatcagttcagagaggattctggagtaccagagggaaataaaaaaggtcagacattactttgagtacgaggatccgaatggaccagtgaatgagatttggcgccaagtatcccttaaagcaccactgataaagttgttgactaaccgcgacaaacggttgcttgaaagaggcaccaatggaacagattgttcgtgcatctgctctacaactccaactgacataactgcggccagttaaacaagatggaactcatcggcctacaagctctgtgcctatttcctgtgatcacattgcctgaattttttaggttgtacagttccatgtaaaacgagattaccagccactatttttgaacagtaaatttactaattaccacaatccttgagtttttactagatttgtataggaggagcggatagtcaggaaccttacagtgccctttttgtattgtaagttacattagctattttttgttgtcggcagttcgctgccctagtttttcgacct

SEQ ID NO: 36675 - protein, 149 aa, Zea mays subsp. mays
  peptide (1)..(149): Ceres Seq. ID no. 12469752
  misc_feature (1)..(84): Pfam Name: Pfam Description:  Exostosin family
  misc_feature (1)..(141): NCBI GI NO: 34899802 NR Description: OJ1092_A07.9
  misc_feature (1)..(147): NCBI GI NO: 30686300 NR Description: Exostosin family [Arabidopsis thaliana]
  misc_feature (1)..(139): NCBI GI NO: 15241619 NR Description: Exostosin family; protein id: At5g44930
  misc_feature (1)..(85): NCBI GI NO: 25408349 NR Description: hypothetical protein At2g35100
  misc_feature (1)..(124): NCBI GI NO: 22330483 NR Description: Exostosin family; protein id: At1g67410.1
  misc_feature (1)..(124): NCBI GI NO: 19386797 NR Description: OJ1485_B09.5
  misc_feature (1)..(137): NCBI GI NO: 18399194 NR Description: Exostosin family; protein id: At1g34270
  misc_feature (1)..(123): NCBI GI NO: 15230692 NR Description: Exostosin family; protein id: At3g45400.1
  misc_feature (1)..(110): NCBI GI NO: 7487224 NR Description: hypothetical protein T1F15
  misc_feature (1)..(138): NCBI GI NO: 15237870 NR Description: Exostosin family; protein id: At5g16890.1
MHSSKFCLHPAGDTPSACRLFDALVSLCVPVIASDYIELPFEDIIDYNKISIFVGTSKAVQPGYLTSTLRRISSERILEYQREIKKVRHYFEYEDPNGPVNEIWRQVSLKAPLIKLLTNRDKRLLERGTNGTDCSCICSTTPTDITAAS

SEQ ID NO: 36676 - DNA, 927 bp, Zea mays subsp. mays
  misc_feature (1)..(927): Ceres Seq. ID no. 12469147
  misc_feature (701)..(701): n is a, c, t, g, unknown, or other
tttcggtgaatgccagtgcacaattctgtggtgttgctgagatgattggaccagtggactttgagaaaagtgtggattactggcagcaagataagtggactggtcaattccctgtgaagtggcacatagtgaaggatgttcccaataatcttttccgacatataattcttgaaaacaacgacaataaacctgtaacaaacagcagagatacacaggaggtgaaactagagcaaggaatggagatgctgaagatctttaagaaccatgatgatgatgcatcaatccttgacgactttgagttttacgaggagcgtgagaaagcgctgcaggaaaataaggcacgcctgcatcagcaacatctacccagttctattgttattgagcccaagaaacccttgactgcacccagtgacctcgtgggccatatcaccaagagttttgctgaggctgtgcggcttggtgaggccaagactgtaagccatttgactgagaaggtttctgggggtgatccgtctattcctgtgaagcatgttgaagttaagcagagtggtttatcttaggaactcttgatcgatgtgaatgaactgtaccaaaaattcacccatacgcttcctgatcaaaatgtcgggaatgcatatgcagatggatgatgatgaaacccaagacatcggcaaaagcatgcatgcacactagggtaggtntttgccaaccttggaagcatagtttcttgaatagtttctctctttttttcttctttcttcctagtattttctccccttctcttcgcatcatatgatgattccttagtgtctagcctcaaggagagttgctgtttttgtgtaagcctctgtaagtttcctgttccatcacatatgagtaaggcctttttgtttctttttatttaagtaaaagatccatcttttatgt

SEQ ID NO: 36677 - protein, 185 aa, Zea mays subsp. mays
  peptide (1)..(185): Ceres Seq. ID no. 12469148
  misc_feature (1)..(88): Pfam Name: Pfam Description:  YT521-B-like family
  misc_feature (1)..(182): NCBI GI NO: 15795138 NR Description: gb|AAF35955
  misc_feature (1)..(182): NCBI GI NO: 30682438 NR Description: expressed protein [Arabidopsis thaliana]
  misc_feature (1)..(169): NCBI GI NO: 38636667 NR Description: putative Rubisco subunit binding-protein betasubunit
  misc_feature (1)..(156): NCBI GI NO: 38567895 NR Description: OSJNBa0060N03.15
  misc_feature (1)..(114): NCBI GI NO: 18087662 NR Description: putative RNA-binding protein [Oryza sativa]
  misc_feature (1)..(152): NCBI GI NO: 15217778 NR Description: unknown protein; protein id: At1g27960.1
  misc_feature (1)..(175): NCBI GI NO: 15912287 NR Description: AT5g61020/maf19_20 [Arabidopsis thaliana]
  misc_feature (1)..(175): NCBI GI NO: 30697466 NR Description: expressed protein [Arabidopsis thaliana]
  misc_feature (1)..(175): NCBI GI NO: 30697464 NR Description: expressed protein [Arabidopsis thaliana]
  misc_feature (1)..(114): NCBI GI NO: 29725575 NR Description: putative RNA-binding protein [Avena sativa]
SVNASAQFCGVAEMIGPVDFEKSVDYWQQDKWTGQFPVKWHIVKDVPNNLFRHIILENNDNKPVTNSRDTQEVKLEQGMEMLKIFKNHDDDASILDDFEFYEEREKALQENKARLHQQHLPSSIVIEPKKPLTAPSDLVGHITKSFAEAVRLGEAKTVSHLTEKVSGGDPSIPVKHVEVKQSGLS

SEQ ID NO: 36678 - protein, 172 aa, Zea mays subsp. mays
  peptide (1)..(172): Ceres Seq. ID no. 12469149
  misc_feature (1)..(75): Pfam Name: Pfam Description:  YT521-B-like family
  misc_feature (1)..(169): NCBI GI NO: 15795138 NR Description: gb|AAF35955
  misc_feature (1)..(169): NCBI GI NO: 30682438 NR Description: expressed protein [Arabidopsis thaliana]
  misc_feature (1)..(156): NCBI GI NO: 38636667 NR Description: putative Rubisco subunit binding-protein betasubunit
  misc_feature (1)..(143): NCBI GI NO: 38567895 NR Description: OSJNBa0060N03.15
  misc_feature (1)..(101): NCBI GI NO: 18087662 NR Description: putative RNA-binding protein [Oryza sativa]
  misc_feature (1)..(139): NCBI GI NO: 15217778 NR Description: unknown protein; protein id: At1g27960.1
  misc_feature (1)..(162): NCBI GI NO: 15912287 NR Description: AT5g61020/maf19_20 [Arabidopsis thaliana]
  misc_feature (1)..(162): NCBI GI NO: 30697466 NR Description: expressed protein [Arabidopsis thaliana]
  misc_feature (1)..(162): NCBI GI NO: 30697464 NR Description: expressed protein [Arabidopsis thaliana]
  misc_feature (1)..(101): NCBI GI NO: 29725575 NR Description: putative RNA-binding protein [Avena sativa]
MIGPVDFEKSVDYWQQDKWTGQFPVKWHIVKDVPNNLFRHIILENNDNKPVTNSRDTQEVKLEQGMEMLKIFKNHDDDASILDDFEFYEEREKALQENKARLHQQHLPSSIVIEPKKPLTAPSDLVGHITKSFAEAVRLGEAKTVSHLTEKVSGGDPSIPVKHVEVKQSGLS

SEQ ID NO: 36679 - protein, 107 aa, Zea mays subsp. mays
  peptide (1)..(107): Ceres Seq. ID no. 12469150
  misc_feature (1)..(104): NCBI GI NO: 15795138 NR Description: gb|AAF35955
  misc_feature (1)..(104): NCBI GI NO: 30682438 NR Description: expressed protein [Arabidopsis thaliana]
  misc_feature (1)..(91): NCBI GI NO: 38636667 NR Description: putative Rubisco subunit binding-protein betasubunit
  misc_feature (1)..(78): NCBI GI NO: 38567895 NR Description: OSJNBa0060N03.15
  misc_feature (1)..(36): NCBI GI NO: 18087662 NR Description: putative RNA-binding protein [Oryza sativa]
  misc_feature (1)..(74): NCBI GI NO: 15217778 NR Description: unknown protein; protein id: At1g27960.1
  misc_feature (1)..(97): NCBI GI NO: 15912287 NR Description: AT5g61020/maf19_20 [Arabidopsis thaliana]
  misc_feature (1)..(97): NCBI GI NO: 30697464 NR Description: expressed protein [Arabidopsis thaliana]
  misc_feature (1)..(97): NCBI GI NO: 30697466 NR Description: expressed protein [Arabidopsis thaliana]
  misc_feature (1)..(36): NCBI GI NO: 29725575 NR Description: putative RNA-binding protein [Avena sativa]
MEMLKIFKNHDDDASILDDFEFYEEREKALQENKARLHQQHLPSSIVIEPKKPLTAPSDLVGHITKSFAEAVRLGEAKTVSHLTEKVSGGDPSIPVKHVEVKQSGLS

SEQ ID NO: 36680 - DNA, 1493 bp, Zea mays subsp. mays; identical to SEQ ID NO: 25323
  misc_feature (1)..(1493): Ceres Seq. ID no. 12469735

SEQ ID NO: 36681 - protein, 362 aa, Zea mays subsp. mays; identical to SEQ ID NO: 25324
  peptide (1)..(362): Ceres Seq. ID no. 12469736
  misc_feature (74)..(208): Pfam Name: AAA Pfam Description: ATPase family associated with various cellular activities
  misc_feature (1)..(361): NCBI GI NO: 10798790 NR Description: replication factor C 36kDa subunit
  misc_feature (4)..(361): NCBI GI NO: 15223967 NR Description: putative replication factor C
  misc_feature (14)..(361): NCBI GI NO: 20841441 NR Description: replication factor C (activator 1) 5
  misc_feature (37)..(361): NCBI GI NO: 6677723 NR Description: replication factor C (activator 1) 5, 36
  misc_feature (27)..(361): NCBI GI NO: 27882432 NR Description: Similar to replication factor C (activator 1) 5(36
  misc_feature (47)..(361): NCBI GI NO: 23271821 NR Description: Similar to replication factor C (activator 1) 5,36
  misc_feature (10)..(340): NCBI GI NO: 34872605 NR Description: similar to replication factor C 5 isoform 1
  misc_feature (27)..(349): NCBI GI NO: 13431787 NR Description: Activator 1 40 kDa subunit
  misc_feature (40)..(350): NCBI GI NO: 19921076 NR Description: CG5313-PA [Drosophila melanogaster]
  misc_feature (27)..(347): NCBI GI NO: 30913228 NR Description: Activator 1 subunit 3

SEQ ID NO: 36682 - protein, 353 aa, Zea mays subsp. mays; identical to SEQ ID NO: 25325
  peptide (1)..(353): Ceres Seq. ID no. 12469737
  misc_feature (65)..(199): Pfam Name: AAA Pfam Description: ATPase family associated with various cellular activities
  misc_feature (1)..(352): NCBI GI NO: 10798790 NR Description: replication factor C 36kDa subunit
  misc_feature (1)..(352): NCBI GI NO: 15223967 NR Description: putative replication factor C
  misc_feature (5)..(352): NCBI GI NO: 20841441 NR Description: replication factor C (activator 1) 5
  misc_feature (28)..(352): NCBI GI NO: 6677723 NR Description: replication factor C (activator 1) 5, 36
  misc_feature (18)..(352): NCBI GI NO: 27882432 NR Description: Similar to replication factor C (activator 1) 5(36
  misc_feature (38)..(352): NCBI GI NO: 23271821 NR Description: Similar to replication factor C (activator 1) 5,36
  misc_feature (1)..(331): NCBI GI NO: 34872605 NR Description: similar to replication factor C 5 isoform 1
  misc_feature (18)..(340): NCBI GI NO: 13431787 NR Description: Activator 1 40 kDa subunit
  misc_feature (31)..(341): NCBI GI NO: 19921076 NR Description: CG5313-PA [Drosophila melanogaster]
  misc_feature (18)..(338): NCBI GI NO: 30913228 NR Description: Activator 1 subunit 3

SEQ ID NO: 36683 - protein, 259 aa, Zea mays subsp. mays; identical to SEQ ID NO: 25326
  peptide (1)..(259): Ceres Seq. ID no. 12469738
  misc_feature (1)..(105): Pfam Name: AAA Pfam Description: ATPase family associated with various cellular activities
  misc_feature (1)..(258): NCBI GI NO: 10798790 NR Description: replication factor C 36kDa subunit
  misc_feature (1)..(258): NCBI GI NO: 15223967 NR Description: putative replication factor C
  misc_feature (1)..(258): NCBI GI NO: 20841441 NR Description: replication factor C (activator 1) 5
  misc_feature (1)..(258): NCBI GI NO: 6677723 NR Description: replication factor C (activator 1) 5, 36
  misc_feature (1)..(258): NCBI GI NO: 27882432 NR Description: Similar to replication factor C (activator 1) 5(36
  misc_feature (1)..(258): NCBI GI NO: 23271821 NR Description: Similar to replication factor C (activator 1) 5,36
  misc_feature (1)..(237): NCBI GI NO: 34872605 NR Description: similar to replication factor C 5 isoform 1
  misc_feature (1)..(246): NCBI GI NO: 13431787 NR Description: Activator 1 40 kDa subunit
  misc_feature (1)..(247): NCBI GI NO: 19921076 NR Description: CG5313-PA [Drosophila melanogaster]
  misc_feature (1)..(244): NCBI GI NO: 30913228 NR Description: Activator 1 subunit 3

SEQ ID NO: 36684 - DNA, 917 bp, Zea mays subsp. mays; identical to SEQ ID NO: 29797
  misc_feature (1)..(917): Ceres Seq. ID no. 13493285

SEQ ID NO: 36685 - protein, 228 aa, Zea mays subsp. mays; identical to SEQ ID NO: 29798
  peptide (1)..(228): Ceres Seq. ID no. 13493286
  misc_feature (42)..(228): NCBI GI NO: 34897628 NR Description: cytoplasmic ribosomal protein L18 [Oryza sativa]
  misc_feature (42)..(228): NCBI GI NO: 34393858 NR Description: putative cytoplasmic ribosomal protein L18
  misc_feature (42)..(228): NCBI GI NO: 606970 NR Description: cytoplasmic ribosomal protein L18
  misc_feature (42)..(228): NCBI GI NO: 15241061 NR Description: 60S ribosomal protein L18 (RPL18C)
  misc_feature (42)..(228): NCBI GI NO: 15230011 NR Description: 60S ribosomal protein L18 (RPL18B)
  misc_feature (45)..(228): NCBI GI NO: 6094021 NR Description: 60S RIBOSOMAL PROTEIN L18
  misc_feature (43)..(228): NCBI GI NO: 7440855 NR Description: ribosomal protein L18
  misc_feature (42)..(204): NCBI GI NO: 28798549 NR Description: 60S ribosomal protein [Medicago sativa]
  misc_feature (42)..(227): NCBI GI NO: 28630356 NR Description: ribosomal protein L18 [Petromyzon marinus]
  misc_feature (42)..(227): NCBI GI NO: 4506607 NR Description: ribosomal protein L18; 60S ribosomal protein L18

SEQ ID NO: 36686 - protein, 187 aa, Zea mays subsp. mays; identical to SEQ ID NO: 29799
  peptide (1)..(187): Ceres Seq. ID no. 13493287
  misc_feature (1)..(187): NCBI GI NO: 34897628 NR Description: cytoplasmic ribosomal protein L18 [Oryza sativa]
  misc_feature (1)..(187): NCBI GI NO: 34393858 NR Description: putative cytoplasmic ribosomal protein L18
  misc_feature (1)..(187): NCBI GI NO: 606970 NR Description: cytoplasmic ribosomal protein L18
  misc_feature (1)..(187): NCBI GI NO: 15241061 NR Description: 60S ribosomal protein L18 (RPL18C)
  misc_feature (1)..(187): NCBI GI NO: 15230011 NR Description: 60S ribosomal protein L18 (RPL18B)
  misc_feature (4)..(187): NCBI GI NO: 6094021 NR Description: 60S RIBOSOMAL PROTEIN L18
  misc_feature (2)..(187): NCBI GI NO: 7440855 NR Description: ribosomal protein L18
  misc_feature (1)..(163): NCBI GI NO: 28798549 NR Description: 60S ribosomal protein [Medicago sativa]
  misc_feature (1)..(186): NCBI GI NO: 28630356 NR Description: ribosomal protein L18 [Petromyzon marinus]
  misc_feature (1)..(186): NCBI GI NO: 4506607 NR Description: ribosomal protein L18; 60S ribosomal protein L18

SEQ ID NO: 36687 - protein, 134 aa, Zea mays subsp. mays; identical to SEQ ID NO: 29800
  peptide (1)..(134): Ceres Seq. ID no. 13493288
  misc_feature (1)..(134): NCBI GI NO: 34897628 NR Description: cytoplasmic ribosomal protein L18 [Oryza sativa]
  misc_feature (1)..(134): NCBI GI NO: 34393858 NR Description: putative cytoplasmic ribosomal protein L18
  misc_feature (1)..(134): NCBI GI NO: 606970 NR Description: cytoplasmic ribosomal protein L18
  misc_feature (1)..(134): NCBI GI NO: 15241061 NR Description: 60S ribosomal protein L18 (RPL18C)
  misc_feature (1)..(134): NCBI GI NO: 15230011 NR Description: 60S ribosomal protein L18 (RPL18B)
  misc_feature (1)..(134): NCBI GI NO: 6094021 NR Description: 60S RIBOSOMAL PROTEIN L18
  misc_feature (1)..(134): NCBI GI NO: 7440855 NR Description: ribosomal protein L18
  misc_feature (1)..(110): NCBI GI NO: 28798549 NR Description: 60S ribosomal protein [Medicago sativa]
  misc_feature (1)..(133): NCBI GI NO: 28630356 NR Description: ribosomal protein L18 [Petromyzon marinus]
  misc_feature (1)..(133): NCBI GI NO: 4506607 NR Description: ribosomal protein L18; 60S ribosomal protein L18

SEQ ID NO: 36688 - DNA, 819 bp, Zea mays subsp. mays; identical to SEQ ID NO: 21884
  misc_feature (1)..(819): Ceres Seq. ID no. 12484054

SEQ ID NO: 36689 - protein, 179 aa, Zea mays subsp. mays; identical to SEQ ID NO: 21885
  peptide (1)..(179): Ceres Seq. ID no. 12484055
  misc_feature (30)..(179): NCBI GI NO: 15221629 NR Description: putative protein kinase C inhibitor
  misc_feature (30)..(160): NCBI GI NO: 25518144 NR Description: F28K20.9 protein - Arabidopsis thaliana
  misc_feature (159)..(179): NCBI GI NO: 25518144 NR Description: F28K20.9 protein - Arabidopsis thaliana
  misc_feature (48)..(179): NCBI GI NO: 629858 NR Description: protein kinase C inhibitor - maize
  misc_feature (44)..(179): NCBI GI NO: 18410510 NR Description: protein kinase C inhibitor-like protein
  misc_feature (48)..(179): NCBI GI NO: 1177047 NR Description: 14 KD ZINC-BINDING PROTEIN
  misc_feature (48)..(179): NCBI GI NO: 11260559 NR Description: protein kinase C inhibitor-like protein -Arabidopsis thaliana
  misc_feature (68)..(179): NCBI GI NO: 1177046 NR Description: 14 KD ZINC-BINDING PROTEIN
  misc_feature (49)..(179): NCBI GI NO: 23612841 NR Description: protein kinase c inhibitor-like protein, putative
  misc_feature (72)..(179): NCBI GI NO: 23480654 NR Description: putative protein kinase C interacting protein 1

SEQ ID NO: 36690 - protein, 136 aa, Zea mays subsp. mays; identical to SEQ ID NO: 21886
  peptide (1)..(136): Ceres Seq. ID no. 12484056

SEQ ID NO: 36691 - DNA, 489 bp, Zea mays subsp. mays
  misc_feature (1)..(489): Ceres Seq. ID no. 4578406
ctctttccattagccatcctagccttcgccccctcgacgagaagaaccacctcaaaaccgaacagccgcaaaagaaagctgctagctactctatacatgataactagaacaggaccgtgaagtaatatatatataatgacgaagtcaggggcgctacaacttgctcggagcaccggagggtcgcttagcaaggaccaagtcaaatccgccgttgatcagtatgtgaagtaccacgacctccacggaggcgaacaagaatcaagaaagtcaaattacgctgatttggcaaacaagtactatgatcttgtcactggcttctacgaatatggatggggcgactcattccattttgctggcggtcccatactcccatgcttgtatttcagatatccgggtgaaacttcccgtgaagccattaagcggcaccagcattttatggcactacaattggggctcaagaagggtatgaaggttctggacgtgggatgt

SEQ ID NO: 36692 - protein, 118 aa, Zea mays subsp. mays
  peptide (1)..(118): Ceres Seq. ID no. 4578407
  misc_feature (1)..(117): NCBI GI NO: 3560531 NR Description: cycloartenol-C24-methyltransferase
  misc_feature (1)..(117): NCBI GI NO: 34393309 NR Description: cycloartenol-C24-methyltransferase
  misc_feature (1)..(117): NCBI GI NO: 7443715 NR Description: sterol 24-C-methyltransferase (EC 2
  misc_feature (1)..(117): NCBI GI NO: 7443716 NR Description: sterol 24-C-methyltransferase (EC 2
  misc_feature (1)..(117): NCBI GI NO: 3560474 NR Description: S-adenosyl-methionine-sterol-C- methyltransferase
  misc_feature (1)..(117): NCBI GI NO: 7443719 NR Description: sterol 24-C-methyltransferase (EC 2
  misc_feature (1)..(117): NCBI GI NO: 3603295 NR Description: S-adenosyl-methionine cycloartenol-C24-methyltransferase
  misc_feature (2)..(117): NCBI GI NO: 7443720 NR Description: probable sterol 24-C-methyltransferase (EC2
  misc_feature (7)..(117): NCBI GI NO: 15240691 NR Description: 24-sterol C-methyltransferase
  misc_feature (7)..(117): NCBI GI NO: 21434843 NR Description: cephalopod [Arabidopsis thaliana]
MTKSGALQLARSTGGSLSKDQVKSAVDQYVKYHDLHGGEQESRKSNYADLANKYYDLVTGFYEYGWGDSFHFAGGPILPCLYFRYPGETSREAIKRHQHFMALQLGLKKGMKVLDVGC

SEQ ID NO: 36693 - DNA, 657 bp, Zea mays subsp. mays
  misc_feature (1)..(657): Ceres Seq. ID no. 15170059
  misc_feature (639)..(639): n is a, c, t, g, unknown, or other
aaaaaaccctaatcgcatctgcttccagagccccccgccgccgctgcgccctcctctcggtcctgccgtccgtcgaggtaaaaggacagcatggtgagggtcagcgtgctcaatgatgctctcaagtccatgtacaatgctgaaaagatagggaaacgtcaggtcatgatcaggccgtcatccaaggtgatcatcaagttcctgacggtcatgcagcgccatggctacattggcgagttcgagtacgtggatgaccacagagctgggaagatcgtggtggagctgaatggaagactgaataaatgtggtgttattagcccacgttttgatgtaggtgttaaggagatcgagggatggacggcgaggcttcttccatctcgccagtttggctacatcgtcctaacaacttctgctggaattatggaccatgaggaggcccgccgtaagaatgttggtggcaaggttctaggtttcttttattgaaaatgtgtttttttgagccacagatgcgtccaagaactcgtctgatgttttgaggtttgttaagactgggtgtccgagcctttgtggtttgttaagacagcgatgtgtcatgtatttcagaaattgggatttttatgagatgtacctgcgagagcncctgtctgtttcgatttt

SEQ ID NO: 36694 - protein, 130 aa, Zea mays subsp. mays
  peptide (1)..(130): Ceres Seq. ID no. 15170060
  misc_feature (5)..(130): Pfam Name: Pfam Description:  Ribosomal protein S8
  misc_feature (1)..(130): NCBI GI NO: 15223001 NR Description: 40S ribosomal protein S15A (RPS15aA)
  misc_feature (1)..(130): NCBI GI NO: 133793 NR Description: 40S RIBOSOMAL PROTEIN S15A (PPCB8)
  misc_feature (1)..(130): NCBI GI NO: 6683481 NR Description: wrp15a [Citrullus lanatus]
  misc_feature (1)..(130): NCBI GI NO: 15231316 NR Description: 40S ribosomal protein S15A (RPS15aD)
  misc_feature (1)..(130): NCBI GI NO: 13560779 NR Description: cytoplasmic ribosomal protein S15a [Daucus carota]
  misc_feature (1)..(130): NCBI GI NO: 28411802 NR Description: ribosomal protein S15
  misc_feature (1)..(130): NCBI GI NO: 2130985 NR Description: r-protein BnS15a [Brassica napus]
  misc_feature (1)..(130): NCBI GI NO: 15225502 NR Description: 40S ribosomal protein S15A (RPS15aC)
  misc_feature (1)..(130): NCBI GI NO: 6322271 NR Description: Homology to rat S15a; Rps22ap
  misc_feature (1)..(130): NCBI GI NO: 14326103 NR Description: ribosomal protein S22 [Candida albicans]
MVRVSVLNDALKSMYNAEKIGKRQVMIRPSSKVIIKFLTVMQRHGYIGEFEYVDDHRAGKIVVELNGRLNKCGVISPRFDVGVKEIEGWTARLLPSRQFGYIVLTTSAGIMDHEEARRKNVGGKVLGFFY

SEQ ID NO: 36695 - protein, 117 aa, Zea mays subsp. mays
  peptide (1)..(117): Ceres Seq. ID no. 15170061
  misc_feature (1)..(117): Pfam Name: Pfam Description:  Ribosomal protein S8
  misc_feature (1)..(117): NCBI GI NO: 15223001 NR Description: 40S ribosomal protein S15A (RPS15aA)
  misc_feature (1)..(117): NCBI GI NO: 133793 NR Description: 40S RIBOSOMAL PROTEIN S15A (PPCB8)
  misc_feature (1)..(117): NCBI GI NO: 6683481 NR Description: wrp15a [Citrullus lanatus]
  misc_feature (1)..(117): NCBI GI NO: 15231316 NR Description: 40S ribosomal protein S15A (RPS15aD)
  misc_feature (1)..(117): NCBI GI NO: 13560779 NR Description: cytoplasmic ribosomal protein S15a [Daucus carota]
  misc_feature (1)..(117): NCBI GI NO: 28411802 NR Description: ribosomal protein S15
  misc_feature (1)..(117): NCBI GI NO: 2130985 NR Description: r-protein BnS15a [Brassica napus]
  misc_feature (1)..(117): NCBI GI NO: 15225502 NR Description: 40S ribosomal protein S15A (RPS15aC)
  misc_feature (1)..(117): NCBI GI NO: 6322271 NR Description: Homology to rat S15a; Rps22ap
  misc_feature (1)..(117): NCBI GI NO: 14326103 NR Description: ribosomal protein S22 [Candida albicans]
MYNAEKIGKRQVMIRPSSKVIIKFLTVMQRHGYIGEFEYVDDHRAGKIVVELNGRLNKCGVISPRFDVGVKEIEGWTARLLPSRQFGYIVLTTSAGIMDHEEARRKNVGGKVLGFFY

SEQ ID NO: 36696 - protein, 105 aa, Zea mays subsp. mays
  peptide (1)..(105): Ceres Seq. ID no. 15170062
  misc_feature (1)..(105): Pfam Name: Pfam Description:  Ribosomal protein S8
  misc_feature (1)..(105): NCBI GI NO: 15223001 NR Description: 40S ribosomal protein S15A (RPS15aA)
  misc_feature (1)..(105): NCBI GI NO: 133793 NR Description: 40S RIBOSOMAL PROTEIN S15A (PPCB8)
  misc_feature (1)..(105): NCBI GI NO: 6683481 NR Description: wrp15a [Citrullus lanatus]
  misc_feature (1)..(105): NCBI GI NO: 15231316 NR Description: 40S ribosomal protein S15A (RPS15aD)
  misc_feature (1)..(105): NCBI GI NO: 13560779 NR Description: cytoplasmic ribosomal protein S15a [Daucus carota]
  misc_feature (1)..(105): NCBI GI NO: 28411802 NR Description: ribosomal protein S15
  misc_feature (1)..(105): NCBI GI NO: 2130985 NR Description: r-protein BnS15a [Brassica napus]
  misc_feature (1)..(105): NCBI GI NO: 15225502 NR Description: 40S ribosomal protein S15A (RPS15aC)
  misc_feature (1)..(105): NCBI GI NO: 6322271 NR Description: Homology to rat S15a; Rps22ap
  misc_feature (1)..(105): NCBI GI NO: 14326103 NR Description: ribosomal protein S22 [Candida albicans]
MIRPSSKVIIKFLTVMQRHGYIGEFEYVDDHRAGKIVVELNGRLNKCGVISPRFDVGVKEIEGWTARLLPSRQFGYIVLTTSAGIMDHEEARRKNVGGKVLGFFY

SEQ ID NO: 36697 - DNA, 959 bp, Zea mays subsp. mays
  misc_feature (1)..(959): Ceres Seq. ID no. 13502430
gagcacactgatgttgctgtcctgctcgacaatgaggccatctatgacatctgccgccgctcccttgacattgagcgcccaacctacaccaacctgaacaggcttgtctcccaggtcatctcatccctgacggcttccctgaggttcgatggtgctctgaacgttgatgtgaacgagttccagaccaacctggtgccctacccgaggatccacttcatgctttcgtcctacgctccagtcatttctgctgagaaggcctaccacgagcagctgtccgtggccgaaatcaccaacagcgccttcgagccatcctccatgatggccaagtgcgacccccgccatggcaagtacatggcatgctgcctcatgtaccgtggtgatgtggttcccaaggacgtgaacgctgctgtggccacaatcaagaccaagcgcaccatccagttcgtggactggtgcccgactggcttcaagtgcggaatcaactaccagcctcccagcgtcgtccccggcggtgacctggccaaggtgcagcgtgccgtgtgcatgatctccaactccaccagtgttgtggaggtcttctcccgcattgaccacaagttcgacctcatgtacgccaagcgcgccttcgtgcactggtacgtcggtgagggtatggaggagggcgagttctccgaggctcgtgaggatctgcgtgcgctcgagaaggactacgaggaggtcggtgctgagtttgacgagggtgaggacggcgacgagggtgacgagtactagacgctctactggcgcggcgtcgtcgggcttgtgtgccactgctatcctgtgatctgccctgagtggctcctatcgtgttatgtttctgtcggttcttatctatctgtcgttgtgtggtttacaacttacgttgtaagactttattcccccgctttgctactgggttattaagtttggcgttattgttt

SEQ ID NO: 36698 - protein, 256 aa, Zea mays subsp. mays
  peptide (1)..(256): Ceres Seq. ID no. 13502431
  misc_feature (53)..(198): Pfam Name: Pfam Description:  Tubulin/FtsZ family, C-terminal domain
  misc_feature (1)..(256): NCBI GI NO: 542179 NR Description: tubulin alpha chain - maize (fragment)
  misc_feature (1)..(256): NCBI GI NO: 8928432 NR Description: Tubulin alpha-3 chain
  misc_feature (1)..(256): NCBI GI NO: 135398 NR Description: Tubulin alpha-1 chain (Alpha-1 tubulin)
  misc_feature (1)..(256): NCBI GI NO: 6094429 NR Description: Tubulin alpha-1 chain (Alpha-1 tubulin)
  misc_feature (1)..(256): NCBI GI NO: 135411 NR Description: Tubulin alpha-2 chain (Alpha-2 tubulin)
  misc_feature (1)..(256): NCBI GI NO: 8928408 NR Description: Tubulin alpha chain
  misc_feature (1)..(256): NCBI GI NO: 3163946 NR Description: alpha-tubulin 1 [Eleusine indica]
  misc_feature (1)..(256): NCBI GI NO: 1556446 NR Description: alpha tubulin [Hordeum vulgare]
  misc_feature (1)..(256): NCBI GI NO: 8928422 NR Description: Tubulin alpha-2 chain
  misc_feature (1)..(256): NCBI GI NO: 10441016 NR Description: alpha-tubulin [Oryza sativa]
EHTDVAVLLDNEAIYDICRRSLDIERPTYTNLNRLVSQVISSLTASLRFDGALNVDVNEFQTNLVPYPRIHFMLSSYAPVISAEKAYHEQLSVAEITNSAFEPSSMMAKCDPRHGKYMACCLMYRGDVVPKDVNAAVATIKTKRTIQFVDWCPTGFKCGINYQPPSVVPGGDLAKVQRAVCMISNSTSVVEVFSRIDHKFDLMYAKRAFVHWYVGEGMEEGEFSEAREDLRALEKDYEEVGAEFDEGEDGDEGDEY

SEQ ID NO: 36699 - protein, 184 aa, Zea mays subsp. mays
  peptide (1)..(184): Ceres Seq. ID no. 13502432
  misc_feature (1)..(126): Pfam Name: Pfam Description:  Tubulin/FtsZ family, C-terminal domain
  misc_feature (1)..(184): NCBI GI NO: 542179 NR Description: tubulin alpha chain - maize (fragment)
  misc_feature (1)..(184): NCBI GI NO: 8928432 NR Description: Tubulin alpha-3 chain
  misc_feature (1)..(184): NCBI GI NO: 135398 NR Description: Tubulin alpha-1 chain (Alpha-1 tubulin)
  misc_feature (1)..(184): NCBI GI NO: 6094429 NR Description: Tubulin alpha-1 chain (Alpha-1 tubulin)
  misc_feature (1)..(184): NCBI GI NO: 135411 NR Description: Tubulin alpha-2 chain (Alpha-2 tubulin)
  misc_feature (1)..(184): NCBI GI NO: 8928408 NR Description: Tubulin alpha chain
  misc_feature (1)..(184): NCBI GI NO: 3163946 NR Description: alpha-tubulin 1 [Eleusine indica]
  misc_feature (1)..(184): NCBI GI NO: 1556446 NR Description: alpha tubulin [Hordeum vulgare]
  misc_feature (1)..(184): NCBI GI NO: 8928422 NR Description: Tubulin alpha-2 chain
  misc_feature (1)..(184): NCBI GI NO: 10441016 NR Description: alpha-tubulin [Oryza sativa]
MLSSYAPVISAEKAYHEQLSVAEITNSAFEPSSMMAKCDPRHGKYMACCLMYRGDVVPKDVNAAVATIKTKRTIQFVDWCPTGFKCGINYQPPSVVPGGDLAKVQRAVCMISNSTSVVEVFSRIDHKFDLMYAKRAFVHWYVGEGMEEGEFSEAREDLRALEKDYEEVGAEFDEGEDGDEGDEY

SEQ ID NO: 36700 - protein, 151 aa, Zea mays subsp. mays
  peptide (1)..(151): Ceres Seq. ID no. 13502433
  misc_feature (1)..(93): Pfam Name: Pfam Description:  Tubulin/FtsZ family, C-terminal domain
  misc_feature (1)..(151): NCBI GI NO: 542179 NR Description: tubulin alpha chain - maize (fragment)
  misc_feature (1)..(151): NCBI GI NO: 8928432 NR Description: Tubulin alpha-3 chain
  misc_feature (1)..(151): NCBI GI NO: 135398 NR Description: Tubulin alpha-1 chain (Alpha-1 tubulin)
  misc_feature (1)..(151): NCBI GI NO: 6094429 NR Description: Tubulin alpha-1 chain (Alpha-1 tubulin)
  misc_feature (1)..(151): NCBI GI NO: 135411 NR Description: Tubulin alpha-2 chain (Alpha-2 tubulin)
  misc_feature (1)..(151): NCBI GI NO: 8928408 NR Description: Tubulin alpha chain
  misc_feature (1)..(151): NCBI GI NO: 3163946 NR Description: alpha-tubulin 1 [Eleusine indica]
  misc_feature (1)..(151): NCBI GI NO: 1556446 NR Description: alpha tubulin [Hordeum vulgare]
  misc_feature (1)..(151): NCBI GI NO: 8928422 NR Description: Tubulin alpha-2 chain
  misc_feature (1)..(151): NCBI GI NO: 10441016 NR Description: alpha-tubulin [Oryza sativa]
MMAKCDPRHGKYMACCLMYRGDVVPKDVNAAVATIKTKRTIQFVDWCPTGFKCGINYQPPSVVPGGDLAKVQRAVCMISNSTSVVEVFSRIDHKFDLMYAKRAFVHWYVGEGMEEGEFSEAREDLRALEKDYEEVGAEFDEGEDGDEGDEY

SEQ ID NO: 36701 - DNA, 1619 bp, Zea mays subsp. mays
  misc_feature (1)..(1619): Ceres Seq. ID no. 13587844
attcgcagccctacccgcgccgccgcaccaggacccgccgcgccggcccagcagcgcgcggttttgcgggtggcgtcgtccaggacctcctccgcccgcccccgaagggccgccgccgccgtggccgcggccgcaatgcagccggccaaggcggtcgccgcggaggcctcccccgccgcggtggagatggggaacggcgccgcggcgccggggctgcagaggcccgacgccatgggcaggttcgggaggttcggcggcaagtacgtccccgagacgctcatgcacgcgctcaccgagctcgagagcgccttccacgcgctcgccaccgacgacgagttccagaaagaactggacggtattctcaaggactacgttggacgtgagagccccctatacttcgcggagcgcctaacggagcactacaagcgcgccgatggcacaggcccgctcatctacctcaagagggaggaccttaaccacacgggtgcccacaagatcaacaatgccgtggcgcaggccttgcttgccaagcgacttgggaagcagcgcatcattgccgagacaggggctggtcagcacggcgtcgccaccgccaccgtgtgccgccgtttcgggctgcagtgcatcatctacatgggcgcacaggatatggagaggcaggcgctcaatgttttccggatgaggcttcttggtgcagaggtcagggcggtacattctgggacagcaaccctgaaggatgcaacttcagaggctatccgtgactgggtcacaaatgtggagaccacacactatatcttgggctctgttgccggtccgcacccgtacccgatgatggtgagggagttccataaggttattggcaaggaaacccggaggcaggccatggacaagtggggtggcaagccggacgtattggttgcctgcgtcggcggcggatcaaacgccatgggcttattccatgagtttgttgaggatcaagatgtgaggctggttggactggaggcagctggccatggcgtagacaccgacaagcatgcggcgactttgacaaagggccaagtcggagttctccatggatccatgagctatttgctgcaggatgatgacggacaagttatcgaaccccactccatcagtgctgggctcgattaccctggcgttggacccgagcacagtttcttgaaggacattggacgtgccgaatacgatagtgtgactgaccaggaggcactggatgctttcaagcgcgtgtctcggttggagggcatcatccctgccctggagacctcccacgcgctggcctaccttgagaagctctgcccgacactggcggacggcgtgagggtggtggtgaactgcagcgggcgaggagacaaggacgtgcacaccgccagcaagtacctggacgtctaaaacaccagcgaggaggctggtttccatgtcaagttttggagggttcagcagtaattaatttagcgctgttctttttggataaaagcacaaataacctggaagctggtattgttgttgtagccggtagtgcccccctgtttttttattttacaagtaatctgaatggctttggagtgcataatcaataatcaaataaatacaaagct

SEQ ID NO: 36702 - protein, 470 aa, Zea mays subsp. mays
  peptide (1)..(470): Ceres Seq. ID no. 13587845
  misc_feature (122)..(456): Pfam Name: Pfam Description:  Pyridoxal-phosphate dependent enzyme
  misc_feature (1)..(470): NCBI GI NO: 18481702 NR Description: tryptophan synthase beta-subunit [Sorghum bicolor]
  misc_feature (50)..(470): NCBI GI NO: 1174780 NR Description: Tryptophan synthase beta chain 2
  misc_feature (1)..(470): NCBI GI NO: 38636821 NR Description: putative tryptophan synthase beta-subunit
  misc_feature (82)..(470): NCBI GI NO: 1174778 NR Description: Tryptophan synthase beta chain 1
  misc_feature (56)..(470): NCBI GI NO: 15239755 NR Description: tryptophan synthase, beta subunit 1 (TSB1)
  misc_feature (31)..(470): NCBI GI NO: 81661 NR Description: tryptophan synthase (EC 4
  misc_feature (31)..(470): NCBI GI NO: 15236977 NR Description: tryptophan synthase, beta subunit 2 (TSB2)
  misc_feature (7)..(470): NCBI GI NO: 3915165 NR Description: Tryptophan synthase beta chain 2
  misc_feature (73)..(470): NCBI GI NO: 7437014 NR Description: probable tryptophan synthase (EC 4
  misc_feature (72)..(468): NCBI GI NO: 17231286 NR Description: tryptophan synthase beta subunit
IRSPTRAAAPGPAAPAQQRAVLRVASSRTSSARPRRAAAAVAAAAMQPAKAVAAEASPAAVEMGNGAAAPGLQRPDAMGRFGRFGGKYVPETLMHALTELESAFHALATDDEFQKELDGILKDYVGRESPLYFAERLTEHYKRADGTGPLIYLKREDLNHTGAHKINNAVAQALLAKRLGKQRIIAETGAGQHGVATATVCRRFGLQCIIYMGAQDMERQALNVFRMRLLGAEVRAVHSGTATLKDATSEAIRDWVTNVETTHYILGSVAGPHPYPMMVREFHKVIGKETRRQAMDKWGGKPDVLVACVGGGSNAMGLFHEFVEDQDVRLVGLEAAGHGVDTDKHAATLTKGQVGVLHGSMSYLLQDDDGQVIEPHSISAGLDYPGVGPEHSFLKDIGRAEYDSVTDQEALDAFKRVSRLEGIIPALETSHALAYLEKLCPTLADGVRVVVNCSGRGDKDVHTASKYLDV

SEQ ID NO: 36703 - protein, 425 aa, Zea mays subsp. mays
  peptide (1)..(425): Ceres Seq. ID no. 13587846
  misc_feature (77)..(411): Pfam Name: Pfam Description:  Pyridoxal-phosphate dependent enzyme
  misc_feature (1)..(425): NCBI GI NO: 18481702 NR Description: tryptophan synthase beta-subunit [Sorghum bicolor]
  misc_feature (5)..(425): NCBI GI NO: 1174780 NR Description: Tryptophan synthase beta chain 2
  misc_feature (1)..(425): NCBI GI NO: 38636821 NR Description: putative tryptophan synthase beta-subunit
  misc_feature (37)..(425): NCBI GI NO: 1174778 NR Description: Tryptophan synthase beta chain 1
  misc_feature (11)..(425): NCBI GI NO: 15239755 NR Description: tryptophan synthase, beta subunit 1 (TSB1)
  misc_feature (1)..(425): NCBI GI NO: 81661 NR Description: tryptophan synthase (EC 4
  misc_feature (1)..(425): NCBI GI NO: 15236977 NR Description: tryptophan synthase, beta subunit 2 (TSB2)
  misc_feature (1)..(425): NCBI GI NO: 3915165 NR Description: Tryptophan synthase beta chain 2
  misc_feature (28)..(425): NCBI GI NO: 7437014 NR Description: probable tryptophan synthase (EC 4
  misc_feature (27)..(423): NCBI GI NO: 17231286 NR Description: tryptophan synthase beta subunit
MQPAKAVAAEASPAAVEMGNGAAAPGLQRPDAMGRFGRFGGKYVPETLMHALTELESAFHALATDDEFQKELDGILKDYVGRESPLYFAERLTEHYKRADGTGPLIYLKREDLNHTGAHKINNAVAQALLAKRLGKQRIIAETGAGQHGVATATVCRRFGLQCIIYMGAQDMERQALNVFRMRLLGAEVRAVHSGTATLKDATSEAIRDWVTNVETTHYILGSVAGPHPYPMMVREFHKVIGKETRRQAMDKWGGKPDVLVACVGGGSNAMGLFHEFVEDQDVRLVGLEAAGHGVDTDKHAATLTKGQVGVLHGSMSYLLQDDDGQVIEPHSISAGLDYPGVGPEHSFLKDIGRAEYDSVTDQEALDAFKRVSRLEGIIPALETSHALAYLEKLCPTLADGVRVVVNCSGRGDKDVHTASKYLDV

SEQ ID NO: 36704 - protein, 408 aa, Zea mays subsp. mays
  peptide (1)..(408): Ceres Seq. ID no. 13587847
  misc_feature (60)..(394): Pfam Name: Pfam Description:  Pyridoxal-phosphate dependent enzyme
  misc_feature (1)..(408): NCBI GI NO: 18481702 NR Description: tryptophan synthase beta-subunit [Sorghum bicolor]
  misc_feature (1)..(408): NCBI GI NO: 1174780 NR Description: Tryptophan synthase beta chain 2
  misc_feature (1)..(408): NCBI GI NO: 38636821 NR Description: putative tryptophan synthase beta-subunit
  misc_feature (20)..(408): NCBI GI NO: 1174778 NR Description: Tryptophan synthase beta chain 1
  misc_feature (1)..(408): NCBI GI NO: 15239755 NR Description: tryptophan synthase, beta subunit 1 (TSB1)
  misc_feature (1)..(408): NCBI GI NO: 81661 NR Description: tryptophan synthase (EC 4
  misc_feature (1)..(408): NCBI GI NO: 15236977 NR Description: tryptophan synthase, beta subunit 2 (TSB2)
  misc_feature (1)..(408): NCBI GI NO: 3915165 NR Description: Tryptophan synthase beta chain 2
  misc_feature (11)..(408): NCBI GI NO: 7437014 NR Description: probable tryptophan synthase (EC 4
  misc_feature (10)..(406): NCBI GI NO: 17231286 NR Description: tryptophan synthase beta subunit
MGNGAAAPGLQRPDAMGRFGRFGGKYVPETLMHALTELESAFHALATDDEFQKELDGILKDYVGRESPLYFAERLTEHYKRADGTGPLIYLKREDLNHTGAHKINNAVAQALLAKRLGKQRIIAETGAGQHGVATATVCRRFGLQCIIYMGAQDMERQALNVFRMRLLGAEVRAVHSGTATLKDATSEAIRDWVTNVETTHYILGSVAGPHPYPMMVREFHKVIGKETRRQAMDKWGGKPDVLVACVGGGSNAMGLFHEFVEDQDVRLVGLEAAGHGVDTDKHAATLTKGQVGVLHGSMSYLLQDDDGQVIEPHSISAGLDYPGVGPEHSFLKDIGRAEYDSVTDQEALDAFKRVSRLEGIIPALETSHALAYLEKLCPTLADGVRVVVNCSGRGDKDVHTASKYLDV

SEQ ID NO: 36705 - DNA, 986 bp, Zea mays subsp. mays
  misc_feature (1)..(986): Ceres Seq. ID no. 15178973
gaaatccgcagattcccgtcgctacttcggccacatggctgcagcggcggcgtggaccggcgccgcatcccccaactcgctgctgctctcgcgctcgcctccccacgccgccgtgctcgcgccttcgccggggagctccatgcggaggcggctcctgctcggcgtcggcaccccggccgtggcggcgctggcggccgcggcgccgccagcggtgctgcaggacggggcggtcactgtgctcatcaccgccggcgcctactctcttgtgcgcgtcttcgacgagctcaccgagcggcggctcatcgaaaagagcttgagcaggaaggttgtgcacgtgctatccggcgtcctgttcatgtcatcttggcccctgttcagggaattgctgagaggtccactctattatgtcctggtgctgctgttcagcgttttagtcttctggcgtgagtcccccatcgggatcgtctccttgtcgatgatgagcggtggcgatggttttgctgacattgttgggaggaggtatggctcagcgaagctgccattcaatcggaagaagagctgggccgggagcatctcgatgttcatttctggtttcctgctgtccgcgatgatgatgctctacttctcaagcctgggttacattgatgttatctgggaagaggcacttggtaagctggcgcttgttgcactagcagcgacagtagtggagtgcgttcctgtgaccgaagttgtagatgacaacatatctgttcctttggccaccatgctggtagcttttctcttgtttagctccaaccgcacaatagttaattaaaatactactagtgcattatttaagacatgtgatgagttcttcagtgatgagttgtgcttacttttgcttcctatgtgatctctagtacttgatggcgacggcctaacatctcccagtttttggtgtctccttgccttggctgttttggtggaaaagtattgctagcttgtct

SEQ ID NO: 36706 - protein, 270 aa, Zea mays subsp. mays
  peptide (1)..(270): Ceres Seq. ID no. 15178974
  misc_feature (127)..(262): NCBI GI NO: 32488404 NR Description: OSJNBa0043A12.34
  misc_feature (19)..(144): NCBI GI NO: 32488404 NR Description: OSJNBa0043A12.34
  misc_feature (127)..(262): NCBI GI NO: 21537252 NR Description: unknown [Arabidopsis thaliana]
  misc_feature (64)..(125): NCBI GI NO: 21537252 NR Description: unknown [Arabidopsis thaliana]
  misc_feature (127)..(262): NCBI GI NO: 15238184 NR Description: expressed protein [Arabidopsis thaliana]
  misc_feature (64)..(125): NCBI GI NO: 15238184 NR Description: expressed protein [Arabidopsis thaliana]
  misc_feature (127)..(262): NCBI GI NO: 28393229 NR Description: unknown protein [Arabidopsis thaliana]
  misc_feature (64)..(125): NCBI GI NO: 28393229 NR Description: unknown protein [Arabidopsis thaliana]
  misc_feature (126)..(262): NCBI GI NO: 34907982 NR Description: P0446G04.23
  misc_feature (21)..(125): NCBI GI NO: 34907982 NR Description: P0446G04.23
KSADSRRYFGHMAAAAAWTGAASPNSLLLSRSPPHAAVLAPSPGSSMRRRLLLGVGTPAVAALAAAAPPAVLQDGAVTVLITAGAYSLVRVFDELTERRLIEKSLSRKVVHVLSGVLFMSSWPLFRELLRGPLYYVLVLLFSVLVFWRESPIGIVSLSMMSGGDGFADIVGRRYGSAKLPFNRKKSWAGSISMFISGFLLSAMMMLYFSSLGYIDVIWEEALGKLALVALAATVVECVPVTEVVDDNISVPLATMLVAFLLFSSNRTIVN

SEQ ID NO: 36707 - protein, 259 aa, Zea mays subsp. mays
  peptide (1)..(259): Ceres Seq. ID no. 15178975
  misc_feature (116)..(251): NCBI GI NO: 32488404 NR Description: OSJNBa0043A12.34
  misc_feature (8)..(133): NCBI GI NO: 32488404 NR Description: OSJNBa0043A12.34
  misc_feature (116)..(251): NCBI GI NO: 21537252 NR Description: unknown [Arabidopsis thaliana]
  misc_feature (53)..(114): NCBI GI NO: 21537252 NR Description: unknown [Arabidopsis thaliana]
  misc_feature (116)..(251): NCBI GI NO: 15238184 NR Description: expressed protein [Arabidopsis thaliana]
  misc_feature (53)..(114): NCBI GI NO: 15238184 NR Description: expressed protein [Arabidopsis thaliana]
  misc_feature (116)..(251): NCBI GI NO: 28393229 NR Description: unknown protein [Arabidopsis thaliana]
  misc_feature (53)..(114): NCBI GI NO: 28393229 NR Description: unknown protein [Arabidopsis thaliana]
  misc_feature (115)..(251): NCBI GI NO: 34907982 NR Description: P0446G04.23
  misc_feature (10)..(114): NCBI GI NO: 34907982 NR Description: P0446G04.23
MAAAAAWTGAASPNSLLLSRSPPHAAVLAPSPGSSMRRRLLLGVGTPAVAALAAAAPPAVLQDGAVTVLITAGAYSLVRVFDELTERRLIEKSLSRKVVHVLSGVLFMSSWPLFRELLRGPLYYVLVLLFSVLVFWRESPIGIVSLSMMSGGDGFADIVGRRYGSAKLPFNRKKSWAGSISMFISGFLLSAMMMLYFSSLGYIDVIWEEALGKLALVALAATVVECVPVTEVVDDNISVPLATMLVAFLLFSSNRTIVN

SEQ ID NO: 36708 - protein, 224 aa, Zea mays subsp. mays
  peptide (1)..(224): Ceres Seq. ID no. 15178976
  misc_feature (81)..(216): NCBI GI NO: 32488404 NR Description: OSJNBa0043A12.34
  misc_feature (1)..(98): NCBI GI NO: 32488404 NR Description: OSJNBa0043A12.34
  misc_feature (81)..(216): NCBI GI NO: 21537252 NR Description: unknown [Arabidopsis thaliana]
  misc_feature (18)..(79): NCBI GI NO: 21537252 NR Description: unknown [Arabidopsis thaliana]
  misc_feature (81)..(216): NCBI GI NO: 15238184 NR Description: expressed protein [Arabidopsis thaliana]
  misc_feature (18)..(79): NCBI GI NO: 15238184 NR Description: expressed protein [Arabidopsis thaliana]
  misc_feature (81)..(216): NCBI GI NO: 28393229 NR Description: unknown protein [Arabidopsis thaliana]
  misc_feature (18)..(79): NCBI GI NO: 28393229 NR Description: unknown protein [Arabidopsis thaliana]
  misc_feature (80)..(216): NCBI GI NO: 34907982 NR Description: P0446G04.23
  misc_feature (1)..(79): NCBI GI NO: 34907982 NR Description: P0446G04.23
MRRRLLLGVGTPAVAALAAAAPPAVLQDGAVTVLITAGAYSLVRVFDELTERRLIEKSLSRKVVHVLSGVLFMSSWPLFRELLRGPLYYVLVLLFSVLVFWRESPIGIVSLSMMSGGDGFADIVGRRYGSAKLPFNRKKSWAGSISMFISGFLLSAMMMLYFSSLGYIDVIWEEALGKLALVALAATVVECVPVTEVVDDNISVPLATMLVAFLLFSSNRTIVN

SEQ ID NO: 36709 - DNA, 1140 bp, Zea mays subsp. mays
  misc_feature (1)..(1140): Ceres Seq. ID no. 13496508
atataccacctccatggcacatctcttcctcaccaccgcatcccacaccccccgagctcagcttagctccagctccaatcacagtcgtgaccagagcgcgagagctagctagagggccgtgaaaatgccgatcaataggatcgccctggggagccaccaggaggtgtaccacccgggcgccctcaaggcggcgttcgctgagttcatctccaccctcatcttcgtcttcgccggccagggctccggcatggccttcagcaagctgaccggcggcggcccgacgaccccggcgggcctgatcgcggcggcggtggcgcacgcgttcgcgctgttcgtggcggtgtctgtgggcgcgaacatctccggcgggcacgtgaaccctgccgtgaccttcggcgccttcgtgggcggcaacatcaccctgttccgggggctcctgtactgggtggcgcagctgctggggtccaccgtggcgtgcttcctgctccgcttctcgacgggcgggcaggccacgggcaccttcgggctgacgggcgtgtcggtgtgggaggcgctggtgctggagatcgtgatgaccttcgggctggtgtacacggtgtacgccacggcggtggacccgaagaagggcagcctgggcaccatcgcccccattgccatcggcttcatcgtgggggccaacatcctggtgggcggcgccttcgacggcgcgtccatgaaccccgccgtgtccttcggccccgccctcgtcagctgggagtggggctaccagtgggtgtactgggtcgggcccctcatcggcggcggcctcgccggcgtcatctacgagctgctcttcatctcccacacccacgagcagctcccctccaccgactactaaaagccgaagccgaccgacctaggggtgcgcagcgcagctagcgcatccagctctctctccccgctcgccgccgtttagtttctctcgtgcacgtgcatgcatcgtcgactgtctcaggccgccgctgcgccggcgccgctcgcatcgtttgcttccttggaccagcagtcgtcgccgtcaggctgaactgcttgtaaccgtgaattccggacccgtttgcttctgtaagatttgtgcatttgcctgagtacacctcgatctgc

SEQ ID NO: 36710 - protein, 250 aa, Zea mays subsp. mays
  peptide (1)..(250): Ceres Seq. ID no. 13496509
  misc_feature (13)..(233): Pfam Name: Pfam Description:  Major intrinsic protein
  misc_feature (1)..(250): NCBI GI NO: 3004950 NR Description: tonoplast intrinsic protein; ZmTIP1 [Zea mays]
  misc_feature (1)..(250): NCBI GI NO: 1729971 NR Description: TONOPLAST INTRINSIC PROTEIN, GAMMA
  misc_feature (1)..(250): NCBI GI NO: 629784 NR Description: tonoplast intrinsic protein gamma - barley
  misc_feature (1)..(250): NCBI GI NO: 4099406 NR Description: gamma-type tonoplast intrinsic protein
  misc_feature (1)..(250): NCBI GI NO: 6478150 NR Description: putative gamma tonoplast intrinsic protein (TIP)
  misc_feature (1)..(250): NCBI GI NO: 12006843 NR Description: putative gamma TIP [Nicotiana glauca]
  misc_feature (1)..(250): NCBI GI NO: 4138262 NR Description: aquaporin 1 [Nicotiana tabacum]
  misc_feature (1)..(250): NCBI GI NO: 17940748 NR Description: aquaporin-like protein [Petunia x hybrida]
  misc_feature (1)..(250): NCBI GI NO: 8699604 NR Description: putative aquaporin TIP3
  misc_feature (1)..(250): NCBI GI NO: 9988412 NR Description: gamma tonoplast intrinsic protein [Pyrus communis]
MPINRIALGSHQEVYHPGALKAAFAEFISTLIFVFAGQGSGMAFSKLTGGGPTTPAGLIAAAVAHAFALFVAVSVGANISGGHVNPAVTFGAFVGGNITLFRGLLYWVAQLLGSTVACFLLRFSTGGQATGTFGLTGVSVWEALVLEIVMTFGLVYTVYATAVDPKKGSLGTIAPIAIGFIVGANILVGGAFDGASMNPAVSFGPALVSWEWGYQWVYWVGPLIGGGLAGVIYELLFISHTHEQLPSTDY

SEQ ID NO: 36711 - protein, 209 aa, Zea mays subsp. mays
  peptide (1)..(209): Ceres Seq. ID no. 13496510
  misc_feature (1)..(192): Pfam Name: Pfam Description:  Major intrinsic protein
  misc_feature (1)..(209): NCBI GI NO: 3004950 NR Description: tonoplast intrinsic protein; ZmTIP1 [Zea mays]
  misc_feature (1)..(209): NCBI GI NO: 1729971 NR Description: TONOPLAST INTRINSIC PROTEIN, GAMMA
  misc_feature (1)..(209): NCBI GI NO: 629784 NR Description: tonoplast intrinsic protein gamma - barley
  misc_feature (1)..(209): NCBI GI NO: 4099406 NR Description: gamma-type tonoplast intrinsic protein
  misc_feature (1)..(209): NCBI GI NO: 6478150 NR Description: putative gamma tonoplast intrinsic protein (TIP)
  misc_feature (1)..(209): NCBI GI NO: 12006843 NR Description: putative gamma TIP [Nicotiana glauca]
  misc_feature (1)..(209): NCBI GI NO: 4138262 NR Description: aquaporin 1 [Nicotiana tabacum]
  misc_feature (1)..(209): NCBI GI NO: 17940748 NR Description: aquaporin-like protein [Petunia x hybrida]
  misc_feature (1)..(209): NCBI GI NO: 8699604 NR Description: putative aquaporin TIP3
  misc_feature (1)..(209): NCBI GI NO: 9988412 NR Description: gamma tonoplast intrinsic protein [Pyrus communis]
MAFSKLTGGGPTTPAGLIAAAVAHAFALFVAVSVGANISGGHVNPAVTFGAFVGGNITLFRGLLYWVAQLLGSTVACFLLRFSTGGQATGTFGLTGVSVWEALVLEIVMTFGLVYTVYATAVDPKKGSLGTIAPIAIGFIVGANILVGGAFDGASMNPAVSFGPALVSWEWGYQWVYWVGPLIGGGLAGVIYELLFISHTHEQLPSTDY

SEQ ID NO: 36712 - DNA, 1863 bp, Zea mays subsp. mays; identical to SEQ ID NO: 36611
  misc_feature (1)..(1863): Ceres Seq. ID no. 13635478

SEQ ID NO: 36713 - protein, 522 aa, Zea mays subsp. mays; identical to SEQ ID NO: 36612
  peptide (1)..(522): Ceres Seq. ID no. 13635479
  misc_feature (111)..(389): Pfam Name: Pfam Description:  Nucleotidyl transferase
  misc_feature (1)..(522): NCBI GI NO: 5705939 NR Description: endosperm ADP-glucose pyrophosphorylase subunithomolog
  misc_feature (1)..(522): NCBI GI NO: 322870 NR Description: glucose-1-phosphate adenylyltransferase (EC2
  misc_feature (27)..(522): NCBI GI NO: 1707924 NR Description: Glucose-1-phosphate adenylyltransferase large subunit 1
  misc_feature (27)..(522): NCBI GI NO: 7434892 NR Description: glucose-1-phosphate adenylyltransferase (EC2
  misc_feature (27)..(522): NCBI GI NO: 13540812 NR Description: ADP-glucose pyrophosphorylase large subunit isoform
  misc_feature (27)..(522): NCBI GI NO: 7434888 NR Description: glucose-1-phosphate adenylyltransferase (EC2
  misc_feature (43)..(522): NCBI GI NO: 7434891 NR Description: glucose-1-phosphate adenylyltransferase (EC2
  misc_feature (27)..(522): NCBI GI NO: 1707923 NR Description: Glucose-1-phosphate adenylyltransferase large subunit 1
  misc_feature (27)..(522): NCBI GI NO: 1707930 NR Description: Glucose-1-phosphate adenylyltransferase large subunit
  misc_feature (27)..(522): NCBI GI NO: 32812836 NR Description: ADP-glucose pyrophosphorylase large subunit

SEQ ID NO: 36714 - protein, 496 aa, Zea mays subsp. mays; identical to SEQ ID NO: 36613
  peptide (1)..(496): Ceres Seq. ID no. 13635480
  misc_feature (85)..(363): Pfam Name: Pfam Description:  Nucleotidyl transferase
  misc_feature (1)..(496): NCBI GI NO: 5705939 NR Description: endosperm ADP-glucose pyrophosphorylase subunithomolog
  misc_feature (1)..(496): NCBI GI NO: 322870 NR Description: glucose-1-phosphate adenylyltransferase (EC2
  misc_feature (1)..(496): NCBI GI NO: 1707924 NR Description: Glucose-1-phosphate adenylyltransferase large subunit 1
  misc_feature (1)..(496): NCBI GI NO: 7434892 NR Description: glucose-1-phosphate adenylyltransferase (EC2
  misc_feature (1)..(496): NCBI GI NO: 13540812 NR Description: ADP-glucose pyrophosphorylase large subunit isoform
  misc_feature (1)..(496): NCBI GI NO: 7434888 NR Description: glucose-1-phosphate adenylyltransferase (EC2
  misc_feature (17)..(496): NCBI GI NO: 7434891 NR Description: glucose-1-phosphate adenylyltransferase (EC2
  misc_feature (1)..(496): NCBI GI NO: 1707923 NR Description: Glucose-1-phosphate adenylyltransferase large subunit 1
  misc_feature (1)..(496): NCBI GI NO: 1707930 NR Description: Glucose-1-phosphate adenylyltransferase large subunit
  misc_feature (1)..(496): NCBI GI NO: 32812836 NR Description: ADP-glucose pyrophosphorylase large subunit

SEQ ID NO: 36715 - protein, 375 aa, Zea mays subsp. mays; identical to SEQ ID NO: 36614
  peptide (1)..(375): Ceres Seq. ID no. 13635481
  misc_feature (1)..(242): Pfam Name: Pfam Description:  Nucleotidyl transferase
  misc_feature (1)..(375): NCBI GI NO: 5705939 NR Description: endosperm ADP-glucose pyrophosphorylase subunithomolog
  misc_feature (1)..(375): NCBI GI NO: 322870 NR Description: glucose-1-phosphate adenylyltransferase (EC2
  misc_feature (1)..(375): NCBI GI NO: 1707924 NR Description: Glucose-1-phosphate adenylyltransferase large subunit 1
  misc_feature (1)..(375): NCBI GI NO: 7434892 NR Description: glucose-1-phosphate adenylyltransferase (EC2
  misc_feature (1)..(375): NCBI GI NO: 13540812 NR Description: ADP-glucose pyrophosphorylase large subunit isoform
  misc_feature (1)..(375): NCBI GI NO: 7434888 NR Description: glucose-1-phosphate adenylyltransferase (EC2
  misc_feature (1)..(375): NCBI GI NO: 7434891 NR Description: glucose-1-phosphate adenylyltransferase (EC2
  misc_feature (1)..(375): NCBI GI NO: 1707923 NR Description: Glucose-1-phosphate adenylyltransferase large subunit 1
  misc_feature (1)..(375): NCBI GI NO: 1707930 NR Description: Glucose-1-phosphate adenylyltransferase large subunit
  misc_feature (1)..(375): NCBI GI NO: 32812836 NR Description: ADP-glucose pyrophosphorylase large subunit

SEQ ID NO: 36716 - DNA, 549 bp, Zea mays subsp. mays
  misc_feature (1)..(549): Ceres Seq. ID no. 13573207
accaccgcatcccacaacccccgagctcagcttagctccactccagctccaatcgcagtcgtgaccagagcgcgagagctagctagagggccgtgaaaatgccgatcaataggatcgccctggggagccaccaggaggtgtaccacccgggcgccctcaaggcggcgttcgctgagttcatctccaccctcatcttcgtcttcgccggccagggctccggcatggccttcagtgagtcctccgctgtccgctcctacccatgcatgcaacacaggctcgatagcctgtacacggcacgccccaccaacagcttcacgacttcttctaagctgttctttaaacatcttgtttaaaacaggctctagtatctctttgagctcagcttggtctgtcatgctctagcctctagcagtagcacaaggtcatggccggctcttttgagttcgacaccgaatgactgaaacgaaggggcagaaaaaaaagaatgtccttttcgtcctactagctagtaccaggctttcggtaggtatttctttaatacaaggccag

SEQ ID NO: 36717 - protein, 84 aa, Zea mays subsp. mays
  peptide (1)..(84): Ceres Seq. ID no. 13573208
  misc_feature (1)..(46): NCBI GI NO: 3004950 NR Description: tonoplast intrinsic protein; ZmTIP1 [Zea mays]
  misc_feature (1)..(46): NCBI GI NO: 1729971 NR Description: TONOPLAST INTRINSIC PROTEIN, GAMMA
  misc_feature (1)..(48): NCBI GI NO: 629784 NR Description: tonoplast intrinsic protein gamma - barley
  misc_feature (1)..(48): NCBI GI NO: 4099406 NR Description: gamma-type tonoplast intrinsic protein
  misc_feature (1)..(49): NCBI GI NO: 17940748 NR Description: aquaporin-like protein [Petunia x hybrida]
  misc_feature (1)..(49): NCBI GI NO: 12006843 NR Description: putative gamma TIP [Nicotiana glauca]
  misc_feature (1)..(48): NCBI GI NO: 6478150 NR Description: putative gamma tonoplast intrinsic protein (TIP)
  misc_feature (1)..(49): NCBI GI NO: 4138262 NR Description: aquaporin 1 [Nicotiana tabacum]
  misc_feature (1)..(46): NCBI GI NO: 9988412 NR Description: gamma tonoplast intrinsic protein [Pyrus communis]
  misc_feature (1)..(48): NCBI GI NO: 1200161 NR Description: tonoplast intrinsic protein [Tulipa gesneriana]
MPINRIALGSHQEVYHPGALKAAFAEFISTLIFVFAGQGSGMAFSESSAVRSYPCMQHRLDSLYTARPTNSFTTSSKLFFKHLV

SEQ ID NO: 36718 - protein, 43 aa, Zea mays subsp. mays
  peptide (1)..(43): Ceres Seq. ID no. 13573209
MAFSESSAVRSYPCMQHRLDSLYTARPTNSFTTSSKLFFKHLV

SEQ ID NO: 36719 - DNA, 676 bp, Zea mays subsp. mays
  misc_feature (1)..(676): Ceres Seq. ID no. 12635492
tttttcaaatggcctccgccgtcgtctccgctgcgttgcgactcccgctcgctacccgccgattctccaactcctcgccgcggattagcttgcaacattccacgatctggattcgtcatctccgtagcatcacaacagcttcctccatgagccaactaaccagcgaaaccgatgcctcccgtactaacgacgagaactcggctgagaaaccagacgacgtaccagacgacgtcgtggttcaatacgtggtgcttagacgagatctgatcgattcgtggccactcgggagcgtcgtaacccagggatgccacgcgtcggttgcggcgatatggtcgttcaaagacgatcccgttacgcttcagtactgtgatccacagcacattgactctatgcacaaggtcactctggaagttaaaggagaaactcagatgttgaatttgtcagagaagttgaagtcaggaggaatctctcataaggtgtggatggagcagccggagaatattccgacttgtattgctacaaagccttatctcaaatctcaagtctctcctttcttcaagaagctcaaactttgcaagtgattcttctccattttatattaaaaaatctcatttataaagggacactcttttgaatgttaagtttttgcatatagagtaaagaaaagaagcagatg

SEQ ID NO: 36720 - protein, 192 aa, Zea mays subsp. mays
  peptide (1)..(192): Ceres Seq. ID no. 12635493
  misc_feature (3)..(192): NCBI GI NO: 15238224 NR Description: putative protein; protein id: At5g10700.1
  misc_feature (12)..(192): NCBI GI NO: 38346909 NR Description: OSJNBb0015N08.9
  misc_feature (78)..(192): NCBI GI NO: 24647481 NR Description: CG14903-PA [Drosophila melanogaster]
  misc_feature (75)..(192): NCBI GI NO: 23479593 NR Description: Drosophila melanogaster CG14903 gene product
  misc_feature (75)..(192): NCBI GI NO: 23612187 NR Description: hypothetical protein [Plasmodium falciparum 3D7]
  misc_feature (77)..(192): NCBI GI NO: 37546977 NR Description: similar to ENSANGP00000018456 [Homo sapiens]
  misc_feature (73)..(192): NCBI GI NO: 27716785 NR Description: similar to CG14903-PA
  misc_feature (79)..(190): NCBI GI NO: 25148624 NR Description: Low molecular weight phosphotyrosine proteinphosphatase
  misc_feature (79)..(190): NCBI GI NO: 39585949 NR Description: Hypothetical protein CBG13912
  misc_feature (77)..(192): NCBI GI NO: 29248553 NR Description: GLP_162_41645_41277 [Giardia lamblia ATCC 50803]
FQMASAVVSAALRLPLATRRFSNSSPRISLQHSTIWIRHLRSITTASSMSQLTSETDASRTNDENSAEKPDDVPDDVVVQYVVLRRDLIDSWPLGSVVTQGCHASVAAIWSFKDDPVTLQYCDPQHIDSMHKVTLEVKGETQMLNLSEKLKSGGISHKVWMEQPENIPTCIATKPYLKSQVSPFFKKLKLCK

SEQ ID NO: 36721 - protein, 190 aa, Zea mays subsp. mays
  peptide (1)..(190): Ceres Seq. ID no. 12635494
  misc_feature (1)..(190): NCBI GI NO: 15238224 NR Description: putative protein; protein id: At5g10700.1
  misc_feature (10)..(190): NCBI GI NO: 38346909 NR Description: OSJNBb0015N08.9
  misc_feature (76)..(190): NCBI GI NO: 24647481 NR Description: CG14903-PA [Drosophila melanogaster]
  misc_feature (73)..(190): NCBI GI NO: 23479593 NR Description: Drosophila melanogaster CG14903 gene product
  misc_feature (73)..(190): NCBI GI NO: 23612187 NR Description: hypothetical protein [Plasmodium falciparum 3D7]
  misc_feature (75)..(190): NCBI GI NO: 37546977 NR Description: similar to ENSANGP00000018456 [Homo sapiens]
  misc_feature (71)..(190): NCBI GI NO: 27716785 NR Description: similar to CG14903-PA
  misc_feature (77)..(188): NCBI GI NO: 25148624 NR Description: Low molecular weight phosphotyrosine proteinphosphatase
  misc_feature (77)..(188): NCBI GI NO: 39585949 NR Description: Hypothetical protein CBG13912
  misc_feature (75)..(190): NCBI GI NO: 29248553 NR Description: GLP_162_41645_41277 [Giardia lamblia ATCC 50803]
MASAVVSAALRLPLATRRFSNSSPRISLQHSTIWIRHLRSITTASSMSQLTSETDASRTNDENSAEKPDDVPDDVVVQYVVLRRDLIDSWPLGSVVTQGCHASVAAIWSFKDDPVTLQYCDPQHIDSMHKVTLEVKGETQMLNLSEKLKSGGISHKVWMEQPENIPTCIATKPYLKSQVSPFFKKLKLCK

SEQ ID NO: 36722 - protein, 144 aa, Zea mays subsp. mays
  peptide (1)..(144): Ceres Seq. ID no. 12635495
  misc_feature (1)..(144): NCBI GI NO: 15238224 NR Description: putative protein; protein id: At5g10700.1
  misc_feature (1)..(144): NCBI GI NO: 38346909 NR Description: OSJNBb0015N08.9
  misc_feature (30)..(144): NCBI GI NO: 24647481 NR Description: CG14903-PA [Drosophila melanogaster]
  misc_feature (27)..(144): NCBI GI NO: 23479593 NR Description: Drosophila melanogaster CG14903 gene product
  misc_feature (27)..(144): NCBI GI NO: 23612187 NR Description: hypothetical protein [Plasmodium falciparum 3D7]
  misc_feature (29)..(144): NCBI GI NO: 37546977 NR Description: similar to ENSANGP00000018456 [Homo sapiens]
  misc_feature (25)..(144): NCBI GI NO: 27716785 NR Description: similar to CG14903-PA
  misc_feature (31)..(142): NCBI GI NO: 25148624 NR Description: Low molecular weight phosphotyrosine proteinphosphatase
  misc_feature (31)..(142): NCBI GI NO: 39585949 NR Description: Hypothetical protein CBG13912
  misc_feature (29)..(144): NCBI GI NO: 29248553 NR Description: GLP_162_41645_41277 [Giardia lamblia ATCC 50803]
MSQLTSETDASRTNDENSAEKPDDVPDDVVVQYVVLRRDLIDSWPLGSVVTQGCHASVAAIWSFKDDPVTLQYCDPQHIDSMHKVTLEVKGETQMLNLSEKLKSGGISHKVWMEQPENIPTCIATKPYLKSQVSPFFKKLKLCK

SEQ ID NO: 36723 - DNA, 683 bp, Zea mays subsp. mays
  misc_feature (1)..(683): Ceres Seq. ID no. 13599266
agtttatctctctctctgttgcaatgtcgaagagcggaagatattgcttaggatcaatggaagacatccgagcagtattccagcgcttcgacaaaaacggagacgggaaaatctccatcgacgagctcaaagacgtgatcggagctctcagtcccacggcgtcgccggaagaaacgacgttgatgatgaaagagttcgatctcgacggtaacggatacatcgacatggacgagttcgttgctctgttccaaaccgaagacggtggcgatattcgagatctgaaggaagcgtttgatctgtacgatttggatggaaacggacggatctctgtgaacgagcttcactcggtgatgaagaatctcggcgagaagtgttcggttgaggattgcaagaggatcattagcaaagttgatgctgacggtgacggttgtgttaactttgaagagtttaagaagatgatgatgaacggcagagctactgcttgacttaacggcgaggaatcgtttccttttttttttttttgtatatattcaatttttagttttaggttttatcgattaaactggattaatctttgtttttcctttggttttttaatcttatggattaattagggatttttatttcttaattgtaaggtttaatcgatttttttattttaataattatttattagtatggtt

SEQ ID NO: 36724 - protein, 160 aa, Zea mays subsp. mays
  peptide (1)..(160): Ceres Seq. ID no. 13599267
  misc_feature (128)..(156): Pfam Name: Pfam Description:  EF hand
  misc_feature (8)..(158): NCBI GI NO: 21618074 NR Description: calmodulin-related protein [Arabidopsis thaliana]
  misc_feature (9)..(156): NCBI GI NO: 15240340 NR Description: calmodulin-related protein 2, touch-induced (TCH2)
  misc_feature (8)..(158): NCBI GI NO: 18408502 NR Description: calmodulin-related protein, putative
  misc_feature (25)..(153): NCBI GI NO: 13397927 NR Description: putative calmodulin-related protein
  misc_feature (19)..(158): NCBI GI NO: 14589311 NR Description: calcium binding protein [Sesbania rostrata]
  misc_feature (16)..(153): NCBI GI NO: 15221030 NR Description: calcium-binding protein, putative
  misc_feature (9)..(155): NCBI GI NO: 6901654 NR Description: calcium-binding protein [Olea europaea]
  misc_feature (9)..(155): NCBI GI NO: 14423648 NR Description: Calcium-binding allergen Ole e 8 (PCA18/PCA23)
  misc_feature (21)..(158): NCBI GI NO: 34895640 NR Description: OSJNBa0083M16.33
  misc_feature (19)..(156): NCBI GI NO: 15221781 NR Description: polcalcin
FISLSVAMSKSGRYCLGSMEDIRAVFQRFDKNGDGKISIDELKDVIGALSPTASPEETTLMMKEFDLDGNGYIDMDEFVALFQTEDGGDIRDLKEAFDLYDLDGNGRISVNELHSVMKNLGEKCSVEDCKRIISKVDADGDGCVNFEEFKKMMMNGRATA

SEQ ID NO: 36725 - protein, 153 aa, Zea mays subsp. mays
  peptide (1)..(153): Ceres Seq. ID no. 13599268
  misc_feature (121)..(149): Pfam Name: Pfam Description:  EF hand
  misc_feature (1)..(151): NCBI GI NO: 21618074 NR Description: calmodulin-related protein [Arabidopsis thaliana]
  misc_feature (2)..(149): NCBI GI NO: 15240340 NR Description: calmodulin-related protein 2, touch-induced (TCH2)
  misc_feature (1)..(151): NCBI GI NO: 18408502 NR Description: calmodulin-related protein, putative
  misc_feature (18)..(146): NCBI GI NO: 13397927 NR Description: putative calmodulin-related protein
  misc_feature (12)..(151): NCBI GI NO: 14589311 NR Description: calcium binding protein [Sesbania rostrata]
  misc_feature (9)..(146): NCBI GI NO: 15221030 NR Description: calcium-binding protein, putative
  misc_feature (2)..(148): NCBI GI NO: 6901654 NR Description: calcium-binding protein [Olea europaea]
  misc_feature (2)..(148): NCBI GI NO: 14423648 NR Description: Calcium-binding allergen Ole e 8 (PCA18/PCA23)
  misc_feature (14)..(151): NCBI GI NO: 34895640 NR Description: OSJNBa0083M16.33
  misc_feature (12)..(149): NCBI GI NO: 15221781 NR Description: polcalcin
MSKSGRYCLGSMEDIRAVFQRFDKNGDGKISIDELKDVIGALSPTASPEETTLMMKEFDLDGNGYIDMDEFVALFQTEDGGDIRDLKEAFDLYDLDGNGRISVNELHSVMKNLGEKCSVEDCKRIISKVDADGDGCVNFEEFKKMMMNGRATA

SEQ ID NO: 36726 - protein, 142 aa, Zea mays subsp. mays
  peptide (1)..(142): Ceres Seq. ID no. 13599269
  misc_feature (110)..(138): Pfam Name: Pfam Description:  EF hand
  misc_feature (1)..(140): NCBI GI NO: 21618074 NR Description: calmodulin-related protein [Arabidopsis thaliana]
  misc_feature (1)..(138): NCBI GI NO: 15240340 NR Description: calmodulin-related protein 2, touch-induced (TCH2)
  misc_feature (1)..(140): NCBI GI NO: 18408502 NR Description: calmodulin-related protein, putative
  misc_feature (7)..(135): NCBI GI NO: 13397927 NR Description: putative calmodulin-related protein
  misc_feature (1)..(140): NCBI GI NO: 14589311 NR Description: calcium binding protein [Sesbania rostrata]
  misc_feature (1)..(135): NCBI GI NO: 15221030 NR Description: calcium-binding protein, putative
  misc_feature (1)..(137): NCBI GI NO: 6901654 NR Description: calcium-binding protein [Olea europaea]
  misc_feature (1)..(137): NCBI GI NO: 14423648 NR Description: Calcium-binding allergen Ole e 8 (PCA18/PCA23)
  misc_feature (3)..(140): NCBI GI NO: 34895640 NR Description: OSJNBa0083M16.33
  misc_feature (1)..(138): NCBI GI NO: 15221781 NR Description: polcalcin
MEDIRAVFQRFDKNGDGKISIDELKDVIGALSPTASPEETTLMMKEFDLDGNGYIDMDEFVALFQTEDGGDIRDLKEAFDLYDLDGNGRISVNELHSVMKNLGEKCSVEDCKRIISKVDADGDGCVNFEEFKKMMMNGRATA

SEQ ID NO: 36727 - DNA, 1059 bp, Zea mays subsp. mays
  misc_feature (1)..(1059): Ceres Seq. ID no. 13623013
gaacagaaccgaaacctcagacactctgcatatatcctctgcgcgtgtatctcgtcgaacagagccgaaagctggagcttccaatggcgggaggcaacgacctgaaggtgctcggcgtgtggacgagcccgttcgtgatccgggtccgcatcgtgctcaacctgaagggcctggcgtacgagtacgtggaggaggacctcggcaacaagagcgcgctcctcctgggatccaacccggtgcacaagagcgtgccggtgctcctccacgccggccgcgccataaacgagtcccaggtcatcctgcagtacatcgacgaggtgtgggcggggacggggccggccgtgcttccggccgacccctacgagcgcgcggtggcgcggttctggggcgcgtacatcgacgacaaggtggagtcggcgtggctggggatgctgttcaggtgcgcgaacgaggaggagagggcggcggcggtggcgcgcgcccgcgaggcgctcgacgcgctggagggcgcgttccgggactgctccagggggaggccgttcttcggcggcgacgacatcgggttcgtggacgccgttctcggcgggtacctcggctggttcggggccgtcggcaggatcatcgggagcaggctcatcgacccggcccggacgccgctgctggccgcgtgggaggaccggttccgcgccgccgacgtggccaagggcgtcgtgcccgacgacctcgacaagatgctcgcgttcctgcagaccctgcgcgctatgaactacgccaagtgagagtgtttcgtcgcatgaacgtgtgccgtgccgtgcacgacctatgatcagttcatgtcgatacgtctatcactcagttttgcttcttccgtcaataatcggtgtgctgaatacatgtacaacagctgcctataattttgcttctttcttctaatacctccgtttttaatttgatagttcaactttataataacaaatgtcaaatttaaaaaaaaaatcggaaggagtatttttttaatacatccaagtccatccaataaaagtgctcgtggggctttct

SEQ ID NO: 36728 - protein, 274 aa, Zea mays subsp. mays
  peptide (1)..(274): Ceres Seq. ID no. 13623014
  misc_feature (170)..(240): NCBI GI NO: 15430719 NR Description: putative glutathione S-transferase OsGSTU11
  misc_feature (92)..(214): NCBI GI NO: 729206 NR Description: PROBABLE GLUTATHIONE S-TRANSFERASE
  misc_feature (25)..(240): NCBI GI NO: 29829093 NR Description: putative translation initiation factor IF-2
  misc_feature (7)..(262): NCBI GI NO: 29830954 NR Description: putative GntR-family transcriptional regulator
  misc_feature (13)..(253): NCBI GI NO: 25989121 NR Description: putative PHA synthase [Streptomyces aureofaciens]
NRTETSDTLHISSARVSRRTEPKAGASNGGRQRPEGARRVDEPVRDPGPHRAQPEGPGVRVRGGGPRQQERAPPGIQPGAQERAGAPPRRPRHKRVPGHPAVHRRGVGGDGAGRASGRPLRARGGAVLGRVHRRQGGVGVAGDAVQVRERGGEGGGGGARPRGARRAGGRVPGLLQGEAVLRRRRHRVRGRRSRRVPRLVRGRRQDHREQAHRPGPDAAAGRVGGPVPRRRRGQGRRARRPRQDARVPADPARYELRQVRVFRRMNVCRAVHDL

SEQ ID NO: 36729 - protein, 258 aa, Zea mays subsp. mays
  peptide (1)..(258): Ceres Seq. ID no. 13623015
  misc_feature (115)..(231): Pfam Name: Pfam Description:  Glutathione S-transferase, C-terminal domain
  misc_feature (28)..(258): NCBI GI NO: 11385511 NR Description: glutathione S-transferase GST 30 [Zea mays]
  misc_feature (30)..(258): NCBI GI NO: 11385501 NR Description: glutathione S-transferase GST 25 [Zea mays]
  misc_feature (28)..(253): NCBI GI NO: 20067421 NR Description: glutathione transferase [Triticum aestivum]
  misc_feature (28)..(258): NCBI GI NO: 37536360 NR Description: putative glutathione S-transferase
  misc_feature (28)..(258): NCBI GI NO: 37536368 NR Description: putative glutathione S-transferase
  misc_feature (30)..(249): NCBI GI NO: 11385527 NR Description: glutathione S-transferase GST 38 [Zea mays]
  misc_feature (30)..(249): NCBI GI NO: 37536358 NR Description: putative glutathione S-transferase
  misc_feature (28)..(253): NCBI GI NO: 11385535 NR Description: glutathione S-transferase GST 42 [Zea mays]
  misc_feature (27)..(252): NCBI GI NO: 11177837 NR Description: putative glutathione S-transferase OsGSTU2
  misc_feature (23)..(252): NCBI GI NO: 6856103 NR Description: glutathione S-transferase [Gossypium hirsutum]
TEPKPQTLCIYPLRVYLVEQSRKLELPMAGGNDLKVLGVWTSPFVIRVRIVLNLKGLAYEYVEEDLGNKSALLLGSNPVHKSVPVLLHAGRAINESQVILQYIDEVWAGTGPAVLPADPYERAVARFWGAYIDDKVESAWLGMLFRCANEEERAAAVARAREALDALEGAFRDCSRGRPFFGGDDIGFVDAVLGGYLGWFGAVGRIIGSRLIDPARTPLLAAWEDRFRAADVAKGVVPDDLDKMLAFLQTLRAMNYAK

SEQ ID NO: 36730 - protein, 231 aa, Zea mays subsp. mays
  peptide (1)..(231): Ceres Seq. ID no. 13623016
  misc_feature (88)..(204): Pfam Name: Pfam Description:  Glutathione S-transferase, C-terminal domain
  misc_feature (1)..(231): NCBI GI NO: 11385511 NR Description: glutathione S-transferase GST 30 [Zea mays]
  misc_feature (3)..(231): NCBI GI NO: 11385501 NR Description: glutathione S-transferase GST 25 [Zea mays]
  misc_feature (1)..(226): NCBI GI NO: 20067421 NR Description: glutathione transferase [Triticum aestivum]
  misc_feature (1)..(231): NCBI GI NO: 37536360 NR Description: putative glutathione S-transferase
  misc_feature (1)..(231): NCBI GI NO: 37536368 NR Description: putative glutathione S-transferase
  misc_feature (3)..(222): NCBI GI NO: 11385527 NR Description: glutathione S-transferase GST 38 [Zea mays]
  misc_feature (3)..(222): NCBI GI NO: 37536358 NR Description: putative glutathione S-transferase
  misc_feature (1)..(226): NCBI GI NO: 11385535 NR Description: glutathione S-transferase GST 42 [Zea mays]
  misc_feature (1)..(225): NCBI GI NO: 11177837 NR Description: putative glutathione S-transferase OsGSTU2
  misc_feature (1)..(225): NCBI GI NO: 6856103 NR Description: glutathione S-transferase [Gossypium hirsutum]
MAGGNDLKVLGVWTSPFVIRVRIVLNLKGLAYEYVEEDLGNKSALLLGSNPVHKSVPVLLHAGRAINESQVILQYIDEVWAGTGPAVLPADPYERAVARFWGAYIDDKVESAWLGMLFRCANEEERAAAVARAREALDALEGAFRDCSRGRPFFGGDDIGFVDAVLGGYLGWFGAVGRIIGSRLIDPARTPLLAAWEDRFRAADVAKGVVPDDLDKMLAFLQTLRAMNYAK

SEQ ID NO: 36731 - DNA, 502 bp, Zea mays subsp. mays
  misc_feature (1)..(502): Ceres Seq. ID no. 5008167
atcagaagctagaagcctagagcagccaagaaaagcacatacccgagtcgccgaaacaacaacaatcccaatcccccctcgtcactcaaaactcgagctcgagcaacaatgtcgctgattcgccgtggaagcgcattcgaccccttctccctcgacctctgggaccccttccagggcttatttcccttcggctctggaagcagcagcagcagcagcctgttcccctcgttcggaggcaccaccaccagctcggagacggccgccttcgccggcgctcgcgtcgactggaaggagacgccggaggcgcacgtgttcaagaccgacgtgccggggctgaagaaggaggaggtgaaggtggagctggaggacggcaacgtgctccagatcagcggcgagcgctgcaaggagcaggaggagaagacggacacctggcaccgcgtggagcgcagcagcggcaagttcctgcgcaggttccgcctgacggagaacgccaggacggagc

SEQ ID NO: 36732 - protein, 131 aa, Zea mays subsp. mays
  peptide (1)..(131): Ceres Seq. ID no. 5008168
  misc_feature (1)..(130): NCBI GI NO: 34902026 NR Description: unknown protein
  misc_feature (1)..(130): NCBI GI NO: 7441293 NR Description: heat shock protein 17.9 - pearl millet
  misc_feature (1)..(130): NCBI GI NO: 34902016 NR Description: putative class I low-molecular-weight heat shockprotein
  misc_feature (1)..(130): NCBI GI NO: 2119194 NR Description: low-molecular-weight heat-shock protein - rice
  misc_feature (1)..(130): NCBI GI NO: 34902028 NR Description: shock protein, low molecular weight
  misc_feature (1)..(130): NCBI GI NO: 1213073 NR Description: heat shock protein 17.8 [Oryza sativa]
  misc_feature (1)..(130): NCBI GI NO: 34902024 NR Description: unknown protein
  misc_feature (1)..(130): NCBI GI NO: 399937 NR Description: 17.4 KD CLASS I HEAT SHOCK PROTEIN
  misc_feature (1)..(130): NCBI GI NO: 422000 NR Description: heat shock protein, low molecular weight
  misc_feature (1)..(130): NCBI GI NO: 25044839 NR Description: class-1 LMW heat shock protein [Ananas comosus]
MSLIRRGSAFDPFSLDLWDPFQGLFPFGSGSSSSSSLFPSFGGTTTSSETAAFAGARVDWKETPEAHVFKTDVPGLKKEEVKVELEDGNVLQISGERCKEQEEKTDTWHRVERSSGKFLRRFRLTENARTE

SEQ ID NO: 36733 - DNA, 1050 bp, Zea mays subsp. mays
  misc_feature (1)..(1050): Ceres Seq. ID no. 13505058
acctcctgactactgcacactcgtctccgcagtttgaaacgaagcccgcggctactgcaagctactccgtctccgtagctaaaggagaggtaggtttttatttggcgacgacatgagcacgggcgtgcgaccggggcggcggttcacggtggggcggagcgaggacgccacgcacccggacaccatccgcgccgccatctccgagttcatcgccaccgccatcttcgtcttcgccgccgagggatccgtcctctcgctcgggaagatgtaccacgacatgagcacggcgggcggcctggtggctgtggcgctggcgcacgcgctggccctggccgtggccgtggcagtggccgtcaacatctcgggcgggcacgtgaacccggcggtcaccttcggcgcgctcgtcggcggccgcgtctccctcgtccgcgcggtcttgtactgggtcgcgcagctgctgggcgccgtcgccgccacgctgctcctgcggctcgccacggggggcatgcggccgccggggttcgcgctcgcgtccggggtcggggactggcacgccgtgctgctggaggccgtcatgacgttcggcctcatgtacgcctactacgccacggtgatcgacccgaagcgggggcacgtgggcaccatcgcgccgctggccgtgggcttcctgctcggcgccaacgtgctggcgggagggcccttcgacggcgcagggatgaacccggcgcgggtcttcggcccggcgctcgtcgggtggcggtggaggcaccactgggtgtactggctgggccctttcctcggcgccgggcttgcagggctggtgtacgagtacctggttatcccgtccgccgacgccgccgtgccccacgcgcaccagccgctcgcgccagaggactactagcttgaaaattgtattgtggggtcgtgtaagtggttaataaggggggcataggtacgtacttgtctgtcgccccagcgtgtgttggagacggtgaatcaggtgatgtgtacatgctgcttcactgtagtgtatgtgtatgtgtatgtagt

SEQ ID NO: 36734 - protein, 262 aa, Zea mays subsp. mays
  peptide (1)..(262): Ceres Seq. ID no. 13505059
  misc_feature (18)..(238): Pfam Name: Pfam Description:  Major intrinsic protein
  misc_feature (1)..(262): NCBI GI NO: 13447827 NR Description: tonoplast membrane integral protein ZmTIP3-1
  misc_feature (2)..(262): NCBI GI NO: 13448043 NR Description: tonoplast membrane integral protein ZmTIP3-2
  misc_feature (1)..(262): NCBI GI NO: 37535634 NR Description: putative beta-tonoplast intrinsic protein
  misc_feature (1)..(262): NCBI GI NO: 15220848 NR Description: major intrinsic protein (MIP) family
  misc_feature (1)..(262): NCBI GI NO: 15219403 NR Description: tonoplast intrinsic protein, alpha (alpha-TIP)
  misc_feature (59)..(262): NCBI GI NO: 7441287 NR Description: membrane protein MP23 precursor - cucurbit
  misc_feature (7)..(53): NCBI GI NO: 7441287 NR Description: membrane protein MP23 precursor - cucurbit
  misc_feature (7)..(262): NCBI GI NO: 4539145 NR Description: major intrinsic protein [Picea abies]
  misc_feature (7)..(262): NCBI GI NO: 7441288 NR Description: membrane protein MP28 - cucurbit
  misc_feature (9)..(262): NCBI GI NO: 81886 NR Description: tonoplast intrinsic protein alpha - kidney bean
MSTGVRPGRRFTVGRSEDATHPDTIRAAISEFIATAIFVFAAEGSVLSLGKMYHDMSTAGGLVAVALAHALALAVAVAVAVNISGGHVNPAVTFGALVGGRVSLVRAVLYWVAQLLGAVAATLLLRLATGGMRPPGFALASGVGDWHAVLLEAVMTFGLMYAYYATVIDPKRGHVGTIAPLAVGFLLGANVLAGGPFDGAGMNPARVFGPALVGWRWRHHWVYWLGPFLGAGLAGLVYEYLVIPSADAAVPHAHQPLAPEDY

SEQ ID NO: 36735 - protein, 211 aa, Zea mays subsp. mays
  peptide (1)..(211): Ceres Seq. ID no. 13505060
  misc_feature (1)..(187): Pfam Name: Pfam Description:  Major intrinsic protein
  misc_feature (1)..(211): NCBI GI NO: 13447827 NR Description: tonoplast membrane integral protein ZmTIP3-1
  misc_feature (1)..(211): NCBI GI NO: 13448043 NR Description: tonoplast membrane integral protein ZmTIP3-2
  misc_feature (1)..(211): NCBI GI NO: 37535634 NR Description: putative beta-tonoplast intrinsic protein
  misc_feature (1)..(211): NCBI GI NO: 15220848 NR Description: major intrinsic protein (MIP) family
  misc_feature (1)..(211): NCBI GI NO: 15219403 NR Description: tonoplast intrinsic protein, alpha (alpha-TIP)
  misc_feature (8)..(211): NCBI GI NO: 7441287 NR Description: membrane protein MP23 precursor - cucurbit
  misc_feature (1)..(211): NCBI GI NO: 4539145 NR Description: major intrinsic protein [Picea abies]
  misc_feature (1)..(211): NCBI GI NO: 7441288 NR Description: membrane protein MP28 - cucurbit
  misc_feature (1)..(211): NCBI GI NO: 81886 NR Description: tonoplast intrinsic protein alpha - kidney bean
  misc_feature (1)..(211): NCBI GI NO: 135859 NR Description: TONOPLAST INTRINSIC PROTEIN, ALPHA (ALPHA TIP)
MYHDMSTAGGLVAVALAHALALAVAVAVAVNISGGHVNPAVTFGALVGGRVSLVRAVLYWVAQLLGAVAATLLLRLATGGMRPPGFALASGVGDWHAVLLEAVMTFGLMYAYYATVIDPKRGHVGTIAPLAVGFLLGANVLAGGPFDGAGMNPARVFGPALVGWRWRHHWVYWLGPFLGAGLAGLVYEYLVIPSADAAVPHAHQPLAPEDY

SEQ ID NO: 36736 - protein, 207 aa, Zea mays subsp. mays
  peptide (1)..(207): Ceres Seq. ID no. 13505061
  misc_feature (1)..(183): Pfam Name: Pfam Description:  Major intrinsic protein
  misc_feature (1)..(207): NCBI GI NO: 13447827 NR Description: tonoplast membrane integral protein ZmTIP3-1
  misc_feature (1)..(207): NCBI GI NO: 13448043 NR Description: tonoplast membrane integral protein ZmTIP3-2
  misc_feature (1)..(207): NCBI GI NO: 37535634 NR Description: putative beta-tonoplast intrinsic protein
  misc_feature (1)..(207): NCBI GI NO: 15220848 NR Description: major intrinsic protein (MIP) family
  misc_feature (1)..(207): NCBI GI NO: 15219403 NR Description: tonoplast intrinsic protein, alpha (alpha-TIP)
  misc_feature (4)..(207): NCBI GI NO: 7441287 NR Description: membrane protein MP23 precursor - cucurbit
  misc_feature (1)..(207): NCBI GI NO: 4539145 NR Description: major intrinsic protein [Picea abies]
  misc_feature (1)..(207): NCBI GI NO: 7441288 NR Description: membrane protein MP28 - cucurbit
  misc_feature (1)..(207): NCBI GI NO: 81886 NR Description: tonoplast intrinsic protein alpha - kidney bean
  misc_feature (1)..(207): NCBI GI NO: 135859 NR Description: TONOPLAST INTRINSIC PROTEIN, ALPHA (ALPHA TIP)
MSTAGGLVAVALAHALALAVAVAVAVNISGGHVNPAVTFGALVGGRVSLVRAVLYWVAQLLGAVAATLLLRLATGGMRPPGFALASGVGDWHAVLLEAVMTFGLMYAYYATVIDPKRGHVGTIAPLAVGFLLGANVLAGGPFDGAGMNPARVFGPALVGWRWRHHWVYWLGPFLGAGLAGLVYEYLVIPSADAAVPHAHQPLAPEDY

SEQ ID NO: 36737 - DNA, 475 bp, Zea mays subsp. mays
  misc_feature (1)..(475): Ceres Seq. ID no. 4648388
gaggagctcctccacgccattcctgcacgccttcctctccaccacctcctcctcccctacgcccccctcctccctccagctccggcgagccttctccgacggccacctcccttcgctcaacccctcctcctccggcgacgacgacagcaagaccaccggcctctacaccgagctctccttctccatctacaacacctycagcaaggccaagctggagccccaccaggagcaggagatggaggaggagcaggagcagcaggcggcgcagccggagctgccgctgttcctggcgaggggcatggggatcgaccgcctcgcctccggcctcttcaccgccggcatgggctccgaggctgccctggctaggatggccagcggggtggaccagaaggccgtgctggcgctggacgcccagtacaaggagatggtggacgagcagcccggcaacgccctgttcctgcgcaactacgcgcag

SEQ ID NO: 36738 - protein, 158 aa, Zea mays subsp. mays
  peptide (1)..(158): Ceres Seq. ID no. 4648389
  misc_feature (1)..(157): NCBI GI NO: 32488305 NR Description: OSJNBb0065L13.14
  misc_feature (66)..(66): Xaa is any aa, unknown or other
RSSSTPFLHAFLSTTSSSPTPPSSLQLRRAFSDGHLPSLNPSSSGDDDSKTTGLYTELSFSIYNTXSKAKLEPHQEQEMEEEQEQQAAQPELPLFLARGMGIDRLASGLFTAGMGSEAALARMASGVDQKAVLALDAQYKEMVDEQPGNALFLRNYAQ

SEQ ID NO: 36739 - protein, 157 aa, Zea mays subsp. mays
  peptide (1)..(157): Ceres Seq. ID no. 4648390
  misc_feature (1)..(93): Pfam Name: rhodopsin family Pfam Description: 7 transmembrane receptor
  misc_feature (3)..(90): NCBI GI NO: 21219450 NR Description: putative secreted proline-rich protein
  misc_feature (3)..(82): NCBI GI NO: 29833843 NR Description: putative proline-rich protein
  misc_feature (1)..(78): NCBI GI NO: 32141270 NR Description: probable translational initiation factor
  misc_feature (2)..(155): NCBI GI NO: 27375632 NR Description: blr0521 [Bradyrhizobium japonicum]
  misc_feature (1)..(69): NCBI GI NO: 7441828 NR Description: extensin-like cell wall protein
  misc_feature (2)..(112): NCBI GI NO: 32422095 NR Description: predicted protein [Neurospora crassa]
  misc_feature (3)..(138): NCBI GI NO: 119714 NR Description: Extensin precursor
  misc_feature (10)..(38): NCBI GI NO: 465445 NR Description: PROBABLE NUCLEAR ANTIGEN
  misc_feature (3)..(119): NCBI GI NO: 6523547 NR Description: hydroxyproline-rich glycoprotein DZ-HRGP
  misc_feature (2)..(77): NCBI GI NO: 81286 NR Description: extensin - Volvox carteri (fragment)
  misc_feature (66)..(66): Xaa is any aa, unknown or other
GAPPRHSCTPSSPPPPPPLRPPPPSSSGEPSPTATSLRSTPPPPATTTARPPASTPSSPSPSTTPXARPSWSPTRSRRWRRSRSSRRRSRSCRCSWRGAWGSTASPPASSPPAWAPRLPWLGWPAGWTRRPCWRWTPSTRRWWTSSPATPCSCATTR

SEQ ID NO: 36740 - protein, 121 aa, Zea mays subsp. mays
  peptide (1)..(121): Ceres Seq. ID no. 4648391
  misc_feature (74)..(121): Pfam Name: 20 copies Pfam Description: Collagen triple helix repeat
  misc_feature (69)..(121): NCBI GI NO: 32141270 NR Description: probable translational initiation factor
  misc_feature (69)..(121): NCBI GI NO: 465445 NR Description: PROBABLE NUCLEAR ANTIGEN
  misc_feature (69)..(121): NCBI GI NO: 93144 NR Description: hypothetical protein - suid herpesvirus 1
  misc_feature (66)..(66): Xaa is any aa, unknown or other
EELLHAIPARLPLHHLLLPYAPLLPPAPASLLRRPPPFAQPLLLRRRRQQDHRPLHRALLLHLQHXQQGQAGAPPGAGDGGGAGAAGGAAGAAAVPGEGHGDRPPRLRPLHRRHGLRGCPG

SEQ ID NO: 36741 - DNA, 438 bp, Zea mays subsp. mays
  misc_feature (1)..(438): Ceres Seq. ID no. 4648385
cctagcacccgtcccgccgccgccgctgctgctgccgccctgaccctcgccgcctgcagcagccaccaccgcgcaaccatgggtatcgacctcgtcgccggcggccgcaacaagaggaccaagcgcacggcgcccaaatccgacgatgtgtacctcaagctgctcgtcaagctctaccgcttcctggtgcggaggaccaagagccagttcaacgccgtgatcctcaagcgtctcttcatgagcaagaccaaccgcccgccgctctcgatgcgccgcctcgtcaggttcatggaggggaaggcggacaagatcgccgtgatcgtgggcaccatcaccgatgaccagagggtctacgagataccggcaatgaaggtggccgcgctcaggttcaccgagacggcgagggccaggatcgtcaatgctggtggcgagtgcctt

SEQ ID NO: 36742 - protein, 146 aa, Zea mays subsp. mays
  peptide (1)..(146): Ceres Seq. ID no. 4648386
  misc_feature (27)..(145): NCBI GI NO: 34393858 NR Description: putative cytoplasmic ribosomal protein L18
  misc_feature (27)..(145): NCBI GI NO: 34897628 NR Description: cytoplasmic ribosomal protein L18 [Oryza sativa]
  misc_feature (27)..(145): NCBI GI NO: 606970 NR Description: cytoplasmic ribosomal protein L18
  misc_feature (27)..(145): NCBI GI NO: 15241061 NR Description: 60S ribosomal protein - like; protein id:At5g27850
  misc_feature (27)..(145): NCBI GI NO: 15230011 NR Description: putative 60S ribosomal protein L18
  misc_feature (27)..(145): NCBI GI NO: 28798549 NR Description: 60S ribosomal protein [Medicago sativa]
  misc_feature (30)..(145): NCBI GI NO: 6094021 NR Description: 60S RIBOSOMAL PROTEIN L18
  misc_feature (28)..(145): NCBI GI NO: 7440855 NR Description: ribosomal protein L18
  misc_feature (27)..(145): NCBI GI NO: 28630354 NR Description: ribosomal protein L18 [Branchiostoma lanceolatum]
  misc_feature (27)..(145): NCBI GI NO: 28630356 NR Description: ribosomal protein L18 [Petromyzon marinus]
PSTRPAAAAAAAALTLAACSSHHRATMGIDLVAGGRNKRTKRTAPKSDDVYLKLLVKLYRFLVRRTKSQFNAVILKRLFMSKTNRPPLSMRRLVRFMEGKADKIAVIVGTITDDQRVYEIPAMKVAALRFTETARARIVNAGGECL

SEQ ID NO: 36743 - protein, 120 aa, Zea mays subsp. mays
  peptide (1)..(120): Ceres Seq. ID no. 4648387
  misc_feature (1)..(119): NCBI GI NO: 34393858 NR Description: putative cytoplasmic ribosomal protein L18
  misc_feature (1)..(119): NCBI GI NO: 34897628 NR Description: cytoplasmic ribosomal protein L18 [Oryza sativa]
  misc_feature (1)..(119): NCBI GI NO: 606970 NR Description: cytoplasmic ribosomal protein L18
  misc_feature (1)..(119): NCBI GI NO: 15241061 NR Description: 60S ribosomal protein - like; protein id:At5g27850
  misc_feature (1)..(119): NCBI GI NO: 15230011 NR Description: putative 60S ribosomal protein L18
  misc_feature (1)..(119): NCBI GI NO: 28798549 NR Description: 60S ribosomal protein [Medicago sativa]
  misc_feature (4)..(119): NCBI GI NO: 6094021 NR Description: 60S RIBOSOMAL PROTEIN L18
  misc_feature (2)..(119): NCBI GI NO: 7440855 NR Description: ribosomal protein L18
  misc_feature (1)..(119): NCBI GI NO: 28630354 NR Description: ribosomal protein L18 [Branchiostoma lanceolatum]
  misc_feature (1)..(119): NCBI GI NO: 28630356 NR Description: ribosomal protein L18 [Petromyzon marinus]
MGIDLVAGGRNKRTKRTAPKSDDVYLKLLVKLYRFLVRRTKSQFNAVILKRLFMSKTNRPPLSMRRLVRFMEGKADKIAVIVGTITDDQRVYEIPAMKVAALRFTETARARIVNAGGECL

SEQ ID NO: 36744 - DNA, 1623 bp, Zea mays subsp. mays
  misc_feature (1)..(1623): Ceres Seq. ID no. 13587067
cccgttcccccaagtctatcagccaaagcatcgcccgccgatggcgtctccgccccactcagtcgaggtccggacccccggcgactcgccgcggcccaccgccgctctcctctccccctccgtggccgcaccccagccctccaacgcctcccgcctcctgctcctcctcaccgcggccgtcgccgccgctacggccttcgtcctgctccgcccgcccatcaccgtcgtgaccgcggcgtccgccaccgcgcggccgctctccaagctctccaagcccgtggtgctgctcatttcctcggacggcttccgcttcgggtaccagtacaaggcccccctcccgcacatccgccgcctcttcgccaatggcacatccgccgccgagggcctgatccccgtcttccccacgctcaccttccccaaccactactccatcgtcaccggcctctacccctcctcccacggcatcatcaacaactacttccccgatcccatctcgggggactacttcaccatgaaaaaccacgatcccaagtggtggctcggggagccgctctgggccaccgctgccgcccagggggtcctgtctgccacattcttctggccgggttcggaggttacgaagggttcctggaactgccccgacaagtactgccgccactacaatggctcggtgccgtttgaggagagggtcgacaccatccttggctattttgatctcccgcctaaccaaatgccacagttcatgacgctgtactttgaggatcctgatcaccaggggcaccaggtgggtcctgacgatccctcaatcaccgatgcggtcgtacatatagatgagatgctcgggaggctcattgctggtttggaggctaggggaatgtttgaggatgtgaacattatattggtaggtgaccatggtatggttgggacctgcgataggaagcttgtgtttctcgaagagttggctccatggatcgagttgaagtcagattgggttctgtcagtgacgccattgctggcaatcaggccgccagatggtgtgtcgccagctgaggttgtggccaagatgaatgaggggcttggatctgggaaggtgaagaatggggaatatttgaaaatgtacttaaaagaggagttgcctactcgcctgcattattcagagagttacaggatcccaccaatcatcgggctggttggggaagggtataagatcgagatgaagcgctccaagagaaatgagtgtggaggagcccatgggtacgacaatgccttcttctcaatgaggaccatatttgccgcacatggacctcgttttcagggtggtagaactgtgccctcatttgagaatgcggagatatacaatgtcatggcttccattctcaatttgaagcctgctccaaacaatggttcagcttctttccctggcacgattctgttgccgaacaaatgatcatggattggttttgtaggagtaagggcacatggatgtatgatggtgttctcatttggttattgtattgtacctcttaaattagacttctgccacatcactgtatctgagcaaaaatgctgctagtagagagttgcttctctctagtgacaacatttggaaacatgtttcacatc

SEQ ID NO: 36745 - protein, 481 aa, Zea mays subsp. mays
  peptide (1)..(481): Ceres Seq. ID no. 13587068
  misc_feature (15)..(481): NCBI GI NO: 34903578 NR Description: nucleotide pyrophosphatase homolog
  misc_feature (13)..(480): NCBI GI NO: 12081942 NR Description: nucleotide pyrophosphatase-like protein
  misc_feature (52)..(479): NCBI GI NO: 15233659 NR Description: nucleotide pyrophosphatase - like protein
  misc_feature (84)..(479): NCBI GI NO: 15233662 NR Description: nucleotide pyrophosphatase - like protein
  misc_feature (84)..(479): NCBI GI NO: 27808612 NR Description: At4g29690 [Arabidopsis thaliana]
  misc_feature (52)..(480): NCBI GI NO: 15233665 NR Description: nucleotide pyrophosphatase -related protein
  misc_feature (248)..(479): NCBI GI NO: 13877571 NR Description: nucleotide pyrophosphatase-like protein
  misc_feature (92)..(469): NCBI GI NO: 9453796 NR Description: dJ131F15
  misc_feature (92)..(469): NCBI GI NO: 13324677 NR Description: ectonucleotide pyrophosphatase/phosphodiesterase 1
  misc_feature (92)..(469): NCBI GI NO: 23503088 NR Description: Ectonucleotide pyrophosphatase/phosphodiesterase 1
PFPQVYQPKHRPPMASPPHSVEVRTPGDSPRPTAALLSPSVAAPQPSNASRLLLLLTAAVAAATAFVLLRPPITVVTAASATARPLSKLSKPVVLLISSDGFRFGYQYKAPLPHIRRLFANGTSAAEGLIPVFPTLTFPNHYSIVTGLYPSSHGIINNYFPDPISGDYFTMKNHDPKWWLGEPLWATAAAQGVLSATFFWPGSEVTKGSWNCPDKYCRHYNGSVPFEERVDTILGYFDLPPNQMPQFMTLYFEDPDHQGHQVGPDDPSITDAVVHIDEMLGRLIAGLEARGMFEDVNIILVGDHGMVGTCDRKLVFLEELAPWIELKSDWVLSVTPLLAIRPPDGVSPAEVVAKMNEGLGSGKVKNGEYLKMYLKEELPTRLHYSESYRIPPIIGLVGEGYKIEMKRSKRNECGGAHGYDNAFFSMRTIFAAHGPRFQGGRTVPSFENAEIYNVMASILNLKPAPNNGSASFPGTILLPNK

SEQ ID NO: 36746 - protein, 468 aa, Zea mays subsp. mays
  peptide (1)..(468): Ceres Seq. ID no. 13587069
  misc_feature (2)..(468): NCBI GI NO: 34903578 NR Description: nucleotide pyrophosphatase homolog
  misc_feature (1)..(467): NCBI GI NO: 12081942 NR Description: nucleotide pyrophosphatase-like protein
  misc_feature (39)..(466): NCBI GI NO: 15233659 NR Description: nucleotide pyrophosphatase - like protein
  misc_feature (71)..(466): NCBI GI NO: 15233662 NR Description: nucleotide pyrophosphatase - like protein
  misc_feature (71)..(466): NCBI GI NO: 27808612 NR Description: At4g29690 [Arabidopsis thaliana]
  misc_feature (39)..(467): NCBI GI NO: 15233665 NR Description: nucleotide pyrophosphatase -related protein
  misc_feature (235)..(466): NCBI GI NO: 13877571 NR Description: nucleotide pyrophosphatase-like protein
  misc_feature (79)..(456): NCBI GI NO: 9453796 NR Description: dJ131F15
  misc_feature (79)..(456): NCBI GI NO: 23503088 NR Description: Ectonucleotide pyrophosphatase/phosphodiesterase 1
  misc_feature (79)..(456): NCBI GI NO: 13324677 NR Description: ectonucleotide pyrophosphatase/phosphodiesterase 1
MASPPHSVEVRTPGDSPRPTAALLSPSVAAPQPSNASRLLLLLTAAVAAATAFVLLRPPITVVTAASATARPLSKLSKPVVLLISSDGFRFGYQYKAPLPHIRRLFANGTSAAEGLIPVFPTLTFPNHYSIVTGLYPSSHGIINNYFPDPISGDYFTMKNHDPKWWLGEPLWATAAAQGVLSATFFWPGSEVTKGSWNCPDKYCRHYNGSVPFEERVDTILGYFDLPPNQMPQFMTLYFEDPDHQGHQVGPDDPSITDAVVHIDEMLGRLIAGLEARGMFEDVNIILVGDHGMVGTCDRKLVFLEELAPWIELKSDWVLSVTPLLAIRPPDGVSPAEVVAKMNEGLGSGKVKNGEYLKMYLKEELPTRLHYSESYRIPPIIGLVGEGYKIEMKRSKRNECGGAHGYDNAFFSMRTIFAAHGPRFQGGRTVPSFENAEIYNVMASILNLKPAPNNGSASFPGTILLPNK

SEQ ID NO: 36747 - protein, 311 aa, Zea mays subsp. mays
  peptide (1)..(311): Ceres Seq. ID no. 13587070
  misc_feature (1)..(311): NCBI GI NO: 34903578 NR Description: nucleotide pyrophosphatase homolog
  misc_feature (1)..(310): NCBI GI NO: 12081942 NR Description: nucleotide pyrophosphatase-like protein
  misc_feature (1)..(309): NCBI GI NO: 15233659 NR Description: nucleotide pyrophosphatase - like protein
  misc_feature (1)..(309): NCBI GI NO: 15233662 NR Description: nucleotide pyrophosphatase - like protein
  misc_feature (1)..(309): NCBI GI NO: 27808612 NR Description: At4g29690 [Arabidopsis thaliana]
  misc_feature (1)..(310): NCBI GI NO: 15233665 NR Description: nucleotide pyrophosphatase -related protein
  misc_feature (78)..(309): NCBI GI NO: 13877571 NR Description: nucleotide pyrophosphatase-like protein
  misc_feature (1)..(299): NCBI GI NO: 9453796 NR Description: dJ131F15
  misc_feature (1)..(299): NCBI GI NO: 23503088 NR Description: Ectonucleotide pyrophosphatase/phosphodiesterase 1
  misc_feature (1)..(299): NCBI GI NO: 13324677 NR Description: ectonucleotide pyrophosphatase/phosphodiesterase 1
MKNHDPKWWLGEPLWATAAAQGVLSATFFWPGSEVTKGSWNCPDKYCRHYNGSVPFEERVDTILGYFDLPPNQMPQFMTLYFEDPDHQGHQVGPDDPSITDAVVHIDEMLGRLIAGLEARGMFEDVNIILVGDHGMVGTCDRKLVFLEELAPWIELKSDWVLSVTPLLAIRPPDGVSPAEVVAKMNEGLGSGKVKNGEYLKMYLKEELPTRLHYSESYRIPPIIGLVGEGYKIEMKRSKRNECGGAHGYDNAFFSMRTIFAAHGPRFQGGRTVPSFENAEIYNVMASILNLKPAPNNGSASFPGTILLPNK

SEQ ID NO: 36748 - DNA, 857 bp, Zea mays subsp. mays
  misc_feature (1)..(857): Ceres Seq. ID no. 13599298
atacatagtggatatagccagagagaaagtaggacgtgttcttaaccttggagctattgaaggaggtgctaatgcttggaaaaacatggacgttcttgtcttcaattcttggcattggtggactcacaaaggcaattctcaagggtgggattacattagagatgggtcgtctttggtgagagacatgaaccgtcttgatgctttctacaaaggacttagcacttggggtcgatgggttgaccaaaacgtcgataccaccaaaaccaaagttttcttccaaggcatttctcccactcactacgagggaagggaatggaacgagccgagaaaaagttgtactgggcaaatgcagccgttgggtggatcaaattacccaagtggccagcctgcatctgcaggagttgtgtccaaagtgttgggagcgatgaaaacgcgtgtgtccttgcttgatatcaccacgctatctcagctgagaaaagatgctcatccttctacttatggtggcgatggaggaaatgattgcagccactggtgccttcccgggttgccagatacttggaaccaacttctctacgcagctttgttcatgtgaatttgaacaatacatctttacaaagaaagtgcaaacacacctttgttctgtaattacattcttggaggtgcaaagaagctgacagttttactttgggggtggtctttaagtgaagactaggagcataaggaagatggattgtaaagcgccttttatttatattgttttcgtatgggatgaaaacaataatctaaaaatttgtctaattaaatattgtgtgatgttatagaaagaaattaataaacaaaggagacattctaagtct

SEQ ID NO: 36749 - protein, 196 aa, Zea mays subsp. mays
  peptide (1)..(196): Ceres Seq. ID no. 13599299
  misc_feature (1)..(196): NCBI GI NO: 18396930 NR Description: expressed protein [Arabidopsis thaliana]
  misc_feature (1)..(196): NCBI GI NO: 25366741 NR Description: F28N24.24 protein - Arabidopsis thaliana
  misc_feature (1)..(196): NCBI GI NO: 18403435 NR Description: expressed protein [Arabidopsis thaliana]
  misc_feature (1)..(195): NCBI GI NO: 18406003 NR Description: expressed protein [Arabidopsis thaliana]
  misc_feature (1)..(194): NCBI GI NO: 21593142 NR Description: unknown [Arabidopsis thaliana]
  misc_feature (1)..(194): NCBI GI NO: 28393769 NR Description: unknown protein [Arabidopsis thaliana]
  misc_feature (30)..(196): NCBI GI NO: 25408325 NR Description: hypothetical protein At2g34070
  misc_feature (1)..(194): NCBI GI NO: 34911864 NR Description: OSJNBb0032K15.9
  misc_feature (1)..(191): NCBI GI NO: 22331091 NR Description: expressed protein [Arabidopsis thaliana]
  misc_feature (29)..(194): NCBI GI NO: 15224614 NR Description: expressed protein [Arabidopsis thaliana]
YIVDIAREKVGRVLNLGAIEGGANAWKNMDVLVFNSWHWWTHKGNSQGWDYIRDGSSLVRDMNRLDAFYKGLSTWGRWVDQNVDTTKTKVFFQGISPTHYEGREWNEPRKSCTGQMQPLGGSNYPSGQPASAGVVSKVLGAMKTRVSLLDITTLSQLRKDAHPSTYGGDGGNDCSHWCLPGLPDTWNQLLYAALFM

SEQ ID NO: 36750 - protein, 168 aa, Zea mays subsp. mays
  peptide (1)..(168): Ceres Seq. ID no. 13599300
  misc_feature (1)..(168): NCBI GI NO: 18396930 NR Description: expressed protein [Arabidopsis thaliana]
  misc_feature (1)..(168): NCBI GI NO: 25366741 NR Description: F28N24.24 protein - Arabidopsis thaliana
  misc_feature (1)..(168): NCBI GI NO: 18403435 NR Description: expressed protein [Arabidopsis thaliana]
  misc_feature (1)..(167): NCBI GI NO: 18406003 NR Description: expressed protein [Arabidopsis thaliana]
  misc_feature (1)..(166): NCBI GI NO: 21593142 NR Description: unknown [Arabidopsis thaliana]
  misc_feature (1)..(166): NCBI GI NO: 28393769 NR Description: unknown protein [Arabidopsis thaliana]
  misc_feature (2)..(168): NCBI GI NO: 25408325 NR Description: hypothetical protein At2g34070
  misc_feature (1)..(166): NCBI GI NO: 34911864 NR Description: OSJNBb0032K15.9
  misc_feature (1)..(163): NCBI GI NO: 22331091 NR Description: expressed protein [Arabidopsis thaliana]
  misc_feature (1)..(166): NCBI GI NO: 15224614 NR Description: expressed protein [Arabidopsis thaliana]
MDVLVFNSWHWWTHKGNSQGWDYIRDGSSLVRDMNRLDAFYKGLSTWGRWVDQNVDTTKTKVFFQGISPTHYEGREWNEPRKSCTGQMQPLGGSNYPSGQPASAGVVSKVLGAMKTRVSLLDITTLSQLRKDAHPSTYGGDGGNDCSHWCLPGLPDTWNQLLYAALFM

SEQ ID NO: 36751 - protein, 135 aa, Zea mays subsp. mays
  peptide (1)..(135): Ceres Seq. ID no. 13599301
  misc_feature (1)..(135): NCBI GI NO: 18396930 NR Description: expressed protein [Arabidopsis thaliana]
  misc_feature (1)..(135): NCBI GI NO: 25366741 NR Description: F28N24.24 protein - Arabidopsis thaliana
  misc_feature (1)..(135): NCBI GI NO: 18403435 NR Description: expressed protein [Arabidopsis thaliana]
  misc_feature (1)..(134): NCBI GI NO: 18406003 NR Description: expressed protein [Arabidopsis thaliana]
  misc_feature (1)..(133): NCBI GI NO: 21593142 NR Description: unknown [Arabidopsis thaliana]
  misc_feature (1)..(133): NCBI GI NO: 28393769 NR Description: unknown protein [Arabidopsis thaliana]
  misc_feature (1)..(135): NCBI GI NO: 25408325 NR Description: hypothetical protein At2g34070
  misc_feature (1)..(133): NCBI GI NO: 34911864 NR Description: OSJNBb0032K15.9
  misc_feature (1)..(130): NCBI GI NO: 22331091 NR Description: expressed protein [Arabidopsis thaliana]
  misc_feature (1)..(133): NCBI GI NO: 15224614 NR Description: expressed protein [Arabidopsis thaliana]
MNRLDAFYKGLSTWGRWVDQNVDTTKTKVFFQGISPTHYEGREWNEPRKSCTGQMQPLGGSNYPSGQPASAGVVSKVLGAMKTRVSLLDITTLSQLRKDAHPSTYGGDGGNDCSHWCLPGLPDTWNQLLYAALFM

SEQ ID NO: 36752 - DNA, 484 bp, Zea mays subsp. mays
  misc_feature (1)..(484): Ceres Seq. ID no. 4648301
ctagcctccagctctctctcttcctctgtctcgcctcctccctccccctgcaggaagctcgtcgagatgtcgtccgaggcggcgaagatggtggtgccggagtcggtgctcctcaagaggaagcgggaggagctctgggccgccgagaagaagaccaaggccgtcgaggagaagaagaaatccagcgagaacatcaaggtcatctacgcccgcgccaagcagtacgccgaggagtacgatgcccaggacaaggagttggttcagcttaagcgtgaggcccggatgaagggtgggttttatgtcagtcctgaggccaagctgctgtttgttgtcagaatcagaggtatcaatgccatgcacccaaagaccaagaagatcttgcagctgttgcgtttgaggcagatattcaatggagtgttcctgaaggttaacaaggccaccatcaacatgctccgcaggatcgagccatatgttgcatatgggt

SEQ ID NO: 36753 - protein, 161 aa, Zea mays subsp. mays
  peptide (1)..(161): Ceres Seq. ID no. 4648302
  misc_feature (106)..(158): Pfam Name: Pfam Description:  Ribosomal protein L30p/L7e
  misc_feature (23)..(160): NCBI GI NO: 38346542 NR Description: OSJNBa0035M09.3
  misc_feature (23)..(160): NCBI GI NO: 38637548 NR Description: putative 60S ribosomal protein L7
  misc_feature (28)..(160): NCBI GI NO: 15226212 NR Description: putative ribosomal protein L7
  misc_feature (23)..(160): NCBI GI NO: 15231288 NR Description: ribosomal protein, putative; protein id:At3g13580
  misc_feature (30)..(160): NCBI GI NO: 445613 NR Description: ribosomal protein L7
  misc_feature (28)..(160): NCBI GI NO: 27311547 NR Description: Unknown protein [Arabidopsis thaliana]
  misc_feature (28)..(160): NCBI GI NO: 30689617 NR Description: 60S ribosomal protein L7 (RPL7C)
  misc_feature (28)..(160): NCBI GI NO: 30689623 NR Description: 60S ribosomal protein L7 (RPL7C)
  misc_feature (32)..(160): NCBI GI NO: 28630259 NR Description: ribosomal protein L7 [Branchiostoma lanceolatum]
  misc_feature (32)..(160): NCBI GI NO: 32169292 NR Description: ribosomal protein L7 [Crassostrea gigas]
LASSSLSSSVSPPPSPCRKLVEMSSEAAKMVVPESVLLKRKREELWAAEKKTKAVEEKKKSSENIKVIYARAKQYAEEYDAQDKELVQLKREARMKGGFYVSPEAKLLFVVRIRGINAMHPKTKKILQLLRLRQIFNGVFLKVNKATINMLRRIEPYVAYG

SEQ ID NO: 36754 - protein, 139 aa, Zea mays subsp. mays
  peptide (1)..(139): Ceres Seq. ID no. 4648303
  misc_feature (84)..(136): Pfam Name: Pfam Description:  Ribosomal protein L30p/L7e
  misc_feature (1)..(138): NCBI GI NO: 38346542 NR Description: OSJNBa0035M09.3
  misc_feature (1)..(138): NCBI GI NO: 38637548 NR Description: putative 60S ribosomal protein L7
  misc_feature (6)..(138): NCBI GI NO: 15226212 NR Description: putative ribosomal protein L7
  misc_feature (1)..(138): NCBI GI NO: 15231288 NR Description: ribosomal protein, putative; protein id:At3g13580
  misc_feature (8)..(138): NCBI GI NO: 445613 NR Description: ribosomal protein L7
  misc_feature (6)..(138): NCBI GI NO: 27311547 NR Description: Unknown protein [Arabidopsis thaliana]
  misc_feature (6)..(138): NCBI GI NO: 30689617 NR Description: 60S ribosomal protein L7 (RPL7C)
  misc_feature (6)..(138): NCBI GI NO: 30689623 NR Description: 60S ribosomal protein L7 (RPL7C)
  misc_feature (10)..(138): NCBI GI NO: 28630259 NR Description: ribosomal protein L7 [Branchiostoma lanceolatum]
  misc_feature (10)..(138): NCBI GI NO: 32169292 NR Description: ribosomal protein L7 [Crassostrea gigas]
MSSEAAKMVVPESVLLKRKREELWAAEKKTKAVEEKKKSSENIKVIYARAKQYAEEYDAQDKELVQLKREARMKGGFYVSPEAKLLFVVRIRGINAMHPKTKKILQLLRLRQIFNGVFLKVNKATINMLRRIEPYVAYG

SEQ ID NO: 36755 - protein, 132 aa, Zea mays subsp. mays
  peptide (1)..(132): Ceres Seq. ID no. 4648304
  misc_feature (77)..(129): Pfam Name: Pfam Description:  Ribosomal protein L30p/L7e
  misc_feature (1)..(131): NCBI GI NO: 38346542 NR Description: OSJNBa0035M09.3
  misc_feature (1)..(131): NCBI GI NO: 38637548 NR Description: putative 60S ribosomal protein L7
  misc_feature (1)..(131): NCBI GI NO: 15226212 NR Description: putative ribosomal protein L7
  misc_feature (1)..(131): NCBI GI NO: 15231288 NR Description: ribosomal protein, putative; protein id:At3g13580
  misc_feature (1)..(131): NCBI GI NO: 445613 NR Description: ribosomal protein L7
  misc_feature (1)..(131): NCBI GI NO: 27311547 NR Description: Unknown protein [Arabidopsis thaliana]
  misc_feature (1)..(131): NCBI GI NO: 30689617 NR Description: 60S ribosomal protein L7 (RPL7C)
  misc_feature (1)..(131): NCBI GI NO: 30689623 NR Description: 60S ribosomal protein L7 (RPL7C)
  misc_feature (3)..(131): NCBI GI NO: 28630259 NR Description: ribosomal protein L7 [Branchiostoma lanceolatum]
  misc_feature (3)..(131): NCBI GI NO: 32169292 NR Description: ribosomal protein L7 [Crassostrea gigas]
MVVPESVLLKRKREELWAAEKKTKAVEEKKKSSENIKVIYARAKQYAEEYDAQDKELVQLKREARMKGGFYVSPEAKLLFVVRIRGINAMHPKTKKILQLLRLRQIFNGVFLKVNKATINMLRRIEPYVAYG

SEQ ID NO: 36756 - DNA, 394 bp, Zea mays subsp. mays
  misc_feature (1)..(394): Ceres Seq. ID no. 4648285
acaccaaagaaaagtctccctcgcaacaactcgcccatttccctccacaccagcccgacacctcaagctccatcccgatcgatggcgcccaaggccgagaagaagcccgcggagaagaagccggccgccgaggtcgccgagaaggccgagaagacccccgccggcaagaagcccaaggcggagaagcggctgccggcgtccaagtccgccaaggagggcggcgacaagaagggccgcaagaagaacaagaagagcgtcgagacctacaagatctacatcttcaaggtgctcaagcaggtgcacccggacatcggcatctcctccaaggccatgtccatcatgaactccttcatcaacgacatcttcgagaagctcgccggcgaggcggccaagc

SEQ ID NO: 36757 - protein, 131 aa, Zea mays subsp. mays
  peptide (1)..(131): Ceres Seq. ID no. 4648286
  misc_feature (49)..(130): Pfam Name: Pfam Description:  Core histone H2A/H2B/H3/H4
  misc_feature (28)..(130): NCBI GI NO: 122022 NR Description: Histone H2B
  misc_feature (28)..(130): NCBI GI NO: 1708107 NR Description: Histone H2B
  misc_feature (28)..(130): NCBI GI NO: 3913804 NR Description: Histone H2B.3
  misc_feature (28)..(130): NCBI GI NO: 34895900 NR Description: putative histone H2B
  misc_feature (28)..(130): NCBI GI NO: 34895832 NR Description: putative histone H2B
  misc_feature (28)..(130): NCBI GI NO: 34895838 NR Description: putative histone H2B
  misc_feature (28)..(130): NCBI GI NO: 399853 NR Description: Histone H2B.1
  misc_feature (28)..(130): NCBI GI NO: 399854 NR Description: Histone H2B.2
  misc_feature (58)..(130): NCBI GI NO: 15030224 NR Description: Similar to H2B histone family, member D
  misc_feature (12)..(130): NCBI GI NO: 15223150 NR Description: histone H2B, putative; protein id: At1g08170.1
TPKKSLPRNNSPISLHTSPTPQAPSRSMAPKAEKKPAEKKPAAEVAEKAEKTPAGKKPKAEKRLPASKSAKEGGDKKGRKKNKKSVETYKIYIFKVLKQVHPDIGISSKAMSIMNSFINDIFEKLAGEAAK

SEQ ID NO: 36758 - protein, 130 aa, Zea mays subsp. mays
  peptide (1)..(130): Ceres Seq. ID no. 4648287
  misc_feature (3)..(129): Pfam Name: Pfam Description:  High molecular weight glutenin subunit
  misc_feature (73)..(128): NCBI GI NO: 17505204 NR Description: histone 1, H2bc; H2B histone family, member S
TKEKSPSQQLAHFPPHQPDTSSSIPIDGAQGREEARGEEAGRRGRREGREDPRRQEAQGGEAAAGVQVRQGGRRQEGPQEEQEERRDLQDLHLQGAQAGAPGHRHLLQGHVHHELLHQRHLREARRRGGQ

SEQ ID NO: 36759 - protein, 113 aa, Zea mays subsp. mays
  peptide (1)..(113): Ceres Seq. ID no. 4648288
  misc_feature (27)..(107): Pfam Name: Pfam Description:  TT viral orf 1
  misc_feature (15)..(109): NCBI GI NO: 11068023 NR Description: PxORF20 peptide [Plutella xylostella granulovirus]
  misc_feature (9)..(113): NCBI GI NO: 11360318 NR Description: probable mucin DKFZp434C196.1 - human (fragment)
  misc_feature (25)..(113): NCBI GI NO: 7949115 NR Description: Ser/Arg-related nuclear matrix protein
  misc_feature (25)..(113): NCBI GI NO: 23274133 NR Description: Similar to serine/arginine repetitive matrix 1
  misc_feature (27)..(113): NCBI GI NO: 29250446 NR Description: GLP_39_87477_88058 [Giardia lamblia ATCC 50803]
  misc_feature (31)..(113): NCBI GI NO: 5032119 NR Description: Ser/Arg-related nuclear matrix protein
  misc_feature (25)..(113): NCBI GI NO: 17553520 NR Description: Putative nuclear protein
  misc_feature (14)..(113): NCBI GI NO: 15027957 NR Description: putative arginine/serine-rich protein
  misc_feature (3)..(113): NCBI GI NO: 28972568 NR Description: mKIAA1019 protein [Mus musculus]
  misc_feature (14)..(113): NCBI GI NO: 15219287 NR Description: arginine/serine-rich protein, putative
HQRKVSLATTRPFPSTPARHLKLHPDRWRPRPRRSPRRRSRPPRSPRRPRRPPPARSPRRRSGCRRPSPPRRAATRRAARRTRRASRPTRSTSSRCSSRCTRTSASPPRPCPS

SEQ ID NO: 36760 - protein, 104 aa, Zea mays subsp. mays
  peptide (1)..(104): Ceres Seq. ID no. 4648289
  misc_feature (22)..(103): Pfam Name: Pfam Description:  Core histone H2A/H2B/H3/H4
  misc_feature (1)..(103): NCBI GI NO: 122022 NR Description: Histone H2B
  misc_feature (1)..(103): NCBI GI NO: 1708107 NR Description: Histone H2B
  misc_feature (1)..(103): NCBI GI NO: 3913804 NR Description: Histone H2B.3
  misc_feature (1)..(103): NCBI GI NO: 34895900 NR Description: putative histone H2B
  misc_feature (1)..(103): NCBI GI NO: 34895832 NR Description: putative histone H2B
  misc_feature (1)..(103): NCBI GI NO: 34895838 NR Description: putative histone H2B
  misc_feature (1)..(103): NCBI GI NO: 399853 NR Description: Histone H2B.1
  misc_feature (1)..(103): NCBI GI NO: 399854 NR Description: Histone H2B.2
  misc_feature (31)..(103): NCBI GI NO: 15030224 NR Description: Similar to H2B histone family, member D
  misc_feature (1)..(103): NCBI GI NO: 15223150 NR Description: histone H2B, putative; protein id: At1g08170.1
MAPKAEKKPAEKKPAAEVAEKAEKTPAGKKPKAEKRLPASKSAKEGGDKKGRKKNKKSVETYKIYIFKVLKQVHPDIGISSKAMSIMNSFINDIFEKLAGEAAK

SEQ ID NO: 36761 - DNA, 776 bp, Zea mays subsp. mays
  misc_feature (1)..(776): Ceres Seq. ID no. 12465542
  misc_feature (578)..(578): n is a, c, t, g, unknown, or other
  misc_feature (546)..(546): n is a, c, t, g, unknown, or other
  misc_feature (464)..(464): n is a, c, t, g, unknown, or other
  misc_feature (548)..(548): n is a, c, t, g, unknown, or other
  misc_feature (481)..(481): n is a, c, t, g, unknown, or other
  misc_feature (566)..(566): n is a, c, t, g, unknown, or other
  misc_feature (487)..(487): n is a, c, t, g, unknown, or other
  misc_feature (525)..(525): n is a, c, t, g, unknown, or other
  misc_feature (515)..(515): n is a, c, t, g, unknown, or other
  misc_feature (553)..(553): n is a, c, t, g, unknown, or other
  misc_feature (533)..(533): n is a, c, t, g, unknown, or other
  misc_feature (563)..(563): n is a, c, t, g, unknown, or other
  misc_feature (542)..(542): n is a, c, t, g, unknown, or other
  misc_feature (518)..(518): n is a, c, t, g, unknown, or other
  misc_feature (531)..(531): n is a, c, t, g, unknown, or other
  misc_feature (448)..(448): n is a, c, t, g, unknown, or other
  misc_feature (536)..(536): n is a, c, t, g, unknown, or other
  misc_feature (724)..(724): n is a, c, t, g, unknown, or other
  misc_feature (551)..(551): n is a, c, t, g, unknown, or other
  misc_feature (550)..(550): n is a, c, t, g, unknown, or other
  misc_feature (415)..(415): n is a, c, t, g, unknown, or other
gtggccgaagatttacacaagaatcaaaactgagagctcatatcagggcacaacatgagaaagctgttggcttgcagaatccaggtgcgtcatcaatgaaccacagtgcaattggaggtccgcaccagccccctaggccagcgaaggtctcagcagcacctccagctccctcagctgagcgcccttacgtctgcccctacgatggttgtgacaaggcatacatccatgagtacaagttgaacctccatgaaaaaagagcatcccaaccactaccaggatggtggtccaaatggtgctgccgccccttcaaagcgcagcatctcgaagagttcccacaggagcaagctggacatcacctctaggatgccaccggccaacatccccaagcacagagggtatgcaacaccattgccanctgtggtgagcctccctgaggagcagcagttgntaaggaaagtggtgtncgaggatgacagcgagnagactnaagaagagggggataacaatggcgaggncanatggaantacaananagntgctancagngncnncnaggaaaccgnagncgaagaatgagntgctagcagggattcatttttttttcttctgtagctgtgcatataccataatctatagactggtggttatagatttcaatacatgtacatttttaaaatacggctggcctatagtagacaagaggttgttgctgccatgccccttntcaactacacaggccatgagttcagaaacgataatggatcattgctcccgtc

SEQ ID NO: 36762 - protein, 119 aa, Zea mays subsp. mays
  peptide (1)..(119): Ceres Seq. ID no. 12465543
  misc_feature (62)..(85): Pfam Name: Pfam Description:  Zinc finger, C2H2 type
  misc_feature (1)..(85): NCBI GI NO: 4927259 NR Description: putative transcription repressor maize TRM protein
  misc_feature (1)..(82): NCBI GI NO: 4519673 NR Description: WREBP-2 [Nicotiana tabacum]
  misc_feature (2)..(85): NCBI GI NO: 30680251 NR Description: expressed protein [Arabidopsis thaliana]
  misc_feature (1)..(85): NCBI GI NO: 18149203 NR Description: unknown protein [Arabidopsis thaliana]
GRRFTQESKLRAHIRAQHEKAVGLQNPGASSMNHSAIGGPHQPPRPAKVSAAPPAPSAERPYVCPYDGCDKAYIHEYKLNLHEKRASQPLPGWWSKWCCRPFKAQHLEEFPQEQAGHHL

SEQ ID NO: 36763 - protein, 109 aa, Zea mays subsp. mays
  peptide (1)..(109): Ceres Seq. ID no. 12465544
  misc_feature (1)..(70): NCBI GI NO: 4927259 NR Description: putative transcription repressor maize TRM protein
  misc_feature (11)..(94): NCBI GI NO: 4519673 NR Description: WREBP-2 [Nicotiana tabacum]
  misc_feature (57)..(57): Xaa is any aa, unknown or other
  misc_feature (68)..(68): Xaa is any aa, unknown or other
  misc_feature (73)..(73): Xaa is any aa, unknown or other
  misc_feature (79)..(79): Xaa is any aa, unknown or other
  misc_feature (81)..(81): Xaa is any aa, unknown or other
  misc_feature (90)..(90): Xaa is any aa, unknown or other
  misc_feature (91)..(91): Xaa is any aa, unknown or other
  misc_feature (93)..(93): Xaa is any aa, unknown or other
  misc_feature (95)..(95): Xaa is any aa, unknown or other
  misc_feature (96)..(96): Xaa is any aa, unknown or other
  misc_feature (97)..(97): Xaa is any aa, unknown or other
  misc_feature (99)..(99): Xaa is any aa, unknown or other
  misc_feature (100)..(100): Xaa is any aa, unknown or other
  misc_feature (101)..(101): Xaa is any aa, unknown or other
  misc_feature (102)..(102): Xaa is any aa, unknown or other
  misc_feature (103)..(103): Xaa is any aa, unknown or other
  misc_feature (106)..(106): Xaa is any aa, unknown or other
  misc_feature (107)..(107): Xaa is any aa, unknown or other
MKKEHPNHYQDGGPNGAAAPSKRSISKSSHRSKLDITSRMPPANIPKHRGYATPLPXVVSLPEEQQLXRKVVXEDDSEXTXEEGDNNGEXXWXYXXXAXXXXXETXXEE

SEQ ID NO: 36764 - protein, 102 aa, Zea mays subsp. mays
  peptide (1)..(102): Ceres Seq. ID no. 12465545
  misc_feature (4)..(4): Xaa is any aa, unknown or other
  misc_feature (6)..(6): Xaa is any aa, unknown or other
  misc_feature (16)..(16): Xaa is any aa, unknown or other
  misc_feature (17)..(17): Xaa is any aa, unknown or other
  misc_feature (19)..(19): Xaa is any aa, unknown or other
  misc_feature (21)..(21): Xaa is any aa, unknown or other
  misc_feature (22)..(22): Xaa is any aa, unknown or other
  misc_feature (23)..(23): Xaa is any aa, unknown or other
  misc_feature (25)..(25): Xaa is any aa, unknown or other
  misc_feature (26)..(26): Xaa is any aa, unknown or other
  misc_feature (27)..(27): Xaa is any aa, unknown or other
  misc_feature (28)..(28): Xaa is any aa, unknown or other
  misc_feature (32)..(32): Xaa is any aa, unknown or other
  misc_feature (33)..(33): Xaa is any aa, unknown or other
  misc_feature (37)..(37): Xaa is any aa, unknown or other
  misc_feature (85)..(85): Xaa is any aa, unknown or other
MTAXRXKKRGITMARXXGXTXXXLXXXXRKPXXKNEXLAGIHFFFFCSCAYTIIYRLVVIDFNTCTFLKYGWPIVDKRLLLPCPXSTTQAMSSETIMDHCSR

SEQ ID NO: 36765 - DNA, 442 bp, Zea mays subsp. mays
  misc_feature (1)..(442): Ceres Seq. ID no. 12465538
  misc_feature (341)..(341): n is a, c, t, g, unknown, or other
  misc_feature (424)..(424): n is a, c, t, g, unknown, or other
  misc_feature (367)..(367): n is a, c, t, g, unknown, or other
aagatgaatataactgtatgaatgaccctagtcctactgttcatggactgccaaccagtagctytgcccgaacaagccccgctcactcaatgsgatccagacgaacaggtggcacatgggcaagaccycgtggctctgatgatggatattcaagtgattctgtgttgaagcmtgcctccagtgacttcaggaaacttggtcagcgtatatttgtttttgtaataggcggtgctactcgatcagagttacgtgctkcacacaagctttcatccaagctgaagcgagacatcatccttggttcatytagccttgatgatcctccccagttcatcacaaaattnaagttkatgtcagtagaagaattganacttgatgaccttcmgctgtraatggtgtccgcccacacggagtgtaaccttttatnttctcygytctgtcagct

SEQ ID NO: 36766 - protein, 128 aa, Zea mays subsp. mays
  peptide (1)..(128): Ceres Seq. ID no. 12465539
  misc_feature (1)..(128): NCBI GI NO: 38345989 NR Description: OSJNBa0032B23.7
  misc_feature (1)..(128): NCBI GI NO: 18391384 NR Description: expressed protein; protein id: At1g12360
  misc_feature (1)..(128): NCBI GI NO: 28201820 NR Description: SNARE-interacting protein KEULE
  misc_feature (2)..(128): NCBI GI NO: 18413751 NR Description: putative protein; protein id: At4g12120
  misc_feature (2)..(128): NCBI GI NO: 28201893 NR Description: Protein transport Sec1b (AtSec1b)
  misc_feature (1)..(93): NCBI GI NO: 25402721 NR Description: protein F5O11.8 [imported] - Arabidopsis thaliana
  misc_feature (2)..(111): NCBI GI NO: 7485573 NR Description: hypothetical protein F16J13
  misc_feature (17)..(111): NCBI GI NO: 13195580 NR Description: AtSec1a [Arabidopsis thaliana]
  misc_feature (17)..(111): NCBI GI NO: 28201892 NR Description: Protein transport Sec1a (AtSec1a)
  misc_feature (51)..(121): NCBI GI NO: 18378910 NR Description: hypothetical protein; protein id: At1g02010.1
  misc_feature (21)..(21): Xaa is any aa, unknown or other
  misc_feature (31)..(31): Xaa is any aa, unknown or other
  misc_feature (42)..(42): Xaa is any aa, unknown or other
  misc_feature (57)..(57): Xaa is any aa, unknown or other
  misc_feature (85)..(85): Xaa is any aa, unknown or other
  misc_feature (101)..(101): Xaa is any aa, unknown or other
  misc_feature (113)..(113): Xaa is any aa, unknown or other
  misc_feature (115)..(115): Xaa is any aa, unknown or other
  misc_feature (122)..(122): Xaa is any aa, unknown or other
  misc_feature (127)..(127): Xaa is any aa, unknown or other
DEYNCMNDPSPTVHGLPTSSXARTSPAHSMXSRRTGGTWARXRGSDDGYSSDSVLKXASSDFRKLGQRIFVFVIGGATRSELRAXHKLSSKLKRDIILGSXSLDDPPQFITKXKXMSVEELXLDDLXL

SEQ ID NO: 36767 - protein, 123 aa, Zea mays subsp. mays
  peptide (1)..(123): Ceres Seq. ID no. 12465540
  misc_feature (1)..(123): NCBI GI NO: 38345989 NR Description: OSJNBa0032B23.7
  misc_feature (1)..(123): NCBI GI NO: 18391384 NR Description: expressed protein; protein id: At1g12360
  misc_feature (1)..(123): NCBI GI NO: 28201820 NR Description: SNARE-interacting protein KEULE
  misc_feature (1)..(123): NCBI GI NO: 18413751 NR Description: putative protein; protein id: At4g12120
  misc_feature (1)..(123): NCBI GI NO: 28201893 NR Description: Protein transport Sec1b (AtSec1b)
  misc_feature (1)..(88): NCBI GI NO: 25402721 NR Description: protein F5O11.8 [imported] - Arabidopsis thaliana
  misc_feature (1)..(106): NCBI GI NO: 7485573 NR Description: hypothetical protein F16J13
  misc_feature (12)..(106): NCBI GI NO: 13195580 NR Description: AtSec1a [Arabidopsis thaliana]
  misc_feature (12)..(106): NCBI GI NO: 28201892 NR Description: Protein transport Sec1a (AtSec1a)
  misc_feature (46)..(116): NCBI GI NO: 18378910 NR Description: hypothetical protein; protein id: At1g02010.1
  misc_feature (16)..(16): Xaa is any aa, unknown or other
  misc_feature (26)..(26): Xaa is any aa, unknown or other
  misc_feature (37)..(37): Xaa is any aa, unknown or other
  misc_feature (52)..(52): Xaa is any aa, unknown or other
  misc_feature (80)..(80): Xaa is any aa, unknown or other
  misc_feature (96)..(96): Xaa is any aa, unknown or other
  misc_feature (108)..(108): Xaa is any aa, unknown or other
  misc_feature (110)..(110): Xaa is any aa, unknown or other
  misc_feature (117)..(117): Xaa is any aa, unknown or other
  misc_feature (122)..(122): Xaa is any aa, unknown or other
MNDPSPTVHGLPTSSXARTSPAHSMXSRRTGGTWARXRGSDDGYSSDSVLKXASSDFRKLGQRIFVFVIGGATRSELRAXHKLSSKLKRDIILGSXSLDDPPQFITKXKXMSVEELXLDDLXL

SEQ ID NO: 36768 - protein, 99 aa, Zea mays subsp. mays
  peptide (1)..(99): Ceres Seq. ID no. 12465541
  misc_feature (1)..(99): NCBI GI NO: 38345989 NR Description: OSJNBa0032B23.7
  misc_feature (1)..(99): NCBI GI NO: 18391384 NR Description: expressed protein; protein id: At1g12360
  misc_feature (1)..(99): NCBI GI NO: 28201820 NR Description: SNARE-interacting protein KEULE
  misc_feature (1)..(99): NCBI GI NO: 18413751 NR Description: putative protein; protein id: At4g12120
  misc_feature (1)..(99): NCBI GI NO: 28201893 NR Description: Protein transport Sec1b (AtSec1b)
  misc_feature (1)..(64): NCBI GI NO: 25402721 NR Description: protein F5O11.8 [imported] - Arabidopsis thaliana
  misc_feature (1)..(82): NCBI GI NO: 7485573 NR Description: hypothetical protein F16J13
  misc_feature (1)..(82): NCBI GI NO: 13195580 NR Description: AtSec1a [Arabidopsis thaliana]
  misc_feature (1)..(82): NCBI GI NO: 28201892 NR Description: Protein transport Sec1a (AtSec1a)
  misc_feature (22)..(92): NCBI GI NO: 18378910 NR Description: hypothetical protein; protein id: At1g02010.1
  misc_feature (2)..(2): Xaa is any aa, unknown or other
  misc_feature (13)..(13): Xaa is any aa, unknown or other
  misc_feature (28)..(28): Xaa is any aa, unknown or other
  misc_feature (56)..(56): Xaa is any aa, unknown or other
  misc_feature (72)..(72): Xaa is any aa, unknown or other
  misc_feature (84)..(84): Xaa is any aa, unknown or other
  misc_feature (86)..(86): Xaa is any aa, unknown or other
  misc_feature (93)..(93): Xaa is any aa, unknown or other
  misc_feature (98)..(98): Xaa is any aa, unknown or other
MXSRRTGGTWARXRGSDDGYSSDSVLKXASSDFRKLGQRIFVFVIGGATRSELRAXHKLSSKLKRDIILGSXSLDDPPQFITKXKXMSVEELXLDDLXL

SEQ ID NO: 36769 - DNA, 461 bp, Zea mays subsp. mays
  misc_feature (1)..(461): Ceres Seq. ID no. 4648918
aaaaccctagcaccagtcccgccgccgccgctgccgccctgaccctcgccgctgctgcagcctccaccgcgcaaccatgggtatcgacctcgtcgccggcggccgcaacaagaggaccaagcgcacggcgcccaaatcggacgatgtgtacctcaagctgctcgtcaagctctaccgcttcctggtccggaggaccaagagccagttcaacgccgtgatcctgaagcgcctcttcatgagcaagaccaaccgccccccgctctcgatgcgccgcctcgtcaggttcatggaggggaaggaggacaagatcgctgtgatagtgggcaccatcaccgatgaccagagggtctacgagataccggcaatgaaggtggccgcgctcaggttcaccgagacggcgagggccaggattgtcaatgccggtggcgagtgccttacctttgaccagctcgcgctccgtg

SEQ ID NO: 36770 - protein, 128 aa, Zea mays subsp. mays
  peptide (1)..(128): Ceres Seq. ID no. 4648919
  misc_feature (1)..(127): NCBI GI NO: 34393858 NR Description: putative cytoplasmic ribosomal protein L18
  misc_feature (1)..(127): NCBI GI NO: 34897628 NR Description: cytoplasmic ribosomal protein L18 [Oryza sativa]
  misc_feature (1)..(127): NCBI GI NO: 606970 NR Description: cytoplasmic ribosomal protein L18
  misc_feature (1)..(127): NCBI GI NO: 15241061 NR Description: 60S ribosomal protein - like; protein id:At5g27850
  misc_feature (1)..(127): NCBI GI NO: 15230011 NR Description: putative 60S ribosomal protein L18
  misc_feature (1)..(127): NCBI GI NO: 28798549 NR Description: 60S ribosomal protein [Medicago sativa]
  misc_feature (4)..(127): NCBI GI NO: 6094021 NR Description: 60S RIBOSOMAL PROTEIN L18
  misc_feature (2)..(127): NCBI GI NO: 7440855 NR Description: ribosomal protein L18
  misc_feature (1)..(127): NCBI GI NO: 28630354 NR Description: ribosomal protein L18 [Branchiostoma lanceolatum]
  misc_feature (1)..(127): NCBI GI NO: 4506607 NR Description: ribosomal protein L18; 60S ribosomal protein L18
MGIDLVAGGRNKRTKRTAPKSDDVYLKLLVKLYRFLVRRTKSQFNAVILKRLFMSKTNRPPLSMRRLVRFMEGKEDKIAVIVGTITDDQRVYEIPAMKVAALRFTETARARIVNAGGECLTFDQLALR

SEQ ID NO: 36771 - protein, 75 aa, Zea mays subsp. mays
  peptide (1)..(75): Ceres Seq. ID no. 4648920
  misc_feature (1)..(74): NCBI GI NO: 34393858 NR Description: putative cytoplasmic ribosomal protein L18
  misc_feature (1)..(74): NCBI GI NO: 34897628 NR Description: cytoplasmic ribosomal protein L18 [Oryza sativa]
  misc_feature (1)..(74): NCBI GI NO: 606970 NR Description: cytoplasmic ribosomal protein L18
  misc_feature (1)..(74): NCBI GI NO: 15241061 NR Description: 60S ribosomal protein - like; protein id:At5g27850
  misc_feature (1)..(74): NCBI GI NO: 15230011 NR Description: putative 60S ribosomal protein L18
  misc_feature (1)..(74): NCBI GI NO: 28798549 NR Description: 60S ribosomal protein [Medicago sativa]
  misc_feature (1)..(74): NCBI GI NO: 6094021 NR Description: 60S RIBOSOMAL PROTEIN L18
  misc_feature (1)..(74): NCBI GI NO: 7440855 NR Description: ribosomal protein L18
  misc_feature (1)..(74): NCBI GI NO: 28630354 NR Description: ribosomal protein L18 [Branchiostoma lanceolatum]
  misc_feature (1)..(74): NCBI GI NO: 4506607 NR Description: ribosomal protein L18; 60S ribosomal protein L18
MSKTNRPPLSMRRLVRFMEGKEDKIAVIVGTITDDQRVYEIPAMKVAALRFTETARARIVNAGGECLTFDQLALR

SEQ ID NO: 36772 - protein, 71 aa, Zea mays subsp. mays
  peptide (1)..(71): Ceres Seq. ID no. 4648921
  misc_feature (3)..(71): NCBI GI NO: 32699068 NR Description: hypothetical protein FLJ35107 [Homo sapiens]
NPSTSPAAAAAALTLAAAAASTAQPWVSTSSPAAATRGPSARRPNRTMCTSSCSSSSTASWSGGPRASSTP

SEQ ID NO: 36773 - DNA, 480 bp, Zea mays subsp. mays
  misc_feature (1)..(480): Ceres Seq. ID no. 4647995
acgtttgatttgagatttgaccagaccatcgcctccgcctcgtccctcccgccgagcccgatcgacctcccttccgccgcacgccggcctccatcctcctccgcgccccgaggccgcagacgcgttggcaagggcgagggtgtgagtggtgtggcactcgcaccatcgtccaacggctactacaatggcggtgccgccgatgctaccggtggcggttccggcgccggcggtggacatggtggtggcgcagccggagctccaagctatggaaccggaggcggcctcggcggaggcaagggtgaggccggcagcgatggatcgtgggggtcaggttatgctcagggaatcggtgctggcacaggcggcggtggcggcggcggatcccaaggcggctctggtggcggtggaggctctgggtccggatccggcagcggtggaatccactgagcttgcacttcagtagctagagcctakagcccc

SEQ ID NO: 36774 - protein, 148 aa, Zea mays subsp. mays
  peptide (1)..(148): Ceres Seq. ID no. 4647996
  misc_feature (12)..(139): Pfam Name: Pfam Description:  Herpesvirus large structural phospho protein UL32
  misc_feature (42)..(148): NCBI GI NO: 7442081 NR Description: glycine-rich protein grp3 - maize
  misc_feature (42)..(148): NCBI GI NO: 37534936 NR Description: putative glycine-rich protein
  misc_feature (43)..(146): NCBI GI NO: 72320 NR Description: glycine-rich cell wall protein precursor -Arabidopsis thaliana
  misc_feature (43)..(146): NCBI GI NO: 15228946 NR Description: unknown protein; protein id: At3g17050.1
  misc_feature (26)..(146): NCBI GI NO: 37534934 NR Description: putative glycine-rich protein
  misc_feature (43)..(146): NCBI GI NO: 72320 NR Description: glycine-rich cell wall protein precursor -Arabidopsis thaliana
  misc_feature (43)..(146): NCBI GI NO: 15228946 NR Description: unknown protein; protein id: At3g17050.1
  misc_feature (43)..(145): NCBI GI NO: 81623 NR Description: glycine-rich protein 1 - Arabidopsis thaliana
  misc_feature (43)..(145): NCBI GI NO: 15234690 NR Description: glycine-rich protein; protein id: At4g22020.1
  misc_feature (32)..(146): NCBI GI NO: 37534934 NR Description: putative glycine-rich protein
TFDLRFDQTIASASSLPPSPIDLPSAARRPPSSSAPRGRRRVGKGEGVSGVALAPSSNGYYNGGAADATGGGSGAGGGHGGGAAGAPSYGTGGGLGGGKGEAGSDGSWGSGYAQGIGAGTGGGGGGGSQGGSGGGGGSGSGSGSGGIH

SEQ ID NO: 36775 - protein, 92 aa, Zea mays subsp. mays
  peptide (1)..(92): Ceres Seq. ID no. 4647997
MAVPPMLPVAVPAPAVDMVVAQPELQAMEPEAASAEARVRPAAMDRGGQVMLRESVLAQAAVAAADPKAALVAVEALGPDPAAVESTELALQ

SEQ ID NO: 36776 - protein, 87 aa, Zea mays subsp. mays
  peptide (1)..(87): Ceres Seq. ID no. 4647998
MLPVAVPAPAVDMVVAQPELQAMEPEAASAEARVRPAAMDRGGQVMLRESVLAQAAVAAADPKAALVAVEALGPDPAAVESTELALQ

SEQ ID NO: 36777 - DNA, 390 bp, Zea mays subsp. mays
  misc_feature (1)..(390): Ceres Seq. ID no. 5008164
agtacaggtcgcaacaaccccccaccgtgagggacgcgaccaaacacacgcccctcttcgcacctcccaccaaccccgacgagcggcgatgaccggcacggtgtccaagctggcggcgccccgtccggcggcaccgccgctccggccggcgtccctccgcaccgccgccctcgccttcgccccttccccgcgccgagtccgcgtttccgtcgccgggcgagccaggagccccatcattgcgmtggcttcggccaaggaaggaagcggtgcaccgaccaagaggactgcgcttcatgatctctacgagctccagggcctgtccccgtgcgtacgacaacctaygccgccctgtcacagacttgctgcccattatcgccagcggcgtcctgt

SEQ ID NO: 36778 - protein, 129 aa, Zea mays subsp. mays
  peptide (1)..(129): Ceres Seq. ID no. 5008165
  misc_feature (30)..(84): NCBI GI NO: 34907042 NR Description: putative transaldolase
  misc_feature (80)..(108): NCBI GI NO: 34907042 NR Description: putative transaldolase
  misc_feature (41)..(108): NCBI GI NO: 10441272 NR Description: transaldolase [Lycopersicon esculentum]
  misc_feature (81)..(81): Xaa is any aa, unknown or other
  misc_feature (114)..(114): Xaa is any aa, unknown or other
VQVATTPHREGRDQTHAPLRTSHQPRRAAMTGTVSKLAAPRPAAPPLRPASLRTAALAFAPSPRRVRVSVAGRARSPIIAXASAKEGSGAPTKRTALHDLYELQGLSPCVRQPXPPCHRLAAHYRQRRP

SEQ ID NO: 36779 - protein, 100 aa, Zea mays subsp. mays
  peptide (1)..(100): Ceres Seq. ID no. 5008166
  misc_feature (1)..(55): NCBI GI NO: 34907042 NR Description: putative transaldolase
  misc_feature (51)..(79): NCBI GI NO: 34907042 NR Description: putative transaldolase
  misc_feature (12)..(79): NCBI GI NO: 10441272 NR Description: transaldolase [Lycopersicon esculentum]
  misc_feature (52)..(52): Xaa is any aa, unknown or other
  misc_feature (85)..(85): Xaa is any aa, unknown or other
MTGTVSKLAAPRPAAPPLRPASLRTAALAFAPSPRRVRVSVAGRARSPIIAXASAKEGSGAPTKRTALHDLYELQGLSPCVRQPXPPCHRLAAHYRQRRP

SEQ ID NO: 36780 - DNA, 434 bp, Zea mays subsp. mays
  misc_feature (1)..(434): Ceres Seq. ID no. 4647884
ttccgcagccaccaccaccccaacccaccggagcagacgaaggcggcgccgcggcgacctcatctccggccaagggaaatgactaccgttccggggtctctggtgtgggagctcgtgaagaaaaacaactgcttcttgatcaagcagttcggcaacagcaacgccaaggtgcagttcagcaaggagccaaacaacctctacaatgtccactcctacaagttctctggcttggcgaacagcaagaccgtggcggtccagccatcagcgggagaggacaaggctgtcgtcctgtccacgaccaagaccaagaagcagaacacccctgccaagctccagcacaagactctgatgcgcaaggagttccgcaagatggccaagtccgtcaagaaccaggtctgcgacaactactacaggcctgatctgaccaagccggc

SEQ ID NO: 36781 - protein, 144 aa, Zea mays subsp. mays
  peptide (1)..(144): Ceres Seq. ID no. 4647885
  misc_feature (31)..(143): Pfam Name: Pfam Description:  Ribosomal L28e protein family
  misc_feature (27)..(143): NCBI GI NO: 34910390 NR Description: ribosomal protein L28-like
  misc_feature (27)..(143): NCBI GI NO: 15224835 NR Description: putative ribosomal protein L28
  misc_feature (27)..(143): NCBI GI NO: 15233567 NR Description: putative protein; protein id: At4g29410
  misc_feature (27)..(143): NCBI GI NO: 32411169 NR Description: predicted protein [Neurospora crassa]
  misc_feature (25)..(143): NCBI GI NO: 20976820 NR Description: GH04183p [Drosophila melanogaster]
  misc_feature (29)..(143): NCBI GI NO: 19114036 NR Description: 60s ribosomal protein L28/L44
  misc_feature (34)..(143): NCBI GI NO: 24418650 NR Description: 60S ribosomal protein L28
  misc_feature (34)..(143): NCBI GI NO: 24656625 NR Description: CG12740-PA [Drosophila melanogaster]
  misc_feature (34)..(143): NCBI GI NO: 24656637 NR Description: CG12740-PC [Drosophila melanogaster]
  misc_feature (26)..(141): NCBI GI NO: 31212979 NR Description: ENSANGP00000014265 [Anopheles gambiae]
FRSHHHPNPPEQTKAAPRRPHLRPREMTTVPGSLVWELVKKNNCFLIKQFGNSNAKVQFSKEPNNLYNVHSYKFSGLANSKTVAVQPSAGEDKAVVLSTTKTKKQNTPAKLQHKTLMRKEFRKMAKSVKNQVCDNYYRPDLTKP

SEQ ID NO: 36782 - protein, 138 aa, Zea mays subsp. mays
  peptide (1)..(138): Ceres Seq. ID no. 4647886
PQPPPPQPTGADEGGAAATSSPAKGNDYRSGVSGVGAREEKQLLLDQAVRQQQRQGAVQQGAKQPLQCPLLQVLWLGEQQDRGGPAISGRGQGCRPVHDQDQEAEHPCQAPAQDSDAQGVPQDGQVRQEPGLRQLLQA

SEQ ID NO: 36783 - protein, 118 aa, Zea mays subsp. mays
  peptide (1)..(118): Ceres Seq. ID no. 4647887
  misc_feature (5)..(117): Pfam Name: Pfam Description:  Ribosomal L28e protein family
  misc_feature (1)..(117): NCBI GI NO: 34910390 NR Description: ribosomal protein L28-like
  misc_feature (1)..(117): NCBI GI NO: 15224835 NR Description: putative ribosomal protein L28
  misc_feature (1)..(117): NCBI GI NO: 15233567 NR Description: putative protein; protein id: At4g29410
  misc_feature (1)..(117): NCBI GI NO: 32411169 NR Description: predicted protein [Neurospora crassa]
  misc_feature (1)..(117): NCBI GI NO: 20976820 NR Description: GH04183p [Drosophila melanogaster]
  misc_feature (3)..(117): NCBI GI NO: 19114036 NR Description: 60s ribosomal protein L28/L44
  misc_feature (8)..(117): NCBI GI NO: 24418650 NR Description: 60S ribosomal protein L28
  misc_feature (8)..(117): NCBI GI NO: 24656625 NR Description: CG12740-PA [Drosophila melanogaster]
  misc_feature (8)..(117): NCBI GI NO: 24656637 NR Description: CG12740-PC [Drosophila melanogaster]
  misc_feature (1)..(115): NCBI GI NO: 31212979 NR Description: ENSANGP00000014265 [Anopheles gambiae]
MTTVPGSLVWELVKKNNCFLIKQFGNSNAKVQFSKEPNNLYNVHSYKFSGLANSKTVAVQPSAGEDKAVVLSTTKTKKQNTPAKLQHKTLMRKEFRKMAKSVKNQVCDNYYRPDLTKP

SEQ ID NO: 36784 - DNA, 473 bp, Zea mays subsp. mays
  misc_feature (1)..(473): Ceres Seq. ID no. 4647721
attccaatttccagtcacaagatctaaacaatcatagaaacacgacagcaagccaagaatcaagaggctcggggaagatgcaggcggcgaaggagaaggtgaaggacggggtgagcgcggtgaaggccaagaccaagatcgcgcaggccaaggcgtcggagaaggcggaggcggccacggcgaggtcgcacgccgagcgggagctggcgcacgagcgcggcaaggccaaggtcgccgccgccaagatggagctgcaccaggacaaggtcctacaccgggaggaggccatcgagcaccgcatccacaagcacggcggccacggccaccaccaccacaagcacggcgtcggcatcgtggccgcgcccgcgccggcgcccggggcaggggcgtactactctactgctgcacgtcaccactactagcgctagctagacgggcacattcgccgactgtgcaatatgatcccgctagct

SEQ ID NO: 36785 - protein, 139 aa, Zea mays subsp. mays
  peptide (1)..(139): Ceres Seq. ID no. 4647722
  misc_feature (26)..(98): Pfam Name: LEA Pfam Description: Late embryogenesis abundant
  misc_feature (26)..(131): NCBI GI NO: 34897842 NR Description: P0514G12.41
  misc_feature (26)..(120): NCBI GI NO: 18652404 NR Description: unknown [Hordeum vulgare]
  misc_feature (26)..(89): NCBI GI NO: 18652403 NR Description: unknown [Hordeum vulgare]
  misc_feature (26)..(128): NCBI GI NO: 15223243 NR Description: late-embryogenesis abundant protein, putative
  misc_feature (26)..(110): NCBI GI NO: 4102692 NR Description: late-embryogenesis abundant protein [Glycine max]
  misc_feature (26)..(127): NCBI GI NO: 4836407 NR Description: seed maturation protein PM29 [Glycine max]
  misc_feature (26)..(135): NCBI GI NO: 38346714 NR Description: OSJNBa0086O06.12
  misc_feature (26)..(108): NCBI GI NO: 15226951 NR Description: similar to late embryogenesis abundant proteins
  misc_feature (28)..(126): NCBI GI NO: 7446478 NR Description: hypothetical protein - Douglas fir
SNFQSQDLNNHRNTTASQESRGSGKMQAAKEKVKDGVSAVKAKTKIAQAKASEKAEAATARSHAERELAHERGKAKVAAAKMELHQDKVLHREEAIEHRIHKHGGHGHHHHKHGVGIVAAPAPAPGAGAYYSTAARHHY

SEQ ID NO: 36786 - protein, 114 aa, Zea mays subsp. mays
  peptide (1)..(114): Ceres Seq. ID no. 4647723
  misc_feature (1)..(73): Pfam Name: LEA Pfam Description: Late embryogenesis abundant
  misc_feature (1)..(106): NCBI GI NO: 34897842 NR Description: P0514G12.41
  misc_feature (1)..(95): NCBI GI NO: 18652404 NR Description: unknown [Hordeum vulgare]
  misc_feature (1)..(64): NCBI GI NO: 18652403 NR Description: unknown [Hordeum vulgare]
  misc_feature (1)..(103): NCBI GI NO: 15223243 NR Description: late-embryogenesis abundant protein, putative
  misc_feature (1)..(85): NCBI GI NO: 4102692 NR Description: late-embryogenesis abundant protein [Glycine max]
  misc_feature (1)..(102): NCBI GI NO: 4836407 NR Description: seed maturation protein PM29 [Glycine max]
  misc_feature (1)..(110): NCBI GI NO: 38346714 NR Description: OSJNBa0086O06.12
  misc_feature (1)..(83): NCBI GI NO: 15226951 NR Description: similar to late embryogenesis abundant proteins
  misc_feature (3)..(101): NCBI GI NO: 7446478 NR Description: hypothetical protein - Douglas fir
MQAAKEKVKDGVSAVKAKTKIAQAKASEKAEAATARSHAERELAHERGKAKVAAAKMELHQDKVLHREEAIEHRIHKHGGHGHHHHKHGVGIVAAPAPAPGAGAYYSTAARHHY

SEQ ID NO: 36787 - DNA, 808 bp, Zea mays subsp. mays
  misc_feature (1)..(808): Ceres Seq. ID no. 13599228
ctctctcgccgtccgccgctactcccctgcctcccccagagctcgttagggttttctcttttttcgggggagaaatctcaagaggcggcaccatgctcgtgtaccaggacaagctttccggcgacgagcttctgtcggattcgttcccttacagggagctggagaacggcgtgctctgggaagtcgatggccattgggtcgttcaaggagcagttgatgtggacattggagccaatccctctgctgagggtggtggtgatgatgagggtgttgatgaccaggccgtgaaggtggttgacattgttgacaccttccgtcttcaggagcaacctgcttttgacaagaagcagtttatctctcacatgaagcgctacatcaagaacctctctgccaagcttgaaggggatgacctagatgctttcaagaagaatgttgagtccgccacaaagtatcttcttagcaagctcaaggaccttcagttctttgttggcgagagcatgcatgatgatggcggcgtggtgttcgcctactacaaggagggagctgctgatccaactttcctgtactttgcacatgggctgaaagaggtcaagtgctaatcgcactgtatgctaaaatctatgctgtcttcagtatttttgctcttatctatggttgtcagtcgactctccaatgttggtgtcagtaactgtcagatgttgagtgtcttgaaaactttctgataattgtgggatttgctttgtaatggtaatcgtgaaattggtgtggttgtgttttggttgaatcaagagattctgccctgttattc

SEQ ID NO: 36788 - protein, 198 aa, Zea mays subsp. mays
  peptide (1)..(198): Ceres Seq. ID no. 13599229
  misc_feature (31)..(195): Pfam Name: Pfam Description:  Translationally controlled tumour protein
  misc_feature (31)..(198): NCBI GI NO: 21070379 NR Description: translationally controlled tumor protein
  misc_feature (31)..(198): NCBI GI NO: 20140865 NR Description: Translationally controlled tumor protein homolog
  misc_feature (31)..(198): NCBI GI NO: 549063 NR Description: Translationally controlled tumor protein homolog
  misc_feature (31)..(198): NCBI GI NO: 1174626 NR Description: TRANSLATIONALLY CONTROLLED TUMOR PROTEIN HOMOLOG
  misc_feature (31)..(198): NCBI GI NO: 9979196 NR Description: Translationally controlled tumor protein homolog
  misc_feature (31)..(174): NCBI GI NO: 7407154 NR Description: human tumor protein-like protein [Hordeum vulgare]
  misc_feature (31)..(198): NCBI GI NO: 20140683 NR Description: Translationally controlled tumor protein homolog
  misc_feature (31)..(198): NCBI GI NO: 6094439 NR Description: TRANSLATIONALLY CONTROLLED TUMOR PROTEIN HOMOLOG
  misc_feature (31)..(198): NCBI GI NO: 9979177 NR Description: Translationally controlled tumor protein homolog
  misc_feature (31)..(198): NCBI GI NO: 2507443 NR Description: Translationally controlled tumor protein homolog
LSPSAATPLPPPELVRVFSFFGGEISRGGTMLVYQDKLSGDELLSDSFPYRELENGVLWEVDGHWVVQGAVDVDIGANPSAEGGGDDEGVDDQAVKVVDIVDTFRLQEQPAFDKKQFISHMKRYIKNLSAKLEGDDLDAFKKNVESATKYLLSKLKDLQFFVGESMHDDGGVVFAYYKEGAADPTFLYFAHGLKEVKC

SEQ ID NO: 36789 - protein, 168 aa, Zea mays subsp. mays
  peptide (1)..(168): Ceres Seq. ID no. 13599230
  misc_feature (1)..(165): Pfam Name: Pfam Description:  Translationally controlled tumour protein
  misc_feature (1)..(168): NCBI GI NO: 21070379 NR Description: translationally controlled tumor protein
  misc_feature (1)..(168): NCBI GI NO: 20140865 NR Description: Translationally controlled tumor protein homolog
  misc_feature (1)..(168): NCBI GI NO: 549063 NR Description: Translationally controlled tumor protein homolog
  misc_feature (1)..(168): NCBI GI NO: 1174626 NR Description: TRANSLATIONALLY CONTROLLED TUMOR PROTEIN HOMOLOG
  misc_feature (1)..(168): NCBI GI NO: 9979196 NR Description: Translationally controlled tumor protein homolog
  misc_feature (1)..(144): NCBI GI NO: 7407154 NR Description: human tumor protein-like protein [Hordeum vulgare]
  misc_feature (1)..(168): NCBI GI NO: 20140683 NR Description: Translationally controlled tumor protein homolog
  misc_feature (1)..(168): NCBI GI NO: 6094439 NR Description: TRANSLATIONALLY CONTROLLED TUMOR PROTEIN HOMOLOG
  misc_feature (1)..(168): NCBI GI NO: 9979177 NR Description: Translationally controlled tumor protein homolog
  misc_feature (1)..(168): NCBI GI NO: 2507443 NR Description: Translationally controlled tumor protein homolog
MLVYQDKLSGDELLSDSFPYRELENGVLWEVDGHWVVQGAVDVDIGANPSAEGGGDDEGVDDQAVKVVDIVDTFRLQEQPAFDKKQFISHMKRYIKNLSAKLEGDDLDAFKKNVESATKYLLSKLKDLQFFVGESMHDDGGVVFAYYKEGAADPTFLYFAHGLKEVKC

SEQ ID NO: 36790 - DNA, 481 bp, Zea mays subsp. mays
  misc_feature (1)..(481): Ceres Seq. ID no. 4647364
  misc_feature (436)..(436): n is a, c, t, g, unknown, or other
aaacaaaccttctgagatttcgccggcgagagaagagtgagagagagagatccaacggctgagatgttccttcgtgcaatcggacggccgttattggccaaagtgaagcagacgacggggatcgtggggctcgacgtcgtaccgaacgcgagggcggtgctgatcgatctctacagcaaaaccctaaaggagatccaagccgtgccggaggacgaaggataccgtaaagcggtggaatcgttcacgcgccaccgtctcaatgtgtgcaaggaagaggaagactgggaggcgatcgagaagcgtcttggctgcggtcaagtcgaggagctcatcgaggaggcgcaagatgagctcacactcattgcgaagatgatcgaatgggacccttggggtgttccagatgactacgagtgtgaagtaattgagaacgatgcanccattcccaagcacgttcctcagcatcgacctggtcctcttcctg

SEQ ID NO: 36791 - protein, 139 aa, Zea mays subsp. mays
  peptide (1)..(139): Ceres Seq. ID no. 4647365
  misc_feature (27)..(83): Pfam Name: Pfam Description:  ETC complex I subunit conserved region
  misc_feature (1)..(138): NCBI GI NO: 18423437 NR Description: expressed protein; protein id: At5g52840
  misc_feature (15)..(138): NCBI GI NO: 16930745 NR Description: NADH-ubiquinone oxidoreductase [Retama raetam]
  misc_feature (65)..(138): NCBI GI NO: 22328992 NR Description: hypothetical protein; protein id: At4g28005.1
  misc_feature (1)..(27): NCBI GI NO: 22328992 NR Description: hypothetical protein; protein id: At4g28005.1
  misc_feature (11)..(109): NCBI GI NO: 24662306 NR Description: CG6463-PA [Drosophila melanogaster]
  misc_feature (14)..(120): NCBI GI NO: 28829489 NR Description: similar to NADH-ubiquinone oxidoreductase 13 KD-B subunit
  misc_feature (14)..(109): NCBI GI NO: 31213375 NR Description: ENSANGP00000017869 [Anopheles gambiae]
  misc_feature (14)..(109): NCBI GI NO: 233598 NR Description: 13 kDa-B polypeptide of iron-sulfur proteinfraction of NADH:ubiquinone oxidoreductase
  misc_feature (14)..(109): NCBI GI NO: 28461281 NR Description: NADH dehydrogenase
  misc_feature (14)..(109): NCBI GI NO: 12844779 NR Description: unnamed protein product [Mus musculus]
  misc_feature (125)..(125): Xaa is any aa, unknown or other
MFLRAIGRPLLAKVKQTTGIVGLDVVPNARAVLIDLYSKTLKEIQAVPEDEGYRKAVESFTRHRLNVCKEEEDWEAIEKRLGCGQVEELIEEAQDELTLIAKMIEWDPWGVPDDYECEVIENDAXIPKHVPQHRPGPLP

SEQ ID NO: 36792 - DNA, 504 bp, Zea mays subsp. mays
  misc_feature (1)..(504): Ceres Seq. ID no. 5008183
ggttccgtggcggggagtgttttccaggcggcggcgcggtagcgtgaaaccgggcgaccgagcaagcgacggccatggcgttctggcagacgcgcgattttctcttctgtggcatatgcggcaccctcctcaccttcgactccgtccgctccgcctcctgccctctatgcggcttcaagcgcgatgccaaagaaattgaagggaaagaaatacagtacacgatgaccgccgaggatattcgaagagggttaaagacacaaacggaggacgttgttgggcaaagaccagtgacaaataaagcctgtccaaaatgcgaccatccaaaagctgaattttacaacatacagatgcgttcagcagatgagggagagacgacgttctacatgtgtaaaggatgcggctgtaatttcaaagacgaatgaggagttatcctaccacttctacggatatatggcattggtgccgaagawattccagcgttgacagactagtactccctccgcc

SEQ ID NO: 36793 - protein, 115 aa, Zea mays subsp. mays
  peptide (1)..(115): Ceres Seq. ID no. 5008184
  misc_feature (75)..(112): Pfam Name: TFIIS Pfam Description: Transcription factor S-II
  misc_feature (1)..(114): NCBI GI NO: 13324793 NR Description: putative RNA polymerase I subunit [Oryza sativa]
  misc_feature (8)..(114): NCBI GI NO: 18404735 NR Description: expressed protein; protein id: At3g25940
  misc_feature (8)..(115): NCBI GI NO: 7657709 NR Description: zinc ribbon domain containing, 1
  misc_feature (8)..(108): NCBI GI NO: 34852033 NR Description: similar to nuclear RNA polymerase I small specific subunit Rpa12
  misc_feature (8)..(115): NCBI GI NO: 12963545 NR Description: nuclear RNA polymerase I small specific subunit
  misc_feature (6)..(108): NCBI GI NO: 31207229 NR Description: ENSANGP00000015033 [Anopheles gambiae]
  misc_feature (11)..(114): NCBI GI NO: 15669335 NR Description: transcription-associated protein ('TFIIS')
  misc_feature (10)..(114): NCBI GI NO: 13541573 NR Description: DNA-directed RNA polymerase subunit M
  misc_feature (10)..(114): NCBI GI NO: 14324969 NR Description: transcription factor
  misc_feature (8)..(59): NCBI GI NO: 26452990 NR Description: unknown protein [Arabidopsis thaliana]
MAFWQTRDFLFCGICGTLLTFDSVRSASCPLCGFKRDAKEIEGKEIQYTMTAEDIRRGLKTQTEDVVGQRPVTNKACPKCDHPKAEFYNIQMRSADEGETTFYMCKGCGCNFKDE

SEQ ID NO: 36794 - protein, 66 aa, Zea mays subsp. mays
  peptide (1)..(66): Ceres Seq. ID no. 5008185
  misc_feature (26)..(63): Pfam Name: TFIIS Pfam Description: Transcription factor S-II
  misc_feature (1)..(65): NCBI GI NO: 13324793 NR Description: putative RNA polymerase I subunit [Oryza sativa]
  misc_feature (1)..(65): NCBI GI NO: 18404735 NR Description: expressed protein; protein id: At3g25940
  misc_feature (1)..(66): NCBI GI NO: 7657709 NR Description: zinc ribbon domain containing, 1
  misc_feature (1)..(59): NCBI GI NO: 34852033 NR Description: similar to nuclear RNA polymerase I small specific subunit Rpa12
  misc_feature (1)..(66): NCBI GI NO: 12963545 NR Description: nuclear RNA polymerase I small specific subunit
  misc_feature (1)..(59): NCBI GI NO: 31207229 NR Description: ENSANGP00000015033 [Anopheles gambiae]
  misc_feature (1)..(65): NCBI GI NO: 15669335 NR Description: transcription-associated protein ('TFIIS')
  misc_feature (1)..(65): NCBI GI NO: 13541573 NR Description: DNA-directed RNA polymerase subunit M
  misc_feature (1)..(65): NCBI GI NO: 14324969 NR Description: transcription factor
  misc_feature (1)..(66): NCBI GI NO: 21553769 NR Description: putative DNA-directed RNA polymerase subunit
MTAEDIRRGLKTQTEDVVGQRPVTNKACPKCDHPKAEFYNIQMRSADEGETTFYMCKGCGCNFKDE

SEQ ID NO: 36795 - protein, 65 aa, Zea mays subsp. mays
  peptide (1)..(65): Ceres Seq. ID no. 5008186
VPWRGVFSRRRRGSVKPGDRASDGHGVLADARFSLLWHMRHPPHLRLRPLRLLPSMRLQARCQRN

SEQ ID NO: 36796 - DNA, 715 bp, Zea mays subsp. mays
  misc_feature (1)..(715): Ceres Seq. ID no. 12484099
  misc_feature (460)..(460): n is a, c, t, g, unknown, or other
  misc_feature (533)..(533): n is a, c, t, g, unknown, or other
  misc_feature (530)..(530): n is a, c, t, g, unknown, or other
tccttcccaatgcagctgagccgataaactacctggtgtcgcgctggggctcggacgagaacacgcttggttcgtacacgttcgatggggtgaacaaaccccgtgacctgtacgagaagctgcgcatccccgtggacaacctgttcttcgcgggagaggccacgagcgtcaagtacacgggcacggtgcacggcgccttctccacgggtgtcatggcggccgaggagtgcaagatgcgggttctggagcggttcagggagctcgacatgctggagatgtgccaccctgccatgggcgaggacagccctgtgtctgtcccgctgctcatctctcggctctaaaagcagacgagtagtagttgtgtatgggatggatcggcacctgagagtaggctgggacatcccactgattgccggagggaagcagggaggaagaagctcccctcccctcgcttcgcttntcctcggcatgaggcatgtgcctggcgttacttgtggcgtgccaagtgccatatttccctaaacttattntgngtgggaaccctctattatgtatgtatactgtgaatttgtgactctgtgttcaggtaacacgagttatcgtgacatcttcgtagagaaagataccgtatgtatgatgtatgtatgatatacatatgatattatgatcaacaattgtagtagtagtaataataaataatacatatatgtgactc

SEQ ID NO: 36797 - protein, 112 aa, Zea mays subsp. mays
  peptide (1)..(112): Ceres Seq. ID no. 12484100
  misc_feature (1)..(77): Pfam Name: Pfam Description:  Flavin containing amine oxidoreductase
  misc_feature (1)..(112): NCBI GI NO: 38344167 NR Description: OSJNBa0053K19.6
  misc_feature (1)..(112): NCBI GI NO: 15224204 NR Description: putative amine oxidase; protein id: At2g43020
  misc_feature (1)..(112): NCBI GI NO: 18650598 NR Description: At2g43020/MFL8.12 [Arabidopsis thaliana]
  misc_feature (1)..(112): NCBI GI NO: 15231622 NR Description: putative protein; protein id: At3g59050
  misc_feature (1)..(112): NCBI GI NO: 21553762 NR Description: putative amine oxidase [Arabidopsis thaliana]
  misc_feature (2)..(112): NCBI GI NO: 13877615 NR Description: putative protein kinase gb|AAD22129
  misc_feature (2)..(112): NCBI GI NO: 15218830 NR Description: polyamine oxidase, putative; protein id:At1g65840
  misc_feature (10)..(112): NCBI GI NO: 25404949 NR Description: protein F1E22.18 [imported] - Arabidopsis thaliana
  misc_feature (6)..(75): NCBI GI NO: 38505628 NR Description: slr5093 [Synechocystis sp. PCC 6803]
LPNAAEPINYLVSRWGSDENTLGSYTFDGVNKPRDLYEKLRIPVDNLFFAGEATSVKYTGTVHGAFSTGVMAAEECKMRVLERFRELDMLEMCHPAMGEDSPVSVPLLISRL

SEQ ID NO: 36798 - DNA, 510 bp, Zea mays subsp. mays
  misc_feature (1)..(510): Ceres Seq. ID no. 5008125
atcagaagctagaagcctagagcagccaagaaaagcacatacccgagtcgccgaaacaacaacaatcccaatcccccctcgtcactcaaaactcgaccaacaatgtcgctgattcgccgtggaagcgcattcgaccccttctcccttgacctctgggaccccttccagggctttcccttcggctctggaagcagcagcagcagcagcctgttcccctcgttcggaggcaccaccagctctgagacggccgccttcgccggcgctcgcgtcgactggaaggagacgccggaggcgcacgtgttcaagaccgacgtgccggggctgaagaaggaggaggtgaaggtggagctggaggacggcaacgtgctccagatcagcggcgagcgcagcaaggagcaggaggagaagacggacacctggcaccgcgtggagcgcmscagcggcaagttcctgcgcaggttccgcctgccggagaacgccaggacggagcagatcagtgcgtccatggag

SEQ ID NO: 36799 - protein, 136 aa, Zea mays subsp. mays
  peptide (1)..(136): Ceres Seq. ID no. 5008126
  misc_feature (1)..(135): NCBI GI NO: 34902026 NR Description: unknown protein
  misc_feature (1)..(135): NCBI GI NO: 34902016 NR Description: putative class I low-molecular-weight heat shockprotein
  misc_feature (1)..(135): NCBI GI NO: 7441293 NR Description: heat shock protein 17.9 - pearl millet
  misc_feature (1)..(135): NCBI GI NO: 2119194 NR Description: low-molecular-weight heat-shock protein - rice
  misc_feature (1)..(135): NCBI GI NO: 1213073 NR Description: heat shock protein 17.8 [Oryza sativa]
  misc_feature (1)..(135): NCBI GI NO: 34902028 NR Description: shock protein, low molecular weight
  misc_feature (1)..(135): NCBI GI NO: 34902024 NR Description: unknown protein
  misc_feature (1)..(135): NCBI GI NO: 399937 NR Description: 17.4 KD CLASS I HEAT SHOCK PROTEIN
  misc_feature (1)..(135): NCBI GI NO: 422000 NR Description: heat shock protein, low molecular weight
  misc_feature (1)..(135): NCBI GI NO: 25044839 NR Description: class-1 LMW heat shock protein [Ananas comosus]
  misc_feature (112)..(112): Xaa is any aa, unknown or other
MSLIRRGSAFDPFSLDLWDPFQGFPFGSGSSSSSSLFPSFGGTTSSETAAFAGARVDWKETPEAHVFKTDVPGLKKEEVKVELEDGNVLQISGERSKEQEEKTDTWHRVERXSGKFLRRFRLPENARTEQISASME

SEQ ID NO: 36800 - DNA, 467 bp, Zea mays subsp. mays
  misc_feature (1)..(467): Ceres Seq. ID no. 4777895
gattagcgaacggaacggaaggaagaccgtggaagcaaaggcgcgcaggcgcaagggagcagagcacacggcacaccacaagagaacaaatacacctcaggtggccttcctaagatcgccgactgaatctacctcgcttcgcgcctccagttccgcaccgggactgccgaatctgtgctcgggatcgtctcttccagcggcaatgggggccgattctgaggacgccgtcaagcagctcagcctcctcatggagcaagtggaggccccgctgaagagatcatttcagaatatgcaccagggctatcccaaagaaacactggtgcgtttccttaaggctagagagtggaacgtaccaaaggctcataaaatgattgttgattctttggattggaggattgaaaatgaaattgatagtgtgctagagagacctatagtcccagtagatttatacagatcaatacgtgatt

SEQ ID NO: 36801 - protein, 155 aa, Zea mays subsp. mays
  peptide (1)..(155): Ceres Seq. ID no. 4777896
  misc_feature (69)..(136): Pfam Name: Pfam Description:  CRAL/TRIO, N-terminus
  misc_feature (68)..(154): NCBI GI NO: 7488694 NR Description: phosphatidylinositol-phosphatidylcholine transfer protein SEC14 homolog Ssh1
  misc_feature (68)..(154): NCBI GI NO: 15222786 NR Description: polyphosphoinositide binding protein, putative
  misc_feature (68)..(154): NCBI GI NO: 15238794 NR Description: putative protein; protein id: At5g47730.1
  misc_feature (68)..(154): NCBI GI NO: 14532536 NR Description: AT5g47730/MCA23_5 [Arabidopsis thaliana]
  misc_feature (95)..(154): NCBI GI NO: 25295905 NR Description: protein F14J16.8 [imported] - Arabidopsis thaliana
ISERNGRKTVEAKARRRKGAEHTAHHKRTNTPQVAFLRSPTESTSLRASSSAPGLPNLCSGSSLPAAMGADSEDAVKQLSLLMEQVEAPLKRSFQNMHQGYPKETLVRFLKAREWNVPKAHKMIVDSLDWRIENEIDSVLERPIVPVDLYRSIRD

SEQ ID NO: 36802 - protein, 88 aa, Zea mays subsp. mays
  peptide (1)..(88): Ceres Seq. ID no. 4777897
  misc_feature (2)..(69): Pfam Name: Pfam Description:  CRAL/TRIO, N-terminus
  misc_feature (1)..(87): NCBI GI NO: 7488694 NR Description: phosphatidylinositol-phosphatidylcholine transfer protein SEC14 homolog Ssh1
  misc_feature (1)..(87): NCBI GI NO: 15222786 NR Description: polyphosphoinositide binding protein, putative
  misc_feature (1)..(87): NCBI GI NO: 15238794 NR Description: putative protein; protein id: At5g47730.1
  misc_feature (1)..(87): NCBI GI NO: 14532536 NR Description: AT5g47730/MCA23_5 [Arabidopsis thaliana]
  misc_feature (28)..(87): NCBI GI NO: 25295905 NR Description: protein F14J16.8 [imported] - Arabidopsis thaliana
MGADSEDAVKQLSLLMEQVEAPLKRSFQNMHQGYPKETLVRFLKAREWNVPKAHKMIVDSLDWRIENEIDSVLERPIVPVDLYRSIRD

SEQ ID NO: 36803 - DNA, 535 bp, Zea mays subsp. mays
  misc_feature (1)..(535): Ceres Seq. ID no. 4777621
gtccgccgacgacaaattcatccggcaggtgacgacgcaaggtacccgcgccggcgcgggcccgggtctgctcccggaggcgcagttcgcagcgttcgtgaggcggcacgggcggcggtactccgggcccaaggagtatgcgcgtcggctgcgcgtgttcgcggccaacctggcccgcgcggcggcgcaccaggcgctggacccgacggcgcgccacggggtcacgcccttctccgacctcacgcgggaggagttcgaggcgcgcctcacgggcctgcgcgccggcggggacgtccagcggctcatgagtggcgtgccggccgccccgccggcctcgcaggaggaggtggcccggctgccggccagcttcgactggcgcgacaagggcgccgtcacgggcgtcaagacgcagggtgcgtgcgggtcgtgctgggcgttcagcacgacgggcgcggtggagggcgccaacttcctcgccacgggggagctcgtcgacctcagcgagcagcagctggtcgactgcgaccacacgtgc

SEQ ID NO: 36804 - protein, 178 aa, Zea mays subsp. mays
  peptide (1)..(178): Ceres Seq. ID no. 4777622
  misc_feature (8)..(131): Pfam Name: Pfam Description:  Herpesvirus leader protein
  misc_feature (13)..(176): NCBI GI NO: 29830954 NR Description: putative GntR-family transcriptional regulator
VRRRQIHPAGDDARYPRRRGPGSAPGGAVRSVREAARAAVLRAQGVCASAARVRGQPGPRGGAPGAGPDGAPRGHALLRPHAGGVRGAPHGPARRRGRPAAHEWRAGRPAGLAGGGGPAAGQLRLARQGRRHGRQDAGCVRVVLGVQHDGRGGGRQLPRHGGARRPQRAAAGRLRPHV

SEQ ID NO: 36805 - protein, 178 aa, Zea mays subsp. mays
  peptide (1)..(178): Ceres Seq. ID no. 4777623
  misc_feature (119)..(177): Pfam Name: Pfam Description:  Papain family cysteine protease
  misc_feature (3)..(177): NCBI GI NO: 34901734 NR Description: putative cysteine proteinase
  misc_feature (23)..(177): NCBI GI NO: 1362047 NR Description: cysteine proteinase (EC 3
  misc_feature (23)..(177): NCBI GI NO: 7435814 NR Description: cysteine proteinase (EC 3
  misc_feature (1)..(177): NCBI GI NO: 17979125 NR Description: putative cysteine proteinase
  misc_feature (3)..(177): NCBI GI NO: 18420375 NR Description: cysteine proteinase RD19A; protein id: At4g39090
  misc_feature (3)..(177): NCBI GI NO: 21593213 NR Description: cysteine proteinase RD19A [Arabidopsis thaliana]
  misc_feature (1)..(177): NCBI GI NO: 4757570 NR Description: cysteine proteinase precursor [Solanum melongena]
  misc_feature (3)..(177): NCBI GI NO: 18141287 NR Description: senescence-associated cysteine protease
  misc_feature (3)..(177): NCBI GI NO: 7211745 NR Description: papain-like cysteine proteinase isoform III
  misc_feature (23)..(177): NCBI GI NO: 7435792 NR Description: cysteine proteinase (EC 3
SADDKFIRQVTTQGTRAGAGPGLLPEAQFAAFVRRHGRRYSGPKEYARRLRVFAANLARAAAHQALDPTARHGVTPFSDLTREEFEARLTGLRAGGDVQRLMSGVPAAPPASQEEVARLPASFDWRDKGAVTGVKTQGACGSCWAFSTTGAVEGANFLATGELVDLSEQQLVDCDHTC

SEQ ID NO: 36806 - DNA, 576 bp, Zea mays subsp. mays
  misc_feature (1)..(576): Ceres Seq. ID no. 13599379
ttttttagtttctctccgacgagatttgagatggcactaagaggagtatggcagctccagaagctggtagtgagctactgtaattggggtggcagcagcagaggcataagagcctttatggaatcagagttacctgctctgatcgagaagaatccgcagctcgaagtggtaacggagctctcaaggggacaacatccttacctcaagggcatttacaggaatagaaatgaaagagtggtgtgtgttaagaacatggatcctgatcaagtgcttttgaatgcaacgaggcttaggaactctcttggaaggaaagtggtgaagctgcggactaggcatgtgaccaaacatcccagtgttcaaggcacttggacaaccgctgtcaagttctgacaacctttgcgggtcttttgttcttcttcttattcgttgctgtaatgttgcaatatcaggattcttcctttgttaccaatatttgcaataccaagttgtttccactacttgttctctctggttcgttcctttttttcttacaacaatgttctgtcttgttttggatccggttaatgtctgggaaac

SEQ ID NO: 36807 - protein, 129 aa, Zea mays subsp. mays
  peptide (1)..(129): Ceres Seq. ID no. 13599380
  misc_feature (12)..(102): Pfam Name: Pfam Description:  Mitochondrial ribosomal protein L51 / S25 / CI-B8 domain
  misc_feature (11)..(129): NCBI GI NO: 15231727 NR Description: expressed protein [Arabidopsis thaliana]
  misc_feature (11)..(128): NCBI GI NO: 26006491 NR Description: Unknown protein
  misc_feature (16)..(124): NCBI GI NO: 40739113 NR Description: hypothetical protein AN6904.2
  misc_feature (16)..(124): NCBI GI NO: 32414711 NR Description: hypothetical protein [Neurospora crassa]
  misc_feature (20)..(124): NCBI GI NO: 19112489 NR Description: hypothetical protein [Schizosaccharomyces pombe]
  misc_feature (18)..(124): NCBI GI NO: 17505717 NR Description: NADH-ubiquinone oxidoreductase B8
  misc_feature (16)..(124): NCBI GI NO: 6325356 NR Description: Mitochondrial Ribosome Protein, Large Subunit
  misc_feature (18)..(124): NCBI GI NO: 39589613 NR Description: Hypothetical protein CBG12220
  misc_feature (14)..(124): NCBI GI NO: 17647665 NR Description: mitochondrial ribosomal protein L-CI-B8 CG5479-PA
  misc_feature (14)..(124): NCBI GI NO: 31195767 NR Description: ENSANGP00000000132 [Anopheles gambiae]
FFSFSPTRFEMALRGVWQLQKLVVSYCNWGGSSRGIRAFMESELPALIEKNPQLEVVTELSRGQHPYLKGIYRNRNERVVCVKNMDPDQVLLNATRLRNSLGRKVVKLRTRHVTKHPSVQGTWTTAVKF

SEQ ID NO: 36808 - protein, 119 aa, Zea mays subsp. mays
  peptide (1)..(119): Ceres Seq. ID no. 13599381
  misc_feature (2)..(92): Pfam Name: Pfam Description:  Mitochondrial ribosomal protein L51 / S25 / CI-B8 domain
  misc_feature (1)..(119): NCBI GI NO: 15231727 NR Description: expressed protein [Arabidopsis thaliana]
  misc_feature (1)..(118): NCBI GI NO: 26006491 NR Description: Unknown protein
  misc_feature (6)..(114): NCBI GI NO: 40739113 NR Description: hypothetical protein AN6904.2
  misc_feature (6)..(114): NCBI GI NO: 32414711 NR Description: hypothetical protein [Neurospora crassa]
  misc_feature (10)..(114): NCBI GI NO: 19112489 NR Description: hypothetical protein [Schizosaccharomyces pombe]
  misc_feature (8)..(114): NCBI GI NO: 17505717 NR Description: NADH-ubiquinone oxidoreductase B8
  misc_feature (6)..(114): NCBI GI NO: 6325356 NR Description: Mitochondrial Ribosome Protein, Large Subunit
  misc_feature (8)..(114): NCBI GI NO: 39589613 NR Description: Hypothetical protein CBG12220
  misc_feature (4)..(114): NCBI GI NO: 17647665 NR Description: mitochondrial ribosomal protein L-CI-B8 CG5479-PA
  misc_feature (4)..(114): NCBI GI NO: 31195767 NR Description: ENSANGP00000000132 [Anopheles gambiae]
MALRGVWQLQKLVVSYCNWGGSSRGIRAFMESELPALIEKNPQLEVVTELSRGQHPYLKGIYRNRNERVVCVKNMDPDQVLLNATRLRNSLGRKVVKLRTRHVTKHPSVQGTWTTAVKF

SEQ ID NO: 36809 - protein, 90 aa, Zea mays subsp. mays
  peptide (1)..(90): Ceres Seq. ID no. 13599382
  misc_feature (1)..(63): Pfam Name: Pfam Description:  Mitochondrial ribosomal protein L51 / S25 / CI-B8 domain
  misc_feature (1)..(90): NCBI GI NO: 15231727 NR Description: expressed protein [Arabidopsis thaliana]
  misc_feature (1)..(89): NCBI GI NO: 26006491 NR Description: Unknown protein
  misc_feature (1)..(85): NCBI GI NO: 40739113 NR Description: hypothetical protein AN6904.2
  misc_feature (1)..(85): NCBI GI NO: 32414711 NR Description: hypothetical protein [Neurospora crassa]
  misc_feature (1)..(85): NCBI GI NO: 19112489 NR Description: hypothetical protein [Schizosaccharomyces pombe]
  misc_feature (1)..(85): NCBI GI NO: 17505717 NR Description: NADH-ubiquinone oxidoreductase B8
  misc_feature (1)..(85): NCBI GI NO: 6325356 NR Description: Mitochondrial Ribosome Protein, Large Subunit
  misc_feature (1)..(85): NCBI GI NO: 39589613 NR Description: Hypothetical protein CBG12220
  misc_feature (1)..(85): NCBI GI NO: 17647665 NR Description: mitochondrial ribosomal protein L-CI-B8 CG5479-PA
  misc_feature (1)..(85): NCBI GI NO: 31195767 NR Description: ENSANGP00000000132 [Anopheles gambiae]
MESELPALIEKNPQLEVVTELSRGQHPYLKGIYRNRNERVVCVKNMDPDQVLLNATRLRNSLGRKVVKLRTRHVTKHPSVQGTWTTAVKF

SEQ ID NO: 36810 - DNA, 955 bp, Zea mays subsp. mays
  misc_feature (1)..(955): Ceres Seq. ID no. 12635356
ataggtaatcataccacaacccgagcattctacaaccactttcatcaacgccatacacgtctcctaccctcacagttcgttgctccgcacatcagcaggacttgcaatggcgggagacggcgagctgaagctgctgggcgtgtggacgagcccgttcgtcatcagggtgcgcgtggtgctcaacctcaagtctctgccgtacgagtacgtggaggagaacctgggcagcaagagcgcgctcctcctgggctccaacccggtgcaccagagcgtgcccgtcctcctccacggcggccgccccgtgaacgagtcccaggtcatcgtgcagtacatcgacgaggtctgggcgggggccggcccgtccgtgctcccggccgacccctacgagcgcgccacggcgcgcttctgggcggcgtacgtcgacgacaaggtcgggtcggcgtggacggggatgctcttctcgtgcaagacggaggaggagagggcggaggccgtgtcccgggccgtggcggcgctggagacgctggagggcgcgttcgcggagtgctccaaggggaaggcgttcttcggcggcgacgccatcgggttcgtcgacgtcgtgctcggcggctacctcgggtggttcggggcgatcgacaagatcatcgggcgccggctgatcgacccggcgaggacgccgctgctggccaggtgggaggagcagttccgcgcggcggacgcggccaagggcgtcgtgccggacgacgccgacaagatgctcgagttcttgcccaccgtgctcgcttgggtcgccgccaaagcgaagtgaactgtgagcccgtgacatcgccagctcgtgacatgtgtgtttgtgtgtgtgcgtgtctgagtccgtccagtgtgtgctgaataaatgcaccgcatgtcgtgtgttgtaccaagggcaaacgatgctgaataattttgatgtttgtgg

SEQ ID NO: 36811 - protein, 295 aa, Zea mays subsp. mays
  peptide (1)..(295): Ceres Seq. ID no. 12635357
  misc_feature (9)..(292): Pfam Name: Pfam Description:  DivIVA protein
  misc_feature (101)..(220): NCBI GI NO: 729206 NR Description: PROBABLE GLUTATHIONE S-TRANSFERASE
  misc_feature (37)..(181): NCBI GI NO: 2388805 NR Description: attachment region binding protein [Gallus gallus]
IGNHTTTRAFYNHFHQRHTRLLPSQFVAPHISRTCNGGRRRAEAAGRVDEPVRHQGARGAQPQVSAVRVRGGEPGQQERAPPGLQPGAPERARPPPRRPPRERVPGHRAVHRRGLGGGRPVRAPGRPLRARHGALLGGVRRRQGRVGVDGDALLVQDGGGEGGGRVPGRGGAGDAGGRVRGVLQGEGVLRRRRHRVRRRRARRLPRVVRGDRQDHRAPADRPGEDAAAGQVGGAVPRGGRGQGRRAGRRRQDARVLAHRARLGRRQSEVNCEPVTSPARDMCVCVCACLSPSSVC

SEQ ID NO: 36812 - protein, 233 aa, Zea mays subsp. mays
  peptide (1)..(233): Ceres Seq. ID no. 12635358
  misc_feature (88)..(204): Pfam Name: Pfam Description:  Glutathione S-transferase, C-terminal domain
  misc_feature (1)..(233): NCBI GI NO: 20067421 NR Description: glutathione transferase [Triticum aestivum]
  misc_feature (1)..(233): NCBI GI NO: 37536360 NR Description: putative glutathione S-transferase
  misc_feature (1)..(231): NCBI GI NO: 11385511 NR Description: glutathione S-transferase GST 30 [Zea mays]
  misc_feature (1)..(231): NCBI GI NO: 37536368 NR Description: putative glutathione S-transferase
  misc_feature (3)..(226): NCBI GI NO: 11385501 NR Description: glutathione S-transferase GST 25 [Zea mays]
  misc_feature (1)..(225): NCBI GI NO: 11385527 NR Description: glutathione S-transferase GST 38 [Zea mays]
  misc_feature (2)..(225): NCBI GI NO: 37536358 NR Description: putative glutathione S-transferase
  misc_feature (1)..(230): NCBI GI NO: 11385535 NR Description: glutathione S-transferase GST 42 [Zea mays]
  misc_feature (6)..(220): NCBI GI NO: 11385495 NR Description: glutathione S-transferase GST 22 [Zea mays]
  misc_feature (1)..(212): NCBI GI NO: 37536280 NR Description: putative glutathione S-transferase
MAGDGELKLLGVWTSPFVIRVRVVLNLKSLPYEYVEENLGSKSALLLGSNPVHQSVPVLLHGGRPVNESQVIVQYIDEVWAGAGPSVLPADPYERATARFWAAYVDDKVGSAWTGMLFSCKTEEERAEAVSRAVAALETLEGAFAECSKGKAFFGGDAIGFVDVVLGGYLGWFGAIDKIIGRRLIDPARTPLLARWEEQFRAADAAKGVVPDDADKMLEFLPTVLAWVAAKAK

SEQ ID NO: 36813 - DNA, 413 bp, Zea mays subsp. mays
  misc_feature (1)..(413): Ceres Seq. ID no. 12638286
aaccaggtgctcgaggaggtcgatcgatggcgtcggagaaagacgcggcgctcgcccccgtgcccaacgacaaccccaccatatttgacaagatcatcaaaaaggagataccttctacggtggtgtatgaggatgagaaggtcctcgctttcagagacataaatcctcaagctccgacccacattgtaatcattcccaaagtcaaggatggattaaccggcctttcaaaggcagaagagaggcatgtagagatacttggctgcctcctctacgctgcaaaagttatcgctaagcaggaaggacttgaagatggctaccgtattgtcatcaatgatggccctagtggatgtcaatctgtttaccacatccatgtccatctccttggagggaggcagatgaactggcccccaggc

SEQ ID NO: 36814 - protein, 137 aa, Zea mays subsp. mays
  peptide (1)..(137): Ceres Seq. ID no. 13624616
  misc_feature (9)..(136): NCBI GI NO: 629858 NR Description: protein kinase C inhibitor - maize
  misc_feature (9)..(136): NCBI GI NO: 1177047 NR Description: 14 KD ZINC-BINDING PROTEIN
  misc_feature (9)..(136): NCBI GI NO: 11260559 NR Description: protein kinase C inhibitor-like protein -Arabidopsis thaliana
  misc_feature (9)..(136): NCBI GI NO: 18410510 NR Description: protein kinase C inhibitor-like protein
  misc_feature (26)..(136): NCBI GI NO: 1177046 NR Description: 14 KD ZINC-BINDING PROTEIN
  misc_feature (4)..(136): NCBI GI NO: 15221629 NR Description: putative protein kinase C inhibitor
  misc_feature (4)..(126): NCBI GI NO: 25518144 NR Description: F28K20.9 protein - Arabidopsis thaliana
  misc_feature (114)..(136): NCBI GI NO: 25518144 NR Description: F28K20.9 protein - Arabidopsis thaliana
  misc_feature (30)..(136): NCBI GI NO: 23480654 NR Description: putative protein kinase C interacting protein 1
  misc_feature (9)..(136): NCBI GI NO: 23612841 NR Description: protein kinase c inhibitor-like protein, putative
PGARGGRSMASEKDAALAPVPNDNPTIFDKIIKKEIPSTVVYEDEKVLAFRDINPQAPTHIVIIPKVKDGLTGLSKAEERHVEILGCLLYAAKVIAKQEGLEDGYRIVINDGPSGCQSVYHIHVHLLGGRQMNWPPG

SEQ ID NO: 36815 - protein, 129 aa, Zea mays subsp. mays
  peptide (1)..(129): Ceres Seq. ID no. 13624617
  misc_feature (1)..(128): NCBI GI NO: 629858 NR Description: protein kinase C inhibitor - maize
  misc_feature (1)..(128): NCBI GI NO: 1177047 NR Description: 14 KD ZINC-BINDING PROTEIN
  misc_feature (1)..(128): NCBI GI NO: 11260559 NR Description: protein kinase C inhibitor-like protein -Arabidopsis thaliana
  misc_feature (1)..(128): NCBI GI NO: 18410510 NR Description: protein kinase C inhibitor-like protein
  misc_feature (18)..(128): NCBI GI NO: 1177046 NR Description: 14 KD ZINC-BINDING PROTEIN
  misc_feature (1)..(128): NCBI GI NO: 15221629 NR Description: putative protein kinase C inhibitor
  misc_feature (1)..(118): NCBI GI NO: 25518144 NR Description: F28K20.9 protein - Arabidopsis thaliana
  misc_feature (106)..(128): NCBI GI NO: 25518144 NR Description: F28K20.9 protein - Arabidopsis thaliana
  misc_feature (22)..(128): NCBI GI NO: 23480654 NR Description: putative protein kinase C interacting protein 1
  misc_feature (1)..(128): NCBI GI NO: 23612841 NR Description: protein kinase c inhibitor-like protein, putative
MASEKDAALAPVPNDNPTIFDKIIKKEIPSTVVYEDEKVLAFRDINPQAPTHIVIIPKVKDGLTGLSKAEERHVEILGCLLYAAKVIAKQEGLEDGYRIVINDGPSGCQSVYHIHVHLLGGRQMNWPPG

SEQ ID NO: 36816 - DNA, 445 bp, Zea mays subsp. mays
  misc_feature (1)..(445): Ceres Seq. ID no. 4777260
ttgtacacatgcctgatgtatggataaatctggctcatacatattttgctcaaggtcattttcaacaagcagttaaattgtatcaaaattgtttgcggaagttcttccacaatacagatgcaaccatcctattataccttgctcggacacactatgaggctgagcgatggcaagactgcaggaaaactttgcttagagctatacatttggctccatcaaattacttgttacggtttaatgtaggagtgtcaatgcagaaattctcagcttcaaccctgcaaaagacaaaacaaacagttgatgaggttcgcgccacagtcactgaacttcagaatgccattagagttttcagtctgttatctgttgcatcaacgtaccactcccatggttttgatgagaggaaaatagaaactcatgttgagtactgtaaacatttacttgatgc

SEQ ID NO: 36817 - protein, 147 aa, Zea mays subsp. mays
  peptide (1)..(147): Ceres Seq. ID no. 4777261
  misc_feature (40)..(73): Pfam Name: Pfam Description:  TPR Domain
  misc_feature (1)..(146): NCBI GI NO: 23095913 NR Description: putative TPR-containing nuclear phosphoprotein
  misc_feature (1)..(146): NCBI GI NO: 25411225 NR Description: probable TPR repeat nuclear phosphoprotein
  misc_feature (27)..(86): NCBI GI NO: 34901616 NR Description: putative TPR-containing nuclear phosphoprotein
  misc_feature (102)..(146): NCBI GI NO: 34901616 NR Description: putative TPR-containing nuclear phosphoprotein
  misc_feature (5)..(146): NCBI GI NO: 7661950 NR Description: KIAA0155 gene product
  misc_feature (5)..(146): NCBI GI NO: 40788884 NR Description: KIAA0155 [Homo sapiens]
  misc_feature (5)..(146): NCBI GI NO: 31753133 NR Description: Unknown (protein for IMAGE:30058591)
  misc_feature (5)..(146): NCBI GI NO: 6678441 NR Description: TPR-containing, SH2-binding phosphoprotein
  misc_feature (5)..(146): NCBI GI NO: 34858978 NR Description: similar to phosphoprotein [Rattus norvegicus]
  misc_feature (5)..(92): NCBI GI NO: 26333645 NR Description: unnamed protein product [Mus musculus]
VHMPDVWINLAHTYFAQGHFQQAVKLYQNCLRKFFHNTDATILLYLARTHYEAERWQDCRKTLLRAIHLAPSNYLLRFNVGVSMQKFSASTLQKTKQTVDEVRATVTELQNAIRVFSLLSVASTYHSHGFDERKIETHVEYCKHLLD

SEQ ID NO: 36818 - protein, 145 aa, Zea mays subsp. mays
  peptide (1)..(145): Ceres Seq. ID no. 4777262
  misc_feature (38)..(71): Pfam Name: Pfam Description:  TPR Domain
  misc_feature (1)..(144): NCBI GI NO: 23095913 NR Description: putative TPR-containing nuclear phosphoprotein
  misc_feature (1)..(144): NCBI GI NO: 25411225 NR Description: probable TPR repeat nuclear phosphoprotein
  misc_feature (25)..(84): NCBI GI NO: 34901616 NR Description: putative TPR-containing nuclear phosphoprotein
  misc_feature (100)..(144): NCBI GI NO: 34901616 NR Description: putative TPR-containing nuclear phosphoprotein
  misc_feature (3)..(144): NCBI GI NO: 7661950 NR Description: KIAA0155 gene product
  misc_feature (3)..(144): NCBI GI NO: 40788884 NR Description: KIAA0155 [Homo sapiens]
  misc_feature (3)..(144): NCBI GI NO: 31753133 NR Description: Unknown (protein for IMAGE:30058591)
  misc_feature (3)..(144): NCBI GI NO: 6678441 NR Description: TPR-containing, SH2-binding phosphoprotein
  misc_feature (3)..(144): NCBI GI NO: 34858978 NR Description: similar to phosphoprotein [Rattus norvegicus]
  misc_feature (3)..(90): NCBI GI NO: 26333645 NR Description: unnamed protein product [Mus musculus]
MPDVWINLAHTYFAQGHFQQAVKLYQNCLRKFFHNTDATILLYLARTHYEAERWQDCRKTLLRAIHLAPSNYLLRFNVGVSMQKFSASTLQKTKQTVDEVRATVTELQNAIRVFSLLSVASTYHSHGFDERKIETHVEYCKHLLD

SEQ ID NO: 36819 - DNA, 703 bp, Zea mays subsp. mays
  misc_feature (1)..(703): Ceres Seq. ID no. 13580129
  misc_feature (554)..(554): n is a, c, t, g, unknown, or other
  misc_feature (282)..(282): n is a, c, t, g, unknown, or other
  misc_feature (489)..(489): n is a, c, t, g, unknown, or other
  misc_feature (351)..(351): n is a, c, t, g, unknown, or other
  misc_feature (561)..(561): n is a, c, t, g, unknown, or other
  misc_feature (699)..(699): n is a, c, t, g, unknown, or other
  misc_feature (98)..(98): n is a, c, t, g, unknown, or other
atcagaaccgatccttacagagagacacacccagcgcgcgagatatctacatcgatcatcatcaccagcgagcgagccggccgagcagcaccgatggnggcgtacatgcgcgtgacgcaccgcgacgaggaaggcaagaaggtgacggagaagatgccggtcccggagacgcggcgcccggacacggccaagcacttcgagcgcaagctggaggagcagggcctccaccgcttcgagcggcacccggcgaacgcgccccggggcgtgggcatcggcgccccnccgcccaagtccgggcgcggcggcaagtacacctgggagggccccggcagcgtcgtcgaggaccagctngacccggcgccgcccgccatcgaccccaacgaccccaactacgaggaggcggaggacgacgaggcggccagggaggtggtcgtcggggaggtggaggtcgctaaggtcgccgagggcagggacggcgtcgccagggtngacgtcgcgccgggcctgctccaggaccagaagcagtaaaaagacttgtcttttctggatacgtntagagtntagatcgactcggtgtgtgtcagtgtgttcgagtttattccgtgcagagagtgcacgtcaactccgctttaattaatctgcttttgttaatatttctactgatcagtaatatgaaccagtggttgatatttggatggncctt

SEQ ID NO: 36820 - protein, 175 aa, Zea mays subsp. mays
  peptide (1)..(175): Ceres Seq. ID no. 13580130
  misc_feature (36)..(170): NCBI GI NO: 18398726 NR Description: expressed protein [Arabidopsis thaliana]
  misc_feature (33)..(33): Xaa is any aa, unknown or other
  misc_feature (94)..(94): Xaa is any aa, unknown or other
  misc_feature (117)..(117): Xaa is any aa, unknown or other
  misc_feature (163)..(163): Xaa is any aa, unknown or other
IRTDPYRETHPAREISTSIIITSERAGRAAPMXAYMRVTHRDEEGKKVTEKMPVPETRRPDTAKHFERKLEEQGLHRFERHPANAPRGVGIGAXPPKSGRGGKYTWEGPGSVVEDQXDPAPPAIDPNDPNYEEAEDDEAAREVVVGEVEVAKVAEGRDGVARXDVAPGLLQDQKQ

SEQ ID NO: 36821 - protein, 150 aa, Zea mays subsp. mays
  peptide (1)..(150): Ceres Seq. ID no. 13580131
  misc_feature (26)..(150): NCBI GI NO: 23105951 NR Description: hypothetical protein [Azotobacter vinelandii]
  misc_feature (47)..(150): NCBI GI NO: 7494125 NR Description: myosin-IA - Acanthamoeba castellanii
  misc_feature (32)..(150): NCBI GI NO: 34393960 NR Description: hypothetical protein
  misc_feature (24)..(145): NCBI GI NO: 7441832 NR Description: hypothetical protein APE1912 - Aeropyrum pernix
  misc_feature (32)..(150): NCBI GI NO: 29830954 NR Description: putative GntR-family transcriptional regulator
  misc_feature (25)..(150): NCBI GI NO: 34910974 NR Description: P0014E08.18
  misc_feature (32)..(32): Xaa is any aa, unknown or other
  misc_feature (94)..(94): Xaa is any aa, unknown or other
  misc_feature (117)..(117): Xaa is any aa, unknown or other
QNRSLQRDTPSARDIYIDHHHQRASRPSSTDXGVHARDAPRRGRQEGDGEDAGPGDAAPGHGQALRAQAGGAGPPPLRAAPGERAPGRGHRRPXAQVRARRQVHLGGPRQRRRGPAXPGAARHRPQRPQLRGGGGRRGGQGGGRRGGGGR

SEQ ID NO: 36822 - protein, 144 aa, Zea mays subsp. mays
  peptide (1)..(144): Ceres Seq. ID no. 13580132
  misc_feature (5)..(139): NCBI GI NO: 18398726 NR Description: expressed protein [Arabidopsis thaliana]
  misc_feature (2)..(2): Xaa is any aa, unknown or other
  misc_feature (63)..(63): Xaa is any aa, unknown or other
  misc_feature (86)..(86): Xaa is any aa, unknown or other
  misc_feature (132)..(132): Xaa is any aa, unknown or other
MXAYMRVTHRDEEGKKVTEKMPVPETRRPDTAKHFERKLEEQGLHRFERHPANAPRGVGIGAXPPKSGRGGKYTWEGPGSVVEDQXDPAPPAIDPNDPNYEEAEDDEAAREVVVGEVEVAKVAEGRDGVARXDVAPGLLQDQKQ

SEQ ID NO: 36823 - DNA, 2375 bp, Zea mays subsp. mays
  misc_feature (1)..(2375): Ceres Seq. ID no. 13587079
ctacttcccggtatcctaaaccctagccgacatgcgccgcccgcagcgccgcgtcgcggcgaagcagactcgcctgcgggaggtcgacgagatacgcctcctcaacgaatggatcgacgccggcaagcccctcccgcgcaccaaacttctgcccccgtcgaaatcagctggaccggttccgaccgccggggagcacccggagtacggcgcgtgcacactgttcgacgagctgccgctgtcgcagaagaccaaggacgggctgcggaaggcggggttcactgagatgagtgagatccagcgcgccgctctgccccacgcgctgtgtggccgcgacatcctcggcgcggccaagaccggctccggcaagacccttgcctttgtcatcccgcttattgagaagctgtatagagagagatggggtccagaggatggtgtgggctgcattattctctccccgacaaatgatttggctgggcagatttttgaggtgatcaagaaagtggggcagttccataactttagtggtggcgtcattgttgctgttggtgcttgacgaggcagatcaaattcttgatcacggattcagaaaccaggttgatgctatcatttctcagattcccaaagttagacaaactttactgttttctgctacacaaacgaagtcagttaaggaccttgcaagggttagcttaagggatcctgaatatataagtgtgcacgaggaggccagaacagccacaccggatacccttgagcagtatgccatgattgtacctcttgagcagaagttaaatatgctctggagcttcattaaaaggcatctaaattcaaagacgatagtcttcttatctagtgtcaagcaggtcaaatttgtttatgaaatttttaagaaacttcgtcctggtattcctttgaaatgtatgcatggacggatgaaacatgtggtacagcaggccatagttgcagatttcaatgaagctacctcagttcttttctcaactgatataacatctcgaggactagatataaagaatgtggattgggtggtgcaggttgattgcccagaaaacattgataattacatccacagagttggccgtacagctcgttacaataagaaaggaaaatcacttatattcctttgtcctgaagaagaagcaatgcttgaaaaattgaaggcaaccgaaagtaaaatacctatacatattcgaaagccaaaggcagaacaactggagcagatatcgcagagtatagcctcagtgctggttaaatttcccaatcttcaggaattgggtaaaagggcttttgttacctatcttaaggcagtatacctccagaaagacaaaaaagtgttcaacctgagcaggttctctgcagagcagtttgctgcatatgctgcttcgcttggtctgcctgttacccccaagatccgcttcataagccacaagaagaatgtgtcgaagaaggatatggaggacattgatatgaaacagatgaaatccagtttggaacatgaagttaccatcactccaaagatcaacattgatttaactttgtgtgatggagatgatgatatcctttatcccaagaagcccactgcagatgctaatatggatgacagacttgatgatgtccttcatcccaaggagtctgccacagatacaaatgtgactggacttgaaagacccttcaaaaagaagaaactgaagataaacgtgaacaggccatcaggaacaagggtcaagtatgatgatgagggcaacgccatcccacctcttgcatctgtcgctgaagaagtatctttagaacctgtggttcacaaggataaaatttcccagcggtatgcagagatgttgagagaaatgcagaaacacgacaaggaggacaagcttgaacacaagaagaccttgcgggagaagaagctgcagaagaagatgaagcttaagcgcaagaggcaggaagacactggagcagggtcagaggaggatagtggatctgaatcagacagaggccaagacacagccaacaaaggtaaaaagaggtacttcaatagcgacgatgaagacaatgacgcagcaaaggacggtgatgttctcgcccagcaggaggcgttggcactgaagctcctgagtaatatgcacagttagctttgggatctgatggtataggttacccttgaatgggggtttgcctattagcgctccagccaggaaggggctgaaattttgaacgtgtcgcggttttttttttctgataaccgggagttaattcccactttcaggcatacgttcatggatgtatgagaaatcagtgtggccgtattaccccaagaaatcggacttagatgaggttttaagtaaaatgcctttgatttt

SEQ ID NO: 36824 - protein, 460 aa, Zea mays subsp. mays
  peptide (1)..(460): Ceres Seq. ID no. 13587080
  misc_feature (43)..(116): Pfam Name: Pfam Description:  Helicase conserved C-terminal domain
  misc_feature (1)..(460): NCBI GI NO: 34901886 NR Description: putative RNA helicase
  misc_feature (1)..(460): NCBI GI NO: 34395216 NR Description: putative RNA helicase
  misc_feature (1)..(456): NCBI GI NO: 15240418 NR Description: DEAD/DEAH box helicase, putative
  misc_feature (1)..(434): NCBI GI NO: 21627812 NR Description: probable ATP-dependent RNA helicase
  misc_feature (1)..(455): NCBI GI NO: 19115564 NR Description: probable ATP-dependent RNA helicase
  misc_feature (1)..(233): NCBI GI NO: 40747532 NR Description: hypothetical protein AN0589.2
  misc_feature (227)..(426): NCBI GI NO: 40747532 NR Description: hypothetical protein AN0589.2
  misc_feature (1)..(436): NCBI GI NO: 6322427 NR Description: putative RNA helicase; Hca4p
  misc_feature (1)..(436): NCBI GI NO: 1619952 NR Description: putative RNA helicase [Saccharomyces cerevisiae]
  misc_feature (1)..(452): NCBI GI NO: 39595354 NR Description: Hypothetical protein CBG03992
MIVPLEQKLNMLWSFIKRHLNSKTIVFLSSVKQVKFVYEIFKKLRPGIPLKCMHGRMKHVVQQAIVADFNEATSVLFSTDITSRGLDIKNVDWVVQVDCPENIDNYIHRVGRTARYNKKGKSLIFLCPEEEAMLEKLKATESKIPIHIRKPKAEQLEQISQSIASVLVKFPNLQELGKRAFVTYLKAVYLQKDKKVFNLSRFSAEQFAAYAASLGLPVTPKIRFISHKKNVSKKDMEDIDMKQMKSSLEHEVTITPKINIDLTLCDGDDDILYPKKPTADANMDDRLDDVLHPKESATDTNVTGLERPFKKKKLKINVNRPSGTRVKYDDEGNAIPPLASVAEEVSLEPVVHKDKISQRYAEMLREMQKHDKEDKLEHKKTLREKKLQKKMKLKRKRQEDTGAGSEEDSGSESDRGQDTANKGKKRYFNSDDEDNDAAKDGDVLAQQEALALKLLSNMHS

SEQ ID NO: 36825 - protein, 450 aa, Zea mays subsp. mays
  peptide (1)..(450): Ceres Seq. ID no. 13587081
  misc_feature (33)..(106): Pfam Name: Pfam Description:  Helicase conserved C-terminal domain
  misc_feature (1)..(450): NCBI GI NO: 34901886 NR Description: putative RNA helicase
  misc_feature (1)..(450): NCBI GI NO: 34395216 NR Description: putative RNA helicase
  misc_feature (1)..(446): NCBI GI NO: 15240418 NR Description: DEAD/DEAH box helicase, putative
  misc_feature (1)..(424): NCBI GI NO: 21627812 NR Description: probable ATP-dependent RNA helicase
  misc_feature (1)..(445): NCBI GI NO: 19115564 NR Description: probable ATP-dependent RNA helicase
  misc_feature (1)..(223): NCBI GI NO: 40747532 NR Description: hypothetical protein AN0589.2
  misc_feature (217)..(416): NCBI GI NO: 40747532 NR Description: hypothetical protein AN0589.2
  misc_feature (1)..(426): NCBI GI NO: 6322427 NR Description: putative RNA helicase; Hca4p
  misc_feature (1)..(426): NCBI GI NO: 1619952 NR Description: putative RNA helicase [Saccharomyces cerevisiae]
  misc_feature (1)..(442): NCBI GI NO: 39595354 NR Description: Hypothetical protein CBG03992
MLWSFIKRHLNSKTIVFLSSVKQVKFVYEIFKKLRPGIPLKCMHGRMKHVVQQAIVADFNEATSVLFSTDITSRGLDIKNVDWVVQVDCPENIDNYIHRVGRTARYNKKGKSLIFLCPEEEAMLEKLKATESKIPIHIRKPKAEQLEQISQSIASVLVKFPNLQELGKRAFVTYLKAVYLQKDKKVFNLSRFSAEQFAAYAASLGLPVTPKIRFISHKKNVSKKDMEDIDMKQMKSSLEHEVTITPKINIDLTLCDGDDDILYPKKPTADANMDDRLDDVLHPKESATDTNVTGLERPFKKKKLKINVNRPSGTRVKYDDEGNAIPPLASVAEEVSLEPVVHKDKISQRYAEMLREMQKHDKEDKLEHKKTLREKKLQKKMKLKRKRQEDTGAGSEEDSGSESDRGQDTANKGKKRYFNSDDEDNDAAKDGDVLAQQEALALKLLSNMHS

SEQ ID NO: 36826 - protein, 408 aa, Zea mays subsp. mays
  peptide (1)..(408): Ceres Seq. ID no. 13587082
  misc_feature (1)..(64): Pfam Name: Pfam Description:  Helicase conserved C-terminal domain
  misc_feature (1)..(408): NCBI GI NO: 34901886 NR Description: putative RNA helicase
  misc_feature (1)..(408): NCBI GI NO: 34395216 NR Description: putative RNA helicase
  misc_feature (1)..(404): NCBI GI NO: 15240418 NR Description: DEAD/DEAH box helicase, putative
  misc_feature (1)..(382): NCBI GI NO: 21627812 NR Description: probable ATP-dependent RNA helicase
  misc_feature (1)..(403): NCBI GI NO: 19115564 NR Description: probable ATP-dependent RNA helicase
  misc_feature (1)..(181): NCBI GI NO: 40747532 NR Description: hypothetical protein AN0589.2
  misc_feature (175)..(374): NCBI GI NO: 40747532 NR Description: hypothetical protein AN0589.2
  misc_feature (1)..(384): NCBI GI NO: 6322427 NR Description: putative RNA helicase; Hca4p
  misc_feature (1)..(384): NCBI GI NO: 1619952 NR Description: putative RNA helicase [Saccharomyces cerevisiae]
  misc_feature (1)..(400): NCBI GI NO: 39595354 NR Description: Hypothetical protein CBG03992
MHGRMKHVVQQAIVADFNEATSVLFSTDITSRGLDIKNVDWVVQVDCPENIDNYIHRVGRTARYNKKGKSLIFLCPEEEAMLEKLKATESKIPIHIRKPKAEQLEQISQSIASVLVKFPNLQELGKRAFVTYLKAVYLQKDKKVFNLSRFSAEQFAAYAASLGLPVTPKIRFISHKKNVSKKDMEDIDMKQMKSSLEHEVTITPKINIDLTLCDGDDDILYPKKPTADANMDDRLDDVLHPKESATDTNVTGLERPFKKKKLKINVNRPSGTRVKYDDEGNAIPPLASVAEEVSLEPVVHKDKISQRYAEMLREMQKHDKEDKLEHKKTLREKKLQKKMKLKRKRQEDTGAGSEEDSGSESDRGQDTANKGKKRYFNSDDEDNDAAKDGDVLAQQEALALKLLSNMHS

SEQ ID NO: 36827 - DNA, 438 bp, Zea mays subsp. mays
  misc_feature (1)..(438): Ceres Seq. ID no. 4776856
tcatctctagcctgcgccgccgcctccaccgcaccccccaaaaccctagcgctcgcttcgccccgccccaccaccatggccggcgcgcaggagtccctcgtctacgccggtgtgatgcgcggccacaacgacgtggtcacggccatcgcgacgcccatcgacaactcgcccttcatcgtctcctcttcccgcgacaagtcgctgctcgtctgggacctcaccaaccccatccaggccacccaggactccagctccgagtacggcgtccccttccgccgcctcaccggccacggccactttgtccaggacgtcgtcctcagctccgacggccagttcgcgctctccggatcctgggacggcgagctccgcctctgggacctctccaccggggtcaccacccgccgcttcgtcggccacgagaaggacgtcctctccgtc

SEQ ID NO: 36828 - protein, 146 aa, Zea mays subsp. mays
  peptide (1)..(146): Ceres Seq. ID no. 4776857
  misc_feature (26)..(145): NCBI GI NO: 34911282 NR Description: guanine nucleotide-binding protein beta subujit-like protein
  misc_feature (29)..(145): NCBI GI NO: 4589836 NR Description: LeArcA2 protein [Lycopersicon esculentum]
  misc_feature (29)..(145): NCBI GI NO: 7446126 NR Description: GTP-binding protein beta chain homolog
  misc_feature (29)..(145): NCBI GI NO: 4589834 NR Description: LeArcA1 protein [Lycopersicon esculentum]
  misc_feature (29)..(145): NCBI GI NO: 3023851 NR Description: Guanine nucleotide-binding protein beta subunit-like protein
  misc_feature (31)..(145): NCBI GI NO: 15229589 NR Description: protein kinase C-receptor/G-protein, putative
  misc_feature (29)..(145): NCBI GI NO: 1346110 NR Description: GUANINE NUCLEOTIDE-BINDING PROTEIN BETA SUBUNIT-LIKE PROTEIN
  misc_feature (31)..(145): NCBI GI NO: 3023847 NR Description: GUANINE NUCLEOTIDE-BINDING PROTEIN BETA SUBUNIT-LIKE PROTEIN
  misc_feature (31)..(145): NCBI GI NO: 3023857 NR Description: GUANINE NUCLEOTIDE-BINDING PROTEIN BETA SUBUNIT-LIKE PROTEIN
  misc_feature (31)..(145): NCBI GI NO: 3023858 NR Description: GUANINE NUCLEOTIDE-BINDING PROTEIN BETA SUBUNIT-LIKE PROTEIN
SSLACAAASTAPPKTLALASPRPTTMAGAQESLVYAGVMRGHNDVVTAIATPIDNSPFIVSSSRDKSLLVWDLTNPIQATQDSSSEYGVPFRRLTGHGHFVQDVVLSSDGQFALSGSWDGELRLWDLSTGVTTRRFVGHEKDVLSV

SEQ ID NO: 36829 - protein, 145 aa, Zea mays subsp. mays
  peptide (1)..(145): Ceres Seq. ID no. 4776858
ISSLRRRLHRTPQNPSARFAPPHHHGRRAGVPRLRRCDARPQRRGHGHRDAHRQLALHRLLFPRQVAARLGPHQPHPGHPGLQLRVRRPLPPPHRPRPLCPGRRPQLRRPVRALRILGRRAPPLGPLHRGHHPPLRRPREGRPLR

SEQ ID NO: 36830 - protein, 121 aa, Zea mays subsp. mays
  peptide (1)..(121): Ceres Seq. ID no. 4776859
  misc_feature (1)..(120): NCBI GI NO: 34911282 NR Description: guanine nucleotide-binding protein beta subujit-like protein
  misc_feature (4)..(120): NCBI GI NO: 4589836 NR Description: LeArcA2 protein [Lycopersicon esculentum]
  misc_feature (4)..(120): NCBI GI NO: 7446126 NR Description: GTP-binding protein beta chain homolog
  misc_feature (4)..(120): NCBI GI NO: 4589834 NR Description: LeArcA1 protein [Lycopersicon esculentum]
  misc_feature (4)..(120): NCBI GI NO: 3023851 NR Description: Guanine nucleotide-binding protein beta subunit-like protein
  misc_feature (6)..(120): NCBI GI NO: 15229589 NR Description: protein kinase C-receptor/G-protein, putative
  misc_feature (4)..(120): NCBI GI NO: 1346110 NR Description: GUANINE NUCLEOTIDE-BINDING PROTEIN BETA SUBUNIT-LIKE PROTEIN
  misc_feature (6)..(120): NCBI GI NO: 3023847 NR Description: GUANINE NUCLEOTIDE-BINDING PROTEIN BETA SUBUNIT-LIKE PROTEIN
  misc_feature (6)..(120): NCBI GI NO: 3023857 NR Description: GUANINE NUCLEOTIDE-BINDING PROTEIN BETA SUBUNIT-LIKE PROTEIN
  misc_feature (6)..(120): NCBI GI NO: 3023858 NR Description: GUANINE NUCLEOTIDE-BINDING PROTEIN BETA SUBUNIT-LIKE PROTEIN
MAGAQESLVYAGVMRGHNDVVTAIATPIDNSPFIVSSSRDKSLLVWDLTNPIQATQDSSSEYGVPFRRLTGHGHFVQDVVLSSDGQFALSGSWDGELRLWDLSTGVTTRRFVGHEKDVLSV

SEQ ID NO: 36831 - DNA, 432 bp, Zea mays subsp. mays
  misc_feature (1)..(432): Ceres Seq. ID no. 4776740
attttctttcgatcgtctcgcatcgacttttattagggttttcgtttcctgagagatcaatcaatcaatcgatatggcttccctagattccgacgtaaacatgatccctgctggtgaatcctccagctccgttgccgcttcttcgtcgagcaagaaggccaagagattcgaagttaagaagtggagcgccgtggctctctgggcttgggatatcgttgttgacaattgcgccatctgcagaaaccacatcatggatctctgtattgaatgtcaggctaatcaggccagcgctacgagtgaggaatgcactgttgcttggggggtttgcaatcacgccttccactttcactgcatcagcagatggttaaagactcgtcaagtttgcccattggataacagtgagtgggagttccagaaatatggtcactaaat

SEQ ID NO: 36832 - protein, 118 aa, Zea mays subsp. mays
  peptide (1)..(118): Ceres Seq. ID no. 4776741
  misc_feature (85)..(106): Pfam Name: RING finger Pfam Description: Zinc finger, C3HC4 type
  misc_feature (1)..(118): NCBI GI NO: 18420256 NR Description: ring-box protein - like; protein id: At5g20570
  misc_feature (4)..(118): NCBI GI NO: 31747517 NR Description: ring box protein [Populus tomentosa]
  misc_feature (1)..(118): NCBI GI NO: 15229164 NR Description: ring-box protein Roc1/Rbx1/Hrt1, putative
  misc_feature (21)..(118): NCBI GI NO: 19387246 NR Description: putative ring box-1 protein
  misc_feature (8)..(118): NCBI GI NO: 19067884 NR Description: hyperosmotic protein 21 [Salmo salar]
  misc_feature (9)..(118): NCBI GI NO: 31210271 NR Description: ENSANGP00000010437 [Anopheles gambiae]
  misc_feature (15)..(118): NCBI GI NO: 18543187 NR Description: CG16982-PA [Drosophila melanogaster]
  misc_feature (21)..(118): NCBI GI NO: 37537963 NR Description: RING-box protein 1
  misc_feature (8)..(118): NCBI GI NO: 32425477 NR Description: RBX1 protein [Homo sapiens]
  misc_feature (21)..(118): NCBI GI NO: 7657508 NR Description: ring-box 1
MASLDSDVNMIPAGESSSSVAASSSSKKAKRFEVKKWSAVALWAWDIVVDNCAICRNHIMDLCIECQANQASATSEECTVAWGVCNHAFHFHCISRWLKTRQVCPLDNSEWEFQKYGH

SEQ ID NO: 36833 - protein, 109 aa, Zea mays subsp. mays
  peptide (1)..(109): Ceres Seq. ID no. 4776742
  misc_feature (76)..(97): Pfam Name: RING finger Pfam Description: Zinc finger, C3HC4 type
  misc_feature (1)..(109): NCBI GI NO: 18420256 NR Description: ring-box protein - like; protein id: At5g20570
  misc_feature (1)..(109): NCBI GI NO: 31747517 NR Description: ring box protein [Populus tomentosa]
  misc_feature (1)..(109): NCBI GI NO: 15229164 NR Description: ring-box protein Roc1/Rbx1/Hrt1, putative
  misc_feature (12)..(109): NCBI GI NO: 19387246 NR Description: putative ring box-1 protein
  misc_feature (1)..(109): NCBI GI NO: 19067884 NR Description: hyperosmotic protein 21 [Salmo salar]
  misc_feature (1)..(109): NCBI GI NO: 31210271 NR Description: ENSANGP00000010437 [Anopheles gambiae]
  misc_feature (6)..(109): NCBI GI NO: 18543187 NR Description: CG16982-PA [Drosophila melanogaster]
  misc_feature (12)..(109): NCBI GI NO: 37537963 NR Description: RING-box protein 1
  misc_feature (1)..(109): NCBI GI NO: 32425477 NR Description: RBX1 protein [Homo sapiens]
  misc_feature (12)..(109): NCBI GI NO: 7657508 NR Description: ring-box 1
MIPAGESSSSVAASSSSKKAKRFEVKKWSAVALWAWDIVVDNCAICRNHIMDLCIECQANQASATSEECTVAWGVCNHAFHFHCISRWLKTRQVCPLDNSEWEFQKYGH

SEQ ID NO: 36834 - protein, 59 aa, Zea mays subsp. mays
  peptide (1)..(59): Ceres Seq. ID no. 4776743
  misc_feature (26)..(47): Pfam Name: RING finger Pfam Description: Zinc finger, C3HC4 type
  misc_feature (1)..(59): NCBI GI NO: 18420256 NR Description: ring-box protein - like; protein id: At5g20570
  misc_feature (1)..(59): NCBI GI NO: 31747517 NR Description: ring box protein [Populus tomentosa]
  misc_feature (1)..(59): NCBI GI NO: 15229164 NR Description: ring-box protein Roc1/Rbx1/Hrt1, putative
  misc_feature (1)..(59): NCBI GI NO: 19387246 NR Description: putative ring box-1 protein
  misc_feature (1)..(59): NCBI GI NO: 19067884 NR Description: hyperosmotic protein 21 [Salmo salar]
  misc_feature (1)..(59): NCBI GI NO: 31210271 NR Description: ENSANGP00000010437 [Anopheles gambiae]
  misc_feature (1)..(59): NCBI GI NO: 18543187 NR Description: CG16982-PA [Drosophila melanogaster]
  misc_feature (1)..(59): NCBI GI NO: 37537963 NR Description: RING-box protein 1
  misc_feature (1)..(59): NCBI GI NO: 32425477 NR Description: RBX1 protein [Homo sapiens]
  misc_feature (1)..(59): NCBI GI NO: 7657508 NR Description: ring-box 1
MDLCIECQANQASATSEECTVAWGVCNHAFHFHCISRWLKTRQVCPLDNSEWEFQKYGH

SEQ ID NO: 36835 - DNA, 469 bp, Zea mays subsp. mays
  misc_feature (1)..(469): Ceres Seq. ID no. 4776593
  misc_feature (401)..(401): n is a, c, t, g, unknown, or other
atcaatctcatcacccaccaccaaacacaatccaagccaatcccaccggagagaagagaagatgtcgggccgcggcaagggaggcaaggggctgggcaagggcggcgccaagcgccaccggaaggtgctgcgcgacaacatccagggcatcaccaagccggcgatccgccgtcttgcgcggcgtggcggcgtgaagcgcatctcggggctcatctacgaggagacccgcggcgtgctcaagatcttcctcgagaacgtcatccgcgacgccgtcacctacaccgagcacgcccgccgcaagaccgtcaccgccatggacgtcgtctacgcgctcaagcgccagggccgcaccctctacggattcggcggctaggccgagggcccagccagctcgcgacgcngccgtccggcagagtagtggtatctatctagttgctgtctagggttcgtggttctccttgtatgtcgc

SEQ ID NO: 36836 - protein, 143 aa, Zea mays subsp. mays
  peptide (1)..(143): Ceres Seq. ID no. 4776594
  misc_feature (134)..(134): Xaa is any aa, unknown or other
INLITHHQTQSKPIPPERREDVGPRQGRQGAGQGRRQAPPEGAARQHPGHHQAGDPPSCAAWRREAHLGAHLRGDPRRAQDLPRERHPRRRHLHRARPPQDRHRHGRRLRAQAPGPHPLRIRRLGRGPSQLATXPSGRVVVSI

SEQ ID NO: 36837 - protein, 123 aa, Zea mays subsp. mays
  peptide (1)..(123): Ceres Seq. ID no. 4776595
  misc_feature (6)..(123): NCBI GI NO: 34858262 NR Description: similar to germinal histone H4 gene
  misc_feature (14)..(123): NCBI GI NO: 34876368 NR Description: similar to germinal histone H4 gene
  misc_feature (21)..(123): NCBI GI NO: 15226944 NR Description: histone H4; protein id: At2g28740
  misc_feature (10)..(123): NCBI GI NO: 31195755 NR Description: ENSANGP00000000125 [Anopheles gambiae]
  misc_feature (21)..(123): NCBI GI NO: 462243 NR Description: Histone H4
  misc_feature (21)..(123): NCBI GI NO: 1806283 NR Description: Histone H4 homologue [Sesbania rostrata]
  misc_feature (21)..(123): NCBI GI NO: 4504301 NR Description: H4 histone family, member A [Homo sapiens]
  misc_feature (21)..(123): NCBI GI NO: 27692935 NR Description: Similar to germinal histone H4 gene [Mus musculus]
  misc_feature (21)..(123): NCBI GI NO: 27692960 NR Description: Similar to germinal histone H4 gene [Mus musculus]
  misc_feature (21)..(123): NCBI GI NO: 37590121 NR Description: Hist1h4h protein [Mus musculus]
SISSPTTKHNPSQSHRREEKMSGRGKGGKGLGKGGAKRHRKVLRDNIQGITKPAIRRLARRGGVKRISGLIYEETRGVLKIFLENVIRDAVTYTEHARRKTVTAMDVVYALKRQGRTLYGFGG

SEQ ID NO: 36838 - protein, 103 aa, Zea mays subsp. mays; identical to SEQ ID NO: 1499
  peptide (1)..(103): Ceres Seq. ID no. 4776596
  misc_feature (1)..(103): NCBI GI NO: 34858262 NR Description: similar to germinal histone H4 gene
  misc_feature (1)..(103): NCBI GI NO: 34876368 NR Description: similar to germinal histone H4 gene
  misc_feature (1)..(103): NCBI GI NO: 15226944 NR Description: histone H4; protein id: At2g28740
  misc_feature (1)..(103): NCBI GI NO: 31195755 NR Description: ENSANGP00000000125 [Anopheles gambiae]
  misc_feature (1)..(103): NCBI GI NO: 462243 NR Description: Histone H4
  misc_feature (1)..(103): NCBI GI NO: 1806283 NR Description: Histone H4 homologue [Sesbania rostrata]
  misc_feature (1)..(103): NCBI GI NO: 4504301 NR Description: H4 histone family, member A [Homo sapiens]
  misc_feature (1)..(103): NCBI GI NO: 27692935 NR Description: Similar to germinal histone H4 gene [Mus musculus]
  misc_feature (1)..(103): NCBI GI NO: 27692960 NR Description: Similar to germinal histone H4 gene [Mus musculus]
  misc_feature (1)..(103): NCBI GI NO: 37590121 NR Description: Hist1h4h protein [Mus musculus]

SEQ ID NO: 36839 - DNA, 1592 bp, Zea mays subsp. mays
  misc_feature (1)..(1592): Ceres Seq. ID no. 13587253
aatgataattattggagcaagaaaaaagatacttatctactaaggtgaacataaaaacatttttcttccatgtcatctatatttaggtgaaaatacaagtcaattaaccatgcttagtagaacctatcagcaagcagccgcgcagagattatgattatccataatctattgaggtcaatgatgctggatccttccagttagatagctatcatcttcagtctttttcatctcactatagtattttgagggtccagttgctcgcttaactcaattccaaggtgtcaaaaatctattattttccaaattttactgaaacttgtaattttttgcatatgccaggaggagctagtggcattggtctggagacatcaagagtcttccgctgagaggagcccatgtggtcatcgctgctagaaacacagaagctgcatcagaagcaagaaagaccatcatggagaagaacccaacggcacgtattgatgttctgaagctagacctcagctccctcaagtctgtcagggcttttgtggaccagttcaactcgatcaaactccctctgaacatcctgatgtaaccctattcacctcttgttcatgcttgttttttattttcatatatatgaaagtttcctttgatttcgttgaatctatctccagcatatacgtattattacttttagcgcttgttttttttcattcatatatatgaaagtttcctttgcttgttttttctttcatatatatgaaagtttccgcctattttagcgctttcctctttgcactggatcaaggcttgagggaatccttttctgttccacagaaataatgcaggcgtcatgttttgcccttttcagctgtctaaagacggggtcgagatgcagtttgcgacaaatcatctaggtattctctcactgacagcatgacttgcttgaaattgtttttttatcaggacactttctgcttaccaatctcctccttgataccatgaaggccactgccaagtctacgggtattgagggccgcattgtgaatttgtcatcagtcgcccaccaccatacgtatccgaagggaattgacttcgataacctcaatgatgagaaaatgtatgtgcgtttatggttctgctttgtaggaattgtctgttgattgaactgcaagtaatgatcttttattaacttgcagatacaacgacaaaatggcttatggacagtctaagctggcgaacttgctgcatgcgaaggagctctctagaaggctgaaggtatttttttcagggtatcctaatagtattatccatgtctgttactctttcgggaagggtagaaacctgaagagaaacaatttgtccatcatggccctaatgctctgtcctgcttcactgtcatgacgcactaactatataaggggcacccagtaagcaatggccattgcgaactttgggatttagataacttcggaacctttgggatcttgatacatatcagtgtgacttgcagagatgatatgatctcgttcccttttacctatgtatgaaaatccatggttctgatgcatgcctacactggttaaaactctgaaacctactcctggttc

SEQ ID NO: 36840 - protein, 63 aa, Zea mays subsp. mays
  peptide (1)..(63): Ceres Seq. ID no. 13587254
  misc_feature (1)..(22): NCBI GI NO: 34895876 NR Description: P0009G03.18
  misc_feature (1)..(22): NCBI GI NO: 15224306 NR Description: short-chain dehydrogenase/reductase family protein
  misc_feature (1)..(22): NCBI GI NO: 11250521 NR Description: hypothetical protein T22P11
  misc_feature (1)..(22): NCBI GI NO: 629592 NR Description: hypothetical protein - rape
  misc_feature (1)..(22): NCBI GI NO: 18413950 NR Description: short-chain dehydrogenase/reductase family protein
  misc_feature (1)..(22): NCBI GI NO: 20260302 NR Description: putative protein [Arabidopsis thaliana]
  misc_feature (1)..(22): NCBI GI NO: 21554820 NR Description: putativepod-specific dehydrogenase SAC25
  misc_feature (1)..(22): NCBI GI NO: 24762219 NR Description: unknown protein [Arabidopsis thaliana]
  misc_feature (1)..(22): NCBI GI NO: 7485551 NR Description: hypothetical protein F16G20
  misc_feature (1)..(22): NCBI GI NO: 30686197 NR Description: short-chain dehydrogenase/reductase family protein
MAYGQSKLANLLHAKELSRRLKVFFSGYPNSIIHVCYSFGKGRNLKRNNLSIMALMLCPASLS

SEQ ID NO: 36841 - protein, 53 aa, Zea mays subsp. mays
  peptide (1)..(53): Ceres Seq. ID no. 13587255
  misc_feature (1)..(41): NCBI GI NO: 34895876 NR Description: P0009G03.18
  misc_feature (1)..(41): NCBI GI NO: 15224306 NR Description: short-chain dehydrogenase/reductase family protein
  misc_feature (1)..(37): NCBI GI NO: 11250521 NR Description: hypothetical protein T22P11
  misc_feature (1)..(41): NCBI GI NO: 629592 NR Description: hypothetical protein - rape
  misc_feature (1)..(37): NCBI GI NO: 18413950 NR Description: short-chain dehydrogenase/reductase family protein
  misc_feature (1)..(37): NCBI GI NO: 21554820 NR Description: putativepod-specific dehydrogenase SAC25
  misc_feature (1)..(37): NCBI GI NO: 20260302 NR Description: putative protein [Arabidopsis thaliana]
  misc_feature (1)..(41): NCBI GI NO: 24762219 NR Description: unknown protein [Arabidopsis thaliana]
  misc_feature (1)..(41): NCBI GI NO: 7485551 NR Description: hypothetical protein F16G20
  misc_feature (1)..(41): NCBI GI NO: 30686197 NR Description: short-chain dehydrogenase/reductase family protein
MKATAKSTGIEGRIVNLSSVAHHHTYPKGIDFDNLNDEKMYVRLWFCFVGIVC

SEQ ID NO: 36842 - protein, 40 aa, Zea mays subsp. mays
  peptide (1)..(40): Ceres Seq. ID no. 13587256
  misc_feature (1)..(40): NCBI GI NO: 34895876 NR Description: P0009G03.18
  misc_feature (1)..(40): NCBI GI NO: 15224306 NR Description: short-chain dehydrogenase/reductase family protein
  misc_feature (1)..(40): NCBI GI NO: 11250521 NR Description: hypothetical protein T22P11
  misc_feature (1)..(40): NCBI GI NO: 629592 NR Description: hypothetical protein - rape
  misc_feature (1)..(40): NCBI GI NO: 18413950 NR Description: short-chain dehydrogenase/reductase family protein
  misc_feature (1)..(40): NCBI GI NO: 21554820 NR Description: putativepod-specific dehydrogenase SAC25
  misc_feature (1)..(40): NCBI GI NO: 20260302 NR Description: putative protein [Arabidopsis thaliana]
  misc_feature (1)..(40): NCBI GI NO: 24762219 NR Description: unknown protein [Arabidopsis thaliana]
  misc_feature (1)..(40): NCBI GI NO: 7485551 NR Description: hypothetical protein F16G20
  misc_feature (1)..(40): NCBI GI NO: 30686197 NR Description: short-chain dehydrogenase/reductase family protein
MEKNPTARIDVLKLDLSSLKSVRAFVDQFNSIKLPLNILM

SEQ ID NO: 36843 - DNA, 474 bp, Zea mays subsp. mays
  misc_feature (1)..(474): Ceres Seq. ID no. 4776511
agcctccatctctctctccctctctctcgcgcctcctcctcccccctgcaggaagctcgtcgggatgtcgtccgaggcggcgaaggtggtggtgccggagtcggtgctcctcaagaggaagcgggaggagctctgggccgccgagaagaagaccaaggccgtcgaggagaagaagaagtccagcgagaacgtcaaggtcatctacgcccgcgccaagcagtacgccgaggagtacgatgcccaggacaaggagttggttcagcttaagcgtgaggcccggatgaagggtgggttctatgtcagtcctgaggctaagctgctgtttgttgtcagaatcagaggtatcaatgccatgcacccaaagaccaagaagatcttgcagctgttgcgtttgagacagatattcaatggagtgttcctgaaggttaacaaggccaccatcaacatgctccgcagggtcgagccatatgttgc

SEQ ID NO: 36844 - protein, 157 aa, Zea mays subsp. mays
  peptide (1)..(157): Ceres Seq. ID no. 4776512
  misc_feature (105)..(156): Pfam Name: Pfam Description:  Ribosomal protein L30p/L7e
  misc_feature (22)..(156): NCBI GI NO: 38346542 NR Description: OSJNBa0035M09.3
  misc_feature (22)..(156): NCBI GI NO: 38637548 NR Description: putative 60S ribosomal protein L7
  misc_feature (27)..(156): NCBI GI NO: 15226212 NR Description: putative ribosomal protein L7
  misc_feature (20)..(156): NCBI GI NO: 30689623 NR Description: 60S ribosomal protein L7 (RPL7C)
  misc_feature (29)..(156): NCBI GI NO: 445613 NR Description: ribosomal protein L7
  misc_feature (22)..(156): NCBI GI NO: 15231288 NR Description: ribosomal protein, putative; protein id:At3g13580
  misc_feature (27)..(156): NCBI GI NO: 27311547 NR Description: Unknown protein [Arabidopsis thaliana]
  misc_feature (27)..(156): NCBI GI NO: 30689617 NR Description: 60S ribosomal protein L7 (RPL7C)
  misc_feature (31)..(156): NCBI GI NO: 28630259 NR Description: ribosomal protein L7 [Branchiostoma lanceolatum]
  misc_feature (21)..(156): NCBI GI NO: 22758864 NR Description: ribosomal protein L7 [Argopecten irradians]
ASISLSLSLAPPPPPCRKLVGMSSEAAKVVVPESVLLKRKREELWAAEKKTKAVEEKKKSSENVKVIYARAKQYAEEYDAQDKELVQLKREARMKGGFYVSPEAKLLFVVRIRGINAMHPKTKKILQLLRLRQIFNGVFLKVNKATINMLRRVEPYV

SEQ ID NO: 36845 - protein, 136 aa, Zea mays subsp. mays
  peptide (1)..(136): Ceres Seq. ID no. 4776513
  misc_feature (84)..(135): Pfam Name: Pfam Description:  Ribosomal protein L30p/L7e
  misc_feature (1)..(135): NCBI GI NO: 38346542 NR Description: OSJNBa0035M09.3
  misc_feature (1)..(135): NCBI GI NO: 38637548 NR Description: putative 60S ribosomal protein L7
  misc_feature (6)..(135): NCBI GI NO: 15226212 NR Description: putative ribosomal protein L7
  misc_feature (1)..(135): NCBI GI NO: 30689623 NR Description: 60S ribosomal protein L7 (RPL7C)
  misc_feature (8)..(135): NCBI GI NO: 445613 NR Description: ribosomal protein L7
  misc_feature (1)..(135): NCBI GI NO: 15231288 NR Description: ribosomal protein, putative; protein id:At3g13580
  misc_feature (6)..(135): NCBI GI NO: 27311547 NR Description: Unknown protein [Arabidopsis thaliana]
  misc_feature (6)..(135): NCBI GI NO: 30689617 NR Description: 60S ribosomal protein L7 (RPL7C)
  misc_feature (10)..(135): NCBI GI NO: 28630259 NR Description: ribosomal protein L7 [Branchiostoma lanceolatum]
  misc_feature (1)..(135): NCBI GI NO: 22758864 NR Description: ribosomal protein L7 [Argopecten irradians]
MSSEAAKVVVPESVLLKRKREELWAAEKKTKAVEEKKKSSENVKVIYARAKQYAEEYDAQDKELVQLKREARMKGGFYVSPEAKLLFVVRIRGINAMHPKTKKILQLLRLRQIFNGVFLKVNKATINMLRRVEPYV

SEQ ID NO: 36846 - protein, 93 aa, Zea mays subsp. mays
  peptide (1)..(93): Ceres Seq. ID no. 4776514
PPSLSPSLSRLLLPPAGSSSGCRPRRRRWWCRSRCSSRGSGRSSGPPRRRPRPSRRRRSPARTSRSSTPAPSSTPRSTMPRTRSWFSLSVRPG

SEQ ID NO: 36847 - DNA, 481 bp, Zea mays subsp. mays
  misc_feature (1)..(481): Ceres Seq. ID no. 13587099
  misc_feature (322)..(322): n is a, c, t, g, unknown, or other
  misc_feature (320)..(320): n is a, c, t, g, unknown, or other
  misc_feature (323)..(323): n is a, c, t, g, unknown, or other
  misc_feature (321)..(321): n is a, c, t, g, unknown, or other
accgcggcagtcgcctcccctcctacaaataacccccgaccctccacgaggacgggagtaccttctgcagcaagtagtgaccaggagcgagcagccaaggaaaggagtcaagcaatggagaaggccgtcgacaggcagcgggtcctgctgcggcacctgaaccccgccgcggcggccagccccgccccgcacgccatctccgcaagcgcgtgcgcggcgggggacagcgcggcgtaccaccggaggccggccttcgccgacgacgtcgtcatcgtcgctgcttacaggacggcaatttgcaaggccaagagagggggttnnnnggatacctttgctgaggacctcttggttcctgtcttcaaggctttggtagacaagacgaagctggacccaagtgaagttggcgacattgttgttggtactggcttagctcctggttcccagagggcaatcaaatgcagaatggctgcactgtatgctg

SEQ ID NO: 36848 - protein, 160 aa, Zea mays subsp. mays
  peptide (1)..(160): Ceres Seq. ID no. 13587100
  misc_feature (86)..(159): Pfam Name: Pfam Description:  Thiolase, N-terminal domain
  misc_feature (39)..(159): NCBI GI NO: 37535022 NR Description: putative thiolase
  misc_feature (39)..(159): NCBI GI NO: 393707 NR Description: 3-ketoacyl-CoA thiolase
  misc_feature (39)..(159): NCBI GI NO: 1129145 NR Description: 3-ketoacyl-CoA thiolase B
  misc_feature (39)..(159): NCBI GI NO: 7433645 NR Description: acetyl-CoA C-acyltransferase (EC 2
  misc_feature (39)..(159): NCBI GI NO: 29367431 NR Description: 3-ketoacyl-CoA thiolase-like protein
  misc_feature (39)..(159): NCBI GI NO: 7433647 NR Description: acetyl-CoA C-acyltransferase (EC 2
  misc_feature (39)..(159): NCBI GI NO: 15225798 NR Description: acetyl-CoA C-acyltransferase
  misc_feature (39)..(159): NCBI GI NO: 16648799 NR Description: At2g33150/F25I18.11 [Arabidopsis thaliana]
  misc_feature (39)..(159): NCBI GI NO: 421810 NR Description: acetyl-CoA C-acyltransferase (EC 2
  misc_feature (39)..(159): NCBI GI NO: 7433644 NR Description: acetyl-CoA C-acyltransferase (EC 2
  misc_feature (107)..(107): Xaa is any aa, unknown or other
  misc_feature (108)..(108): Xaa is any aa, unknown or other
TAAVASPPTNNPRPSTRTGVPSAASSDQERAAKERSQAMEKAVDRQRVLLRHLNPAAAASPAPHAISASACAAGDSAAYHRRPAFADDVVIVAAYRTAICKAKRGGXXDTFAEDLLVPVFKALVDKTKLDPSEVGDIVVGTGLAPGSQRAIKCRMAALYA

SEQ ID NO: 36849 - protein, 122 aa, Zea mays subsp. mays
  peptide (1)..(122): Ceres Seq. ID no. 13587101
  misc_feature (48)..(121): Pfam Name: Pfam Description:  Thiolase, N-terminal domain
  misc_feature (1)..(121): NCBI GI NO: 37535022 NR Description: putative thiolase
  misc_feature (1)..(121): NCBI GI NO: 393707 NR Description: 3-ketoacyl-CoA thiolase
  misc_feature (1)..(121): NCBI GI NO: 1129145 NR Description: 3-ketoacyl-CoA thiolase B
  misc_feature (1)..(121): NCBI GI NO: 7433645 NR Description: acetyl-CoA C-acyltransferase (EC 2
  misc_feature (1)..(121): NCBI GI NO: 29367431 NR Description: 3-ketoacyl-CoA thiolase-like protein
  misc_feature (1)..(121): NCBI GI NO: 7433647 NR Description: acetyl-CoA C-acyltransferase (EC 2
  misc_feature (1)..(121): NCBI GI NO: 15225798 NR Description: acetyl-CoA C-acyltransferase
  misc_feature (1)..(121): NCBI GI NO: 16648799 NR Description: At2g33150/F25I18.11 [Arabidopsis thaliana]
  misc_feature (1)..(121): NCBI GI NO: 421810 NR Description: acetyl-CoA C-acyltransferase (EC 2
  misc_feature (1)..(121): NCBI GI NO: 7433644 NR Description: acetyl-CoA C-acyltransferase (EC 2
  misc_feature (69)..(69): Xaa is any aa, unknown or other
  misc_feature (70)..(70): Xaa is any aa, unknown or other
MEKAVDRQRVLLRHLNPAAAASPAPHAISASACAAGDSAAYHRRPAFADDVVIVAAYRTAICKAKRGGXXDTFAEDLLVPVFKALVDKTKLDPSEVGDIVVGTGLAPGSQRAIKCRMAALYA

SEQ ID NO: 36850 - DNA, 2512 bp, Zea mays subsp. mays; identical to SEQ ID NO: 22485
  misc_feature (1)..(2512): Ceres Seq. ID no. 13623192

SEQ ID NO: 36851 - protein, 471 aa, Zea mays subsp. mays; identical to SEQ ID NO: 22486
  peptide (1)..(471): Ceres Seq. ID no. 13623193
  misc_feature (1)..(161): Pfam Name: Pfam Description:  ABC transporter
  misc_feature (1)..(471): NCBI GI NO: 28071305 NR Description: putative ABC transporter
  misc_feature (1)..(471): NCBI GI NO: 15239436 NR Description: ABC transporter family protein
  misc_feature (1)..(422): NCBI GI NO: 7573600 NR Description: ABC transporter homolog [Populus nigra]
  misc_feature (1)..(468): NCBI GI NO: 28436765 NR Description: Similar to ATP-binding cassette, sub-family F
  misc_feature (1)..(466): NCBI GI NO: 27707592 NR Description: similar to ATP-binding cassette
  misc_feature (1)..(466): NCBI GI NO: 3005931 NR Description: ABC transporter [Homo sapiens]
  misc_feature (1)..(466): NCBI GI NO: 10947137 NR Description: ATP-binding cassette
  misc_feature (1)..(466): NCBI GI NO: 10179834 NR Description: iron inhibited ABC transporter 2 [Homo sapiens]
  misc_feature (1)..(466): NCBI GI NO: 27881506 NR Description: ATP-binding cassette
  misc_feature (1)..(466): NCBI GI NO: 23956078 NR Description: ATP-binding cassette, sub-family F

SEQ ID NO: 36852 - protein, 457 aa, Zea mays subsp. mays; identical to SEQ ID NO: 22487
  peptide (1)..(457): Ceres Seq. ID no. 13623194
  misc_feature (1)..(147): Pfam Name: Pfam Description:  ABC transporter
  misc_feature (1)..(457): NCBI GI NO: 28071305 NR Description: putative ABC transporter
  misc_feature (1)..(457): NCBI GI NO: 15239436 NR Description: ABC transporter family protein
  misc_feature (1)..(408): NCBI GI NO: 7573600 NR Description: ABC transporter homolog [Populus nigra]
  misc_feature (1)..(454): NCBI GI NO: 28436765 NR Description: Similar to ATP-binding cassette, sub-family F
  misc_feature (1)..(452): NCBI GI NO: 27707592 NR Description: similar to ATP-binding cassette
  misc_feature (1)..(452): NCBI GI NO: 3005931 NR Description: ABC transporter [Homo sapiens]
  misc_feature (1)..(452): NCBI GI NO: 10947137 NR Description: ATP-binding cassette
  misc_feature (1)..(452): NCBI GI NO: 27881506 NR Description: ATP-binding cassette
  misc_feature (1)..(452): NCBI GI NO: 10179834 NR Description: iron inhibited ABC transporter 2 [Homo sapiens]
  misc_feature (1)..(452): NCBI GI NO: 23956078 NR Description: ATP-binding cassette, sub-family F

SEQ ID NO: 36853 - protein, 413 aa, Zea mays subsp. mays; identical to SEQ ID NO: 22488
  peptide (1)..(413): Ceres Seq. ID no. 13623195
  misc_feature (1)..(103): Pfam Name: Pfam Description:  ABC transporter
  misc_feature (1)..(413): NCBI GI NO: 28071305 NR Description: putative ABC transporter
  misc_feature (1)..(413): NCBI GI NO: 15239436 NR Description: ABC transporter family protein
  misc_feature (1)..(364): NCBI GI NO: 7573600 NR Description: ABC transporter homolog [Populus nigra]
  misc_feature (1)..(410): NCBI GI NO: 28436765 NR Description: Similar to ATP-binding cassette, sub-family F
  misc_feature (1)..(408): NCBI GI NO: 27707592 NR Description: similar to ATP-binding cassette
  misc_feature (1)..(408): NCBI GI NO: 3005931 NR Description: ABC transporter [Homo sapiens]
  misc_feature (1)..(408): NCBI GI NO: 10179834 NR Description: iron inhibited ABC transporter 2 [Homo sapiens]
  misc_feature (1)..(408): NCBI GI NO: 27881506 NR Description: ATP-binding cassette
  misc_feature (1)..(408): NCBI GI NO: 10947137 NR Description: ATP-binding cassette
  misc_feature (1)..(408): NCBI GI NO: 23956078 NR Description: ATP-binding cassette, sub-family F

SEQ ID NO: 36854 - DNA, 1802 bp, Zea mays subsp. mays
  misc_feature (1)..(1802): Ceres Seq. ID no. 13574390
gaaaaaaaggcaaaaaacatttaccttttttctatctgtatattatctgaataaatcaagaggaggaagaggggagggagcgagggagggggaggagtagcaaatccagactccatagcaaccagctcgcgagaaggggaaaagggggaggaagagcttcgcttgtgtattgattgctcgctgctccagtccctgcattcgtgccgtttttggcaagtaggtggcgtggcaagcatggtgccgggctatgactgcgccgcctccgtgctgctgtgcgcggaggacaacgctgctattctcggcctggacgacgatggggaggagtcctcctgggcggccgccgctacgccgccacgtgacaccgtcgccgccgccgccgccaccggggtcgccgtcgatgggattttgacggagttccccttgctctcggatgactgcgttgcgacgctcgtggagaaggaggtggagcacatgcccgcggaggggtacctccagaagctgcagcgacggcatggggacctggatttggccgccgtcaggaaggacgccatcgattggatttggaaggtcattgagcattacaatttcgcaccgttgactgccgttttgtctgtgaactacctcgatagattcctctccacgtatgagttccctgaaggcagagcttggatgactcagctcttggcagtggcttgcttgtctttggcttcgaaaatcgaagagacttttgtgccactccccttggatttgcaggtagcggaggcaaagtttgtttttgagggaaggaccataaaaaggatggagcttctggtgctaagcaccttaaagtggaggatgcatgctgttactgcttgctcatttgttgaatactttcttcataaattgagtgatcatggtgcaccctccttgcttgcacgctctcgctcttcggaccttgtcttgagcaccgctaaaggtgctgaattcgtggtattcagaccctccgagattgctgccagtgttgcacttgctgctatcggcgaatgcaggagttctgtaattgagagagctgctagtagctgcaaatatttggacaaggagagggttttaagatgccatgaaatgattcaagagaagattactgcgggaagcattgtcctaaagtctgctggatcatcaatctcctctgtgccacaaagcccaataggtgtcctggacgctgcagcctgtctgagtcaacaaagcgatgacgctactgtcgggtctcctgcagtatgttaccatagttcttccacaagcaagaggagaaggatcactagacgtctactctaattgtggtacgcttcaggtgtgctcctcaccgctctaggagtttttgattggttcaaacatcttaaatttagtttggccgctggaggattatggtttagtcaagtagttgctgaatggaacaacaaaacacgcacactacttggtccataaagacaagaaaataactggcagcgtcccgcgagccagcgctgcaatccagttcatgcaagaccctagagtccagggggggtgctggtgtaggtagagagggaacaaggcattcacatacgccgtagagatgagagagcctctcgtatgttttgtacttttgctccttcagtttgcaatgaactatataaacaaggattgccttggggcagtgaacatttgtcggatgaaaagaatcaaaaaggatgggggtcggcagaggaatagaacaatttgatatatttccataaactacagatatgtttcctttttcataatgatgagctatcatttttgttgatggt

SEQ ID NO: 36855 - protein, 358 aa, Zea mays subsp. mays
  peptide (1)..(358): Ceres Seq. ID no. 13574391
  misc_feature (67)..(202): Pfam Name: Pfam Description:  Cyclin, N-terminal domain
  misc_feature (1)..(358): NCBI GI NO: 19070611 NR Description: D-type cyclin [Zea mays]
  misc_feature (5)..(355): NCBI GI NO: 18916916 NR Description: cyclin [Oryza sativa (japonica cultivar-group)]
  misc_feature (1)..(337): NCBI GI NO: 19070615 NR Description: D-type cyclin [Zea mays]
  misc_feature (5)..(357): NCBI GI NO: 4160298 NR Description: cyclin D2.1 protein [Nicotiana tabacum]
  misc_feature (8)..(353): NCBI GI NO: 34906810 NR Description: D-type cyclin-like protein
  misc_feature (12)..(358): NCBI GI NO: 22091622 NR Description: cyclin D2 [Daucus carota]
  misc_feature (55)..(355): NCBI GI NO: 7484663 NR Description: cyclin D-like protein - red goosefoot
  misc_feature (64)..(348): NCBI GI NO: 1076312 NR Description: cyclin delta-2 - Arabidopsis thaliana
  misc_feature (64)..(348): NCBI GI NO: 15227224 NR Description: cyclin delta-2 (CYCD2) [Arabidopsis thaliana]
  misc_feature (65)..(334): NCBI GI NO: 15238462 NR Description: cyclin, putative [Arabidopsis thaliana]
MVPGYDCAASVLLCAEDNAAILGLDDDGEESSWAAAATPPRDTVAAAAATGVAVDGILTEFPLLSDDCVATLVEKEVEHMPAEGYLQKLQRRHGDLDLAAVRKDAIDWIWKVIEHYNFAPLTAVLSVNYLDRFLSTYEFPEGRAWMTQLLAVACLSLASKIEETFVPLPLDLQVAEAKFVFEGRTIKRMELLVLSTLKWRMHAVTACSFVEYFLHKLSDHGAPSLLARSRSSDLVLSTAKGAEFVVFRPSEIAASVALAAIGECRSSVIERAASSCKYLDKERVLRCHEMIQEKITAGSIVLKSAGSSISSVPQSPIGVLDAAACLSQQSDDATVGSPAVCYHSSSTSKRRRITRRLL

SEQ ID NO: 36856 - protein, 279 aa, Zea mays subsp. mays
  peptide (1)..(279): Ceres Seq. ID no. 13574392
  misc_feature (1)..(123): Pfam Name: Pfam Description:  Cyclin, N-terminal domain
  misc_feature (1)..(279): NCBI GI NO: 19070611 NR Description: D-type cyclin [Zea mays]
  misc_feature (1)..(276): NCBI GI NO: 18916916 NR Description: cyclin [Oryza sativa (japonica cultivar-group)]
  misc_feature (1)..(258): NCBI GI NO: 19070615 NR Description: D-type cyclin [Zea mays]
  misc_feature (1)..(278): NCBI GI NO: 4160298 NR Description: cyclin D2.1 protein [Nicotiana tabacum]
  misc_feature (1)..(274): NCBI GI NO: 34906810 NR Description: D-type cyclin-like protein
  misc_feature (1)..(279): NCBI GI NO: 22091622 NR Description: cyclin D2 [Daucus carota]
  misc_feature (1)..(276): NCBI GI NO: 7484663 NR Description: cyclin D-like protein - red goosefoot
  misc_feature (1)..(269): NCBI GI NO: 1076312 NR Description: cyclin delta-2 - Arabidopsis thaliana
  misc_feature (1)..(269): NCBI GI NO: 15227224 NR Description: cyclin delta-2 (CYCD2) [Arabidopsis thaliana]
  misc_feature (1)..(255): NCBI GI NO: 15238462 NR Description: cyclin, putative [Arabidopsis thaliana]
MPAEGYLQKLQRRHGDLDLAAVRKDAIDWIWKVIEHYNFAPLTAVLSVNYLDRFLSTYEFPEGRAWMTQLLAVACLSLASKIEETFVPLPLDLQVAEAKFVFEGRTIKRMELLVLSTLKWRMHAVTACSFVEYFLHKLSDHGAPSLLARSRSSDLVLSTAKGAEFVVFRPSEIAASVALAAIGECRSSVIERAASSCKYLDKERVLRCHEMIQEKITAGSIVLKSAGSSISSVPQSPIGVLDAAACLSQQSDDATVGSPAVCYHSSSTSKRRRITRRLL

SEQ ID NO: 36857 - protein, 213 aa, Zea mays subsp. mays
  peptide (1)..(213): Ceres Seq. ID no. 13574393
  misc_feature (1)..(57): Pfam Name: Pfam Description:  Cyclin, N-terminal domain
  misc_feature (1)..(213): NCBI GI NO: 19070611 NR Description: D-type cyclin [Zea mays]
  misc_feature (1)..(210): NCBI GI NO: 18916916 NR Description: cyclin [Oryza sativa (japonica cultivar-group)]
  misc_feature (1)..(192): NCBI GI NO: 19070615 NR Description: D-type cyclin [Zea mays]
  misc_feature (1)..(212): NCBI GI NO: 4160298 NR Description: cyclin D2.1 protein [Nicotiana tabacum]
  misc_feature (1)..(208): NCBI GI NO: 34906810 NR Description: D-type cyclin-like protein
  misc_feature (1)..(213): NCBI GI NO: 22091622 NR Description: cyclin D2 [Daucus carota]
  misc_feature (1)..(210): NCBI GI NO: 7484663 NR Description: cyclin D-like protein - red goosefoot
  misc_feature (1)..(203): NCBI GI NO: 1076312 NR Description: cyclin delta-2 - Arabidopsis thaliana
  misc_feature (1)..(203): NCBI GI NO: 15227224 NR Description: cyclin delta-2 (CYCD2) [Arabidopsis thaliana]
  misc_feature (1)..(189): NCBI GI NO: 15238462 NR Description: cyclin, putative [Arabidopsis thaliana]
MTQLLAVACLSLASKIEETFVPLPLDLQVAEAKFVFEGRTIKRMELLVLSTLKWRMHAVTACSFVEYFLHKLSDHGAPSLLARSRSSDLVLSTAKGAEFVVFRPSEIAASVALAAIGECRSSVIERAASSCKYLDKERVLRCHEMIQEKITAGSIVLKSAGSSISSVPQSPIGVLDAAACLSQQSDDATVGSPAVCYHSSSTSKRRRITRRLL

SEQ ID NO: 36858 - DNA, 1842 bp, Zea mays subsp. mays; identical to SEQ ID NO: 36343
  misc_feature (1)..(1842): Ceres Seq. ID no. 13574386

SEQ ID NO: 36859 - protein, 531 aa, Zea mays subsp. mays; identical to SEQ ID NO: 36344
  peptide (1)..(531): Ceres Seq. ID no. 13574387
  misc_feature (19)..(531): NCBI GI NO: 1709619 NR Description: Protein disulfide isomerase precursor (PDI)
  misc_feature (19)..(531): NCBI GI NO: 13925728 NR Description: protein disulfide isomerase 3 precursor
  misc_feature (19)..(531): NCBI GI NO: 13925726 NR Description: protein disulfide isomerase 2 precursor
  misc_feature (19)..(531): NCBI GI NO: 12056115 NR Description: protein disulfide isomerase
  misc_feature (19)..(531): NCBI GI NO: 1709620 NR Description: Protein disulfide isomerase precursor (PDI)
  misc_feature (19)..(531): NCBI GI NO: 1709617 NR Description: Protein disulfide isomerase precursor
  misc_feature (22)..(531): NCBI GI NO: 266743 NR Description: Protein disulfide isomerase precursor (PDI)
  misc_feature (22)..(531): NCBI GI NO: 99992 NR Description: protein disulfide-isomerase (EC 5
  misc_feature (20)..(506): NCBI GI NO: 11133775 NR Description: Protein disulfide isomerase precursor (PDI)
  misc_feature (29)..(506): NCBI GI NO: 11133818 NR Description: Protein disulfide isomerase precursor (PDI)

SEQ ID NO: 36860 - protein, 513 aa, Zea mays subsp. mays; identical to SEQ ID NO: 36345
  peptide (1)..(513): Ceres Seq. ID no. 13574388
  misc_feature (1)..(513): NCBI GI NO: 1709619 NR Description: Protein disulfide isomerase precursor (PDI)
  misc_feature (1)..(513): NCBI GI NO: 13925728 NR Description: protein disulfide isomerase 3 precursor
  misc_feature (1)..(513): NCBI GI NO: 13925726 NR Description: protein disulfide isomerase 2 precursor
  misc_feature (1)..(513): NCBI GI NO: 12056115 NR Description: protein disulfide isomerase
  misc_feature (1)..(513): NCBI GI NO: 1709620 NR Description: Protein disulfide isomerase precursor (PDI)
  misc_feature (1)..(513): NCBI GI NO: 1709617 NR Description: Protein disulfide isomerase precursor
  misc_feature (4)..(513): NCBI GI NO: 266743 NR Description: Protein disulfide isomerase precursor (PDI)
  misc_feature (4)..(513): NCBI GI NO: 99992 NR Description: protein disulfide-isomerase (EC 5
  misc_feature (2)..(488): NCBI GI NO: 11133775 NR Description: Protein disulfide isomerase precursor (PDI)
  misc_feature (11)..(488): NCBI GI NO: 11133818 NR Description: Protein disulfide isomerase precursor (PDI)

SEQ ID NO: 36861 - protein, 460 aa, Zea mays subsp. mays; identical to SEQ ID NO: 36346
  peptide (1)..(460): Ceres Seq. ID no. 13574389
  misc_feature (1)..(460): NCBI GI NO: 1709619 NR Description: Protein disulfide isomerase precursor (PDI)
  misc_feature (1)..(460): NCBI GI NO: 13925728 NR Description: protein disulfide isomerase 3 precursor
  misc_feature (1)..(460): NCBI GI NO: 13925726 NR Description: protein disulfide isomerase 2 precursor
  misc_feature (1)..(460): NCBI GI NO: 12056115 NR Description: protein disulfide isomerase
  misc_feature (1)..(460): NCBI GI NO: 1709620 NR Description: Protein disulfide isomerase precursor (PDI)
  misc_feature (1)..(460): NCBI GI NO: 1709617 NR Description: Protein disulfide isomerase precursor
  misc_feature (1)..(460): NCBI GI NO: 266743 NR Description: Protein disulfide isomerase precursor (PDI)
  misc_feature (1)..(460): NCBI GI NO: 99992 NR Description: protein disulfide-isomerase (EC 5
  misc_feature (1)..(435): NCBI GI NO: 11133775 NR Description: Protein disulfide isomerase precursor (PDI)
  misc_feature (1)..(435): NCBI GI NO: 11133818 NR Description: Protein disulfide isomerase precursor (PDI)

SEQ ID NO: 36862 - DNA, 2498 bp, Zea mays subsp. mays; identical to SEQ ID NO: 22580
  misc_feature (1)..(2498): Ceres Seq. ID no. 13574538
  misc_feature (457)..(457): n is a, c, t, g, unknown, or other
  misc_feature (458)..(458): n is a, c, t, g, unknown, or other

SEQ ID NO: 36863 - protein, 191 aa, Zea mays subsp. mays; identical to SEQ ID NO: 22581
  peptide (1)..(191): Ceres Seq. ID no. 15222595
  misc_feature (97)..(174): Pfam Name: Pfam Description:  Per1-like
  misc_feature (97)..(174): NCBI GI NO: 37536224 NR Description: unknown protein
  misc_feature (97)..(171): NCBI GI NO: 15219283 NR Description: expressed protein [Arabidopsis thaliana]
  misc_feature (97)..(163): NCBI GI NO: 20260110 NR Description: unknown protein [Arabidopsis thaliana]
  misc_feature (97)..(171): NCBI GI NO: 10176931 NR Description: gene_id:MTG10.16~unknown protein
  misc_feature (97)..(171): NCBI GI NO: 18424554 NR Description: expressed protein [Arabidopsis thaliana]

SEQ ID NO: 36864 - protein, 176 aa, Zea mays subsp. mays; identical to SEQ ID NO: 22582
  peptide (1)..(176): Ceres Seq. ID no. 15222596
  misc_feature (82)..(159): Pfam Name: Pfam Description:  Per1-like
  misc_feature (82)..(159): NCBI GI NO: 37536224 NR Description: unknown protein
  misc_feature (82)..(156): NCBI GI NO: 15219283 NR Description: expressed protein [Arabidopsis thaliana]
  misc_feature (82)..(148): NCBI GI NO: 20260110 NR Description: unknown protein [Arabidopsis thaliana]
  misc_feature (82)..(156): NCBI GI NO: 10176931 NR Description: gene_id:MTG10.16~unknown protein
  misc_feature (82)..(156): NCBI GI NO: 18424554 NR Description: expressed protein [Arabidopsis thaliana]

SEQ ID NO: 36865 - protein, 135 aa, Zea mays subsp. mays; identical to SEQ ID NO: 22583
  peptide (1)..(135): Ceres Seq. ID no. 15222597
  misc_feature (41)..(118): Pfam Name: Pfam Description:  Per1-like
  misc_feature (41)..(118): NCBI GI NO: 37536224 NR Description: unknown protein
  misc_feature (41)..(115): NCBI GI NO: 15219283 NR Description: expressed protein [Arabidopsis thaliana]
  misc_feature (41)..(107): NCBI GI NO: 20260110 NR Description: unknown protein [Arabidopsis thaliana]
  misc_feature (41)..(115): NCBI GI NO: 10176931 NR Description: gene_id:MTG10.16~unknown protein
  misc_feature (41)..(115): NCBI GI NO: 18424554 NR Description: expressed protein [Arabidopsis thaliana]

SEQ ID NO: 36866 - DNA, 2512 bp, Zea mays subsp. mays; identical to SEQ ID NO: 22485
  misc_feature (1)..(2512): Ceres Seq. ID no. 13623192

SEQ ID NO: 36867 - protein, 471 aa, Zea mays subsp. mays; identical to SEQ ID NO: 22486
  peptide (1)..(471): Ceres Seq. ID no. 13623193
  misc_feature (1)..(161): Pfam Name: Pfam Description:  ABC transporter
  misc_feature (1)..(471): NCBI GI NO: 28071305 NR Description: putative ABC transporter
  misc_feature (1)..(471): NCBI GI NO: 15239436 NR Description: ABC transporter family protein
  misc_feature (1)..(422): NCBI GI NO: 7573600 NR Description: ABC transporter homolog [Populus nigra]
  misc_feature (1)..(468): NCBI GI NO: 28436765 NR Description: Similar to ATP-binding cassette, sub-family F
  misc_feature (1)..(466): NCBI GI NO: 27707592 NR Description: similar to ATP-binding cassette
  misc_feature (1)..(466): NCBI GI NO: 3005931 NR Description: ABC transporter [Homo sapiens]
  misc_feature (1)..(466): NCBI GI NO: 10947137 NR Description: ATP-binding cassette
  misc_feature (1)..(466): NCBI GI NO: 10179834 NR Description: iron inhibited ABC transporter 2 [Homo sapiens]
  misc_feature (1)..(466): NCBI GI NO: 27881506 NR Description: ATP-binding cassette
  misc_feature (1)..(466): NCBI GI NO: 23956078 NR Description: ATP-binding cassette, sub-family F

SEQ ID NO: 36868 - protein, 457 aa, Zea mays subsp. mays; identical to SEQ ID NO: 22487
  peptide (1)..(457): Ceres Seq. ID no. 13623194
  misc_feature (1)..(147): Pfam Name: Pfam Description:  ABC transporter
  misc_feature (1)..(457): NCBI GI NO: 28071305 NR Description: putative ABC transporter
  misc_feature (1)..(457): NCBI GI NO: 15239436 NR Description: ABC transporter family protein
  misc_feature (1)..(408): NCBI GI NO: 7573600 NR Description: ABC transporter homolog [Populus nigra]
  misc_feature (1)..(454): NCBI GI NO: 28436765 NR Description: Similar to ATP-binding cassette, sub-family F
  misc_feature (1)..(452): NCBI GI NO: 27707592 NR Description: similar to ATP-binding cassette
  misc_feature (1)..(452): NCBI GI NO: 3005931 NR Description: ABC transporter [Homo sapiens]
  misc_feature (1)..(452): NCBI GI NO: 10947137 NR Description: ATP-binding cassette
  misc_feature (1)..(452): NCBI GI NO: 27881506 NR Description: ATP-binding cassette
  misc_feature (1)..(452): NCBI GI NO: 10179834 NR Description: iron inhibited ABC transporter 2 [Homo sapiens]
  misc_feature (1)..(452): NCBI GI NO: 23956078 NR Description: ATP-binding cassette, sub-family F

SEQ ID NO: 36869 - protein, 413 aa, Zea mays subsp. mays; identical to SEQ ID NO: 22488
  peptide (1)..(413): Ceres Seq. ID no. 13623195
  misc_feature (1)..(103): Pfam Name: Pfam Description:  ABC transporter
  misc_feature (1)..(413): NCBI GI NO: 28071305 NR Description: putative ABC transporter
  misc_feature (1)..(413): NCBI GI NO: 15239436 NR Description: ABC transporter family protein
  misc_feature (1)..(364): NCBI GI NO: 7573600 NR Description: ABC transporter homolog [Populus nigra]
  misc_feature (1)..(410): NCBI GI NO: 28436765 NR Description: Similar to ATP-binding cassette, sub-family F
  misc_feature (1)..(408): NCBI GI NO: 27707592 NR Description: similar to ATP-binding cassette
  misc_feature (1)..(408): NCBI GI NO: 3005931 NR Description: ABC transporter [Homo sapiens]
  misc_feature (1)..(408): NCBI GI NO: 10179834 NR Description: iron inhibited ABC transporter 2 [Homo sapiens]
  misc_feature (1)..(408): NCBI GI NO: 27881506 NR Description: ATP-binding cassette
  misc_feature (1)..(408): NCBI GI NO: 10947137 NR Description: ATP-binding cassette
  misc_feature (1)..(408): NCBI GI NO: 23956078 NR Description: ATP-binding cassette, sub-family F

SEQ ID NO: 36870 - DNA, 1604 bp, Zea mays subsp. mays
  misc_feature (1)..(1604): Ceres Seq. ID no. 13623434
atttgttttgtagggacttgtttacagactatgctgacttctgttttaagacctacggcgatcgcgtaaagcactggtttacattcaatgagccaaggatagtagcgctacttggctatgacacagggtcaaatcctcctcaaaggtgcaccagatgcgctgctggtgggaattcagcaaccgaaccttacatagttgctcataattttctcttggcacatgctactgcagttgcaagataccgtacgaaatatcaggtatttccatcttgagaacctcagaagttcctctgaaaaataacatcactctagcactcctaggagtggtaaactgatgttattttattcaatgaagtgtgtggtccaggattttatttttaaatgaaatgtgggcagggtctatatatgcttggaagttggaacaatggtcagcatactttcacattaataactctactgttcatgaaatgcattagcttgttctcctaaacgattggacatgtgcctgtcgaatttcattagtttcttggactgaaaactgctgatggaagagtgacatgatgttttaaaaacataggctgctcagaagggtaaggtcggaatagtcctggacttcaactggtacgaggctcttacaaactcacctgatgaccaagcagcagcccaaagagccagggacttccacattggctggtttgttgatccattgataaacggacactatccacagataatgcaagatctcgtgaaggagaggctgcccaggttcactcctgagcaggctaaactggtgaagggctcggcagactacatcggtatcaacgagtacacatccagctacatgaaggggcagaagctggtccagctggcgcccagtagctactctgccgattggcaggttcaatatgtttgtgagtttaatttcttgtgctttaaactcgatatttcgaataaatatgtatttgccttggatatatatttttttcaccaaacctaaacatccgtcccataaattctgtagttgcacgcaatggcaaaccgattggaccacaggcgaattctaagtggctctacatcgccccgacggggatgtacgggtgcgtgaactacctcaaggagaagtatgggaatccaacgatctacataacggagaacggaatggaccagcctggaaacttgacccgagaccagtacctgcgcgacgccacgagggtgcggttctacaggagctacatcggccagctgaagaaggccatagaccagggagcgaacgtggctggctacttcgcctggtctctcctcgacaacttcgagtggctggcagggtactcgtccaagttcggcatcgtctacgtggacttcaacacgctcgaacgccacccgaaggcgtcggcctactggttcagggacatgcttcagaagcattgagatctccagagccgagcctgagcacggaaggtaccattttgttcagcttcgcctagtgtttgggatggcccaatggttcaaatccggctcagtgcctggctaccaaaatgggaacaaaggacagctaccccgatcaattgtgatgttgtgtgtttgtgggtatgttctctctggagt

SEQ ID NO: 36871 - protein, 112 aa, Zea mays subsp. mays
  peptide (1)..(112): Ceres Seq. ID no. 13623435
  misc_feature (1)..(112): Pfam Name: Pfam Description:  Glycosyl hydrolase family 1
  misc_feature (1)..(112): NCBI GI NO: 7489456 NR Description: beta-glucosidase (EC 3.2.1.21), chloroplast - rice
  misc_feature (1)..(112): NCBI GI NO: 18875458 NR Description: beta-glucosidase [Oryza sativa]
  misc_feature (1)..(109): NCBI GI NO: 34914546 NR Description: putative beta-glucosidase
  misc_feature (1)..(111): NCBI GI NO: 1362162 NR Description: beta-glucosidase BGQ60 precursor - barley
  misc_feature (1)..(112): NCBI GI NO: 17226270 NR Description: beta-mannosidase enzyme [Lycopersicon esculentum]
  misc_feature (1)..(109): NCBI GI NO: 34899014 NR Description: putative non-cyanogenic beta-glucosidase precursor
  misc_feature (1)..(112): NCBI GI NO: 15229584 NR Description: glycosyl hydrolase family 1 [Arabidopsis thaliana]
  misc_feature (1)..(111): NCBI GI NO: 9294062 NR Description: beta-glucosidase [Arabidopsis thaliana]
  misc_feature (1)..(111): NCBI GI NO: 22331147 NR Description: glycosyl hydrolase family 1 [Arabidopsis thaliana]
  misc_feature (1)..(111): NCBI GI NO: 38344470 NR Description: OSJNBa0022H21.5
MYGCVNYLKEKYGNPTIYITENGMDQPGNLTRDQYLRDATRVRFYRSYIGQLKKAIDQGANVAGYFAWSLLDNFEWLAGYSSKFGIVYVDFNTLERHPKASAYWFRDMLQKH

SEQ ID NO: 36872 - protein, 89 aa, Zea mays subsp. mays
  peptide (1)..(89): Ceres Seq. ID no. 13623436
  misc_feature (1)..(89): Pfam Name: Pfam Description:  Glycosyl hydrolase family 1
  misc_feature (1)..(89): NCBI GI NO: 7489456 NR Description: beta-glucosidase (EC 3.2.1.21), chloroplast - rice
  misc_feature (1)..(89): NCBI GI NO: 18875458 NR Description: beta-glucosidase [Oryza sativa]
  misc_feature (1)..(86): NCBI GI NO: 34914546 NR Description: putative beta-glucosidase
  misc_feature (1)..(88): NCBI GI NO: 1362162 NR Description: beta-glucosidase BGQ60 precursor - barley
  misc_feature (1)..(89): NCBI GI NO: 17226270 NR Description: beta-mannosidase enzyme [Lycopersicon esculentum]
  misc_feature (1)..(86): NCBI GI NO: 34899014 NR Description: putative non-cyanogenic beta-glucosidase precursor
  misc_feature (1)..(89): NCBI GI NO: 15229584 NR Description: glycosyl hydrolase family 1 [Arabidopsis thaliana]
  misc_feature (1)..(88): NCBI GI NO: 9294062 NR Description: beta-glucosidase [Arabidopsis thaliana]
  misc_feature (1)..(88): NCBI GI NO: 22331147 NR Description: glycosyl hydrolase family 1 [Arabidopsis thaliana]
  misc_feature (1)..(88): NCBI GI NO: 38344470 NR Description: OSJNBa0022H21.5
MDQPGNLTRDQYLRDATRVRFYRSYIGQLKKAIDQGANVAGYFAWSLLDNFEWLAGYSSKFGIVYVDFNTLERHPKASAYWFRDMLQKH

SEQ ID NO: 36873 - protein, 89 aa, Zea mays subsp. mays
  peptide (1)..(89): Ceres Seq. ID no. 13623437
  misc_feature (5)..(85): Pfam Name: Pfam Description:  Glycosyl hydrolase family 1
  misc_feature (5)..(85): NCBI GI NO: 7489456 NR Description: beta-glucosidase (EC 3.2.1.21), chloroplast - rice
  misc_feature (5)..(85): NCBI GI NO: 18875458 NR Description: beta-glucosidase [Oryza sativa]
  misc_feature (5)..(85): NCBI GI NO: 34914546 NR Description: putative beta-glucosidase
  misc_feature (7)..(85): NCBI GI NO: 1362162 NR Description: beta-glucosidase BGQ60 precursor - barley
  misc_feature (7)..(85): NCBI GI NO: 17226270 NR Description: beta-mannosidase enzyme [Lycopersicon esculentum]
  misc_feature (5)..(87): NCBI GI NO: 34899014 NR Description: putative non-cyanogenic beta-glucosidase precursor
  misc_feature (7)..(85): NCBI GI NO: 15229584 NR Description: glycosyl hydrolase family 1 [Arabidopsis thaliana]
  misc_feature (15)..(85): NCBI GI NO: 9294062 NR Description: beta-glucosidase [Arabidopsis thaliana]
  misc_feature (15)..(85): NCBI GI NO: 22331147 NR Description: glycosyl hydrolase family 1 [Arabidopsis thaliana]
  misc_feature (7)..(86): NCBI GI NO: 38344470 NR Description: OSJNBa0022H21.5
LFCRDLFTDYADFCFKTYGDRVKHWFTFNEPRIVALLGYDTGSNPPQRCTRCAAGGNSATEPYIVAHNFLLAHATAVARYRTKYQVFPS

SEQ ID NO: 36874 - DNA, 2207 bp, Zea mays subsp. mays
  misc_feature (1)..(2207): Ceres Seq. ID no. 13600680
ccccgccctctccgccccgctctcccactcgtaggtgttctccccgtctccgcccgcactcgctcgtccgcgcgcaggaaggttgacctgtcgagggccggcgaacccggtaagtaagagtgaaaatggatggaagtagtaaagggagtgggcattctgaagcattaaggaactacaacctgggaagaactttaggtatcggtacatttggaagtgaagattgcagagcataagcttactggacatagggttgctataaagatcatcaactgccgccaaatgagaaatatggaaatggaagagaaagcaaagagagaattcaagatattgaagttgttcattcacccccatatcattcggctttatgaggtcatatacacacctacagatatatatgttgtgatggaatattgtaagtatggcgagttatttgattacattgttgagaaaggcagattacaggaagatgaagctcgtcgaatcttccagcaggtatttatcacttttcttggctggttacttctagtaacatgctttttttgagtcacaataggtagttatcaaagaacggttttatcttgttgctttgaattttgatatttatggatagtgcattcatattcttcatttgtttctgttgtgtttaatgtgctctcattaagtatctggattagttttgccttgccttatttttatcttctgatctgccaccattttgacttgcaagcatgatgtggtaattgctttgtcttagggtatcactattgcatgtagttcagaatttcaaatcatgatttaaacattacatctttccatggaggatacgacaattaaaatattcctttttcttttatatctaaattccaggtttgttttattagttgttttttcacattggaaaaattcatgaacagatcatatctggcgtcgaatactgccatagaaacatggttgtccaccgtgacctaaagccggaaaacttgttacttgattcaaagtataatgtaaaacttgcggattttggtctgagcaatgtcatgcatgatggccattttctgaagactagctgtgggagtccgaactatgctgctccagaggtaatatctggtaaactatatgctggacctgaggtcgatgtatggagttgtggggtgattctttatgctcttctttgtggaactcttccatttgatgatgagaatattcccaatctgttcaaaaaaaattaagggaggtatctacacagttccaagtcatttgtctgctttggccagggatttgatcccacgaatgcttgttgttgagcctatgaagagaatcacaattagggaaattcgggagcatcaatggttccagattcgccttccacgttacttggcagtgcctccaccagatacgacacaacaagccaaaatgattgatgaagatacacttcgagatgttgttaatatgggatttaacaagaaccatgtgtgtgaatcactgtgcagcagacttcaaaatgaggcaactgttgcatattatttactattggacaatcggtttagagcaactagtggctatcttggggcagattatcaagaatcaatggacaggaatttaaatcagctggcgtcatctgaatcatctagttctggtacgaggaattatgttccaggaagcagtgatcctcatagcagtggtttgcggccatattatcctgttgaaagaaaatgggcgcttggacttcagtctcgggcccaccctcgtgaaataatggttgaggtcttaaaagcacttcaagaattaaacgtcagatggaagaagaatgggcactacaacgtgaaatgcagatggtgcccagggtttcctgaagttaatgacacgttagatgccagcaacagctttcttggtgactctaccatcatggataatgatgatgctaatgggaggctacctactgtgatcaagtttgaattccagctttacaagacgaaggacgacaagtacctcttagatatgcagagagttactggacctcagctgctcttccttgacttctgtgcggccttccttaccaagcttagggttctatagtggtctaccatgtgcaaattttcactgtggtgatgaataaccgaaagcatgtaaataggaaccttgttctcgtcttttggacaacgaaaaaaaaaaaaaaaaaaaaactcgagggggggcccggtacccaa

SEQ ID NO: 36875 - protein, 304 aa, Zea mays subsp. mays
  peptide (1)..(304): Ceres Seq. ID no. 15219000
  misc_feature (255)..(303): Pfam Name: Pfam Description:  Kinase associated domain 1
  misc_feature (16)..(304): NCBI GI NO: 4107001 NR Description: OSK4 [Oryza sativa]
  misc_feature (16)..(304): NCBI GI NO: 4107003 NR Description: OSK5 [Oryza sativa]
  misc_feature (16)..(304): NCBI GI NO: 7434356 NR Description: serine/threonine protein kinase homolog - rice
  misc_feature (16)..(304): NCBI GI NO: 3341452 NR Description: SnRK1-type protein kinase
  misc_feature (16)..(304): NCBI GI NO: 2130049 NR Description: serine/threonine-specific protein kinase (EC2
  misc_feature (16)..(304): NCBI GI NO: 18934 NR Description: protein kinase [Hordeum vulgare subsp. vulgare]
  misc_feature (16)..(304): NCBI GI NO: 2146812 NR Description: serine/threonine-specific protein kinase (EC2
  misc_feature (16)..(304): NCBI GI NO: 400982 NR Description: Carbon catabolite derepressing protein kinase
  misc_feature (16)..(304): NCBI GI NO: 30678280 NR Description: Snf1-related protein kinase KIN10 (AKIN10)
  misc_feature (16)..(304): NCBI GI NO: 18395701 NR Description: Snf1-related protein kinase KIN10 (AKIN10)
MLFFVELFHLMMRIFPICSKKIKGGIYTVPSHLSALARDLIPRMLVVEPMKRITIREIREHQWFQIRLPRYLAVPPPDTTQQAKMIDEDTLRDVVNMGFNKNHVCESLCSRLQNEATVAYYLLLDNRFRATSGYLGADYQESMDRNLNQLASSESSSSGTRNYVPGSSDPHSSGLRPYYPVERKWALGLQSRAHPREIMVEVLKALQELNVRWKKNGHYNVKCRWCPGFPEVNDTLDASNSFLGDSTIMDNDDANGRLPTVIKFEFQLYKTKDDKYLLDMQRVTGPQLLFLDFCAAFLTKLRVL

SEQ ID NO: 36876 - protein, 294 aa, Zea mays subsp. mays
  peptide (1)..(294): Ceres Seq. ID no. 15219001
  misc_feature (245)..(293): Pfam Name: Pfam Description:  Kinase associated domain 1
  misc_feature (6)..(294): NCBI GI NO: 4107001 NR Description: OSK4 [Oryza sativa]
  misc_feature (6)..(294): NCBI GI NO: 4107003 NR Description: OSK5 [Oryza sativa]
  misc_feature (6)..(294): NCBI GI NO: 7434356 NR Description: serine/threonine protein kinase homolog - rice
  misc_feature (6)..(294): NCBI GI NO: 3341452 NR Description: SnRK1-type protein kinase
  misc_feature (6)..(294): NCBI GI NO: 2130049 NR Description: serine/threonine-specific protein kinase (EC2
  misc_feature (6)..(294): NCBI GI NO: 18934 NR Description: protein kinase [Hordeum vulgare subsp. vulgare]
  misc_feature (6)..(294): NCBI GI NO: 2146812 NR Description: serine/threonine-specific protein kinase (EC2
  misc_feature (6)..(294): NCBI GI NO: 400982 NR Description: Carbon catabolite derepressing protein kinase
  misc_feature (6)..(294): NCBI GI NO: 30678280 NR Description: Snf1-related protein kinase KIN10 (AKIN10)
  misc_feature (6)..(294): NCBI GI NO: 18395701 NR Description: Snf1-related protein kinase KIN10 (AKIN10)
MMRIFPICSKKIKGGIYTVPSHLSALARDLIPRMLVVEPMKRITIREIREHQWFQIRLPRYLAVPPPDTTQQAKMIDEDTLRDVVNMGFNKNHVCESLCSRLQNEATVAYYLLLDNRFRATSGYLGADYQESMDRNLNQLASSESSSSGTRNYVPGSSDPHSSGLRPYYPVERKWALGLQSRAHPREIMVEVLKALQELNVRWKKNGHYNVKCRWCPGFPEVNDTLDASNSFLGDSTIMDNDDANGRLPTVIKFEFQLYKTKDDKYLLDMQRVTGPQLLFLDFCAAFLTKLRVL

SEQ ID NO: 36877 - protein, 293 aa, Zea mays subsp. mays
  peptide (1)..(293): Ceres Seq. ID no. 15219002
  misc_feature (244)..(292): Pfam Name: Pfam Description:  Kinase associated domain 1
  misc_feature (5)..(293): NCBI GI NO: 4107001 NR Description: OSK4 [Oryza sativa]
  misc_feature (5)..(293): NCBI GI NO: 4107003 NR Description: OSK5 [Oryza sativa]
  misc_feature (5)..(293): NCBI GI NO: 7434356 NR Description: serine/threonine protein kinase homolog - rice
  misc_feature (5)..(293): NCBI GI NO: 3341452 NR Description: SnRK1-type protein kinase
  misc_feature (5)..(293): NCBI GI NO: 2130049 NR Description: serine/threonine-specific protein kinase (EC2
  misc_feature (5)..(293): NCBI GI NO: 18934 NR Description: protein kinase [Hordeum vulgare subsp. vulgare]
  misc_feature (5)..(293): NCBI GI NO: 2146812 NR Description: serine/threonine-specific protein kinase (EC2
  misc_feature (5)..(293): NCBI GI NO: 400982 NR Description: Carbon catabolite derepressing protein kinase
  misc_feature (5)..(293): NCBI GI NO: 30678280 NR Description: Snf1-related protein kinase KIN10 (AKIN10)
  misc_feature (5)..(293): NCBI GI NO: 18395701 NR Description: Snf1-related protein kinase KIN10 (AKIN10)
MRIFPICSKKIKGGIYTVPSHLSALARDLIPRMLVVEPMKRITIREIREHQWFQIRLPRYLAVPPPDTTQQAKMIDEDTLRDVVNMGFNKNHVCESLCSRLQNEATVAYYLLLDNRFRATSGYLGADYQESMDRNLNQLASSESSSSGTRNYVPGSSDPHSSGLRPYYPVERKWALGLQSRAHPREIMVEVLKALQELNVRWKKNGHYNVKCRWCPGFPEVNDTLDASNSFLGDSTIMDNDDANGRLPTVIKFEFQLYKTKDDKYLLDMQRVTGPQLLFLDFCAAFLTKLRVL

SEQ ID NO: 36878 - DNA, 1445 bp, Zea mays subsp. mays
  misc_feature (1)..(1445): Ceres Seq. ID no. 12556598
tgagatgcatggggtagccaatcgggtgtcgccgtgcgcgcgcgcgcgcgtctggcctcctccttccctttccttgctaaataaagcaagtagcagataggggaaagtctgctcgcaagttgcatccgccctgcgccaagaaaagccatcgttcttcccacaaacgcacacatagaagcatcattcccctctcggctagcttcctcctctctccctcctcttcgtcttcctctttccttctcccttgggaaacctgctgcctttgagctttcttcttcgagtgctcccaccagatctcctcctccttaccttctttggcacgttcggcggcgcgcgcggagatagatagatcccgccatcgtcgtcgccgtccttgcttccgatcggagggccacaaccacaacctctcgctccttagcgtgcgcgcgcgagccagggtcaagaagagagctagctataggccggagatcgatggggaggggaaagatcgtgatccgcaggatcgataactccacgagccggcaggtgaccttctccaagcgccggaacgggatcttcaagaaggccaaggagctcgccatcctctgcgatgcggaggtcggcctcgtcatcttctccagcaccggccgcctctacgagtactctagcaccagcatgaaatcagttatagatcggtacggcaaggccaaggaagagcagcaagtcgtcgcaaatcccaactcggagcttaagttttggcaaagggaggcagcaagcttgagacaacaactgcacaacttgcaagaaaattatcggcagttgacgggagatgatctttctgggctgaatgtcaaagaactgcagtccctggagaatcaattggaaacaagcctgcgtggtgtccgcgcaaagaaggaccatctcttgatagatgagattcacgatttgaatcgaaaggcaagtttatttcaccaagaaaatacagacttgtacaataagatcaacctgattcgccaagaaaatgatgagttacataaaaagatctatgagactgaaggaccaagtggagttaatcgggagtcaccgactccattcaactttgcagtagtagaaaccagagatgttccagtgcaacttgaactcagcacactgccacaacaaaataacattgagccatctactgctcctaagctaggattgcaattaattccatgaagaagagtaaaactgccgtcttatgatgctgaaggaaactatttattgtgaagagatgatactcagagaaagacatatttgtggcagggagatttgagatatgaacttataaatgtaatgcaaataattttcagactggaatggggtcgtggaattcagaggatgattgctttctagttgcatttgatgtttgatgagacttttctcatgtgaaacgtttattaaaacttcaaaatggtgcagatgttgct

SEQ ID NO: 36879 - protein, 240 aa, Zea mays subsp. mays
  peptide (1)..(240): Ceres Seq. ID no. 12556599
  misc_feature (73)..(172): Pfam Name: Pfam Description:  K-box region
  misc_feature (1)..(240): NCBI GI NO: 9964296 NR Description: MADS box protein 2 [Zea mays]
  misc_feature (1)..(240): NCBI GI NO: 29611976 NR Description: MADS-box transcription factor MADS2 [Zea mays]
  misc_feature (1)..(240): NCBI GI NO: 30313677 NR Description: transcription factor MADS27
  misc_feature (1)..(235): NCBI GI NO: 38344968 NR Description: OSJNBa0072F16.13
  misc_feature (1)..(231): NCBI GI NO: 7489303 NR Description: MADS-box transcription factor DEFH125
  misc_feature (1)..(238): NCBI GI NO: 30313689 NR Description: transcription factor MADS57
  misc_feature (1)..(238): NCBI GI NO: 29367491 NR Description: MADS box protein-like protein
  misc_feature (1)..(234): NCBI GI NO: 30694601 NR Description: MADS-box protein [Arabidopsis thaliana]
  misc_feature (1)..(238): NCBI GI NO: 34452085 NR Description: MADS-box protein 14 [Petunia x hybrida]
  misc_feature (1)..(233): NCBI GI NO: 15235748 NR Description: MADS-box protein; protein id: At4g37940
MGRGKIVIRRIDNSTSRQVTFSKRRNGIFKKAKELAILCDAEVGLVIFSSTGRLYEYSSTSMKSVIDRYGKAKEEQQVVANPNSELKFWQREAASLRQQLHNLQENYRQLTGDDLSGLNVKELQSLENQLETSLRGVRAKKDHLLIDEIHDLNRKASLFHQENTDLYNKINLIRQENDELHKKIYETEGPSGVNRESPTPFNFAVVETRDVPVQLELSTLPQQNNIEPSTAPKLGLQLIP

SEQ ID NO: 36880 - protein, 179 aa, Zea mays subsp. mays
  peptide (1)..(179): Ceres Seq. ID no. 12556600
  misc_feature (12)..(111): Pfam Name: Pfam Description:  K-box region
  misc_feature (1)..(179): NCBI GI NO: 9964296 NR Description: MADS box protein 2 [Zea mays]
  misc_feature (1)..(179): NCBI GI NO: 29611976 NR Description: MADS-box transcription factor MADS2 [Zea mays]
  misc_feature (1)..(179): NCBI GI NO: 30313677 NR Description: transcription factor MADS27
  misc_feature (1)..(174): NCBI GI NO: 38344968 NR Description: OSJNBa0072F16.13
  misc_feature (1)..(170): NCBI GI NO: 7489303 NR Description: MADS-box transcription factor DEFH125
  misc_feature (1)..(177): NCBI GI NO: 30313689 NR Description: transcription factor MADS57
  misc_feature (1)..(177): NCBI GI NO: 29367491 NR Description: MADS box protein-like protein
  misc_feature (1)..(173): NCBI GI NO: 30694601 NR Description: MADS-box protein [Arabidopsis thaliana]
  misc_feature (1)..(177): NCBI GI NO: 34452085 NR Description: MADS-box protein 14 [Petunia x hybrida]
  misc_feature (1)..(172): NCBI GI NO: 15235748 NR Description: MADS-box protein; protein id: At4g37940
MKSVIDRYGKAKEEQQVVANPNSELKFWQREAASLRQQLHNLQENYRQLTGDDLSGLNVKELQSLENQLETSLRGVRAKKDHLLIDEIHDLNRKASLFHQENTDLYNKINLIRQENDELHKKIYETEGPSGVNRESPTPFNFAVVETRDVPVQLELSTLPQQNNIEPSTAPKLGLQLIP

SEQ ID NO: 36881 - DNA, 842 bp, Zea mays subsp. mays
  misc_feature (1)..(842): Ceres Seq. ID no. 13589145
atcggggaccgtatttgcctgggatctgcggcagccacaggagctgataccaatctctgttctaggtcttaatgaaacagctgagcctgtgtgtgaaagtgaggtttgggaggttcttttcgacacttacactaagtcttccgatatcatctcatctgcatctgcaagaatattgccagtgatgatgtgttcagaggatgggatccttgcagtcgtcgaacaagataagagaccccttgaattgcttgctgaatcttgtgccatcaactccttcgacatagatcctcagaacccctctgatgttgtttgcgcattagaatgggaatcggtcggtgtcctaactcgtggtagagatgcaatgtcagaagaatgaaaattttcatcacccagggatctcaatcagatttttttccaaggtggatgaaactgctatcagaaagaatcttctgaattctgagggcttccatattcagtcaccattctaatgcccgtgaccatgggcaacggtagaaggaataaagcgtgcatgacgaatgccttttcctgtctttgcatactaaccaacactgtcttgtaccgttggaagttttactctgttgtcatgggtagttgcagattgcagaaaccttttctgggctagcttcaagatgtgtaattgctcttggatgccaactgctgacagtttgaaggagtggtcacaaacaattcaatccttttagctgggggctgatgaactgaagctataattagtttcataatgtttgcttgtggtattaaattggctcctgaacaatatggactccgatacatattttatttatctggcttaccatttagattcc

SEQ ID NO: 36882 - protein, 123 aa, Zea mays subsp. mays
  peptide (1)..(123): Ceres Seq. ID no. 13589146
  misc_feature (1)..(115): NCBI GI NO: 18417678 NR Description: WD-40 repeat protein family [Arabidopsis thaliana]
  misc_feature (1)..(115): NCBI GI NO: 21554881 NR Description: unknown [Arabidopsis thaliana]
  misc_feature (1)..(98): NCBI GI NO: 25372649 NR Description: hypothetical protein AT4g30840
SGTVFAWDLRQPQELIPISVLGLNETAEPVCESEVWEVLFDTYTKSSDIISSASARILPVMMCSEDGILAVVEQDKRPLELLAESCAINSFDIDPQNPSDVVCALEWESVGVLTRGRDAMSEE

SEQ ID NO: 36883 - protein, 63 aa, Zea mays subsp. mays
  peptide (1)..(63): Ceres Seq. ID no. 13589147
  misc_feature (1)..(55): NCBI GI NO: 18417678 NR Description: WD-40 repeat protein family [Arabidopsis thaliana]
  misc_feature (1)..(55): NCBI GI NO: 21554881 NR Description: unknown [Arabidopsis thaliana]
  misc_feature (1)..(38): NCBI GI NO: 25372649 NR Description: hypothetical protein AT4g30840
MMCSEDGILAVVEQDKRPLELLAESCAINSFDIDPQNPSDVVCALEWESVGVLTRGRDAMSEE

SEQ ID NO: 36884 - protein, 62 aa, Zea mays subsp. mays
  peptide (1)..(62): Ceres Seq. ID no. 13589148
  misc_feature (1)..(54): NCBI GI NO: 18417678 NR Description: WD-40 repeat protein family [Arabidopsis thaliana]
  misc_feature (1)..(54): NCBI GI NO: 21554881 NR Description: unknown [Arabidopsis thaliana]
  misc_feature (1)..(37): NCBI GI NO: 25372649 NR Description: hypothetical protein AT4g30840
MCSEDGILAVVEQDKRPLELLAESCAINSFDIDPQNPSDVVCALEWESVGVLTRGRDAMSEE

SEQ ID NO: 36885 - DNA, 2190 bp, Zea mays subsp. mays
  misc_feature (1)..(2190): Ceres Seq. ID no. 13599724
tgctactcaatttgatcaaccgccatccattctcctcctccgttgcagctgcggcatccatccagtagtccgaccaatccatggcttcagcgttcgggaccgcctccacttgcggcattaaacatgcacctgccggcgttgcgcttgctgcgcccatgaagcacctttccctcgtctcgccctcgctggtttcgcttccgcgcaagatgaggccgcgaaggaagtacaacttcagggtaaacgctgcaaaggagctgcatttcaacaaggatggctcggctatcaggaaaatgcaaaatggggtcaacaagcttgcagatctcgtcggggttactcttggaccaaaggggcgaaatgtagtcctcgaaagcaagtatggctcacctaaaattgtcaatgatggtgtcactgtggcaaaggaggttgaacttgaggaccctgttgaaaatattggtgctaaattggtccgccaagctgctgctaaaacaaatgacttggctggtgatgggacaaccacttcggttgtccttgctcaagggatgattactgagggtgtaaaggttgtagctgctggtgctaatccagtgcagatcacccgtggtattgagaaaacagccaaagcactagtcagtgaactccaaaagatgtccaaggaggttgaggacagtgagcttgctgatgttgctgcagttagtgcgggaaataactatgaaattgggaatatgatagctgaggctatgaaaaaggttgggcggcagggagtggtcacacttgaagaaggaaagagtgctgaaaataacctctattctgttgagggaatgcagtttgaccgtggctatatttctccctactttgtgactgacagtgaaaaaatgacagtcgagtatgagaactgcaagcttctccttgtggacaagaaaattaacaatgccagagatcttatcactatcctggaggatgctattagaagtggatatccaattctaatagtggcagaggacattgagcaggaagctcttgcaacccttgtggttaataggcttagaggtgcattgaagattgctgctattaaggcccctggttttggagagcgcaaaagtcaatatcttgatgacattgctactctcactggaggcactgtcatcagagaagaagttggattatccttagacaaggcagacaatgcggtcctaggaactgctgctaaggttgtagttaccaaggattcaacaacaatagtgggagatggcactacacaggaggaagtgaacaaaagggtgacacaaatcaagaaccagattgaggctactgaacaagaatatgagagagaaaaactaaacgagaggatagctaaactctctggtggtgttgctgtcattcaggtaggagcacagacagaaactgagctcaaggaaaagaaattgagggttgaggatgccctgaatgctacaaaggcagcagtcgaggaaggtatcgtaggtggtggctgtacccttttgaggcttgcatcaaaagttgatgcaattatagagacccttgagaacgatgaacagaaggttggggctgaaattgtaaggaagtccttgagctatccacttaaattgattgcaaaaaatgcaggcgttaatggcagtgtggttactgagaaggttcttgccaatgagaacttcaggtatgggtacaatgcggctacaggggagtatgaggacttgatggctgctggtatcattgatcccaccaaggttgtgaggtgctgcttggagcatgctgcatcggtggcgaaaaccttcatcacctctgatgccgttgttgttgacgccaaggtggctgagcaagcaccatcatctcctgcaaacccaatggcaatgggtggtggctcaggttttgggttctaaattgttcagctgcccttcgttccatcgcagcgacagaatcttagtttcgagatataataataaattggatgatgttagtttcgagatattagttggatgttgttattgttgtctcaaattataaaaaatcaagtgcaagtaaccaagacagctgaaaaaaatagttttgatgagatgctgcttcgtttttcttttctactaaaaaaaaaaaaaaaaaaaaaaaaaaaaaaaaaaaaaaaaaaaaaactcgagggggggcccggaacccaattcgcccaaaagggagtcgaataac

SEQ ID NO: 36886 - protein, 604 aa, Zea mays subsp. mays
  peptide (1)..(604): Ceres Seq. ID no. 13599725
  misc_feature (78)..(581): Pfam Name: Pfam Description:  TCP-1/cpn60 chaperonin family
  misc_feature (1)..(604): NCBI GI NO: 34897924 NR Description: ESTs C99033
  misc_feature (1)..(603): NCBI GI NO: 2506277 NR Description: RuBisCO subunit binding-protein beta subunit
  misc_feature (1)..(604): NCBI GI NO: 15231255 NR Description: chaperonin, putative [Arabidopsis thaliana]
  misc_feature (1)..(604): NCBI GI NO: 15222729 NR Description: RuBisCo subunit binding- protein beta subunit/60 kDachaperonin beta subunit
  misc_feature (1)..(604): NCBI GI NO: 7443855 NR Description: probable chaperonin 60 beta chain precursor
  misc_feature (1)..(604): NCBI GI NO: 81601 NR Description: chaperonin 60 beta precursor
  misc_feature (1)..(604): NCBI GI NO: 30696748 NR Description: chaperonin, putative [Arabidopsis thaliana]
  misc_feature (1)..(587): NCBI GI NO: 134104 NR Description: RuBisCO subunit binding-protein beta subunit
  misc_feature (102)..(604): NCBI GI NO: 2493650 NR Description: RUBISCO SUBUNIT BINDING-PROTEIN BETA SUBUNIT
  misc_feature (50)..(593): NCBI GI NO: 15222666 NR Description: chaperonin, putative [Arabidopsis thaliana]
MASAFGTASTCGIKHAPAGVALAAPMKHLSLVSPSLVSLPRKMRPRRKYNFRVNAAKELHFNKDGSAIRKMQNGVNKLADLVGVTLGPKGRNVVLESKYGSPKIVNDGVTVAKEVELEDPVENIGAKLVRQAAAKTNDLAGDGTTTSVVLAQGMITEGVKVVAAGANPVQITRGIEKTAKALVSELQKMSKEVEDSELADVAAVSAGNNYEIGNMIAEAMKKVGRQGVVTLEEGKSAENNLYSVEGMQFDRGYISPYFVTDSEKMTVEYENCKLLLVDKKINNARDLITILEDAIRSGYPILIVAEDIEQEALATLVVNRLRGALKIAAIKAPGFGERKSQYLDDIATLTGGTVIREEVGLSLDKADNAVLGTAAKVVVTKDSTTIVGDGTTQEEVNKRVTQIKNQIEATEQEYEREKLNERIAKLSGGVAVIQVGAQTETELKEKKLRVEDALNATKAAVEEGIVGGGCTLLRLASKVDAIIETLENDEQKVGAEIVRKSLSYPLKLIAKNAGVNGSVVTEKVLANENFRYGYNAATGEYEDLMAAGIIDPTKVVRCCLEHAASVAKTFITSDAVVVDAKVAEQAPSSPANPMAMGGGSGFGF

SEQ ID NO: 36887 - protein, 579 aa, Zea mays subsp. mays
  peptide (1)..(579): Ceres Seq. ID no. 13599726
  misc_feature (53)..(556): Pfam Name: Pfam Description:  TCP-1/cpn60 chaperonin family
  misc_feature (1)..(579): NCBI GI NO: 34897924 NR Description: ESTs C99033
  misc_feature (1)..(578): NCBI GI NO: 2506277 NR Description: RuBisCO subunit binding-protein beta subunit
  misc_feature (1)..(579): NCBI GI NO: 15231255 NR Description: chaperonin, putative [Arabidopsis thaliana]
  misc_feature (1)..(579): NCBI GI NO: 15222729 NR Description: RuBisCo subunit binding- protein beta subunit/60 kDachaperonin beta subunit
  misc_feature (1)..(579): NCBI GI NO: 7443855 NR Description: probable chaperonin 60 beta chain precursor
  misc_feature (1)..(579): NCBI GI NO: 81601 NR Description: chaperonin 60 beta precursor
  misc_feature (1)..(579): NCBI GI NO: 30696748 NR Description: chaperonin, putative [Arabidopsis thaliana]
  misc_feature (1)..(562): NCBI GI NO: 134104 NR Description: RuBisCO subunit binding-protein beta subunit
  misc_feature (77)..(579): NCBI GI NO: 2493650 NR Description: RUBISCO SUBUNIT BINDING-PROTEIN BETA SUBUNIT
  misc_feature (25)..(568): NCBI GI NO: 15222666 NR Description: chaperonin, putative [Arabidopsis thaliana]
MKHLSLVSPSLVSLPRKMRPRRKYNFRVNAAKELHFNKDGSAIRKMQNGVNKLADLVGVTLGPKGRNVVLESKYGSPKIVNDGVTVAKEVELEDPVENIGAKLVRQAAAKTNDLAGDGTTTSVVLAQGMITEGVKVVAAGANPVQITRGIEKTAKALVSELQKMSKEVEDSELADVAAVSAGNNYEIGNMIAEAMKKVGRQGVVTLEEGKSAENNLYSVEGMQFDRGYISPYFVTDSEKMTVEYENCKLLLVDKKINNARDLITILEDAIRSGYPILIVAEDIEQEALATLVVNRLRGALKIAAIKAPGFGERKSQYLDDIATLTGGTVIREEVGLSLDKADNAVLGTAAKVVVTKDSTTIVGDGTTQEEVNKRVTQIKNQIEATEQEYEREKLNERIAKLSGGVAVIQVGAQTETELKEKKLRVEDALNATKAAVEEGIVGGGCTLLRLASKVDAIIETLENDEQKVGAEIVRKSLSYPLKLIAKNAGVNGSVVTEKVLANENFRYGYNAATGEYEDLMAAGIIDPTKVVRCCLEHAASVAKTFITSDAVVVDAKVAEQAPSSPANPMAMGGGSGFGF

SEQ ID NO: 36888 - protein, 562 aa, Zea mays subsp. mays
  peptide (1)..(562): Ceres Seq. ID no. 13599727
  misc_feature (36)..(539): Pfam Name: Pfam Description:  TCP-1/cpn60 chaperonin family
  misc_feature (1)..(562): NCBI GI NO: 34897924 NR Description: ESTs C99033
  misc_feature (1)..(561): NCBI GI NO: 2506277 NR Description: RuBisCO subunit binding-protein beta subunit
  misc_feature (1)..(562): NCBI GI NO: 15231255 NR Description: chaperonin, putative [Arabidopsis thaliana]
  misc_feature (1)..(562): NCBI GI NO: 15222729 NR Description: RuBisCo subunit binding- protein beta subunit/60 kDachaperonin beta subunit
  misc_feature (1)..(562): NCBI GI NO: 7443855 NR Description: probable chaperonin 60 beta chain precursor
  misc_feature (1)..(562): NCBI GI NO: 81601 NR Description: chaperonin 60 beta precursor
  misc_feature (1)..(562): NCBI GI NO: 30696748 NR Description: chaperonin, putative [Arabidopsis thaliana]
  misc_feature (1)..(545): NCBI GI NO: 134104 NR Description: RuBisCO subunit binding-protein beta subunit
  misc_feature (60)..(562): NCBI GI NO: 2493650 NR Description: RUBISCO SUBUNIT BINDING-PROTEIN BETA SUBUNIT
  misc_feature (8)..(551): NCBI GI NO: 15222666 NR Description: chaperonin, putative [Arabidopsis thaliana]
MRPRRKYNFRVNAAKELHFNKDGSAIRKMQNGVNKLADLVGVTLGPKGRNVVLESKYGSPKIVNDGVTVAKEVELEDPVENIGAKLVRQAAAKTNDLAGDGTTTSVVLAQGMITEGVKVVAAGANPVQITRGIEKTAKALVSELQKMSKEVEDSELADVAAVSAGNNYEIGNMIAEAMKKVGRQGVVTLEEGKSAENNLYSVEGMQFDRGYISPYFVTDSEKMTVEYENCKLLLVDKKINNARDLITILEDAIRSGYPILIVAEDIEQEALATLVVNRLRGALKIAAIKAPGFGERKSQYLDDIATLTGGTVIREEVGLSLDKADNAVLGTAAKVVVTKDSTTIVGDGTTQEEVNKRVTQIKNQIEATEQEYEREKLNERIAKLSGGVAVIQVGAQTETELKEKKLRVEDALNATKAAVEEGIVGGGCTLLRLASKVDAIIETLENDEQKVGAEIVRKSLSYPLKLIAKNAGVNGSVVTEKVLANENFRYGYNAATGEYEDLMAAGIIDPTKVVRCCLEHAASVAKTFITSDAVVVDAKVAEQAPSSPANPMAMGGGSGFGF

SEQ ID NO: 36889 - DNA, 2345 bp, Zea mays subsp. mays
  misc_feature (1)..(2345): Ceres Seq. ID no. 13599868
taactccatgcacaaaactactccctgcgcaaaacacagagtagaatagaggctcaattaaccaatctttattaactccctgcgcaaaacacacggaatagaatacatgctcaattaatcaattaaccatttttttattaactccctgcacaaaactagcctaagcagtgatttttacagtaattttgataccttggcaccacgcttatattttgataaatcgtaccatatctatgatttatcttttgttaaatcatagatccctaacacttatattttgttgttatggacagtttgcatgaacacttgattgtacacctatatatcaattctacatgattgttgtttgcttgagattatttccccaaatattgatatgattccagattcatcatgacatgccatatgtttttttggatttgatgcttacatgtagatggataagaagaccaaggttatagtttgtgttgctgctgcacatatattactgtcatgtcaatgatggctatgattattcattctagaaaaagaaaacgaaatgcaaggaggactgggattacctatgcaccaatgcatgaaagggatagaactagaattgaatatctcaacacaaagatttggagggatgacacaacatgtataaacatgattagaatgaaaagggcttgtttctttcacctaactaaacattttagagagcgtggtttacttcaggacactatccatatgtgtgttgaacaacaagtggccatgtttctaaatacagttgggcataaccttagaaataggttgattggcatgaattttggtagatctggggaaacagttagtcgatgtttcaataaagttcttcgtgcaattggtgagctacgtggggaactaattaggccaccttcattggacactccaaccaaaatagcagggaactacagatgggatccgtattttaaggattgtattggagctattgatggtacacatgtaagagccactattcctagagatatggagcatgcctttcgtggtaggaagtcctatgcgactcaaaatgtaatggcggctgtagattttgatctacgcttcacttatgtgttggctggttgggagggaacatctcatgatgctaatgtattacgggatgctttagaacgtgtgaatggccttcgcgttccacaagctttggtaattggtcgtatagtccctcatcatcggaatggtggggtcacttatctttcactcacctaatgtggatccgaaggcagagaatcctaatgagatggttacagctggtgtgctttcaagccttcagaatttcctacgcaagtgcctcatagctatcctctcatatggcccaatgccgaagcacattgcatttattatggatggcaatcgtcgatatgctaaattcagaagcatgcaagaaggagctggtcacaggatgggtttctctacccttattgcaagtctgatgtactgctatgaaatgggtgtgaagtacatcactgtctacgcattcagcatcgacaattttaaaagggacccaagtgaggtggaatccttgatgcagttaatggaggaaaaaatcaacgaactcttagagaaccaaagtgtaatcaacaagattaactgtaagatcaacttttggggtaacttggacttgttatatgagccggtgcggttggcggctgagaagctgatggcgagcacagctgggaacacagggctggtcttttctatctgcatgccatacaactcgacttctgagattgtcaatgctgtcagtcaagtctgtgcggaaaggatggaaatgtttcagagcgaacatattggcgaatgcaatggtcatgctgcaaataacggtgtgcgatcagagatttcagtggcggatttggatcgccacatgtatagtgccgaatgcccagatcctgatattgtcatccggacttcgggcgagactcgattgagcaatttcctcctttggcagacaacgtttagtcacttgcagaatccagatcctctgtggcccgagttctcttttaggcaccttgtttgggctatcttgcagtatcagagagtttaccctgctctggagcataacagaaagttggctaagaagcagttgtgattccatgttatttgcaaggaggtatcatgaagggctattaacatcaaacttttccttctcaatttcccggtaatgggaaatgcaaagaacatactagcatataacattatgaatagatcaccatgtaacttaagtgtgattgctaccataaccatgtaacttatttgagctcgtacaaatgctgtgattcctaaatatatatatatagagtgcccggggt

SEQ ID NO: 36890 - protein, 303 aa, Zea mays subsp. mays; identical to SEQ ID NO: 23465
  peptide (1)..(303): Ceres Seq. ID no. 13599869
  misc_feature (55)..(293): Pfam Name: Pfam Description:  Putative undecaprenyl diphosphate synthase
  misc_feature (1)..(303): NCBI GI NO: 34898408 NR Description: ESTs C72761
  misc_feature (27)..(297): NCBI GI NO: 23491567 NR Description: cis-prenyltransferase [Periploca sepium]
  misc_feature (27)..(297): NCBI GI NO: 18398467 NR Description: undecaprenyl pyrophosphate synthetase
  misc_feature (27)..(297): NCBI GI NO: 20336659 NR Description: hypothetical protein [Arabidopsis thaliana]
  misc_feature (46)..(297): NCBI GI NO: 25314045 NR Description: hypothetical protein At2g17570
  misc_feature (27)..(300): NCBI GI NO: 16751461 NR Description: cis-prenyltransferase [Hevea brasiliensis]
  misc_feature (27)..(300): NCBI GI NO: 22213587 NR Description: cis-prenyltransferase 2 [Hevea brasiliensis]
  misc_feature (27)..(300): NCBI GI NO: 16751459 NR Description: cis-prenyltransferase [Hevea brasiliensis]
  misc_feature (27)..(300): NCBI GI NO: 22213585 NR Description: cis-prenyltransferase 1 [Hevea brasiliensis]
  misc_feature (27)..(300): NCBI GI NO: 20563022 NR Description: cis-prenyltransferase2 [Hevea brasiliensis]

SEQ ID NO: 36891 - protein, 282 aa, Zea mays subsp. mays; identical to SEQ ID NO: 23466
  peptide (1)..(282): Ceres Seq. ID no. 13599870
  misc_feature (34)..(272): Pfam Name: Pfam Description:  Putative undecaprenyl diphosphate synthase
  misc_feature (1)..(282): NCBI GI NO: 34898408 NR Description: ESTs C72761
  misc_feature (6)..(276): NCBI GI NO: 23491567 NR Description: cis-prenyltransferase [Periploca sepium]
  misc_feature (6)..(276): NCBI GI NO: 18398467 NR Description: undecaprenyl pyrophosphate synthetase
  misc_feature (6)..(276): NCBI GI NO: 20336659 NR Description: hypothetical protein [Arabidopsis thaliana]
  misc_feature (25)..(276): NCBI GI NO: 25314045 NR Description: hypothetical protein At2g17570
  misc_feature (6)..(279): NCBI GI NO: 16751461 NR Description: cis-prenyltransferase [Hevea brasiliensis]
  misc_feature (6)..(279): NCBI GI NO: 22213587 NR Description: cis-prenyltransferase 2 [Hevea brasiliensis]
  misc_feature (6)..(279): NCBI GI NO: 16751459 NR Description: cis-prenyltransferase [Hevea brasiliensis]
  misc_feature (6)..(279): NCBI GI NO: 22213585 NR Description: cis-prenyltransferase 1 [Hevea brasiliensis]
  misc_feature (6)..(279): NCBI GI NO: 20563022 NR Description: cis-prenyltransferase2 [Hevea brasiliensis]

SEQ ID NO: 36892 - protein, 256 aa, Zea mays subsp. mays; identical to SEQ ID NO: 23467
  peptide (1)..(256): Ceres Seq. ID no. 13599871
  misc_feature (8)..(246): Pfam Name: Pfam Description:  Putative undecaprenyl diphosphate synthase
  misc_feature (1)..(256): NCBI GI NO: 34898408 NR Description: ESTs C72761
  misc_feature (1)..(250): NCBI GI NO: 23491567 NR Description: cis-prenyltransferase [Periploca sepium]
  misc_feature (1)..(250): NCBI GI NO: 18398467 NR Description: undecaprenyl pyrophosphate synthetase
  misc_feature (1)..(250): NCBI GI NO: 20336659 NR Description: hypothetical protein [Arabidopsis thaliana]
  misc_feature (1)..(250): NCBI GI NO: 25314045 NR Description: hypothetical protein At2g17570
  misc_feature (1)..(253): NCBI GI NO: 16751461 NR Description: cis-prenyltransferase [Hevea brasiliensis]
  misc_feature (1)..(253): NCBI GI NO: 22213587 NR Description: cis-prenyltransferase 2 [Hevea brasiliensis]
  misc_feature (1)..(253): NCBI GI NO: 16751459 NR Description: cis-prenyltransferase [Hevea brasiliensis]
  misc_feature (1)..(253): NCBI GI NO: 22213585 NR Description: cis-prenyltransferase 1 [Hevea brasiliensis]
  misc_feature (1)..(253): NCBI GI NO: 20563022 NR Description: cis-prenyltransferase2 [Hevea brasiliensis]

SEQ ID NO: 36893 - DNA, 706 bp, Zea mays subsp. mays
  misc_feature (1)..(706): Ceres Seq. ID no. 13589561
gttggtgatgctgtaatggaaaattcatttctacgacctcttggccatttggagttggacctgccagatgccccagaaaaagccccacgtcctcctgcacaagctgttgacccattctcaaaatttgggccaaaggcagagatatcacatatattccgcgcaccagagaagaggccacccaaggagctctcgctcgcgttcacgggtctcacgcttctgccatctattggattcttgatagggctcgttcgtcttggagtgaacttgaagaacttcccgtccttgccaggaccggccgcatttgcctcacttttccatgctgggataggagcagtcctgatgctctacgttctcttctggatcaagttggaccttttcacaactctcaagtacctcggcttccttggcatcttccttgtgtttgtgggccatagggctctatcctacctttcctcggtgtcgacaaaacagaagacggcatgagtggacagagttttttccaaccatccatttcttgaggggggggccattgcaggcccttgggtgtcttatgagggagggctcggtttatttcagttggctttgcagaatactgataactagaaaaagtagtaggacctcaccttcgtgtattatgatgatgcacatacaattttctgagtagaatggatgttgaatcatagaactaatgaataatatgaacact

SEQ ID NO: 36894 - protein, 160 aa, Zea mays subsp. mays
  peptide (1)..(160): Ceres Seq. ID no. 13589562
  misc_feature (1)..(160): NCBI GI NO: 34906860 NR Description: P0470A12.7
  misc_feature (1)..(160): NCBI GI NO: 22328844 NR Description: expressed protein [Arabidopsis thaliana]
  misc_feature (1)..(132): NCBI GI NO: 7486600 NR Description: hypothetical protein F7J7
  misc_feature (1)..(158): NCBI GI NO: 39598219 NR Description: Hypothetical protein CBG14887
  misc_feature (1)..(159): NCBI GI NO: 17508279 NR Description: Ribophorin II (31.1 kD) [Caenorhabditis elegans]
  misc_feature (18)..(160): NCBI GI NO: 29841329 NR Description: similar to GenBank Accession Number AK004968putative ribophorin II in Mus musculus
  misc_feature (1)..(148): NCBI GI NO: 14714733 NR Description: Rpn2 protein [Mus musculus]
  misc_feature (1)..(148): NCBI GI NO: 34996495 NR Description: ribophorin II [Mus musculus]
  misc_feature (1)..(157): NCBI GI NO: 28436786 NR Description: Similar to ribophorin II [Xenopus laevis]
  misc_feature (1)..(148): NCBI GI NO: 88567 NR Description: ribophorin II precursor - human
VGDAVMENSFLRPLGHLELDLPDAPEKAPRPPAQAVDPFSKFGPKAEISHIFRAPEKRPPKELSLAFTGLTLLPSIGFLIGLVRLGVNLKNFPSLPGPAAFASLFHAGIGAVLMLYVLFWIKLDLFTTLKYLGFLGIFLVFVGHRALSYLSSVSTKQKTA

SEQ ID NO: 36895 - protein, 155 aa, Zea mays subsp. mays
  peptide (1)..(155): Ceres Seq. ID no. 13589563
  misc_feature (1)..(155): NCBI GI NO: 34906860 NR Description: P0470A12.7
  misc_feature (1)..(155): NCBI GI NO: 22328844 NR Description: expressed protein [Arabidopsis thaliana]
  misc_feature (1)..(127): NCBI GI NO: 7486600 NR Description: hypothetical protein F7J7
  misc_feature (1)..(153): NCBI GI NO: 39598219 NR Description: Hypothetical protein CBG14887
  misc_feature (1)..(154): NCBI GI NO: 17508279 NR Description: Ribophorin II (31.1 kD) [Caenorhabditis elegans]
  misc_feature (13)..(155): NCBI GI NO: 29841329 NR Description: similar to GenBank Accession Number AK004968putative ribophorin II in Mus musculus
  misc_feature (1)..(143): NCBI GI NO: 14714733 NR Description: Rpn2 protein [Mus musculus]
  misc_feature (1)..(143): NCBI GI NO: 34996495 NR Description: ribophorin II [Mus musculus]
  misc_feature (1)..(152): NCBI GI NO: 28436786 NR Description: Similar to ribophorin II [Xenopus laevis]
  misc_feature (1)..(143): NCBI GI NO: 88567 NR Description: ribophorin II precursor - human
MENSFLRPLGHLELDLPDAPEKAPRPPAQAVDPFSKFGPKAEISHIFRAPEKRPPKELSLAFTGLTLLPSIGFLIGLVRLGVNLKNFPSLPGPAAFASLFHAGIGAVLMLYVLFWIKLDLFTTLKYLGFLGIFLVFVGHRALSYLSSVSTKQKTA

SEQ ID NO: 36896 - DNA, 549 bp, Zea mays subsp. mays
  misc_feature (1)..(549): Ceres Seq. ID no. 13624847
gctagcttttgtctctgtgtcgccttcctcctcctaagtttgtaaacctaattttgagcaaagttcatagcttttatcttcctcatggccactcgtcttcagtttgagaataactgtgaagttggagtcttttcaaaactcactaacgcctattgcttagtcgctattggaggctctgagaatttttacagtgcttttgagtcggagttagctgatgttatccctatcgttaagacctctcttggtggaacacgaatcattggccgtctttgcgctggaaacaagaatggtcttcttgtccctcatacaactactgaccaagagcttcagcacttgaggaacagtttacctgatgcagttgtggtccagagaatcgaggaacgtctgtctgctcttggaaattgcattgcctgcaatgaccatgtcgcccttgctcacaccgatcttgacaaggaaactgaggagataatagcagatgtgcttggtgttgaagttttccgtcagacaattgcaggcaacattcttgttggcagttactgtgccttgtcc

SEQ ID NO: 36897 - protein, 155 aa, Zea mays subsp. mays
  peptide (1)..(155): Ceres Seq. ID no. 13624848
  misc_feature (3)..(154): Pfam Name: Pfam Description:  eIF-6 family
  misc_feature (1)..(154): NCBI GI NO: 15228161 NR Description: eukaryotic translation initiation factor 6
  misc_feature (1)..(154): NCBI GI NO: 27261099 NR Description: putative eukaryotic translation initiation factor 6
  misc_feature (1)..(154): NCBI GI NO: 6016330 NR Description: EUKARYOTIC TRANSLATION INITIATION FACTOR 6 (EIF-6)
  misc_feature (1)..(154): NCBI GI NO: 6325273 NR Description: similar to human translation initiation factor 6
  misc_feature (1)..(154): NCBI GI NO: 11513605 NR Description: Chain A, Crystal Structure Of S.Cerevisiae Eif6
  misc_feature (1)..(154): NCBI GI NO: 19075991 NR Description: eukaryotic translation initiation factor 6
  misc_feature (1)..(154): NCBI GI NO: 21492634 NR Description: CG17611-PA [Drosophila melanogaster]
  misc_feature (1)..(154): NCBI GI NO: 27501448 NR Description: integrin beta 4 binding protein [Mus musculus]
  misc_feature (1)..(154): NCBI GI NO: 31242655 NR Description: ENSANGP00000017466 [Anopheles gambiae]
  misc_feature (1)..(154): NCBI GI NO: 6381991 NR Description: b4 integrin interactor homolog [Mus musculus]
MATRLQFENNCEVGVFSKLTNAYCLVAIGGSENFYSAFESELADVIPIVKTSLGGTRIIGRLCAGNKNGLLVPHTTTDQELQHLRNSLPDAVVVQRIEERLSALGNCIACNDHVALAHTDLDKETEEIIADVLGVEVFRQTIAGNILVGSYCALS

SEQ ID NO: 36898 - DNA, 573 bp, Zea mays subsp. mays
  misc_feature (1)..(573): Ceres Seq. ID no. 13624849
acgaccatgatttggtaaagaaagcaggaggaagccggcggtgtaggcgacccatggctccacagacgaggagagagaggttggcgggggaggcgcggccgagctcgtcggggctaacaccggcgaagccgggggcggtcgaggtgcagcgccgacgggtgggcagcggttggacgagccgtcggatctccatctacgcctcccgagtctacttcctcctcatcatgctccagatcccgctcttcagggtcccttgtagagctggcacatgcacaactcctattcaagtaacatcatctcagttggtctcaaatgatatattcccagcagctgttgtgaaggccatgctctaccctggagctaccgtgagcagcctaactaaaagcaagacatttccgagttggaatgacctgtttgacatgtacaacctgacagaagcaaaaaatgcttctgcagtagttgatctccagcgtctagagatacttgccggaagctacttctgtgttgctggagcgctcattggcatcataaatcctgggaggatgactttgtttggtacccttttgattatct

SEQ ID NO: 36899 - protein, 190 aa, Zea mays subsp. mays
  peptide (1)..(190): Ceres Seq. ID no. 13624850
  misc_feature (18)..(189): NCBI GI NO: 34913974 NR Description: B1110C07.25
  misc_feature (56)..(189): NCBI GI NO: 18416514 NR Description: expressed protein [Arabidopsis thaliana]
  misc_feature (56)..(189): NCBI GI NO: 17064978 NR Description: putative protein [Arabidopsis thaliana]
  misc_feature (104)..(189): NCBI GI NO: 8953390 NR Description: putative protein [Arabidopsis thaliana]
  misc_feature (83)..(189): NCBI GI NO: 15220078 NR Description: hypothetical protein [Arabidopsis thaliana]
DHDLVKKAGGSRRCRRPMAPQTRRERLAGEARPSSSGLTPAKPGAVEVQRRRVGSGWTSRRISIYASRVYFLLIMLQIPLFRVPCRAGTCTTPIQVTSSQLVSNDIFPAAVVKAMLYPGATVSSLTKSKTFPSWNDLFDMYNLTEAKNASAVVDLQRLEILAGSYFCVAGALIGIINPGRMTLFGTLLII

SEQ ID NO: 36900 - protein, 173 aa, Zea mays subsp. mays
  peptide (1)..(173): Ceres Seq. ID no. 13624851
  misc_feature (1)..(172): NCBI GI NO: 34913974 NR Description: B1110C07.25
  misc_feature (39)..(172): NCBI GI NO: 18416514 NR Description: expressed protein [Arabidopsis thaliana]
  misc_feature (39)..(172): NCBI GI NO: 17064978 NR Description: putative protein [Arabidopsis thaliana]
  misc_feature (87)..(172): NCBI GI NO: 8953390 NR Description: putative protein [Arabidopsis thaliana]
  misc_feature (66)..(172): NCBI GI NO: 15220078 NR Description: hypothetical protein [Arabidopsis thaliana]
MAPQTRRERLAGEARPSSSGLTPAKPGAVEVQRRRVGSGWTSRRISIYASRVYFLLIMLQIPLFRVPCRAGTCTTPIQVTSSQLVSNDIFPAAVVKAMLYPGATVSSLTKSKTFPSWNDLFDMYNLTEAKNASAVVDLQRLEILAGSYFCVAGALIGIINPGRMTLFGTLLII

SEQ ID NO: 36901 - protein, 116 aa, Zea mays subsp. mays
  peptide (1)..(116): Ceres Seq. ID no. 13624852
  misc_feature (1)..(115): NCBI GI NO: 34913974 NR Description: B1110C07.25
  misc_feature (1)..(115): NCBI GI NO: 18416514 NR Description: expressed protein [Arabidopsis thaliana]
  misc_feature (1)..(115): NCBI GI NO: 17064978 NR Description: putative protein [Arabidopsis thaliana]
  misc_feature (30)..(115): NCBI GI NO: 8953390 NR Description: putative protein [Arabidopsis thaliana]
  misc_feature (9)..(115): NCBI GI NO: 15220078 NR Description: hypothetical protein [Arabidopsis thaliana]
MLQIPLFRVPCRAGTCTTPIQVTSSQLVSNDIFPAAVVKAMLYPGATVSSLTKSKTFPSWNDLFDMYNLTEAKNASAVVDLQRLEILAGSYFCVAGALIGIINPGRMTLFGTLLII

SEQ ID NO: 36902 - DNA, 538 bp, Zea mays subsp. mays
  misc_feature (1)..(538): Ceres Seq. ID no. 13625118
  misc_feature (245)..(245): n is a, c, t, g, unknown, or other
  misc_feature (246)..(246): n is a, c, t, g, unknown, or other
  misc_feature (248)..(248): n is a, c, t, g, unknown, or other
  misc_feature (249)..(249): n is a, c, t, g, unknown, or other
  misc_feature (247)..(247): n is a, c, t, g, unknown, or other
attgcgcacaccttgatgctgggcatgagcaggacggggttggccggagcggcgctgcgggtggcgctgacggcgctgctgccgctggtcctgccggcgtactacgtgtacaagctgaccacgtacctcctcggcgccgtcttccccgaggacgtcgccggcaaggtggtactcatcaccggcgcctcctccggcatcggcgagcacctggcctatgagtacgcgaagcggggagcctacctggnnnnnggtggcgaggagggaggcgagcctccgcgaggtcggcgacgtcgcgctggggctgggctcgccgggcgtcctcgtcctcccggctgacgtctccaagcctcgggactgcgagggcttcatcgacgacacgattagctacttcggtagactggatcacctggtgaacaacgcgtccatctggcaagtgtgcaagttcgaagagatccaggacgtcaggcacttgagagccctgatggacatcaacttctggggccacgtgtacccaacccggctcgccatccctcacctc

SEQ ID NO: 36903 - protein, 111 aa, Zea mays subsp. mays
  peptide (1)..(111): Ceres Seq. ID no. 13625119
  misc_feature (17)..(81): NCBI GI NO: 21742781 NR Description: OSJNBa0055C08.3
  misc_feature (31)..(81): NCBI GI NO: 15824408 NR Description: steroleosin [Sesamum indicum]
  misc_feature (31)..(81): NCBI GI NO: 18423187 NR Description: short-chain dehydrogenase/reductase family protein
  misc_feature (23)..(81): NCBI GI NO: 15232779 NR Description: short-chain dehydrogenase/reductase family protein
  misc_feature (19)..(81): NCBI GI NO: 8777392 NR Description: 11-beta-hydroxysteroid dehydrogenase-like
  misc_feature (19)..(81): NCBI GI NO: 15241203 NR Description: short-chain dehydrogenase/reductase family protein
  misc_feature (25)..(81): NCBI GI NO: 15232777 NR Description: short-chain dehydrogenase/reductase family protein
  misc_feature (50)..(81): NCBI GI NO: 21311775 NR Description: steroleosin-B [Sesamum indicum]
  misc_feature (21)..(91): NCBI GI NO: 15241261 NR Description: short-chain dehydrogenase/reductase family protein
  misc_feature (50)..(81): NCBI GI NO: 15234888 NR Description: short-chain dehydrogenase/reductase family protein
  misc_feature (82)..(82): Xaa is any aa, unknown or other
  misc_feature (83)..(83): Xaa is any aa, unknown or other
IAHTLMLGMSRTGLAGAALRVALTALLPLVLPAYYVYKLTTYLLGAVFPEDVAGKVVLITGASSGIGEHLAYEYAKRGAYLXXGGEEGGEPPRGRRRRAGAGLAGRPRPPG

SEQ ID NO: 36904 - protein, 108 aa, Zea mays subsp. mays
  peptide (1)..(108): Ceres Seq. ID no. 13625120
  misc_feature (13)..(107): NCBI GI NO: 21742781 NR Description: OSJNBa0055C08.3
  misc_feature (14)..(107): NCBI GI NO: 15824408 NR Description: steroleosin [Sesamum indicum]
  misc_feature (14)..(107): NCBI GI NO: 18423187 NR Description: short-chain dehydrogenase/reductase family protein
  misc_feature (13)..(107): NCBI GI NO: 15232779 NR Description: short-chain dehydrogenase/reductase family protein
  misc_feature (13)..(107): NCBI GI NO: 8777392 NR Description: 11-beta-hydroxysteroid dehydrogenase-like
  misc_feature (13)..(107): NCBI GI NO: 15232777 NR Description: short-chain dehydrogenase/reductase family protein
  misc_feature (13)..(107): NCBI GI NO: 15241203 NR Description: short-chain dehydrogenase/reductase family protein
  misc_feature (13)..(107): NCBI GI NO: 21311775 NR Description: steroleosin-B [Sesamum indicum]
  misc_feature (16)..(107): NCBI GI NO: 15241261 NR Description: short-chain dehydrogenase/reductase family protein
  misc_feature (13)..(107): NCBI GI NO: 15234888 NR Description: short-chain dehydrogenase/reductase family protein
  misc_feature (11)..(11): Xaa is any aa, unknown or other
  misc_feature (12)..(12): Xaa is any aa, unknown or other
MSTRSGEPTWXXVARREASLREVGDVALGLGSPGVLVLPADVSKPRDCEGFIDDTISYFGRLDHLVNNASIWQVCKFEEIQDVRHLRALMDINFWGHVYPTRLAIPHL

SEQ ID NO: 36905 - protein, 106 aa, Zea mays subsp. mays
  peptide (1)..(106): Ceres Seq. ID no. 13625121
  misc_feature (12)..(76): NCBI GI NO: 21742781 NR Description: OSJNBa0055C08.3
  misc_feature (26)..(76): NCBI GI NO: 15824408 NR Description: steroleosin [Sesamum indicum]
  misc_feature (26)..(76): NCBI GI NO: 18423187 NR Description: short-chain dehydrogenase/reductase family protein
  misc_feature (18)..(76): NCBI GI NO: 15232779 NR Description: short-chain dehydrogenase/reductase family protein
  misc_feature (14)..(76): NCBI GI NO: 8777392 NR Description: 11-beta-hydroxysteroid dehydrogenase-like
  misc_feature (14)..(76): NCBI GI NO: 15241203 NR Description: short-chain dehydrogenase/reductase family protein
  misc_feature (20)..(76): NCBI GI NO: 15232777 NR Description: short-chain dehydrogenase/reductase family protein
  misc_feature (45)..(76): NCBI GI NO: 21311775 NR Description: steroleosin-B [Sesamum indicum]
  misc_feature (16)..(86): NCBI GI NO: 15241261 NR Description: short-chain dehydrogenase/reductase family protein
  misc_feature (45)..(76): NCBI GI NO: 15234888 NR Description: short-chain dehydrogenase/reductase family protein
  misc_feature (77)..(77): Xaa is any aa, unknown or other
  misc_feature (78)..(78): Xaa is any aa, unknown or other
MLGMSRTGLAGAALRVALTALLPLVLPAYYVYKLTTYLLGAVFPEDVAGKVVLITGASSGIGEHLAYEYAKRGAYLXXGGEEGGEPPRGRRRRAGAGLAGRPRPPG

SEQ ID NO: 36906 - DNA, 596 bp, Zea mays subsp. mays
  misc_feature (1)..(596): Ceres Seq. ID no. 13625083
acagtgcctctcgctcactgactgactactgtaataccagagatcgaacaacttggtcctgcagctcaagaagagagttttgtgcatttgggggccgggggcaagagagagagagagagccatggcggcggaccagcagccgcagctgcaggaggagatgaacgacgctgccggcggcggcctcaggctgcctccagggttccgcttccacccgagcgacttcgagattgtcagcttctacctcaccaacaaggtgctcaacacgcgcttcacctgcaccgccatcacggaggccgacctaaacaagattgagccatgggacctcccgagcaaggcgaagatgggcgagaaagagtggtacttcttctaccagaaggaccgcaagtacccgacggggctgagggcgaaccgggccaccgaggccggttactggaaggcgacgggcaaggacaaggaggtctacaacgccgcggaaggggtggcggtactggtcggcatgaagaagacgctcgtcttctacaggggcagggctcccaggggtgacaagacaaactgggtcatgcacgagtacaggctcgaaggcagcggcaggctcc

SEQ ID NO: 36907 - protein, 158 aa, Zea mays subsp. mays
  peptide (1)..(158): Ceres Seq. ID no. 13625084
  misc_feature (23)..(153): Pfam Name: NAM Pfam Description: No apical meristem
  misc_feature (1)..(157): NCBI GI NO: 32527660 NR Description: NAM-related protein 1 [Zea mays]
  misc_feature (23)..(154): NCBI GI NO: 30686737 NR Description: NAM (no apical meristem)-related protein
  misc_feature (23)..(154): NCBI GI NO: 9758909 NR Description: NAM (no apical meristem)-like protein
  misc_feature (23)..(154): NCBI GI NO: 1279640 NR Description: NAM [Petunia x hybrida]
  misc_feature (23)..(154): NCBI GI NO: 15241819 NR Description: NAM / CUC2 - like protein [Arabidopsis thaliana]
  misc_feature (23)..(154): NCBI GI NO: 21536866 NR Description: NAM / CUC2-like protein [Arabidopsis thaliana]
  misc_feature (9)..(154): NCBI GI NO: 34902148 NR Description: Putative NAM (no apical meristem) protein
  misc_feature (23)..(154): NCBI GI NO: 15240252 NR Description: NAM, no apical meristem, - like protein
  misc_feature (23)..(154): NCBI GI NO: 21537315 NR Description: NAM, no apical meristem,-like protein
  misc_feature (26)..(154): NCBI GI NO: 21389172 NR Description: nam-like protein 17 [Petunia x hybrida]
MAADQQPQLQEEMNDAAGGGLRLPPGFRFHPSDFEIVSFYLTNKVLNTRFTCTAITEADLNKIEPWDLPSKAKMGEKEWYFFYQKDRKYPTGLRANRATEAGYWKATGKDKEVYNAAEGVAVLVGMKKTLVFYRGRAPRGDKTNWVMHEYRLEGSGRL

SEQ ID NO: 36908 - protein, 146 aa, Zea mays subsp. mays
  peptide (1)..(146): Ceres Seq. ID no. 13625085
  misc_feature (11)..(141): Pfam Name: NAM Pfam Description: No apical meristem
  misc_feature (1)..(145): NCBI GI NO: 32527660 NR Description: NAM-related protein 1 [Zea mays]
  misc_feature (11)..(142): NCBI GI NO: 30686737 NR Description: NAM (no apical meristem)-related protein
  misc_feature (11)..(142): NCBI GI NO: 9758909 NR Description: NAM (no apical meristem)-like protein
  misc_feature (11)..(142): NCBI GI NO: 1279640 NR Description: NAM [Petunia x hybrida]
  misc_feature (11)..(142): NCBI GI NO: 15241819 NR Description: NAM / CUC2 - like protein [Arabidopsis thaliana]
  misc_feature (11)..(142): NCBI GI NO: 21536866 NR Description: NAM / CUC2-like protein [Arabidopsis thaliana]
  misc_feature (1)..(142): NCBI GI NO: 34902148 NR Description: Putative NAM (no apical meristem) protein
  misc_feature (11)..(142): NCBI GI NO: 15240252 NR Description: NAM, no apical meristem, - like protein
  misc_feature (11)..(142): NCBI GI NO: 21537315 NR Description: NAM, no apical meristem,-like protein
  misc_feature (14)..(142): NCBI GI NO: 21389172 NR Description: nam-like protein 17 [Petunia x hybrida]
MNDAAGGGLRLPPGFRFHPSDFEIVSFYLTNKVLNTRFTCTAITEADLNKIEPWDLPSKAKMGEKEWYFFYQKDRKYPTGLRANRATEAGYWKATGKDKEVYNAAEGVAVLVGMKKTLVFYRGRAPRGDKTNWVMHEYRLEGSGRL

SEQ ID NO: 36909 - protein, 85 aa, Zea mays subsp. mays
  peptide (1)..(85): Ceres Seq. ID no. 13625086
  misc_feature (1)..(80): Pfam Name: NAM Pfam Description: No apical meristem
  misc_feature (1)..(84): NCBI GI NO: 32527660 NR Description: NAM-related protein 1 [Zea mays]
  misc_feature (1)..(81): NCBI GI NO: 30686737 NR Description: NAM (no apical meristem)-related protein
  misc_feature (1)..(81): NCBI GI NO: 9758909 NR Description: NAM (no apical meristem)-like protein
  misc_feature (1)..(81): NCBI GI NO: 1279640 NR Description: NAM [Petunia x hybrida]
  misc_feature (1)..(81): NCBI GI NO: 15241819 NR Description: NAM / CUC2 - like protein [Arabidopsis thaliana]
  misc_feature (1)..(81): NCBI GI NO: 21536866 NR Description: NAM / CUC2-like protein [Arabidopsis thaliana]
  misc_feature (1)..(81): NCBI GI NO: 34902148 NR Description: Putative NAM (no apical meristem) protein
  misc_feature (1)..(81): NCBI GI NO: 15240252 NR Description: NAM, no apical meristem, - like protein
  misc_feature (1)..(81): NCBI GI NO: 21537315 NR Description: NAM, no apical meristem,-like protein
  misc_feature (1)..(81): NCBI GI NO: 21389172 NR Description: nam-like protein 17 [Petunia x hybrida]
MGEKEWYFFYQKDRKYPTGLRANRATEAGYWKATGKDKEVYNAAEGVAVLVGMKKTLVFYRGRAPRGDKTNWVMHEYRLEGSGRL

SEQ ID NO: 36910 - DNA, 834 bp, Zea mays subsp. mays
  misc_feature (1)..(834): Ceres Seq. ID no. 13636282
gtgctttcttagaggtgggttggcttctcctccccctccggttcgggttcgggttcgtgaggttctccggggttcggtttcgtgggtgagcggatcgagatggcggcgtcggatgttgagtaccgctgcttcgtcggcggcctcgcctgggccacggacgaccactccctccacaacgccttcagcacctacggcgaggtcctcgagtccaagatcatcctcgatcgggagacgcagaggtcccgcggcttcggcttcgtcaccttctccacggaggagcgcatgcggaaccgcatcgagggcatgaacggcaaggagctggacggccgcaacatcaccgtcaacgaggcccagtcccgcggcggccgtggaggcggcggcggtgggtacggtggtggccgtggaggcggcggctacggcggtggcgggcgccgtgatggcggcggcggctacggcggtggcggcggctacggtggcggcggcggctacggtggtggtggcggcggctacggcggtggcaaccgtggcggcggctacggcaactccgacgggaactggaggaactgagcggtggggcccgcgcggccaagttatcctgttcgctgccgtgatgtttaccctagtccagagggtttatcttcgttcgtctcgtgtttgttgttgcccatctgtgtttttgattgcaaggtcgctctgtgtcagttgttagtgctgtgttcatcctcggctccagcagacccatgcatcaaacagcatggactgcggatcgatggatgctgttacccccgtcaggctttattctaagttaatcttaaggaaaaaatggtgcttctt

SEQ ID NO: 36911 - protein, 155 aa, Zea mays subsp. mays
  peptide (1)..(155): Ceres Seq. ID no. 13636283
  misc_feature (10)..(81): Pfam Name: a.k.a. RRM, RBD, or RNP domain Pfam Description: RNA recognition motif.
  misc_feature (1)..(155): NCBI GI NO: 82696 NR Description: glycine-rich protein - maize
  misc_feature (1)..(155): NCBI GI NO: 20257675 NR Description: glycine-rich RNA binding protein [Zea mays]
  misc_feature (1)..(155): NCBI GI NO: 20257691 NR Description: glycine-rich RNA binding protein [Zea mays]
  misc_feature (1)..(155): NCBI GI NO: 20257683 NR Description: glycine-rich RNA binding protein [Zea mays]
  misc_feature (1)..(155): NCBI GI NO: 20257699 NR Description: glycine-rich RNA binding protein [Zea mays]
  misc_feature (1)..(155): NCBI GI NO: 20257693 NR Description: glycine-rich RNA binding protein [Zea mays]
  misc_feature (1)..(155): NCBI GI NO: 20257667 NR Description: glycine-rich RNA binding protein [Zea mays]
  misc_feature (1)..(155): NCBI GI NO: 20257669 NR Description: glycine-rich RNA binding protein [Zea mays]
  misc_feature (1)..(155): NCBI GI NO: 20257709 NR Description: glycine-rich RNA binding protein [Zea mays]
  misc_feature (1)..(155): NCBI GI NO: 20257687 NR Description: glycine-rich RNA binding protein [Zea mays]
MAASDVEYRCFVGGLAWATDDHSLHNAFSTYGEVLESKIILDRETQRSRGFGFVTFSTEERMRNRIEGMNGKELDGRNITVNEAQSRGGRGGGGGGYGGGRGGGGYGGGGRRDGGGGYGGGGGYGGGGGYGGGGGGYGGGNRGGGYGNSDGNWRN

SEQ ID NO: 36912 - protein, 101 aa, Zea mays subsp. mays
  peptide (1)..(101): Ceres Seq. ID no. 13636284
  misc_feature (40)..(101): Pfam Name: Pfam Description:  Equine herpesvirus glycoprotein gp2
CFLRGGLASPPPPVRVRVREVLRGSVSWVSGSRWRRRMLSTAASSAASPGPRTTTPSTTPSAPTARSSSPRSSSIGRRRGPAASASSPSPRRSACGTASRA

SEQ ID NO: 36913 - protein, 94 aa, Zea mays subsp. mays
  peptide (1)..(94): Ceres Seq. ID no. 13636285
  misc_feature (9)..(94): Pfam Name: LMP1 Pfam Description: Herpesvirus latent membrane protein 1
  misc_feature (1)..(94): NCBI GI NO: 82696 NR Description: glycine-rich protein - maize
  misc_feature (1)..(94): NCBI GI NO: 20257675 NR Description: glycine-rich RNA binding protein [Zea mays]
  misc_feature (1)..(94): NCBI GI NO: 20257691 NR Description: glycine-rich RNA binding protein [Zea mays]
  misc_feature (1)..(94): NCBI GI NO: 20257683 NR Description: glycine-rich RNA binding protein [Zea mays]
  misc_feature (1)..(94): NCBI GI NO: 20257699 NR Description: glycine-rich RNA binding protein [Zea mays]
  misc_feature (1)..(94): NCBI GI NO: 20257693 NR Description: glycine-rich RNA binding protein [Zea mays]
  misc_feature (1)..(94): NCBI GI NO: 20257667 NR Description: glycine-rich RNA binding protein [Zea mays]
  misc_feature (1)..(94): NCBI GI NO: 20257669 NR Description: glycine-rich RNA binding protein [Zea mays]
  misc_feature (1)..(94): NCBI GI NO: 20257709 NR Description: glycine-rich RNA binding protein [Zea mays]
  misc_feature (1)..(94): NCBI GI NO: 20257687 NR Description: glycine-rich RNA binding protein [Zea mays]
MRNRIEGMNGKELDGRNITVNEAQSRGGRGGGGGGYGGGRGGGGYGGGGRRDGGGGYGGGGGYGGGGGYGGGGGGYGGGNRGGGYGNSDGNWRN

SEQ ID NO: 36914 - DNA, 589 bp, Zea mays subsp. mays
  misc_feature (1)..(589): Ceres Seq. ID no. 13637313
aaaaaaaaatccccttgctcacgcgctctctgccccgcttgctatatcctcctagagcccagccaaatcccccgccgtcctcctgttcatctcctcttctccctctcctcctcctcctcctcgtcccccttcctcgggttggaaattggaatggaggcggcgacgatggcgtggacggcggcggtggtcggggcggggctggtgtactggttcgtgtgggtgatgggcgcggcggaggtgaagggcaagcgggcggtggatctcaagatgggatccatcacgcgggacaaggtgcaggacaagtacacccagtactggtccttcttccgccggcccaaggagacggccaccacggcggcgtcggcggagaaggtgccggccttcgtggacaccttctacaacctggtgaccgacatctacgagtggggctggggccagtccttccacttctcgccgtccctgcccggccgctcccaccgcgacgccacgcgcgtccacgaggagcgcgtcgccgacctcctcggcgcccggccgggccaccgcctcctcgacgtcggctgcggcgtcggcgggcccatgcgcgctatcg

SEQ ID NO: 36915 - protein, 196 aa, Zea mays subsp. mays
  peptide (1)..(196): Ceres Seq. ID no. 13637314
  misc_feature (51)..(195): NCBI GI NO: 3560533 NR Description: 24-methylene lophenol C24(1)methyltransferase
  misc_feature (51)..(195): NCBI GI NO: 7443718 NR Description: probable sterol 24-C-methyltransferase (EC2
  misc_feature (51)..(195): NCBI GI NO: 1061040 NR Description: sterol-C-methyltransferase [Arabidopsis thaliana]
  misc_feature (51)..(195): NCBI GI NO: 15217917 NR Description: sterol-C-methyltransferase [Arabidopsis thaliana]
  misc_feature (51)..(195): NCBI GI NO: 23397216 NR Description: putative sterol-C-methyltransferase
  misc_feature (51)..(195): NCBI GI NO: 22136020 NR Description: 24-sterol C-methyltransferase
  misc_feature (59)..(195): NCBI GI NO: 7443717 NR Description: probable sterol 24-C-methyltransferase (EC2
  misc_feature (51)..(195): NCBI GI NO: 21555010 NR Description: sterol-C-methyltransferase [Arabidopsis thaliana]
  misc_feature (51)..(195): NCBI GI NO: 15222955 NR Description: S-adenosyl-methionine -sterol-C-methyltransferase -related
  misc_feature (51)..(195): NCBI GI NO: 2246456 NR Description: S-adenosyl-methionine-sterol-C-methyltransferase
KKKSPCSRALCPACYILLEPSQIPRRPPVHLLFSLSSSSSSSPFLGLEIGMEAATMAWTAAVVGAGLVYWFVWVMGAAEVKGKRAVDLKMGSITRDKVQDKYTQYWSFFRRPKETATTAASAEKVPAFVDTFYNLVTDIYEWGWGQSFHFSPSLPGRSHRDATRVHEERVADLLGARPGHRLLDVGCGVGGPMRAI

SEQ ID NO: 36916 - protein, 195 aa, Zea mays subsp. mays
  peptide (1)..(195): Ceres Seq. ID no. 13637315
  misc_feature (47)..(126): NCBI GI NO: 30793991 NR Description: unknown protein [Arabidopsis thaliana]
  misc_feature (47)..(129): NCBI GI NO: 15224564 NR Description: glycine-rich protein [Arabidopsis thaliana]
  misc_feature (47)..(100): NCBI GI NO: 17539034 NR Description: Putative protein [Caenorhabditis elegans]
KKIPLLTRSLPRLLYPPRAQPNPPPSSCSSPLLPLLLLLLVPLPRVGNWNGGGDDGVDGGGGRGGAGVLVRVGDGRGGGEGQAGGGSQDGIHHAGQGAGQVHPVLVLLPPAQGDGHHGGVGGEGAGLRGHLLQPGDRHLRVGLGPVLPLLAVPARPLPPRRHARPRGARRRPPRRPAGPPPPRRRLRRRRAHARY

SEQ ID NO: 36917 - protein, 146 aa, Zea mays subsp. mays
  peptide (1)..(146): Ceres Seq. ID no. 13637316
  misc_feature (1)..(145): NCBI GI NO: 3560533 NR Description: 24-methylene lophenol C24(1)methyltransferase
  misc_feature (1)..(145): NCBI GI NO: 7443718 NR Description: probable sterol 24-C-methyltransferase (EC2
  misc_feature (1)..(145): NCBI GI NO: 1061040 NR Description: sterol-C-methyltransferase [Arabidopsis thaliana]
  misc_feature (1)..(145): NCBI GI NO: 15217917 NR Description: sterol-C-methyltransferase [Arabidopsis thaliana]
  misc_feature (1)..(145): NCBI GI NO: 23397216 NR Description: putative sterol-C-methyltransferase
  misc_feature (1)..(145): NCBI GI NO: 22136020 NR Description: 24-sterol C-methyltransferase
  misc_feature (9)..(145): NCBI GI NO: 7443717 NR Description: probable sterol 24-C-methyltransferase (EC2
  misc_feature (1)..(145): NCBI GI NO: 21555010 NR Description: sterol-C-methyltransferase [Arabidopsis thaliana]
  misc_feature (1)..(145): NCBI GI NO: 15222955 NR Description: S-adenosyl-methionine -sterol-C-methyltransferase -related
  misc_feature (1)..(145): NCBI GI NO: 2246456 NR Description: S-adenosyl-methionine-sterol-C-methyltransferase
MEAATMAWTAAVVGAGLVYWFVWVMGAAEVKGKRAVDLKMGSITRDKVQDKYTQYWSFFRRPKETATTAASAEKVPAFVDTFYNLVTDIYEWGWGQSFHFSPSLPGRSHRDATRVHEERVADLLGARPGHRLLDVGCGVGGPMRAI

SEQ ID NO: 36918 - DNA, 1361 bp, Zea mays subsp. mays; identical to SEQ ID NO: 24001
  misc_feature (1)..(1361): Ceres Seq. ID no. 13636326

SEQ ID NO: 36919 - protein, 418 aa, Zea mays subsp. mays; identical to SEQ ID NO: 24002
  peptide (1)..(418): Ceres Seq. ID no. 15219393
  misc_feature (39)..(281): Pfam Name: Pfam Description:  Ribosomal protein L4/L1 family
  misc_feature (15)..(418): NCBI GI NO: 34393487 NR Description: putative 60S ribosomal protein L4/L1
  misc_feature (15)..(418): NCBI GI NO: 34897236 NR Description: putative 60S ribosomal protein L1
  misc_feature (16)..(418): NCBI GI NO: 15232723 NR Description: 60S ribosomal protein L4/L1 (RPL4A)
  misc_feature (16)..(418): NCBI GI NO: 21593543 NR Description: 60S ribosomal protein L4-B (L1)
  misc_feature (16)..(418): NCBI GI NO: 15242558 NR Description: 60S ribosomal protein L4/L1 (RPL4D)
  misc_feature (13)..(418): NCBI GI NO: 17367847 NR Description: 60S ribosomal protein L4 (L1)
  misc_feature (16)..(418): NCBI GI NO: 26450328 NR Description: putative 60S ribosomal protein
  misc_feature (112)..(418): NCBI GI NO: 13605831 NR Description: AT5g02870/F9G14_180 [Arabidopsis thaliana]
  misc_feature (64)..(418): NCBI GI NO: 6441068 NR Description: 60S ribosomal protein L4 [Chlamydomonas sp. HS-5]
  misc_feature (13)..(388): NCBI GI NO: 32822849 NR Description: Ribosomal protein [Xenopus laevis]

SEQ ID NO: 36920 - protein, 404 aa, Zea mays subsp. mays; identical to SEQ ID NO: 24003
  peptide (1)..(404): Ceres Seq. ID no. 15219394
  misc_feature (25)..(267): Pfam Name: Pfam Description:  Ribosomal protein L4/L1 family
  misc_feature (1)..(404): NCBI GI NO: 34393487 NR Description: putative 60S ribosomal protein L4/L1
  misc_feature (1)..(404): NCBI GI NO: 34897236 NR Description: putative 60S ribosomal protein L1
  misc_feature (2)..(404): NCBI GI NO: 15232723 NR Description: 60S ribosomal protein L4/L1 (RPL4A)
  misc_feature (2)..(404): NCBI GI NO: 21593543 NR Description: 60S ribosomal protein L4-B (L1)
  misc_feature (2)..(404): NCBI GI NO: 15242558 NR Description: 60S ribosomal protein L4/L1 (RPL4D)
  misc_feature (1)..(404): NCBI GI NO: 17367847 NR Description: 60S ribosomal protein L4 (L1)
  misc_feature (2)..(404): NCBI GI NO: 26450328 NR Description: putative 60S ribosomal protein
  misc_feature (98)..(404): NCBI GI NO: 13605831 NR Description: AT5g02870/F9G14_180 [Arabidopsis thaliana]
  misc_feature (50)..(404): NCBI GI NO: 6441068 NR Description: 60S ribosomal protein L4 [Chlamydomonas sp. HS-5]
  misc_feature (1)..(374): NCBI GI NO: 32822849 NR Description: Ribosomal protein [Xenopus laevis]

SEQ ID NO: 36921 - protein, 387 aa, Zea mays subsp. mays; identical to SEQ ID NO: 24004
  peptide (1)..(387): Ceres Seq. ID no. 15219395
  misc_feature (8)..(250): Pfam Name: Pfam Description:  Ribosomal protein L4/L1 family
  misc_feature (1)..(387): NCBI GI NO: 34393487 NR Description: putative 60S ribosomal protein L4/L1
  misc_feature (1)..(387): NCBI GI NO: 34897236 NR Description: putative 60S ribosomal protein L1
  misc_feature (1)..(387): NCBI GI NO: 15232723 NR Description: 60S ribosomal protein L4/L1 (RPL4A)
  misc_feature (1)..(387): NCBI GI NO: 21593543 NR Description: 60S ribosomal protein L4-B (L1)
  misc_feature (1)..(387): NCBI GI NO: 15242558 NR Description: 60S ribosomal protein L4/L1 (RPL4D)
  misc_feature (1)..(387): NCBI GI NO: 17367847 NR Description: 60S ribosomal protein L4 (L1)
  misc_feature (1)..(387): NCBI GI NO: 26450328 NR Description: putative 60S ribosomal protein
  misc_feature (81)..(387): NCBI GI NO: 13605831 NR Description: AT5g02870/F9G14_180 [Arabidopsis thaliana]
  misc_feature (33)..(387): NCBI GI NO: 6441068 NR Description: 60S ribosomal protein L4 [Chlamydomonas sp. HS-5]
  misc_feature (1)..(357): NCBI GI NO: 32822849 NR Description: Ribosomal protein [Xenopus laevis]

SEQ ID NO: 36922 - DNA, 519 bp, Zea mays subsp. mays
  misc_feature (1)..(519): Ceres Seq. ID no. 13626773
atccttagtgtatctcctggccgtttctgcttcatcttctcgaatcgtcttctcttcttcttctcaaagtttagtgaaagatggccgatggtgaggacattcagccccttgtttgtgacaatggaactggaatggtgaaggctggatttgctggtgatgatgctccaagggctgtgttcccgagtattgttggtcgtcctagacacactggtgtcatggttgggatgggtcagaaagacgcttacgttggtgacgaagctcagtccaagagaggtattcttaccctcaagtatccgattgagcatggtattgtgagcaactgggatgacatggagaagatctggcatcacactttctacaacgagcttcgtgttgcacctgaagagcacccggttcttctcactgaggcgccgcttaaccctaaggctaacagggagaagatgactcagatcatgttcgagactttcaatgtccctgccatgtatgttgctattcaggctgttctttctctttacgcta

SEQ ID NO: 36923 - protein, 146 aa, Zea mays subsp. mays
  peptide (1)..(146): Ceres Seq. ID no. 13626774
  misc_feature (1)..(145): Pfam Name: Pfam Description:  Actin
  misc_feature (1)..(145): NCBI GI NO: 9965319 NR Description: actin [Setaria italica]
  misc_feature (1)..(145): NCBI GI NO: 15076949 NR Description: actin [Musa x paradisiaca]
  misc_feature (1)..(145): NCBI GI NO: 15088544 NR Description: actin [Triticum monococcum]
  misc_feature (1)..(145): NCBI GI NO: 24496452 NR Description: actin [Hordeum vulgare]
  misc_feature (1)..(145): NCBI GI NO: 15242516 NR Description: ACTIN 2/7 (sp|P53492) [Arabidopsis thaliana]
  misc_feature (1)..(145): NCBI GI NO: 34905850 NR Description: putative actin
  misc_feature (1)..(145): NCBI GI NO: 461465 NR Description: ACTIN
  misc_feature (1)..(145): NCBI GI NO: 15229955 NR Description: actin 11 (ACT11) [Arabidopsis thaliana]
  misc_feature (1)..(145): NCBI GI NO: 11276970 NR Description: actin [imported] - Malva pusilla
  misc_feature (1)..(145): NCBI GI NO: 11276968 NR Description: actin [imported] - Picea rubens
MADGEDIQPLVCDNGTGMVKAGFAGDDAPRAVFPSIVGRPRHTGVMVGMGQKDAYVGDEAQSKRGILTLKYPIEHGIVSNWDDMEKIWHHTFYNELRVAPEEHPVLLTEAPLNPKANREKMTQIMFETFNVPAMYVAIQAVLSLYA

SEQ ID NO: 36924 - protein, 129 aa, Zea mays subsp. mays
  peptide (1)..(129): Ceres Seq. ID no. 13626775
  misc_feature (1)..(128): Pfam Name: Pfam Description:  Actin
  misc_feature (1)..(128): NCBI GI NO: 9965319 NR Description: actin [Setaria italica]
  misc_feature (1)..(128): NCBI GI NO: 15242516 NR Description: ACTIN 2/7 (sp|P53492) [Arabidopsis thaliana]
  misc_feature (1)..(128): NCBI GI NO: 24496452 NR Description: actin [Hordeum vulgare]
  misc_feature (1)..(128): NCBI GI NO: 15088544 NR Description: actin [Triticum monococcum]
  misc_feature (1)..(128): NCBI GI NO: 15076949 NR Description: actin [Musa x paradisiaca]
  misc_feature (1)..(128): NCBI GI NO: 34905850 NR Description: putative actin
  misc_feature (1)..(128): NCBI GI NO: 461465 NR Description: ACTIN
  misc_feature (1)..(128): NCBI GI NO: 15229955 NR Description: actin 11 (ACT11) [Arabidopsis thaliana]
  misc_feature (1)..(128): NCBI GI NO: 11276970 NR Description: actin [imported] - Malva pusilla
  misc_feature (1)..(128): NCBI GI NO: 11276968 NR Description: actin [imported] - Picea rubens
MVKAGFAGDDAPRAVFPSIVGRPRHTGVMVGMGQKDAYVGDEAQSKRGILTLKYPIEHGIVSNWDDMEKIWHHTFYNELRVAPEEHPVLLTEAPLNPKANREKMTQIMFETFNVPAMYVAIQAVLSLYA

SEQ ID NO: 36925 - protein, 101 aa, Zea mays subsp. mays
  peptide (1)..(101): Ceres Seq. ID no. 13626776
  misc_feature (1)..(100): Pfam Name: Pfam Description:  Actin
  misc_feature (1)..(100): NCBI GI NO: 9965319 NR Description: actin [Setaria italica]
  misc_feature (1)..(100): NCBI GI NO: 15088544 NR Description: actin [Triticum monococcum]
  misc_feature (1)..(100): NCBI GI NO: 24496452 NR Description: actin [Hordeum vulgare]
  misc_feature (1)..(100): NCBI GI NO: 15242516 NR Description: ACTIN 2/7 (sp|P53492) [Arabidopsis thaliana]
  misc_feature (1)..(100): NCBI GI NO: 15076949 NR Description: actin [Musa x paradisiaca]
  misc_feature (1)..(100): NCBI GI NO: 34905850 NR Description: putative actin
  misc_feature (1)..(100): NCBI GI NO: 461465 NR Description: ACTIN
  misc_feature (1)..(100): NCBI GI NO: 15229955 NR Description: actin 11 (ACT11) [Arabidopsis thaliana]
  misc_feature (1)..(100): NCBI GI NO: 11276970 NR Description: actin [imported] - Malva pusilla
  misc_feature (1)..(100): NCBI GI NO: 11276968 NR Description: actin [imported] - Picea rubens
MVGMGQKDAYVGDEAQSKRGILTLKYPIEHGIVSNWDDMEKIWHHTFYNELRVAPEEHPVLLTEAPLNPKANREKMTQIMFETFNVPAMYVAIQAVLSLYA

SEQ ID NO: 36926 - DNA, 945 bp, Zea mays subsp. mays; identical to SEQ ID NO: 25656
  misc_feature (1)..(945): Ceres Seq. ID no. 13636168

SEQ ID NO: 36927 - protein, 195 aa, Zea mays subsp. mays; identical to SEQ ID NO: 25657
  peptide (1)..(195): Ceres Seq. ID no. 13636169
  misc_feature (1)..(75): NCBI GI NO: 34394517 NR Description: r40g2 protein
  misc_feature (1)..(75): NCBI GI NO: 7489571 NR Description: r40c1 protein - rice
  misc_feature (1)..(75): NCBI GI NO: 7489572 NR Description: r40g2 protein - rice (fragment)
  misc_feature (1)..(75): NCBI GI NO: 34902150 NR Description: Putative r40c1 protein - rice
  misc_feature (26)..(75): NCBI GI NO: 34394517 NR Description: r40g2 protein
  misc_feature (26)..(75): NCBI GI NO: 34394518 NR Description: putative r40c2 protein
  misc_feature (26)..(75): NCBI GI NO: 7489572 NR Description: r40g2 protein - rice (fragment)
  misc_feature (7)..(75): NCBI GI NO: 34894060 NR Description: putative r40c1 protein
  misc_feature (26)..(73): NCBI GI NO: 18404934 NR Description: lectin repeat protein family
  misc_feature (26)..(73): NCBI GI NO: 25408635 NR Description: hypothetical protein At2g39050

SEQ ID NO: 36928 - protein, 134 aa, Zea mays subsp. mays; identical to SEQ ID NO: 25658
  peptide (1)..(134): Ceres Seq. ID no. 13636170
  misc_feature (1)..(14): NCBI GI NO: 34394517 NR Description: r40g2 protein
  misc_feature (1)..(14): NCBI GI NO: 7489571 NR Description: r40c1 protein - rice
  misc_feature (1)..(14): NCBI GI NO: 7489572 NR Description: r40g2 protein - rice (fragment)
  misc_feature (1)..(14): NCBI GI NO: 34902150 NR Description: Putative r40c1 protein - rice
  misc_feature (1)..(14): NCBI GI NO: 34394517 NR Description: r40g2 protein
  misc_feature (1)..(14): NCBI GI NO: 34394518 NR Description: putative r40c2 protein
  misc_feature (1)..(14): NCBI GI NO: 7489572 NR Description: r40g2 protein - rice (fragment)
  misc_feature (1)..(14): NCBI GI NO: 34894060 NR Description: putative r40c1 protein
  misc_feature (1)..(12): NCBI GI NO: 18404934 NR Description: lectin repeat protein family
  misc_feature (1)..(12): NCBI GI NO: 25408635 NR Description: hypothetical protein At2g39050

SEQ ID NO: 36929 - protein, 107 aa, Zea mays subsp. mays; identical to SEQ ID NO: 25659
  peptide (1)..(107): Ceres Seq. ID no. 13636171
  misc_feature (50)..(107): Pfam Name: Pfam Description:  Equine herpesvirus glycoprotein gp2
  misc_feature (54)..(107): NCBI GI NO: 34394516 NR Description: putative r40c1 protein
  misc_feature (50)..(107): NCBI GI NO: 17221108 NR Description: glycoprotein gp2 [Equine herpesvirus 1]
  misc_feature (50)..(107): NCBI GI NO: 17221104 NR Description: glycoprotein gp2 [Equine herpesvirus 1]
  misc_feature (50)..(107): NCBI GI NO: 17221110 NR Description: glycoprotein gp2 [Equine herpesvirus 1]
  misc_feature (50)..(107): NCBI GI NO: 17221100 NR Description: glycoprotein gp2 [Equine herpesvirus 1]
  misc_feature (18)..(107): NCBI GI NO: 17221108 NR Description: glycoprotein gp2 [Equine herpesvirus 1]
  misc_feature (18)..(107): NCBI GI NO: 17221104 NR Description: glycoprotein gp2 [Equine herpesvirus 1]
  misc_feature (18)..(107): NCBI GI NO: 17221110 NR Description: glycoprotein gp2 [Equine herpesvirus 1]
  misc_feature (18)..(107): NCBI GI NO: 17221100 NR Description: glycoprotein gp2 [Equine herpesvirus 1]
  misc_feature (50)..(107): NCBI GI NO: 17221114 NR Description: glycoprotein gp2 [Equine herpesvirus 1]

SEQ ID NO: 36930 - DNA, 1931 bp, Zea mays subsp. mays; identical to SEQ ID NO: 31717
  misc_feature (1)..(1931): Ceres Seq. ID no. 13636275

SEQ ID NO: 36931 - protein, 343 aa, Zea mays subsp. mays; identical to SEQ ID NO: 31718
  peptide (1)..(343): Ceres Seq. ID no. 13636276
  misc_feature (173)..(338): Pfam Name: Pfam Description:  Protein kinase domain
  misc_feature (147)..(338): NCBI GI NO: 34897534 NR Description: OSJNBa0042L16.4
  misc_feature (12)..(85): NCBI GI NO: 34897534 NR Description: OSJNBa0042L16.4
  misc_feature (10)..(338): NCBI GI NO: 14194119 NR Description: At1g01540/F22L4_6 [Arabidopsis thaliana]
  misc_feature (10)..(338): NCBI GI NO: 15223428 NR Description: protein kinase family [Arabidopsis thaliana]
  misc_feature (7)..(338): NCBI GI NO: 15234142 NR Description: protein kinase family [Arabidopsis thaliana]
  misc_feature (10)..(338): NCBI GI NO: 15235432 NR Description: protein kinase family [Arabidopsis thaliana]
  misc_feature (127)..(338): NCBI GI NO: 37535714 NR Description: putative kinase
  misc_feature (10)..(118): NCBI GI NO: 37535714 NR Description: putative kinase
  misc_feature (14)..(338): NCBI GI NO: 37536398 NR Description: putative receptor-like protein kinase
  misc_feature (1)..(17): NCBI GI NO: 37536398 NR Description: putative receptor-like protein kinase

SEQ ID NO: 36932 - protein, 211 aa, Zea mays subsp. mays; identical to SEQ ID NO: 31719
  peptide (1)..(211): Ceres Seq. ID no. 13636277
  misc_feature (41)..(206): Pfam Name: Pfam Description:  Protein kinase domain
  misc_feature (15)..(206): NCBI GI NO: 34897534 NR Description: OSJNBa0042L16.4
  misc_feature (1)..(206): NCBI GI NO: 14194119 NR Description: At1g01540/F22L4_6 [Arabidopsis thaliana]
  misc_feature (1)..(206): NCBI GI NO: 15223428 NR Description: protein kinase family [Arabidopsis thaliana]
  misc_feature (1)..(206): NCBI GI NO: 15234142 NR Description: protein kinase family [Arabidopsis thaliana]
  misc_feature (1)..(206): NCBI GI NO: 15235432 NR Description: protein kinase family [Arabidopsis thaliana]
  misc_feature (1)..(206): NCBI GI NO: 37535714 NR Description: putative kinase
  misc_feature (1)..(206): NCBI GI NO: 37536398 NR Description: putative receptor-like protein kinase
  misc_feature (1)..(206): NCBI GI NO: 25518287 NR Description: hypothetical protein F22L4
  misc_feature (10)..(206): NCBI GI NO: 15231637 NR Description: protein kinase family [Arabidopsis thaliana]
  misc_feature (1)..(206): NCBI GI NO: 30690058 NR Description: protein kinase family [Arabidopsis thaliana]

SEQ ID NO: 36933 - DNA, 549 bp, Zea mays subsp. mays
  misc_feature (1)..(549): Ceres Seq. ID no. 13625268
accaacaggaaaaaaggcccagaggcggtgccgtgaccgattcgagacgcaagagaaggatcgagacgaggcggcggttttccgggggcagcatcggcgcggccacgaaagatgtcttactcaagaggctcaaggtatggatctcgctcgccttactcgagaagcacaaggtaccgaagtcgctctaggagtgtcgactctagtgatgctgaaaaccctgggaacaacctgtatgtgactggtttgtcagctcgtgtaacggatcgagatctggagaagcacttctccactgagggtgaggtgattgatgcaagcgttgtatatgatccttggacaagggaatcacggggttttggttttgttaccatggctgctgttaaagatgcagatcgctgcatcaaatatctggaccgttctgtgttgcaaggtcgggtcataactgttgagaagattttgttgacagcaacagggtagatgttggtagctgctctgcaacaaactgatacaacctaacaccaaaccatgccaacctcagccaaagggttgtat

SEQ ID NO: 36934 - protein, 120 aa, Zea mays subsp. mays
  peptide (1)..(120): Ceres Seq. ID no. 13625269
  misc_feature (40)..(111): Pfam Name: a.k.a. RRM, RBD, or RNP domain Pfam Description: RNA recognition motif.
  misc_feature (21)..(113): NCBI GI NO: 34902002 NR Description: putative transformer serine/arginine-richribonucleoprotein
  misc_feature (1)..(115): NCBI GI NO: 30680096 NR Description: transformer serine/arginine-rich ribonucleoprotein
  misc_feature (1)..(113): NCBI GI NO: 18390758 NR Description: transformer serine/arginine-rich ribonucleoprotein
  misc_feature (1)..(113): NCBI GI NO: 28973767 NR Description: putative transformer-SR ribonucleoprotein
  misc_feature (1)..(113): NCBI GI NO: 40253470 NR Description: putative transformer-SR ribonucleoprotein
  misc_feature (1)..(113): NCBI GI NO: 11275253 NR Description: transformer-2-like protein - liverwort
  misc_feature (26)..(113): NCBI GI NO: 8778550 NR Description: F22G5.31 [Arabidopsis thaliana]
  misc_feature (2)..(113): NCBI GI NO: 7489207 NR Description: transformer-SR ribonucleoprotein - common tobacco
  misc_feature (1)..(113): NCBI GI NO: 40738429 NR Description: hypothetical protein AN6676.2
  misc_feature (1)..(113): NCBI GI NO: 681904 NR Description: cp29 [Arabidopsis thaliana]
MSYSRGSRYGSRSPYSRSTRYRSRSRSVDSSDAENPGNNLYVTGLSARVTDRDLEKHFSTEGEVIDASVVYDPWTRESRGFGFVTMAAVKDADRCIKYLDRSVLQGRVITVEKILLTATG

SEQ ID NO: 36935 - protein, 78 aa, Zea mays subsp. mays
  peptide (1)..(78): Ceres Seq. ID no. 13625270
PTGKKAQRRCRDRFETQEKDRDEAAVFRGQHRRGHERCLTQEAQGMDLARLTREAQGTEVALGVSTLVMLKTLGTTCM

SEQ ID NO: 36936 - protein, 61 aa, Zea mays subsp. mays
  peptide (1)..(61): Ceres Seq. ID no. 13625271
QQEKRPRGGAVTDSRRKRRIETRRRFSGGSIGAATKDVLLKRLKVWISLALLEKHKVPKSL

SEQ ID NO: 36937 - DNA, 514 bp, Zea mays subsp. mays
  misc_feature (1)..(514): Ceres Seq. ID no. 13625317
aaaacttctcctcttgaggaaggcagcccgagcgagcgcgctgcaatggcggactcgtcggcgccgacgagagtgatgatggcggtgaacgagtcgtcgctcaaggggtacccgcacccctccatcagctgtcgcaccgccttcgactggacgctctccaagctcgtccgctccaaccctgggggcttccacttcctcttcgtccacgttcatgtccccgacgaggacggatttgatgacatggatagcatctatgcttcgccggaggactttcaccaaatgaagcagagagacaagataagagggcttcatttgctcgagtactttgtaaaccaatgccatcagttagggataaaatgcgaggcatggatcagacatggagatccaaaggaggttatctgcagcgaagtgaagagagtccagcctgaccttctagttgtgggaagtaggggtcttgggccatttcagaggaggacaagcctggtgcaatggtgagagctatctcgctgagtca

SEQ ID NO: 36938 - protein, 164 aa, Zea mays subsp. mays
  peptide (1)..(164): Ceres Seq. ID no. 13625318
  misc_feature (22)..(157): Pfam Name: Pfam Description:  Universal stress protein family
  misc_feature (16)..(157): NCBI GI NO: 19387249 NR Description: putative ethylene-responsive protein
  misc_feature (20)..(157): NCBI GI NO: 15241464 NR Description: expressed protein [Arabidopsis thaliana]
  misc_feature (20)..(157): NCBI GI NO: 6016711 NR Description: unknown protein [Arabidopsis thaliana]
  misc_feature (20)..(157): NCBI GI NO: 18395845 NR Description: expressed protein [Arabidopsis thaliana]
  misc_feature (26)..(157): NCBI GI NO: 21536534 NR Description: putative ethylene-responsive protein
  misc_feature (1)..(157): NCBI GI NO: 30681955 NR Description: ethylene-responsive protein -related
  misc_feature (1)..(157): NCBI GI NO: 30681959 NR Description: ethylene-responsive protein -related
  misc_feature (5)..(157): NCBI GI NO: 40539010 NR Description: putative stress-related protein
  misc_feature (16)..(157): NCBI GI NO: 34914610 NR Description: P0520B06.18
  misc_feature (83)..(157): NCBI GI NO: 18399413 NR Description: ethylene-responsive protein -related
KTSPLEEGSPSERAAMADSSAPTRVMMAVNESSLKGYPHPSISCRTAFDWTLSKLVRSNPGGFHFLFVHVHVPDEDGFDDMDSIYASPEDFHQMKQRDKIRGLHLLEYFVNQCHQLGIKCEAWIRHGDPKEVICSEVKRVQPDLLVVGSRGLGPFQRRTSLVQW

SEQ ID NO: 36939 - protein, 149 aa, Zea mays subsp. mays
  peptide (1)..(149): Ceres Seq. ID no. 13625319
  misc_feature (7)..(142): Pfam Name: Pfam Description:  Universal stress protein family
  misc_feature (1)..(142): NCBI GI NO: 19387249 NR Description: putative ethylene-responsive protein
  misc_feature (5)..(142): NCBI GI NO: 15241464 NR Description: expressed protein [Arabidopsis thaliana]
  misc_feature (5)..(142): NCBI GI NO: 6016711 NR Description: unknown protein [Arabidopsis thaliana]
  misc_feature (5)..(142): NCBI GI NO: 18395845 NR Description: expressed protein [Arabidopsis thaliana]
  misc_feature (11)..(142): NCBI GI NO: 21536534 NR Description: putative ethylene-responsive protein
  misc_feature (1)..(142): NCBI GI NO: 30681955 NR Description: ethylene-responsive protein -related
  misc_feature (1)..(142): NCBI GI NO: 30681959 NR Description: ethylene-responsive protein -related
  misc_feature (1)..(142): NCBI GI NO: 40539010 NR Description: putative stress-related protein
  misc_feature (1)..(142): NCBI GI NO: 34914610 NR Description: P0520B06.18
  misc_feature (68)..(142): NCBI GI NO: 18399413 NR Description: ethylene-responsive protein -related
MADSSAPTRVMMAVNESSLKGYPHPSISCRTAFDWTLSKLVRSNPGGFHFLFVHVHVPDEDGFDDMDSIYASPEDFHQMKQRDKIRGLHLLEYFVNQCHQLGIKCEAWIRHGDPKEVICSEVKRVQPDLLVVGSRGLGPFQRRTSLVQW

SEQ ID NO: 36940 - protein, 139 aa, Zea mays subsp. mays
  peptide (1)..(139): Ceres Seq. ID no. 13625320
  misc_feature (1)..(132): Pfam Name: Pfam Description:  Universal stress protein family
  misc_feature (1)..(132): NCBI GI NO: 19387249 NR Description: putative ethylene-responsive protein
  misc_feature (1)..(132): NCBI GI NO: 15241464 NR Description: expressed protein [Arabidopsis thaliana]
  misc_feature (1)..(132): NCBI GI NO: 6016711 NR Description: unknown protein [Arabidopsis thaliana]
  misc_feature (1)..(132): NCBI GI NO: 18395845 NR Description: expressed protein [Arabidopsis thaliana]
  misc_feature (1)..(132): NCBI GI NO: 21536534 NR Description: putative ethylene-responsive protein
  misc_feature (1)..(132): NCBI GI NO: 30681955 NR Description: ethylene-responsive protein -related
  misc_feature (1)..(132): NCBI GI NO: 30681959 NR Description: ethylene-responsive protein -related
  misc_feature (1)..(132): NCBI GI NO: 40539010 NR Description: putative stress-related protein
  misc_feature (1)..(132): NCBI GI NO: 34914610 NR Description: P0520B06.18
  misc_feature (58)..(132): NCBI GI NO: 18399413 NR Description: ethylene-responsive protein -related
MMAVNESSLKGYPHPSISCRTAFDWTLSKLVRSNPGGFHFLFVHVHVPDEDGFDDMDSIYASPEDFHQMKQRDKIRGLHLLEYFVNQCHQLGIKCEAWIRHGDPKEVICSEVKRVQPDLLVVGSRGLGPFQRRTSLVQW

SEQ ID NO: 36941 - DNA, 955 bp, Zea mays subsp. mays
  misc_feature (1)..(955): Ceres Seq. ID no. 13627624
gaaccgcacaaacgcgctcggcgcttccccacccaaaaaggaaaaccaaccaccactcccaccaccctccgcctccgcctgcgccacagctgccgattcgaaagccctcgtcctgacccctcgcaaaaccctagctccaaccaccatgaagggcaaggccaacgcctccaagaaggatgaggccaggctccgggccggcggcggcggcgccggaaagcgcaagaaggccgccgcgagcggcaagcccaagcgccctccctccgccttcttcgtcttcatgtctgaattcaggcaggagtaccaggcgcagcaccctggcaacaagagcgttgcggccgtgagcaaggcagcaggggaaaagtggcgctctatgtcagagcaagagaagcaaccctatgtggaccaagctgggcagaagaagcaggactatgagaagactaaggcaaatattgagaaggagagcacaagctcaaagaaggctaagactgatgacgacgatggctcgaagtccgaggtcgatgatgaggatggcggtagtgacgaggataacgacgacgacgagtaaatagtatttccgctgttgtgaggtagcaaatcgattgttaggtccccaattagctcactggtttgctatctttaatgttaagttgtttggaacaggtgtttatgaaggggatctattagtttcgtgaggttgttagtttagtgcattagcaaagaaaaagccgaatgctgctagctattatgttgcttttcttttgctaatcacttgtgtcacaactttctgtacctgtttcattgactaatctagtgactagtcagttatgggtttaatgtttggttttggttttatatatttctttgttgcattctgtgcggtctacggaagtcatctgtgctgtatgaatgatgaatatctgcttgtggctcgtttcagtttagtgagtttttgttt

SEQ ID NO: 36942 - protein, 187 aa, Zea mays subsp. mays
  peptide (1)..(187): Ceres Seq. ID no. 13627625
  misc_feature (82)..(151): Pfam Name: high mobility group Pfam Description: HMG
  misc_feature (49)..(187): NCBI GI NO: 7446227 NR Description: high mobility group protein HMGc2 - maize
  misc_feature (49)..(187): NCBI GI NO: 7446226 NR Description: high mobility group protein HMGc1 - maize
  misc_feature (49)..(187): NCBI GI NO: 17017394 NR Description: HMG-like nucleosome/chromatin assembly factor D
  misc_feature (49)..(187): NCBI GI NO: 18700443 NR Description: high mobility group box protein 2
  misc_feature (50)..(186): NCBI GI NO: 7446231 NR Description: probable high mobility group protein HMG1 - swordbean
  misc_feature (42)..(187): NCBI GI NO: 7446229 NR Description: high mobility group protein MNB1b - maize
  misc_feature (49)..(187): NCBI GI NO: 123378 NR Description: DNA-BINDING PROTEIN MNB1B (HMG1-LIKE PROTEIN)
  misc_feature (52)..(187): NCBI GI NO: 729737 NR Description: HMG1/2-LIKE PROTEIN
  misc_feature (49)..(187): NCBI GI NO: 3885888 NR Description: high mobility group protein [Oryza sativa]
  misc_feature (49)..(187): NCBI GI NO: 729738 NR Description: HMG1/2-LIKE PROTEIN
NRTNALGASPPKKENQPPLPPPSASACATAADSKALVLTPRKTLAPTTMKGKANASKKDEARLRAGGGGAGKRKKAAASGKPKRPPSAFFVFMSEFRQEYQAQHPGNKSVAAVSKAAGEKWRSMSEQEKQPYVDQAGQKKQDYEKTKANIEKESTSSKKAKTDDDDGSKSEVDDEDGGSDEDNDDDE

SEQ ID NO: 36943 - protein, 139 aa, Zea mays subsp. mays
  peptide (1)..(139): Ceres Seq. ID no. 13627626
  misc_feature (34)..(103): Pfam Name: high mobility group Pfam Description: HMG
  misc_feature (1)..(139): NCBI GI NO: 7446227 NR Description: high mobility group protein HMGc2 - maize
  misc_feature (1)..(139): NCBI GI NO: 7446226 NR Description: high mobility group protein HMGc1 - maize
  misc_feature (1)..(139): NCBI GI NO: 17017394 NR Description: HMG-like nucleosome/chromatin assembly factor D
  misc_feature (1)..(139): NCBI GI NO: 18700443 NR Description: high mobility group box protein 2
  misc_feature (2)..(138): NCBI GI NO: 7446231 NR Description: probable high mobility group protein HMG1 - swordbean
  misc_feature (1)..(139): NCBI GI NO: 7446229 NR Description: high mobility group protein MNB1b - maize
  misc_feature (1)..(139): NCBI GI NO: 123378 NR Description: DNA-BINDING PROTEIN MNB1B (HMG1-LIKE PROTEIN)
  misc_feature (4)..(139): NCBI GI NO: 729737 NR Description: HMG1/2-LIKE PROTEIN
  misc_feature (1)..(139): NCBI GI NO: 3885888 NR Description: high mobility group protein [Oryza sativa]
  misc_feature (1)..(139): NCBI GI NO: 729738 NR Description: HMG1/2-LIKE PROTEIN
MKGKANASKKDEARLRAGGGGAGKRKKAAASGKPKRPPSAFFVFMSEFRQEYQAQHPGNKSVAAVSKAAGEKWRSMSEQEKQPYVDQAGQKKQDYEKTKANIEKESTSSKKAKTDDDDGSKSEVDDEDGGSDEDNDDDE

SEQ ID NO: 36944 - protein, 95 aa, Zea mays subsp. mays
  peptide (1)..(95): Ceres Seq. ID no. 13627627
  misc_feature (1)..(59): Pfam Name: high mobility group Pfam Description: HMG
  misc_feature (1)..(95): NCBI GI NO: 7446227 NR Description: high mobility group protein HMGc2 - maize
  misc_feature (1)..(95): NCBI GI NO: 7446226 NR Description: high mobility group protein HMGc1 - maize
  misc_feature (1)..(95): NCBI GI NO: 17017394 NR Description: HMG-like nucleosome/chromatin assembly factor D
  misc_feature (1)..(95): NCBI GI NO: 18700443 NR Description: high mobility group box protein 2
  misc_feature (1)..(94): NCBI GI NO: 7446231 NR Description: probable high mobility group protein HMG1 - swordbean
  misc_feature (1)..(95): NCBI GI NO: 7446229 NR Description: high mobility group protein MNB1b - maize
  misc_feature (1)..(95): NCBI GI NO: 123378 NR Description: DNA-BINDING PROTEIN MNB1B (HMG1-LIKE PROTEIN)
  misc_feature (1)..(95): NCBI GI NO: 729737 NR Description: HMG1/2-LIKE PROTEIN
  misc_feature (1)..(95): NCBI GI NO: 3885888 NR Description: high mobility group protein [Oryza sativa]
  misc_feature (1)..(95): NCBI GI NO: 729738 NR Description: HMG1/2-LIKE PROTEIN
MSEFRQEYQAQHPGNKSVAAVSKAAGEKWRSMSEQEKQPYVDQAGQKKQDYEKTKANIEKESTSSKKAKTDDDDGSKSEVDDEDGGSDEDNDDDE

SEQ ID NO: 36945 - DNA, 1462 bp, Zea mays subsp. mays; identical to SEQ ID NO: 32498
  misc_feature (1)..(1462): Ceres Seq. ID no. 13579635

SEQ ID NO: 36946 - protein, 410 aa, Zea mays subsp. mays; identical to SEQ ID NO: 32499
  peptide (1)..(410): Ceres Seq. ID no. 13579636
  misc_feature (30)..(103): Pfam Name: Pfam Description:  Ubiquitin family
  misc_feature (27)..(410): NCBI GI NO: 100934 NR Description: polyubiquitin - maize
  misc_feature (27)..(410): NCBI GI NO: 481477 NR Description: polyubiquitin 6 - rice
  misc_feature (30)..(410): NCBI GI NO: 899608 NR Description: polyubiquitin
  misc_feature (27)..(409): NCBI GI NO: 902584 NR Description: polyubiquitin containing 7 ubiquitin monomers
  misc_feature (27)..(410): NCBI GI NO: 902584 NR Description: polyubiquitin containing 7 ubiquitin monomers
  misc_feature (30)..(410): NCBI GI NO: 4809266 NR Description: polyubiquitin [Sporobolus stapfianus]
  misc_feature (27)..(409): NCBI GI NO: 100524 NR Description: polyubiquitin 6 - common sunflower
  misc_feature (27)..(409): NCBI GI NO: 16660462 NR Description: polyubiquitin OUB2 [Olea europaea]
  misc_feature (27)..(409): NCBI GI NO: 4115337 NR Description: ubiquitin [Pisum sativum]
  misc_feature (27)..(409): NCBI GI NO: 100934 NR Description: polyubiquitin - maize

SEQ ID NO: 36947 - protein, 381 aa, Zea mays subsp. mays; identical to SEQ ID NO: 32500
  peptide (1)..(381): Ceres Seq. ID no. 13579637
  misc_feature (1)..(74): Pfam Name: Pfam Description:  Ubiquitin family
  misc_feature (1)..(381): NCBI GI NO: 100934 NR Description: polyubiquitin - maize
  misc_feature (1)..(381): NCBI GI NO: 481477 NR Description: polyubiquitin 6 - rice
  misc_feature (1)..(381): NCBI GI NO: 899608 NR Description: polyubiquitin
  misc_feature (1)..(380): NCBI GI NO: 902584 NR Description: polyubiquitin containing 7 ubiquitin monomers
  misc_feature (1)..(381): NCBI GI NO: 902584 NR Description: polyubiquitin containing 7 ubiquitin monomers
  misc_feature (1)..(381): NCBI GI NO: 4809266 NR Description: polyubiquitin [Sporobolus stapfianus]
  misc_feature (1)..(380): NCBI GI NO: 100524 NR Description: polyubiquitin 6 - common sunflower
  misc_feature (1)..(380): NCBI GI NO: 418854 NR Description: polyubiquitin 6 - parsley
  misc_feature (1)..(380): NCBI GI NO: 16660462 NR Description: polyubiquitin OUB2 [Olea europaea]
  misc_feature (1)..(380): NCBI GI NO: 4115337 NR Description: ubiquitin [Pisum sativum]

SEQ ID NO: 36948 - protein, 305 aa, Zea mays subsp. mays; identical to SEQ ID NO: 32501
  peptide (1)..(305): Ceres Seq. ID no. 13579638
  misc_feature (1)..(74): Pfam Name: Pfam Description:  Ubiquitin family
  misc_feature (1)..(305): NCBI GI NO: 100934 NR Description: polyubiquitin - maize
  misc_feature (1)..(305): NCBI GI NO: 481477 NR Description: polyubiquitin 6 - rice
  misc_feature (1)..(305): NCBI GI NO: 899608 NR Description: polyubiquitin
  misc_feature (1)..(304): NCBI GI NO: 902584 NR Description: polyubiquitin containing 7 ubiquitin monomers
  misc_feature (1)..(305): NCBI GI NO: 902584 NR Description: polyubiquitin containing 7 ubiquitin monomers
  misc_feature (1)..(305): NCBI GI NO: 4809266 NR Description: polyubiquitin [Sporobolus stapfianus]
  misc_feature (1)..(304): NCBI GI NO: 100524 NR Description: polyubiquitin 6 - common sunflower
  misc_feature (1)..(304): NCBI GI NO: 16660462 NR Description: polyubiquitin OUB2 [Olea europaea]
  misc_feature (1)..(304): NCBI GI NO: 4115337 NR Description: ubiquitin [Pisum sativum]
  misc_feature (1)..(304): NCBI GI NO: 170352 NR Description: hexameric polyubiquitin

SEQ ID NO: 36949 - DNA, 455 bp, Zea mays subsp. mays
  misc_feature (1)..(455): Ceres Seq. ID no. 13636910
taatcgtccatccgtatttccgtcacaactcacaacccgagccccccaaacccgaagcagcaggagctcccctgaccttgctccgcctccgatcaaggaaaaggaagatgagctactacggccagcagccccccgtcggcgtcccgccgcagcaaggctacccggggaaggacggctacccgccagcggggtacccgccggccggctaccccccgccggcgcagggctacccgccgcagggctacccgcagcagggttacccacagcagggctacccgccgcagtacgcgcagccgcctccacagcagcagcagagcagcgggccttccttcatggaaggatgcttggctgccctctgctgctgctgcctcctggacgcctgcttctgacggaaccatccgtgccgggtccaacacggctgcaagtgaagcaaccagcttacggaagagctggaa

SEQ ID NO: 36950 - protein, 151 aa, Zea mays subsp. mays
  peptide (1)..(151): Ceres Seq. ID no. 13636911
  misc_feature (2)..(104): NCBI GI NO: 23000746 NR Description: hypothetical protein [Magnetococcus sp. MC-1]
NRPSVFPSQLTTRAPQTRSSRSSPDLAPPPIKEKEDELLRPAAPRRRPAAARLPGEGRLPASGVPAGRLPPAGAGLPAAGLPAAGLPTAGLPAAVRAAASTAAAEQRAFLHGRMLGCPLLLLPPGRLLLTEPSVPGPTRLQVKQPAYGRAG

SEQ ID NO: 36951 - protein, 128 aa, Zea mays subsp. mays
  peptide (1)..(128): Ceres Seq. ID no. 13636912
  misc_feature (3)..(100): Pfam Name: Pfam Description:  Extensin-like region
  misc_feature (36)..(128): NCBI GI NO: 40538901 NR Description: expressed protein
  misc_feature (36)..(128): NCBI GI NO: 34393718 NR Description: adhesive/proline-rich protein homolog-like protein
  misc_feature (36)..(128): NCBI GI NO: 1808688 NR Description: hypothetical protein [Sporobolus stapfianus]
  misc_feature (36)..(113): NCBI GI NO: 34901106 NR Description: contains ESTsC24875
  misc_feature (36)..(128): NCBI GI NO: 15227350 NR Description: proline-rich protein family [Arabidopsis thaliana]
  misc_feature (38)..(128): NCBI GI NO: 18425209 NR Description: expressed protein [Arabidopsis thaliana]
  misc_feature (41)..(128): NCBI GI NO: 21554421 NR Description: unknown [Arabidopsis thaliana]
  misc_feature (38)..(128): NCBI GI NO: 21618167 NR Description: adhesive/proline-rich protein homolog
  misc_feature (43)..(128): NCBI GI NO: 15229624 NR Description: proline-rich protein family [Arabidopsis thaliana]
  misc_feature (29)..(108): NCBI GI NO: 15229624 NR Description: proline-rich protein family [Arabidopsis thaliana]
IVHPYFRHNSQPEPPKPEAAGAPLTLLRLRSRKRKMSYYGQQPPVGVPPQQGYPGKDGYPPAGYPPAGYPPPAQGYPPQGYPQQGYPQQGYPPQYAQPPPQQQQSSGPSFMEGCLAALCCCCLLDACF

SEQ ID NO: 36952 - protein, 93 aa, Zea mays subsp. mays
  peptide (1)..(93): Ceres Seq. ID no. 13636913
  misc_feature (1)..(65): Pfam Name: Pfam Description:  Extensin-like region
  misc_feature (1)..(93): NCBI GI NO: 40538901 NR Description: expressed protein
  misc_feature (1)..(93): NCBI GI NO: 34393718 NR Description: adhesive/proline-rich protein homolog-like protein
  misc_feature (1)..(93): NCBI GI NO: 1808688 NR Description: hypothetical protein [Sporobolus stapfianus]
  misc_feature (1)..(78): NCBI GI NO: 34901106 NR Description: contains ESTsC24875
  misc_feature (1)..(93): NCBI GI NO: 15227350 NR Description: proline-rich protein family [Arabidopsis thaliana]
  misc_feature (3)..(93): NCBI GI NO: 18425209 NR Description: expressed protein [Arabidopsis thaliana]
  misc_feature (6)..(93): NCBI GI NO: 21554421 NR Description: unknown [Arabidopsis thaliana]
  misc_feature (3)..(93): NCBI GI NO: 21618167 NR Description: adhesive/proline-rich protein homolog
  misc_feature (8)..(93): NCBI GI NO: 15229624 NR Description: proline-rich protein family [Arabidopsis thaliana]
  misc_feature (1)..(73): NCBI GI NO: 15229624 NR Description: proline-rich protein family [Arabidopsis thaliana]
MSYYGQQPPVGVPPQQGYPGKDGYPPAGYPPAGYPPPAQGYPPQGYPQQGYPQQGYPPQYAQPPPQQQQSSGPSFMEGCLAALCCCCLLDACF

SEQ ID NO: 36953 - DNA, 538 bp, Zea mays subsp. mays
  misc_feature (1)..(538): Ceres Seq. ID no. 13629237
  misc_feature (443)..(443): n is a, c, t, g, unknown, or other
  misc_feature (480)..(480): n is a, c, t, g, unknown, or other
  misc_feature (407)..(407): n is a, c, t, g, unknown, or other
  misc_feature (434)..(434): n is a, c, t, g, unknown, or other
  misc_feature (481)..(481): n is a, c, t, g, unknown, or other
  misc_feature (479)..(479): n is a, c, t, g, unknown, or other
  misc_feature (406)..(406): n is a, c, t, g, unknown, or other
  misc_feature (448)..(448): n is a, c, t, g, unknown, or other
  misc_feature (447)..(447): n is a, c, t, g, unknown, or other
  misc_feature (408)..(408): n is a, c, t, g, unknown, or other
  misc_feature (482)..(482): n is a, c, t, g, unknown, or other
  misc_feature (432)..(432): n is a, c, t, g, unknown, or other
  misc_feature (449)..(449): n is a, c, t, g, unknown, or other
  misc_feature (405)..(405): n is a, c, t, g, unknown, or other
agttttcttgtgccgtagctttgtgacaaaagaagtagctgtttgcctctttgcagtgaaagcactaccaacaagaagatgattatcacagagaccaaccgcagagagatctgcaaataccttttcaaagaaggagtattgttcgccaagaaggacttcaatctcccaaagcatccgttgattgagtcagtgcccaacctgcaagtgatcaagctcatgcagagtttcaaatccaaggagtacgttagggagaccttcgcttggatgcactactattggtttctcaccaacgaagggattgagttcttgagaacttatcttaaccttccctcggatgttgttcccgcgaccttgaagaagtctgctaagcccattggtcgttccctttggtggccctcctggtgnnnngccctagaggtcctcgctttgagnanaccggtccntagnnntggtgaccgtgaggggtaccgagggccacnnnngcggtgatgcagcaggtggaaaagggtggagctccagctgattaccagccgctttc

SEQ ID NO: 36954 - protein, 136 aa, Zea mays subsp. mays
  peptide (1)..(136): Ceres Seq. ID no. 13629238
  misc_feature (3)..(98): Pfam Name: Pfam Description:  Plectin/S10 domain
  misc_feature (1)..(132): NCBI GI NO: 15235985 NR Description: 40S ribosomal protein S10 (RPS10A)
  misc_feature (1)..(133): NCBI GI NO: 15237217 NR Description: 40S ribosomal protein S10 (RPS10C)
  misc_feature (1)..(133): NCBI GI NO: 20139798 NR Description: 40S ribosomal protein S10-3
  misc_feature (1)..(101): NCBI GI NO: 15238099 NR Description: expressed protein [Arabidopsis thaliana]
  misc_feature (1)..(132): NCBI GI NO: 34897532 NR Description: OSJNBa0042L16.3
  misc_feature (1)..(132): NCBI GI NO: 34905824 NR Description: putative ribosomal protein S10
  misc_feature (1)..(132): NCBI GI NO: 20140213 NR Description: 40S ribosomal protein S10
  misc_feature (1)..(97): NCBI GI NO: 20140136 NR Description: 40S ribosomal protein S10
  misc_feature (1)..(98): NCBI GI NO: 40642980 NR Description: ribosomal protein S10 [Crassostrea gigas]
  misc_feature (1)..(97): NCBI GI NO: 19920344 NR Description: CG14206-PC [Drosophila melanogaster]
  misc_feature (109)..(109): Xaa is any aa, unknown or other
  misc_feature (110)..(110): Xaa is any aa, unknown or other
  misc_feature (118)..(118): Xaa is any aa, unknown or other
  misc_feature (119)..(119): Xaa is any aa, unknown or other
  misc_feature (122)..(122): Xaa is any aa, unknown or other
  misc_feature (123)..(123): Xaa is any aa, unknown or other
  misc_feature (124)..(124): Xaa is any aa, unknown or other
  misc_feature (134)..(134): Xaa is any aa, unknown or other
  misc_feature (135)..(135): Xaa is any aa, unknown or other
MIITETNRREICKYLFKEGVLFAKKDFNLPKHPLIESVPNLQVIKLMQSFKSKEYVRETFAWMHYYWFLTNEGIEFLRTYLNLPSDVVPATLKKSAKPIGRSLWWPSWXXALEVLALXXPVXXXGDREGYRGPXXR

SEQ ID NO: 36955 - protein, 90 aa, Zea mays subsp. mays
  peptide (1)..(90): Ceres Seq. ID no. 13629239
  misc_feature (1)..(52): Pfam Name: Pfam Description:  Plectin/S10 domain
  misc_feature (1)..(86): NCBI GI NO: 15235985 NR Description: 40S ribosomal protein S10 (RPS10A)
  misc_feature (1)..(87): NCBI GI NO: 15237217 NR Description: 40S ribosomal protein S10 (RPS10C)
  misc_feature (1)..(87): NCBI GI NO: 20139798 NR Description: 40S ribosomal protein S10-3
  misc_feature (1)..(55): NCBI GI NO: 15238099 NR Description: expressed protein [Arabidopsis thaliana]
  misc_feature (1)..(86): NCBI GI NO: 34897532 NR Description: OSJNBa0042L16.3
  misc_feature (1)..(86): NCBI GI NO: 34905824 NR Description: putative ribosomal protein S10
  misc_feature (1)..(86): NCBI GI NO: 20140213 NR Description: 40S ribosomal protein S10
  misc_feature (1)..(51): NCBI GI NO: 20140136 NR Description: 40S ribosomal protein S10
  misc_feature (1)..(52): NCBI GI NO: 40642980 NR Description: ribosomal protein S10 [Crassostrea gigas]
  misc_feature (1)..(51): NCBI GI NO: 19920344 NR Description: CG14206-PC [Drosophila melanogaster]
  misc_feature (63)..(63): Xaa is any aa, unknown or other
  misc_feature (64)..(64): Xaa is any aa, unknown or other
  misc_feature (72)..(72): Xaa is any aa, unknown or other
  misc_feature (73)..(73): Xaa is any aa, unknown or other
  misc_feature (76)..(76): Xaa is any aa, unknown or other
  misc_feature (77)..(77): Xaa is any aa, unknown or other
  misc_feature (78)..(78): Xaa is any aa, unknown or other
  misc_feature (88)..(88): Xaa is any aa, unknown or other
  misc_feature (89)..(89): Xaa is any aa, unknown or other
MQSFKSKEYVRETFAWMHYYWFLTNEGIEFLRTYLNLPSDVVPATLKKSAKPIGRSLWWPSWXXALEVLALXXPVXXXGDREGYRGPXXR

SEQ ID NO: 36956 - protein, 74 aa, Zea mays subsp. mays
  peptide (1)..(74): Ceres Seq. ID no. 13629240
  misc_feature (1)..(70): NCBI GI NO: 15235985 NR Description: 40S ribosomal protein S10 (RPS10A)
  misc_feature (1)..(71): NCBI GI NO: 15237217 NR Description: 40S ribosomal protein S10 (RPS10C)
  misc_feature (1)..(71): NCBI GI NO: 20139798 NR Description: 40S ribosomal protein S10-3
  misc_feature (1)..(39): NCBI GI NO: 15238099 NR Description: expressed protein [Arabidopsis thaliana]
  misc_feature (1)..(70): NCBI GI NO: 34897532 NR Description: OSJNBa0042L16.3
  misc_feature (1)..(70): NCBI GI NO: 34905824 NR Description: putative ribosomal protein S10
  misc_feature (1)..(70): NCBI GI NO: 20140213 NR Description: 40S ribosomal protein S10
  misc_feature (1)..(35): NCBI GI NO: 20140136 NR Description: 40S ribosomal protein S10
  misc_feature (1)..(36): NCBI GI NO: 40642980 NR Description: ribosomal protein S10 [Crassostrea gigas]
  misc_feature (1)..(35): NCBI GI NO: 19920344 NR Description: CG14206-PC [Drosophila melanogaster]
  misc_feature (47)..(47): Xaa is any aa, unknown or other
  misc_feature (48)..(48): Xaa is any aa, unknown or other
  misc_feature (56)..(56): Xaa is any aa, unknown or other
  misc_feature (57)..(57): Xaa is any aa, unknown or other
  misc_feature (60)..(60): Xaa is any aa, unknown or other
  misc_feature (61)..(61): Xaa is any aa, unknown or other
  misc_feature (62)..(62): Xaa is any aa, unknown or other
  misc_feature (72)..(72): Xaa is any aa, unknown or other
  misc_feature (73)..(73): Xaa is any aa, unknown or other
MHYYWFLTNEGIEFLRTYLNLPSDVVPATLKKSAKPIGRSLWWPSWXXALEVLALXXPVXXXGDREGYRGPXXR

SEQ ID NO: 36957 - DNA, 1150 bp, Zea mays subsp. mays
  misc_feature (1)..(1150): Ceres Seq. ID no. 13636132
acacataaccagcacacagctctcgccttctctctcccatcggcacacccgagctcgctccctccttccacgtcgaggtccgagtcctgctttgatggcgaccgacgtggctgagactcccgcgccgttggtggatgcggccccagaggcgcccgccgacgccccggcggcgcctgctgccgacgcgaagccggccaaggccaagaaggccaccgcgccgaagaagcgcgccagcccgacccacccgccgtacgccgagatggtctcggaggcgatcacgtcgctcaaggagaggacggggtccagcagctatgcgattgccaagttcgtggaggacaagcacaaggacaagctcccgcccaacttccgcaagcttctgaacgttcagctcaagaagctcgtcgccggcggcaagctgaccaaggtgaagaactcgtacaagctgtcgtccgccaccaagccgaatcccaagcccaaggccgccccgaagaagcccaagaccggcgctaagaagcccaaggccgctgccaagcccaaagctaagacccccgccaaggcgaagcccgccacaaagcccaagcccgccgcgaagccgaaagccgtagtgaaaccgaagacacccgccaagcccaaggccaagccagctgccaaggcgaagcccaagaccgccggcgctaagccgaagccacttgctaagaaggccggccgcgccaaggcggcgaagacgtcggccaaggacacgccagggaagaaggcccctgccaagaaggccgctccctcaaagaaggcggcgaccccggtgcggaaagcgccgtcccgtaaggccaagaagtaaagcggccaagaaggggggcgcgatgctgtaaatttgatatcggagaggctcgggtacactggtcattcagtatccgagaccgatagctgaggctagtggcgatggaggactgtgttattactactataaactggtggttgtgtttctgtaactggtgaatgatcaagttggaagcttttagtctatcttagatatatcagtggatagtgttttttgtattttcgttttcttttccaatgtgtgttgggtcttgtggattatcctttttttctaatctaatacaatgaagaggcatgtcttttgaagcttcccctg

SEQ ID NO: 36958 - protein, 277 aa, Zea mays subsp. mays
  peptide (1)..(277): Ceres Seq. ID no. 13636133
  misc_feature (80)..(150): Pfam Name: Pfam Description:  linker histone H1 and H5 family
  misc_feature (32)..(277): NCBI GI NO: 121950 NR Description: HISTONE H1
  misc_feature (32)..(275): NCBI GI NO: 34897182 NR Description: histone-like protein
  misc_feature (32)..(275): NCBI GI NO: 5230785 NR Description: histone H1 WH1B.1 [Triticum aestivum]
  misc_feature (33)..(277): NCBI GI NO: 5230785 NR Description: histone H1 WH1B.1 [Triticum aestivum]
  misc_feature (27)..(277): NCBI GI NO: 7439660 NR Description: histone H1 (clone TH32) - wheat
  misc_feature (36)..(277): NCBI GI NO: 7439656 NR Description: histone H1 (clone TH315) - wheat
  misc_feature (32)..(277): NCBI GI NO: 5230790 NR Description: histone H1 WH1A.4 [Triticum aestivum]
  misc_feature (32)..(277): NCBI GI NO: 11558848 NR Description: histone H1 [Triticum aestivum]
  misc_feature (32)..(277): NCBI GI NO: 5230781 NR Description: histone H1 WH1A.1 [Triticum aestivum]
  misc_feature (38)..(277): NCBI GI NO: 2623960 NR Description: histone H1 [Apium graveolens]
HITSTQLSPSLSHRHTRARSLLPRRGPSPALMATDVAETPAPLVDAAPEAPADAPAAPAADAKPAKAKKATAPKKRASPTHPPYAEMVSEAITSLKERTGSSSYAIAKFVEDKHKDKLPPNFRKLLNVQLKKLVAGGKLTKVKNSYKLSSATKPNPKPKAAPKKPKTGAKKPKAAAKPKAKTPAKAKPATKPKPAAKPKAVVKPKTPAKPKAKPAAKAKPKTAGAKPKPLAKKAGRAKAAKTSAKDTPGKKAPAKKAAPSKKAATPVRKAPSRKAKK

SEQ ID NO: 36959 - protein, 246 aa, Zea mays subsp. mays
  peptide (1)..(246): Ceres Seq. ID no. 13636134
  misc_feature (49)..(119): Pfam Name: Pfam Description:  linker histone H1 and H5 family
  misc_feature (1)..(246): NCBI GI NO: 121950 NR Description: HISTONE H1
  misc_feature (1)..(244): NCBI GI NO: 34897182 NR Description: histone-like protein
  misc_feature (1)..(244): NCBI GI NO: 5230785 NR Description: histone H1 WH1B.1 [Triticum aestivum]
  misc_feature (2)..(246): NCBI GI NO: 5230785 NR Description: histone H1 WH1B.1 [Triticum aestivum]
  misc_feature (1)..(246): NCBI GI NO: 7439660 NR Description: histone H1 (clone TH32) - wheat
  misc_feature (5)..(246): NCBI GI NO: 7439656 NR Description: histone H1 (clone TH315) - wheat
  misc_feature (1)..(246): NCBI GI NO: 5230790 NR Description: histone H1 WH1A.4 [Triticum aestivum]
  misc_feature (1)..(246): NCBI GI NO: 11558848 NR Description: histone H1 [Triticum aestivum]
  misc_feature (1)..(246): NCBI GI NO: 5230781 NR Description: histone H1 WH1A.1 [Triticum aestivum]
  misc_feature (7)..(246): NCBI GI NO: 2623960 NR Description: histone H1 [Apium graveolens]
MATDVAETPAPLVDAAPEAPADAPAAPAADAKPAKAKKATAPKKRASPTHPPYAEMVSEAITSLKERTGSSSYAIAKFVEDKHKDKLPPNFRKLLNVQLKKLVAGGKLTKVKNSYKLSSATKPNPKPKAAPKKPKTGAKKPKAAAKPKAKTPAKAKPATKPKPAAKPKAVVKPKTPAKPKAKPAAKAKPKTAGAKPKPLAKKAGRAKAAKTSAKDTPGKKAPAKKAAPSKKAATPVRKAPSRKAKK

SEQ ID NO: 36960 - protein, 191 aa, Zea mays subsp. mays
  peptide (1)..(191): Ceres Seq. ID no. 13636135
  misc_feature (1)..(64): Pfam Name: Pfam Description:  linker histone H1 and H5 family
  misc_feature (1)..(191): NCBI GI NO: 121950 NR Description: HISTONE H1
  misc_feature (1)..(189): NCBI GI NO: 34897182 NR Description: histone-like protein
  misc_feature (1)..(189): NCBI GI NO: 5230785 NR Description: histone H1 WH1B.1 [Triticum aestivum]
  misc_feature (1)..(191): NCBI GI NO: 5230785 NR Description: histone H1 WH1B.1 [Triticum aestivum]
  misc_feature (1)..(191): NCBI GI NO: 7439660 NR Description: histone H1 (clone TH32) - wheat
  misc_feature (1)..(191): NCBI GI NO: 7439656 NR Description: histone H1 (clone TH315) - wheat
  misc_feature (1)..(191): NCBI GI NO: 5230790 NR Description: histone H1 WH1A.4 [Triticum aestivum]
  misc_feature (1)..(191): NCBI GI NO: 11558848 NR Description: histone H1 [Triticum aestivum]
  misc_feature (1)..(191): NCBI GI NO: 5230781 NR Description: histone H1 WH1A.1 [Triticum aestivum]
  misc_feature (1)..(191): NCBI GI NO: 2623960 NR Description: histone H1 [Apium graveolens]
MVSEAITSLKERTGSSSYAIAKFVEDKHKDKLPPNFRKLLNVQLKKLVAGGKLTKVKNSYKLSSATKPNPKPKAAPKKPKTGAKKPKAAAKPKAKTPAKAKPATKPKPAAKPKAVVKPKTPAKPKAKPAAKAKPKTAGAKPKPLAKKAGRAKAAKTSAKDTPGKKAPAKKAAPSKKAATPVRKAPSRKAKK

SEQ ID NO: 36961 - DNA, 1665 bp, Zea mays subsp. mays; identical to SEQ ID NO: 32977
  misc_feature (1)..(1665): Ceres Seq. ID no. 13633473

SEQ ID NO: 36962 - protein, 419 aa, Zea mays subsp. mays; identical to SEQ ID NO: 32978
  peptide (1)..(419): Ceres Seq. ID no. 13633474
  misc_feature (1)..(391): NCBI GI NO: 34897424 NR Description: putative protein kinase
  misc_feature (1)..(400): NCBI GI NO: 14719339 NR Description: putative protein kinase [Oryza sativa]
  misc_feature (1)..(399): NCBI GI NO: 34906046 NR Description: putative serine/threonine-specific protein kinase
  misc_feature (1)..(367): NCBI GI NO: 15227001 NR Description: protein kinase (APK1b) [Arabidopsis thaliana]
  misc_feature (1)..(281): NCBI GI NO: 8778537 NR Description: F22G5.5 [Arabidopsis thaliana]
  misc_feature (261)..(419): NCBI GI NO: 8778537 NR Description: F22G5.5 [Arabidopsis thaliana]
  misc_feature (1)..(415): NCBI GI NO: 15222437 NR Description: protein kinase (APK1a) [Arabidopsis thaliana]
  misc_feature (1)..(375): NCBI GI NO: 15241749 NR Description: protein kinase, putative [Arabidopsis thaliana]
  misc_feature (1)..(375): NCBI GI NO: 166809 NR Description: protein kinase
  misc_feature (1)..(401): NCBI GI NO: 15225520 NR Description: protein kinase, putative [Arabidopsis thaliana]

SEQ ID NO: 36963 - protein, 399 aa, Zea mays subsp. mays; identical to SEQ ID NO: 32979
  peptide (1)..(399): Ceres Seq. ID no. 13633475
  misc_feature (1)..(371): NCBI GI NO: 34897424 NR Description: putative protein kinase
  misc_feature (1)..(380): NCBI GI NO: 14719339 NR Description: putative protein kinase [Oryza sativa]
  misc_feature (1)..(379): NCBI GI NO: 34906046 NR Description: putative serine/threonine-specific protein kinase
  misc_feature (1)..(347): NCBI GI NO: 15227001 NR Description: protein kinase (APK1b) [Arabidopsis thaliana]
  misc_feature (1)..(261): NCBI GI NO: 8778537 NR Description: F22G5.5 [Arabidopsis thaliana]
  misc_feature (241)..(399): NCBI GI NO: 8778537 NR Description: F22G5.5 [Arabidopsis thaliana]
  misc_feature (1)..(395): NCBI GI NO: 15222437 NR Description: protein kinase (APK1a) [Arabidopsis thaliana]
  misc_feature (1)..(355): NCBI GI NO: 15241749 NR Description: protein kinase, putative [Arabidopsis thaliana]
  misc_feature (1)..(355): NCBI GI NO: 166809 NR Description: protein kinase
  misc_feature (1)..(381): NCBI GI NO: 15225520 NR Description: protein kinase, putative [Arabidopsis thaliana]

SEQ ID NO: 36964 - protein, 375 aa, Zea mays subsp. mays; identical to SEQ ID NO: 32980
  peptide (1)..(375): Ceres Seq. ID no. 13633476
  misc_feature (1)..(347): NCBI GI NO: 34897424 NR Description: putative protein kinase
  misc_feature (1)..(356): NCBI GI NO: 14719339 NR Description: putative protein kinase [Oryza sativa]
  misc_feature (1)..(355): NCBI GI NO: 34906046 NR Description: putative serine/threonine-specific protein kinase
  misc_feature (1)..(323): NCBI GI NO: 15227001 NR Description: protein kinase (APK1b) [Arabidopsis thaliana]
  misc_feature (1)..(237): NCBI GI NO: 8778537 NR Description: F22G5.5 [Arabidopsis thaliana]
  misc_feature (217)..(375): NCBI GI NO: 8778537 NR Description: F22G5.5 [Arabidopsis thaliana]
  misc_feature (1)..(371): NCBI GI NO: 15222437 NR Description: protein kinase (APK1a) [Arabidopsis thaliana]
  misc_feature (1)..(331): NCBI GI NO: 15241749 NR Description: protein kinase, putative [Arabidopsis thaliana]
  misc_feature (1)..(331): NCBI GI NO: 166809 NR Description: protein kinase
  misc_feature (1)..(357): NCBI GI NO: 15225520 NR Description: protein kinase, putative [Arabidopsis thaliana]

SEQ ID NO: 36965 - DNA, 419 bp, Zea mays subsp. mays
  misc_feature (1)..(419): Ceres Seq. ID no. 13629513
  misc_feature (306)..(306): n is a, c, t, g, unknown, or other
  misc_feature (307)..(307): n is a, c, t, g, unknown, or other
  misc_feature (266)..(266): n is a, c, t, g, unknown, or other
  misc_feature (262)..(262): n is a, c, t, g, unknown, or other
  misc_feature (264)..(264): n is a, c, t, g, unknown, or other
  misc_feature (304)..(304): n is a, c, t, g, unknown, or other
  misc_feature (303)..(303): n is a, c, t, g, unknown, or other
  misc_feature (305)..(305): n is a, c, t, g, unknown, or other
  misc_feature (265)..(265): n is a, c, t, g, unknown, or other
gccgccaacccccaaacaaaaccctaggccaccaccaggcacaagcagagcagaagcagacatggccaccattccgaccaccgattctggcctcgtcctcagttcctccgctctcctccggaggactaggagggccgcctcatccgtcaccgccaggctgccagccgtcgcccgccgtcgcccgcagctcctcgtgcgtgcctccgccaaggagatcgccttcgaccagggctccagagccgcccttcaggccggcgtcaanannntcgccggcgcgggcggcgtcaccctcggacccagagnnnnnaatgttgtcttggatgagtttggaacccccaaagtggtcaatgatggagttaccattgcccgcgctattgagctcgctgatcccatggagaatgctggtgcttccttgattc

SEQ ID NO: 36966 - protein, 139 aa, Zea mays subsp. mays
  peptide (1)..(139): Ceres Seq. ID no. 13629514
  misc_feature (13)..(138): NCBI GI NO: 29367489 NR Description: putative chaperonin 60 alpha subunit
  misc_feature (21)..(138): NCBI GI NO: 31193919 NR Description: putative rubisco subunit binding-protein alphasubunit precursor
  misc_feature (33)..(138): NCBI GI NO: 1710807 NR Description: RuBisCO subunit binding-protein alpha subunit
  misc_feature (33)..(138): NCBI GI NO: 3790441 NR Description: chaperonin 60 alpha subunit [Canavalia lineata]
  misc_feature (21)..(138): NCBI GI NO: 464727 NR Description: RuBisCO subunit binding-protein alpha subunit
  misc_feature (67)..(138): NCBI GI NO: 134102 NR Description: RuBisCO subunit binding-protein alpha subunit
  misc_feature (65)..(138): NCBI GI NO: 99801 NR Description: chaperonine 60K alpha chain - rape (fragment)
  misc_feature (65)..(138): NCBI GI NO: 1351030 NR Description: RuBisCO subunit binding-protein alpha subunit
  misc_feature (60)..(138): NCBI GI NO: 10697184 NR Description: chaperonin-60 alpha subunit [Avicennia marina]
  misc_feature (65)..(138): NCBI GI NO: 15226314 NR Description: RuBisCO subunit binding- protein alpha subunit/60kDa chaperonin alpha subunit
  misc_feature (87)..(87): Xaa is any aa, unknown or other
  misc_feature (88)..(88): Xaa is any aa, unknown or other
  misc_feature (89)..(89): Xaa is any aa, unknown or other
  misc_feature (101)..(101): Xaa is any aa, unknown or other
  misc_feature (102)..(102): Xaa is any aa, unknown or other
PPTPKQNPRPPPGTSRAEADMATIPTTDSGLVLSSSALLRRTRRAASSVTARLPAVARRRPQLLVRASAKEIAFDQGSRAALQAGVXXXAGAGGVTLGPRXXNVVLDEFGTPKVVNDGVTIARAIELADPMENAGASLI

SEQ ID NO: 36967 - protein, 137 aa, Zea mays subsp. mays
  peptide (1)..(137): Ceres Seq. ID no. 13629515
  misc_feature (3)..(125): Pfam Name: Pfam Description:  Extensin-like region
  misc_feature (26)..(99): NCBI GI NO: 32422095 NR Description: predicted protein [Neurospora crassa]
  misc_feature (87)..(87): Xaa is any aa, unknown or other
  misc_feature (88)..(88): Xaa is any aa, unknown or other
  misc_feature (101)..(101): Xaa is any aa, unknown or other
  misc_feature (102)..(102): Xaa is any aa, unknown or other
RQPPNKTLGHHQAQAEQKQTWPPFRPPILASSSVPPLSSGGLGGPPHPSPPGCQPSPAVARSSSCVPPPRRSPSTRAPEPPFRPASXXSPARAASPSDPEXXMLSWMSLEPPKWSMMELPLPALLSSLIPWRMLVLP

SEQ ID NO: 36968 - protein, 119 aa, Zea mays subsp. mays
  peptide (1)..(119): Ceres Seq. ID no. 13629516
  misc_feature (1)..(118): NCBI GI NO: 29367489 NR Description: putative chaperonin 60 alpha subunit
  misc_feature (1)..(118): NCBI GI NO: 31193919 NR Description: putative rubisco subunit binding-protein alphasubunit precursor
  misc_feature (13)..(118): NCBI GI NO: 1710807 NR Description: RuBisCO subunit binding-protein alpha subunit
  misc_feature (13)..(118): NCBI GI NO: 3790441 NR Description: chaperonin 60 alpha subunit [Canavalia lineata]
  misc_feature (1)..(118): NCBI GI NO: 464727 NR Description: RuBisCO subunit binding-protein alpha subunit
  misc_feature (47)..(118): NCBI GI NO: 134102 NR Description: RuBisCO subunit binding-protein alpha subunit
  misc_feature (45)..(118): NCBI GI NO: 99801 NR Description: chaperonine 60K alpha chain - rape (fragment)
  misc_feature (45)..(118): NCBI GI NO: 1351030 NR Description: RuBisCO subunit binding-protein alpha subunit
  misc_feature (40)..(118): NCBI GI NO: 10697184 NR Description: chaperonin-60 alpha subunit [Avicennia marina]
  misc_feature (45)..(118): NCBI GI NO: 15226314 NR Description: RuBisCO subunit binding- protein alpha subunit/60kDa chaperonin alpha subunit
  misc_feature (67)..(67): Xaa is any aa, unknown or other
  misc_feature (68)..(68): Xaa is any aa, unknown or other
  misc_feature (69)..(69): Xaa is any aa, unknown or other
  misc_feature (81)..(81): Xaa is any aa, unknown or other
  misc_feature (82)..(82): Xaa is any aa, unknown or other
MATIPTTDSGLVLSSSALLRRTRRAASSVTARLPAVARRRPQLLVRASAKEIAFDQGSRAALQAGVXXXAGAGGVTLGPRXXNVVLDEFGTPKVVNDGVTIARAIELADPMENAGASLI

SEQ ID NO: 36969 - DNA, 546 bp, Zea mays subsp. mays
  misc_feature (1)..(546): Ceres Seq. ID no. 13629579
ctctttccattagccatcctagccttcgccccctcgacgagaagaaccacctcaaaaccgaacagccgcaaaagaaagctgctagctactctatacatgataactaggtagatatatataagcttccggggctttaatttggttgggagttccggccatgagcgagaagagattcatgcatggcgcaaatttcatgtgtgttttgcagaacaggaccgtgaagtaatatatatataatgacgaagtcaggggcgctacaacttgctcggagcaccggagggtcgcttagcaaggaccaagtcaaatccgccgttgatcagtatgtgaagtaccacgacctccacggaggcgaacaagaatcaagaaagtcaaattacgctgatttggcaaacaagtactatgatcttgtcactggcttctacgaatatggatggggcgactcattccattttgctggcggatatccgggtgaaacttcccgtgaagccattaagcggcaccagcattttatggcactacaattggggctcaagaagggtatgaagg

SEQ ID NO: 36970 - protein, 103 aa, Zea mays subsp. mays
  peptide (1)..(103): Ceres Seq. ID no. 13629580
  misc_feature (1)..(102): NCBI GI NO: 3560531 NR Description: cycloartenol-C24-methyltransferase
  misc_feature (1)..(102): NCBI GI NO: 34393309 NR Description: cycloartenol-C24-methyltransferase
  misc_feature (1)..(102): NCBI GI NO: 7443715 NR Description: sterol 24-C-methyltransferase (EC 2
  misc_feature (1)..(102): NCBI GI NO: 7443716 NR Description: sterol 24-C-methyltransferase (EC 2
  misc_feature (1)..(102): NCBI GI NO: 3560474 NR Description: S-adenosyl-methionine-sterol-C- methyltransferase
  misc_feature (1)..(102): NCBI GI NO: 7443719 NR Description: sterol 24-C-methyltransferase (EC 2
  misc_feature (1)..(102): NCBI GI NO: 3603295 NR Description: S-adenosyl-methionine cycloartenol-C24-methyltransferase
  misc_feature (2)..(102): NCBI GI NO: 7443720 NR Description: probable sterol 24-C-methyltransferase (EC2
  misc_feature (7)..(102): NCBI GI NO: 15240691 NR Description: 24-sterol C-methyltransferase
  misc_feature (7)..(102): NCBI GI NO: 21434843 NR Description: cephalopod [Arabidopsis thaliana]
MTKSGALQLARSTGGSLSKDQVKSAVDQYVKYHDLHGGEQESRKSNYADLANKYYDLVTGFYEYGWGDSFHFAGGYPGETSREAIKRHQHFMALQLGLKKGMK

SEQ ID NO: 36971 - DNA, 824 bp, Zea mays subsp. mays
  misc_feature (1)..(824): Ceres Seq. ID no. 13636883
accctagcctctatctcattccactccgacattcacgtgcagctgtcgggagcaggcaatggcgccggatctaagcgaactcgccgccgccgctccagcccgtggcgcctacctcgccggcgtcggtgtcgcggtcctcctcgctgcctccttcctcccagtagccgagtcgtcctgcgtgcgagataactcattggtgagagacataagccaaatgccgcaaagcagctatgggattgaaggattgtcacatataacagttgctggtgcgctcaatcatgggatgaaggaggtggaagtgtggcttcagacaataagtccaggtcaaaggacgccaatccacaggcattcctgtgaagaagttttcactgtcctcaaagggaagggtacgctcttgatgggatcaagctcactaaagtacccagggcagccacaggaaattcctttctttcagaataccacattttcaatccctgtaaatgatccacaccaggtttggaattctgacgagcacgaagatttgcaagttcttgtgatcatatcgagaccgcctgctaagatatttttatatgatgattggagcatgcctcatacagccgcggtactgaaattccccttcgtctgggatgaggactgcttcgaagcagcaaaagacgaactctaggtcacaagtgtttcctgcaatttatctgcttcatccatgatcctgctggtgctggactactacaattctcagcactagttgtaataaagccagtgcgcttttcatgtataattctgtattgtggctcgcgaaaataaaatttggcaacggtttatgaact

SEQ ID NO: 36972 - protein, 201 aa, Zea mays subsp. mays
  peptide (1)..(201): Ceres Seq. ID no. 13636884
  misc_feature (36)..(201): Pfam Name: Pfam Description:  Auxin binding protein
  misc_feature (1)..(201): NCBI GI NO: 168422 NR Description: auxin-binding protein precursor
  misc_feature (1)..(201): NCBI GI NO: 113003 NR Description: Auxin-binding protein 1 precursor (ABP) (ERABP1)
  misc_feature (1)..(201): NCBI GI NO: 168397 NR Description: auxin-binding protein
  misc_feature (39)..(201): NCBI GI NO: 21730833 NR Description: Chain A
  misc_feature (11)..(201): NCBI GI NO: 461451 NR Description: AUXIN-BINDING PROTEIN 4 PRECURSOR (ABP)
  misc_feature (6)..(201): NCBI GI NO: 7442016 NR Description: auxin-binding protein - oat
  misc_feature (24)..(201): NCBI GI NO: 461449 NR Description: AUXIN-BINDING PROTEIN T85 PRECURSOR (ABP)
  misc_feature (26)..(201): NCBI GI NO: 1050443 NR Description: auxin binding protein 1 [Capsicum annuum]
  misc_feature (23)..(201): NCBI GI NO: 3819676 NR Description: ER auxin binding protein 1
  misc_feature (24)..(201): NCBI GI NO: 461450 NR Description: AUXIN-BINDING PROTEIN T92 PRECURSOR (ABP)
MAPDLSELAAAAPARGAYLAGVGVAVLLAASFLPVAESSCVRDNSLVRDISQMPQSSYGIEGLSHITVAGALNHGMKEVEVWLQTISPGQRTPIHRHSCEEVFTVLKGKGTLLMGSSSLKYPGQPQEIPFFQNTTFSIPVNDPHQVWNSDEHEDLQVLVIISRPPAKIFLYDDWSMPHTAAVLKFPFVWDEDCFEAAKDEL

SEQ ID NO: 36973 - protein, 149 aa, Zea mays subsp. mays
  peptide (1)..(149): Ceres Seq. ID no. 13636885
  misc_feature (1)..(149): Pfam Name: Pfam Description:  Auxin binding protein
  misc_feature (1)..(149): NCBI GI NO: 168422 NR Description: auxin-binding protein precursor
  misc_feature (1)..(149): NCBI GI NO: 113003 NR Description: Auxin-binding protein 1 precursor (ABP) (ERABP1)
  misc_feature (1)..(149): NCBI GI NO: 168397 NR Description: auxin-binding protein
  misc_feature (1)..(149): NCBI GI NO: 21730833 NR Description: Chain A
  misc_feature (1)..(149): NCBI GI NO: 461451 NR Description: AUXIN-BINDING PROTEIN 4 PRECURSOR (ABP)
  misc_feature (1)..(149): NCBI GI NO: 7442016 NR Description: auxin-binding protein - oat
  misc_feature (1)..(149): NCBI GI NO: 461449 NR Description: AUXIN-BINDING PROTEIN T85 PRECURSOR (ABP)
  misc_feature (1)..(149): NCBI GI NO: 1050443 NR Description: auxin binding protein 1 [Capsicum annuum]
  misc_feature (1)..(149): NCBI GI NO: 3819676 NR Description: ER auxin binding protein 1
  misc_feature (1)..(149): NCBI GI NO: 461450 NR Description: AUXIN-BINDING PROTEIN T92 PRECURSOR (ABP)
MPQSSYGIEGLSHITVAGALNHGMKEVEVWLQTISPGQRTPIHRHSCEEVFTVLKGKGTLLMGSSSLKYPGQPQEIPFFQNTTFSIPVNDPHQVWNSDEHEDLQVLVIISRPPAKIFLYDDWSMPHTAAVLKFPFVWDEDCFEAAKDEL

SEQ ID NO: 36974 - protein, 126 aa, Zea mays subsp. mays
  peptide (1)..(126): Ceres Seq. ID no. 13636886
  misc_feature (1)..(126): Pfam Name: Pfam Description:  Auxin binding protein
  misc_feature (1)..(126): NCBI GI NO: 168422 NR Description: auxin-binding protein precursor
  misc_feature (1)..(126): NCBI GI NO: 113003 NR Description: Auxin-binding protein 1 precursor (ABP) (ERABP1)
  misc_feature (1)..(126): NCBI GI NO: 168397 NR Description: auxin-binding protein
  misc_feature (1)..(126): NCBI GI NO: 21730833 NR Description: Chain A
  misc_feature (1)..(126): NCBI GI NO: 461451 NR Description: AUXIN-BINDING PROTEIN 4 PRECURSOR (ABP)
  misc_feature (1)..(126): NCBI GI NO: 7442016 NR Description: auxin-binding protein - oat
  misc_feature (1)..(126): NCBI GI NO: 461449 NR Description: AUXIN-BINDING PROTEIN T85 PRECURSOR (ABP)
  misc_feature (1)..(126): NCBI GI NO: 1050443 NR Description: auxin binding protein 1 [Capsicum annuum]
  misc_feature (1)..(126): NCBI GI NO: 3819676 NR Description: ER auxin binding protein 1
  misc_feature (1)..(126): NCBI GI NO: 461450 NR Description: AUXIN-BINDING PROTEIN T92 PRECURSOR (ABP)
MKEVEVWLQTISPGQRTPIHRHSCEEVFTVLKGKGTLLMGSSSLKYPGQPQEIPFFQNTTFSIPVNDPHQVWNSDEHEDLQVLVIISRPPAKIFLYDDWSMPHTAAVLKFPFVWDEDCFEAAKDEL

SEQ ID NO: 36975 - DNA, 542 bp, Zea mays subsp. mays
  misc_feature (1)..(542): Ceres Seq. ID no. 13629835
  misc_feature (402)..(402): n is a, c, t, g, unknown, or other
  misc_feature (403)..(403): n is a, c, t, g, unknown, or other
gaagccagagaaaaggttactccgcagaaagcaaaaccctagcccactccggcgcgccaccggccgatggtttcgatgagcaccacgccgaagccgcttgactccgccgtcgtcagcgcagccgttgacggcggggatgagggtggtggtggaggcggtggcgggaagaagcaggcgcacggggcggtgatggcgccgccaccgatggtggtcccggccgcggcgcccgcggccgaggaggaggttcggaaggtcaggaagccgtacaccatcaccaagtcgcgggagagctggacggagccggagcacgacaagttcctcgaggccctgcagctttttgatcgtgattggaagaaaattgaagcatatgttggctcaaagactgttatacagataaggagnnatgcacagaatacctttcctgaaggttcagaagaaatggtacgggcgagcatctgcccccacccaggccaaaacgaaaggcagctcatccatatccacagaaaggcatctaaaaatgtttctcaagctattttatcaca

SEQ ID NO: 36976 - protein, 158 aa, Zea mays subsp. mays
  peptide (1)..(158): Ceres Seq. ID no. 13629836
  misc_feature (73)..(118): Pfam Name: Pfam Description:  Myb-like DNA-binding domain
  misc_feature (43)..(156): NCBI GI NO: 6682239 NR Description: putative MYB-related protein
  misc_feature (43)..(156): NCBI GI NO: 30680926 NR Description: myb family transcription factor
  misc_feature (49)..(152): NCBI GI NO: 8953721 NR Description: contains similarity to MYB-related DNA-bindingprotein~gene_id:F6N7
  misc_feature (49)..(152): NCBI GI NO: 30696225 NR Description: myb family transcription factor
  misc_feature (49)..(152): NCBI GI NO: 30696221 NR Description: myb family transcription factor
  misc_feature (51)..(156): NCBI GI NO: 11357907 NR Description: hypothetical protein F9G14
  misc_feature (51)..(156): NCBI GI NO: 14596213 NR Description: putative protein [Arabidopsis thaliana]
  misc_feature (51)..(156): NCBI GI NO: 18414039 NR Description: myb family transcription factor
  misc_feature (62)..(124): NCBI GI NO: 10177075 NR Description: gene_id:MKP11.15~unknown protein
  misc_feature (55)..(132): NCBI GI NO: 37805865 NR Description: putative LHY protein
  misc_feature (112)..(112): Xaa is any aa, unknown or other
  misc_feature (113)..(113): Xaa is any aa, unknown or other
MVSMSTTPKPLDSAVVSAAVDGGDEGGGGGGGGKKQAHGAVMAPPPMVVPAAAPAAEEEVRKVRKPYTITKSRESWTEPEHDKFLEALQLFDRDWKKIEAYVGSKTVIQIRXXAQNTFPEGSEEMVRASICPHPGQNERQLIHIHRKASKNVSQAILS

SEQ ID NO: 36977 - protein, 155 aa, Zea mays subsp. mays
  peptide (1)..(155): Ceres Seq. ID no. 13629837
  misc_feature (70)..(115): Pfam Name: Pfam Description:  Myb-like DNA-binding domain
  misc_feature (40)..(153): NCBI GI NO: 6682239 NR Description: putative MYB-related protein
  misc_feature (40)..(153): NCBI GI NO: 30680926 NR Description: myb family transcription factor
  misc_feature (46)..(149): NCBI GI NO: 8953721 NR Description: contains similarity to MYB-related DNA-bindingprotein~gene_id:F6N7
  misc_feature (46)..(149): NCBI GI NO: 30696221 NR Description: myb family transcription factor
  misc_feature (46)..(149): NCBI GI NO: 30696225 NR Description: myb family transcription factor
  misc_feature (48)..(153): NCBI GI NO: 11357907 NR Description: hypothetical protein F9G14
  misc_feature (48)..(153): NCBI GI NO: 18414039 NR Description: myb family transcription factor
  misc_feature (48)..(153): NCBI GI NO: 14596213 NR Description: putative protein [Arabidopsis thaliana]
  misc_feature (59)..(121): NCBI GI NO: 10177075 NR Description: gene_id:MKP11.15~unknown protein
  misc_feature (52)..(129): NCBI GI NO: 37805865 NR Description: putative LHY protein
  misc_feature (109)..(109): Xaa is any aa, unknown or other
  misc_feature (110)..(110): Xaa is any aa, unknown or other
MSTTPKPLDSAVVSAAVDGGDEGGGGGGGGKKQAHGAVMAPPPMVVPAAAPAAEEEVRKVRKPYTITKSRESWTEPEHDKFLEALQLFDRDWKKIEAYVGSKTVIQIRXXAQNTFPEGSEEMVRASICPHPGQNERQLIHIHRKASKNVSQAILS

SEQ ID NO: 36978 - protein, 117 aa, Zea mays subsp. mays
  peptide (1)..(117): Ceres Seq. ID no. 13629838
  misc_feature (32)..(77): Pfam Name: Pfam Description:  Myb-like DNA-binding domain
  misc_feature (2)..(115): NCBI GI NO: 6682239 NR Description: putative MYB-related protein
  misc_feature (2)..(115): NCBI GI NO: 30680926 NR Description: myb family transcription factor
  misc_feature (8)..(111): NCBI GI NO: 8953721 NR Description: contains similarity to MYB-related DNA-bindingprotein~gene_id:F6N7
  misc_feature (8)..(111): NCBI GI NO: 30696221 NR Description: myb family transcription factor
  misc_feature (8)..(111): NCBI GI NO: 30696225 NR Description: myb family transcription factor
  misc_feature (10)..(115): NCBI GI NO: 11357907 NR Description: hypothetical protein F9G14
  misc_feature (10)..(115): NCBI GI NO: 14596213 NR Description: putative protein [Arabidopsis thaliana]
  misc_feature (10)..(115): NCBI GI NO: 18414039 NR Description: myb family transcription factor
  misc_feature (21)..(83): NCBI GI NO: 10177075 NR Description: gene_id:MKP11.15~unknown protein
  misc_feature (14)..(91): NCBI GI NO: 37805865 NR Description: putative LHY protein
  misc_feature (71)..(71): Xaa is any aa, unknown or other
  misc_feature (72)..(72): Xaa is any aa, unknown or other
MAPPPMVVPAAAPAAEEEVRKVRKPYTITKSRESWTEPEHDKFLEALQLFDRDWKKIEAYVGSKTVIQIRXXAQNTFPEGSEEMVRASICPHPGQNERQLIHIHRKASKNVSQAILS

SEQ ID NO: 36979 - DNA, 546 bp, Zea mays subsp. mays
  misc_feature (1)..(546): Ceres Seq. ID no. 13633729
  misc_feature (526)..(526): n is a, c, t, g, unknown, or other
  misc_feature (527)..(527): n is a, c, t, g, unknown, or other
acgccttcaagctctgctagactgagaaaatcaacgagttctttctccggcgataccttttccaatcgatcagatggcgaaggatccagttcgtgttctcgtcaccggagctgcaggacaaatcggatacgctctagtccctatgattgcgagaggaatcatgcttggtgcagaccagcctgtgatcctccacatgctcgatatccctcctgctgctgaagctttgaacggtgtcaaaatggagttgatcgacgctgctttccctcttctcaaaggtgtggtggctaccactgacgctgttgaagggtgtactggcgtcaacgttgcagttatggttggtggtttcccgaggaaagaaggaatggagaggaaggatgtcatgtccaagaacgtttccatttacaagtctcaagccgctgccttggagaagcacgccgcaccaaactgcaaggttttggttgttgcaaaccctgcaaacaccaacgcgttgatccttaaggagtttgcaccgtcgattcctgagaannacatcacttgcttgacgag

SEQ ID NO: 36980 - protein, 157 aa, Zea mays subsp. mays
  peptide (1)..(157): Ceres Seq. ID no. 13633730
  misc_feature (3)..(155): Pfam Name: Pfam Description:  lactate/malate dehydrogenase
  misc_feature (1)..(156): NCBI GI NO: 15219721 NR Description: malate dehydrogenase, cytosolic, putative
  misc_feature (1)..(156): NCBI GI NO: 10798652 NR Description: malate dehydrogenase [Nicotiana tabacum]
  misc_feature (1)..(156): NCBI GI NO: 15239843 NR Description: malate dehydrogenase, cytosolic, putative
  misc_feature (1)..(156): NCBI GI NO: 21593565 NR Description: cytosolic malate dehydrogenase
  misc_feature (1)..(156): NCBI GI NO: 18202485 NR Description: Malate dehydrogenase, cytoplasmic
  misc_feature (1)..(156): NCBI GI NO: 15982948 NR Description: NAD-dependent malate dehydrogenase
  misc_feature (1)..(156): NCBI GI NO: 39939491 NR Description: malate dehydrogenase [Pinus pinaster]
  misc_feature (1)..(156): NCBI GI NO: 37535388 NR Description: cytoplasmic malate dehydrogenase
  misc_feature (1)..(156): NCBI GI NO: 10334493 NR Description: cytosolic malate dehydrogenase [Cicer arietinum]
  misc_feature (1)..(156): NCBI GI NO: 27462764 NR Description: malate dehydrogenase [Lupinus albus]
  misc_feature (151)..(151): Xaa is any aa, unknown or other
  misc_feature (152)..(152): Xaa is any aa, unknown or other
MAKDPVRVLVTGAAGQIGYALVPMIARGIMLGADQPVILHMLDIPPAAEALNGVKMELIDAAFPLLKGVVATTDAVEGCTGVNVAVMVGGFPRKEGMERKDVMSKNVSIYKSQAAALEKHAAPNCKVLVVANPANTNALILKEFAPSIPEXXITCLT

SEQ ID NO: 36981 - protein, 134 aa, Zea mays subsp. mays
  peptide (1)..(134): Ceres Seq. ID no. 13633731
  misc_feature (1)..(132): Pfam Name: Pfam Description:  lactate/malate dehydrogenase
  misc_feature (1)..(133): NCBI GI NO: 15219721 NR Description: malate dehydrogenase, cytosolic, putative
  misc_feature (1)..(133): NCBI GI NO: 10798652 NR Description: malate dehydrogenase [Nicotiana tabacum]
  misc_feature (1)..(133): NCBI GI NO: 15239843 NR Description: malate dehydrogenase, cytosolic, putative
  misc_feature (1)..(133): NCBI GI NO: 21593565 NR Description: cytosolic malate dehydrogenase
  misc_feature (1)..(133): NCBI GI NO: 18202485 NR Description: Malate dehydrogenase, cytoplasmic
  misc_feature (1)..(133): NCBI GI NO: 15982948 NR Description: NAD-dependent malate dehydrogenase
  misc_feature (1)..(133): NCBI GI NO: 39939491 NR Description: malate dehydrogenase [Pinus pinaster]
  misc_feature (1)..(133): NCBI GI NO: 37535388 NR Description: cytoplasmic malate dehydrogenase
  misc_feature (1)..(133): NCBI GI NO: 10334493 NR Description: cytosolic malate dehydrogenase [Cicer arietinum]
  misc_feature (1)..(133): NCBI GI NO: 27462764 NR Description: malate dehydrogenase [Lupinus albus]
  misc_feature (128)..(128): Xaa is any aa, unknown or other
  misc_feature (129)..(129): Xaa is any aa, unknown or other
MIARGIMLGADQPVILHMLDIPPAAEALNGVKMELIDAAFPLLKGVVATTDAVEGCTGVNVAVMVGGFPRKEGMERKDVMSKNVSIYKSQAAALEKHAAPNCKVLVVANPANTNALILKEFAPSIPEXXITCLT

SEQ ID NO: 36982 - protein, 128 aa, Zea mays subsp. mays
  peptide (1)..(128): Ceres Seq. ID no. 13633732
  misc_feature (1)..(126): Pfam Name: Pfam Description:  lactate/malate dehydrogenase
  misc_feature (1)..(127): NCBI GI NO: 15219721 NR Description: malate dehydrogenase, cytosolic, putative
  misc_feature (1)..(127): NCBI GI NO: 10798652 NR Description: malate dehydrogenase [Nicotiana tabacum]
  misc_feature (1)..(127): NCBI GI NO: 15239843 NR Description: malate dehydrogenase, cytosolic, putative
  misc_feature (1)..(127): NCBI GI NO: 21593565 NR Description: cytosolic malate dehydrogenase
  misc_feature (1)..(127): NCBI GI NO: 18202485 NR Description: Malate dehydrogenase, cytoplasmic
  misc_feature (1)..(127): NCBI GI NO: 15982948 NR Description: NAD-dependent malate dehydrogenase
  misc_feature (1)..(127): NCBI GI NO: 39939491 NR Description: malate dehydrogenase [Pinus pinaster]
  misc_feature (1)..(127): NCBI GI NO: 37535388 NR Description: cytoplasmic malate dehydrogenase
  misc_feature (1)..(127): NCBI GI NO: 10334493 NR Description: cytosolic malate dehydrogenase [Cicer arietinum]
  misc_feature (1)..(127): NCBI GI NO: 27462764 NR Description: malate dehydrogenase [Lupinus albus]
  misc_feature (122)..(122): Xaa is any aa, unknown or other
  misc_feature (123)..(123): Xaa is any aa, unknown or other
MLGADQPVILHMLDIPPAAEALNGVKMELIDAAFPLLKGVVATTDAVEGCTGVNVAVMVGGFPRKEGMERKDVMSKNVSIYKSQAAALEKHAAPNCKVLVVANPANTNALILKEFAPSIPEXXITCLT

SEQ ID NO: 36983 - DNA, 1747 bp, Zea mays subsp. mays; identical to SEQ ID NO: 34649
  misc_feature (1)..(1747): Ceres Seq. ID no. 13637284

SEQ ID NO: 36984 - protein, 366 aa, Zea mays subsp. mays; identical to SEQ ID NO: 34650
  peptide (1)..(366): Ceres Seq. ID no. 13637285
  misc_feature (29)..(364): NCBI GI NO: 4138581 NR Description: mitochondrial energy transfer protein
  misc_feature (82)..(366): NCBI GI NO: 231654 NR Description: Brittle-1 protein, chloroplast precursor
  misc_feature (54)..(365): NCBI GI NO: 15236783 NR Description: mitochondrial carrier protein family
  misc_feature (139)..(362): NCBI GI NO: 15231083 NR Description: mitochondrial carrier protein family
  misc_feature (139)..(362): NCBI GI NO: 21537282 NR Description: mitochondrial carrier protein, putative
  misc_feature (85)..(166): NCBI GI NO: 15231083 NR Description: mitochondrial carrier protein family
  misc_feature (85)..(166): NCBI GI NO: 21537282 NR Description: mitochondrial carrier protein, putative
  misc_feature (84)..(358): NCBI GI NO: 20864410 NR Description: RIKEN cDNA 2900084M01 [Mus musculus]
  misc_feature (84)..(358): NCBI GI NO: 34877651 NR Description: similar to CG4241-PA [Rattus norvegicus]
  misc_feature (84)..(358): NCBI GI NO: 29742699 NR Description: similar to CG4241-PA [Homo sapiens]

SEQ ID NO: 36985 - protein, 330 aa, Zea mays subsp. mays; identical to SEQ ID NO: 34651
  peptide (1)..(330): Ceres Seq. ID no. 13637286
  misc_feature (1)..(328): NCBI GI NO: 4138581 NR Description: mitochondrial energy transfer protein
  misc_feature (46)..(330): NCBI GI NO: 231654 NR Description: Brittle-1 protein, chloroplast precursor
  misc_feature (18)..(329): NCBI GI NO: 15236783 NR Description: mitochondrial carrier protein family
  misc_feature (103)..(326): NCBI GI NO: 15231083 NR Description: mitochondrial carrier protein family
  misc_feature (103)..(326): NCBI GI NO: 21537282 NR Description: mitochondrial carrier protein, putative
  misc_feature (49)..(130): NCBI GI NO: 15231083 NR Description: mitochondrial carrier protein family
  misc_feature (49)..(130): NCBI GI NO: 21537282 NR Description: mitochondrial carrier protein, putative
  misc_feature (48)..(322): NCBI GI NO: 20864410 NR Description: RIKEN cDNA 2900084M01 [Mus musculus]
  misc_feature (48)..(322): NCBI GI NO: 34877651 NR Description: similar to CG4241-PA [Rattus norvegicus]
  misc_feature (48)..(322): NCBI GI NO: 29742699 NR Description: similar to CG4241-PA [Homo sapiens]

SEQ ID NO: 36986 - protein, 255 aa, Zea mays subsp. mays; identical to SEQ ID NO: 34652
  peptide (1)..(255): Ceres Seq. ID no. 13637287
  misc_feature (1)..(253): NCBI GI NO: 4138581 NR Description: mitochondrial energy transfer protein
  misc_feature (1)..(255): NCBI GI NO: 231654 NR Description: Brittle-1 protein, chloroplast precursor
  misc_feature (1)..(254): NCBI GI NO: 15236783 NR Description: mitochondrial carrier protein family
  misc_feature (28)..(251): NCBI GI NO: 15231083 NR Description: mitochondrial carrier protein family
  misc_feature (28)..(251): NCBI GI NO: 21537282 NR Description: mitochondrial carrier protein, putative
  misc_feature (1)..(55): NCBI GI NO: 15231083 NR Description: mitochondrial carrier protein family
  misc_feature (1)..(55): NCBI GI NO: 21537282 NR Description: mitochondrial carrier protein, putative
  misc_feature (1)..(247): NCBI GI NO: 20864410 NR Description: RIKEN cDNA 2900084M01 [Mus musculus]
  misc_feature (1)..(247): NCBI GI NO: 34877651 NR Description: similar to CG4241-PA [Rattus norvegicus]
  misc_feature (1)..(247): NCBI GI NO: 29742699 NR Description: similar to CG4241-PA [Homo sapiens]

SEQ ID NO: 36987 - DNA, 445 bp, Zea mays subsp. mays
  misc_feature (1)..(445): Ceres Seq. ID no. 13627430
aacccagggtgagtctccggatccgtcgccgtctggtctccgtgtgctctcgtcgccgtcgccgtcgccgccgtctgactgaccccctcgcctcccgcggcgtcgggtctctggtgctgctgctactgctgctgcgtgcagggctgtgatggcgacgaagaggagcgtgggcaccctcggcgaggcggatctgaagggtaagaaggtgttcgtgcgcgccgacctctacgtccctctcgacgacgcccagaagatcaccgacgacacccgcatccgcgcctccgtccccaccatcaagttcctcctcgagaagggcgccaaggtcatcctcgccagccacctgggtcgtccaaaaggtgtcaccccaaagtacagcttgaagcctcttgttccacgcttgtctgagctccttgaagttgaagtcgtgatggccaatgattgcatt

SEQ ID NO: 36988 - protein, 99 aa, Zea mays subsp. mays
  peptide (1)..(99): Ceres Seq. ID no. 13627431
  misc_feature (3)..(98): Pfam Name: Pfam Description:  Phosphoglycerate kinase
  misc_feature (1)..(98): NCBI GI NO: 129916 NR Description: Phosphoglycerate kinase, cytosolic
  misc_feature (1)..(98): NCBI GI NO: 15219412 NR Description: phosphoglycerate kinase -related
  misc_feature (1)..(98): NCBI GI NO: 21536853 NR Description: phosphoglycerate kinase, putative
  misc_feature (1)..(98): NCBI GI NO: 3738261 NR Description: chloroplast phosphoglycerate kinase
  misc_feature (1)..(98): NCBI GI NO: 7434544 NR Description: phosphoglycerate kinase (EC 2
  misc_feature (1)..(98): NCBI GI NO: 29124969 NR Description: 3-phosphoglycerate kinase [Populus tremuloides]
  misc_feature (1)..(98): NCBI GI NO: 3738257 NR Description: cytosolic phosphoglycerate kinase 1
  misc_feature (1)..(98): NCBI GI NO: 3738259 NR Description: cytosolic phosphoglycerate kinase 1
  misc_feature (1)..(98): NCBI GI NO: 6056366 NR Description: phosphoglycerate kinase [Arabidopsis thaliana]
  misc_feature (1)..(98): NCBI GI NO: 12644295 NR Description: PHOSPHOGLYCERATE KINASE, CHLOROPLAST PRECURSOR
MATKRSVGTLGEADLKGKKVFVRADLYVPLDDAQKITDDTRIRASVPTIKFLLEKGAKVILASHLGRPKGVTPKYSLKPLVPRLSELLEVEVVMANDCI

SEQ ID NO: 36989 - DNA, 1764 bp, Zea mays subsp. mays; identical to SEQ ID NO: 23212
  misc_feature (1)..(1764): Ceres Seq. ID no. 13636367

SEQ ID NO: 36990 - protein, 456 aa, Zea mays subsp. mays; identical to SEQ ID NO: 23213
  peptide (1)..(456): Ceres Seq. ID no. 13636368
  misc_feature (162)..(414): Pfam Name: Pfam Description:  Fatty acid desaturase
  misc_feature (65)..(452): NCBI GI NO: 28371827 NR Description: delta-12 oleate desaturase [Punica granatum]
  misc_feature (65)..(452): NCBI GI NO: 28564441 NR Description: delta 12-acyl-lipid-desaturase [Punica granatum]
  misc_feature (65)..(456): NCBI GI NO: 27261181 NR Description: delta 12 oleic acid desaturase FAD2
  misc_feature (65)..(456): NCBI GI NO: 34903462 NR Description: putative omega-6 fatty acid desaturase
  misc_feature (65)..(456): NCBI GI NO: 8886726 NR Description: omega-6 fatty acid desaturase [Sesamum indicum]
  misc_feature (65)..(455): NCBI GI NO: 1345977 NR Description: Omega-6 fatty acid desaturase
  misc_feature (65)..(455): NCBI GI NO: 4378875 NR Description: delta-12 desaturase [Brassica carinata]
  misc_feature (65)..(455): NCBI GI NO: 7433295 NR Description: omega-6 desaturase, microsomal - upland cotton
  misc_feature (65)..(455): NCBI GI NO: 17225582 NR Description: delta-12 fatty acid desaturase
  misc_feature (248)..(455): NCBI GI NO: 32421083 NR Description: hypothetical protein [Neurospora crassa]

SEQ ID NO: 36991 - protein, 392 aa, Zea mays subsp. mays; identical to SEQ ID NO: 23214
  peptide (1)..(392): Ceres Seq. ID no. 13636369
  misc_feature (98)..(350): Pfam Name: Pfam Description:  Fatty acid desaturase
  misc_feature (1)..(388): NCBI GI NO: 28371827 NR Description: delta-12 oleate desaturase [Punica granatum]
  misc_feature (1)..(388): NCBI GI NO: 28564441 NR Description: delta 12-acyl-lipid-desaturase [Punica granatum]
  misc_feature (1)..(392): NCBI GI NO: 27261181 NR Description: delta 12 oleic acid desaturase FAD2
  misc_feature (1)..(392): NCBI GI NO: 34903462 NR Description: putative omega-6 fatty acid desaturase
  misc_feature (1)..(392): NCBI GI NO: 8886726 NR Description: omega-6 fatty acid desaturase [Sesamum indicum]
  misc_feature (1)..(391): NCBI GI NO: 1345977 NR Description: Omega-6 fatty acid desaturase
  misc_feature (1)..(391): NCBI GI NO: 4378875 NR Description: delta-12 desaturase [Brassica carinata]
  misc_feature (1)..(391): NCBI GI NO: 7433295 NR Description: omega-6 desaturase, microsomal - upland cotton
  misc_feature (1)..(391): NCBI GI NO: 17225582 NR Description: delta-12 fatty acid desaturase
  misc_feature (184)..(391): NCBI GI NO: 32421083 NR Description: hypothetical protein [Neurospora crassa]

SEQ ID NO: 36992 - protein, 386 aa, Zea mays subsp. mays; identical to SEQ ID NO: 23215
  peptide (1)..(386): Ceres Seq. ID no. 13636370
  misc_feature (92)..(344): Pfam Name: Pfam Description:  Fatty acid desaturase
  misc_feature (1)..(382): NCBI GI NO: 28371827 NR Description: delta-12 oleate desaturase [Punica granatum]
  misc_feature (1)..(382): NCBI GI NO: 28564441 NR Description: delta 12-acyl-lipid-desaturase [Punica granatum]
  misc_feature (1)..(386): NCBI GI NO: 27261181 NR Description: delta 12 oleic acid desaturase FAD2
  misc_feature (1)..(386): NCBI GI NO: 34903462 NR Description: putative omega-6 fatty acid desaturase
  misc_feature (1)..(386): NCBI GI NO: 8886726 NR Description: omega-6 fatty acid desaturase [Sesamum indicum]
  misc_feature (1)..(385): NCBI GI NO: 1345977 NR Description: Omega-6 fatty acid desaturase
  misc_feature (1)..(385): NCBI GI NO: 4378875 NR Description: delta-12 desaturase [Brassica carinata]
  misc_feature (1)..(385): NCBI GI NO: 7433295 NR Description: omega-6 desaturase, microsomal - upland cotton
  misc_feature (1)..(385): NCBI GI NO: 17225582 NR Description: delta-12 fatty acid desaturase
  misc_feature (178)..(385): NCBI GI NO: 32421083 NR Description: hypothetical protein [Neurospora crassa]

SEQ ID NO: 36993 - DNA, 430 bp, Zea mays subsp. mays
  misc_feature (1)..(430): Ceres Seq. ID no. 13630640
  misc_feature (104)..(104): n is a, c, t, g, unknown, or other
  misc_feature (204)..(204): n is a, c, t, g, unknown, or other
  misc_feature (282)..(282): n is a, c, t, g, unknown, or other
  misc_feature (102)..(102): n is a, c, t, g, unknown, or other
  misc_feature (281)..(281): n is a, c, t, g, unknown, or other
  misc_feature (200)..(200): n is a, c, t, g, unknown, or other
  misc_feature (116)..(116): n is a, c, t, g, unknown, or other
  misc_feature (106)..(106): n is a, c, t, g, unknown, or other
  misc_feature (13)..(13): n is a, c, t, g, unknown, or other
  misc_feature (105)..(105): n is a, c, t, g, unknown, or other
  misc_feature (96)..(96): n is a, c, t, g, unknown, or other
  misc_feature (203)..(203): n is a, c, t, g, unknown, or other
  misc_feature (280)..(280): n is a, c, t, g, unknown, or other
  misc_feature (95)..(95): n is a, c, t, g, unknown, or other
  misc_feature (202)..(202): n is a, c, t, g, unknown, or other
  misc_feature (12)..(12): n is a, c, t, g, unknown, or other
  misc_feature (15)..(15): n is a, c, t, g, unknown, or other
  misc_feature (14)..(14): n is a, c, t, g, unknown, or other
  misc_feature (201)..(201): n is a, c, t, g, unknown, or other
agctttcttgtnnnngagctttgtgacaaaagaagaagctgtttgcctctttgcagtgaaagcactaccagcaagaagatgattatcaccgagannagccgnannnagatctcggnataccttttcaaagaaggagtattgctcgccaggaaggacttcactctcccaaagcatccgctgattgagccagcgtccaagcnnnnngcgatctgggtcatgccgagtttccaatccaaggagcacgtaagggagatcttcgcttggatgctactactattgnnntctgaccaacgaaggaactgagttcttgacaacttagcttacccttccctcggacgttgttcccgcgaccttgaagaagtctgctaaacccgttggtcgtccctttggtgggcctcctggtgatcgccctacaggtcctcgctttgag

SEQ ID NO: 36994 - protein, 100 aa, Zea mays subsp. mays
  peptide (1)..(100): Ceres Seq. ID no. 13630641
  misc_feature (29)..(89): Pfam Name: Pfam Description:  Plectin/S10 domain
  misc_feature (27)..(89): NCBI GI NO: 15237217 NR Description: 40S ribosomal protein S10 (RPS10C)
  misc_feature (27)..(89): NCBI GI NO: 20139798 NR Description: 40S ribosomal protein S10-3
  misc_feature (27)..(89): NCBI GI NO: 15235985 NR Description: 40S ribosomal protein S10 (RPS10A)
  misc_feature (27)..(89): NCBI GI NO: 15238099 NR Description: expressed protein [Arabidopsis thaliana]
  misc_feature (27)..(88): NCBI GI NO: 34897532 NR Description: OSJNBa0042L16.3
  misc_feature (27)..(88): NCBI GI NO: 20140213 NR Description: 40S ribosomal protein S10
  misc_feature (27)..(88): NCBI GI NO: 34905824 NR Description: putative ribosomal protein S10
  misc_feature (27)..(88): NCBI GI NO: 40642980 NR Description: ribosomal protein S10 [Crassostrea gigas]
  misc_feature (27)..(88): NCBI GI NO: 20140136 NR Description: 40S ribosomal protein S10
  misc_feature (27)..(88): NCBI GI NO: 24266976 NR Description: ribosomal protein S10 [Branchiostoma belcheri]
  misc_feature (4)..(4): Xaa is any aa, unknown or other
  misc_feature (5)..(5): Xaa is any aa, unknown or other
  misc_feature (32)..(32): Xaa is any aa, unknown or other
  misc_feature (34)..(34): Xaa is any aa, unknown or other
  misc_feature (35)..(35): Xaa is any aa, unknown or other
  misc_feature (36)..(36): Xaa is any aa, unknown or other
  misc_feature (39)..(39): Xaa is any aa, unknown or other
  misc_feature (67)..(67): Xaa is any aa, unknown or other
  misc_feature (68)..(68): Xaa is any aa, unknown or other
  misc_feature (94)..(94): Xaa is any aa, unknown or other
SFLXXELCDKRRSCLPLCSESTTSKKMIITEXSXXXISXYLFKEGVLLARKDFTLPKHPLIEPASKXXAIWVMPSFQSKEHVREIFAWMLLLLXSDQRRN

SEQ ID NO: 36995 - protein, 74 aa, Zea mays subsp. mays
  peptide (1)..(74): Ceres Seq. ID no. 13630642
  misc_feature (3)..(63): Pfam Name: Pfam Description:  Plectin/S10 domain
  misc_feature (1)..(63): NCBI GI NO: 15237217 NR Description: 40S ribosomal protein S10 (RPS10C)
  misc_feature (1)..(63): NCBI GI NO: 20139798 NR Description: 40S ribosomal protein S10-3
  misc_feature (1)..(63): NCBI GI NO: 15235985 NR Description: 40S ribosomal protein S10 (RPS10A)
  misc_feature (1)..(63): NCBI GI NO: 15238099 NR Description: expressed protein [Arabidopsis thaliana]
  misc_feature (1)..(62): NCBI GI NO: 34897532 NR Description: OSJNBa0042L16.3
  misc_feature (1)..(62): NCBI GI NO: 20140213 NR Description: 40S ribosomal protein S10
  misc_feature (1)..(62): NCBI GI NO: 34905824 NR Description: putative ribosomal protein S10
  misc_feature (1)..(62): NCBI GI NO: 40642980 NR Description: ribosomal protein S10 [Crassostrea gigas]
  misc_feature (1)..(62): NCBI GI NO: 20140136 NR Description: 40S ribosomal protein S10
  misc_feature (1)..(62): NCBI GI NO: 24266976 NR Description: ribosomal protein S10 [Branchiostoma belcheri]
  misc_feature (6)..(6): Xaa is any aa, unknown or other
  misc_feature (8)..(8): Xaa is any aa, unknown or other
  misc_feature (9)..(9): Xaa is any aa, unknown or other
  misc_feature (10)..(10): Xaa is any aa, unknown or other
  misc_feature (13)..(13): Xaa is any aa, unknown or other
  misc_feature (41)..(41): Xaa is any aa, unknown or other
  misc_feature (42)..(42): Xaa is any aa, unknown or other
  misc_feature (68)..(68): Xaa is any aa, unknown or other
MIITEXSXXXISXYLFKEGVLLARKDFTLPKHPLIEPASKXXAIWVMPSFQSKEHVREIFAWMLLLLXSDQRRN

SEQ ID NO: 36996 - DNA, 541 bp, Zea mays subsp. mays
  misc_feature (1)..(541): Ceres Seq. ID no. 13632682
acgaaccaaagagtgcaaaatggcagcgacgtctctctccatcgcaaccacattccgctcctcgtcttacctcactcacgcttctccccatggcttcttcccttcccgacccaacacaacattccgcatctgttcaccttcctccacaccgacccaccgtgcaacccacctccgtcccgtctccgccgtcgaagctccggagaagatcgagaagattgggtccgagatctcttctctgactctcgaggaagcccgcgtcctcgtggactaccttcaggacaagttcggtgtgtcgccgctctcgttagctcccgctgcggcggctgtggctgctccgggagacggtggcggtgcggcggctgcggtggaggagcagacggagttcgacgtggtgattaacgaagtgccgagcagtgcgcgtatcgcggtgattaaagcggtgagggctttgactagcttggcgttgaaggaagcgaaggagcttatcgaagggttgccgaagaagtttaaggaaggtgtgacgaaggatgaagctgaagaa

SEQ ID NO: 36997 - protein, 180 aa, Zea mays subsp. mays
  peptide (1)..(180): Ceres Seq. ID no. 13632683
  misc_feature (127)..(179): Pfam Name: Pfam Description:  Ribosomal protein L7/L12 C-terminal domain
  misc_feature (7)..(179): NCBI GI NO: 15232274 NR Description: 50S ribosomal protein L12-1, chloroplast precursor
  misc_feature (7)..(179): NCBI GI NO: 15232276 NR Description: 50S ribosomal protein L12-3, chloroplast precursor
  misc_feature (7)..(179): NCBI GI NO: 541897 NR Description: ribosomal protein L12
  misc_feature (7)..(179): NCBI GI NO: 21592776 NR Description: 50S ribosomal protein L12-C [Arabidopsis thaliana]
  misc_feature (7)..(179): NCBI GI NO: 541896 NR Description: ribosomal protein L12
  misc_feature (7)..(179): NCBI GI NO: 15232275 NR Description: 50S ribosomal protein L12-2, chloroplast precursor
  misc_feature (7)..(179): NCBI GI NO: 133085 NR Description: 50S RIBOSOMAL PROTEIN L12, CHLOROPLAST PRECURSOR
  misc_feature (7)..(179): NCBI GI NO: 548746 NR Description: 50S RIBOSOMAL PROTEIN L12, CHLOROPLAST PRECURSOR
  misc_feature (7)..(179): NCBI GI NO: 20020 NR Description: ribosomal protein L12-1a [Nicotiana tabacum]
  misc_feature (7)..(179): NCBI GI NO: 133088 NR Description: 50S RIBOSOMAL PROTEIN L12, CHLOROPLAST PRECURSOR
RTKECKMAATSLSIATTFRSSSYLTHASPHGFFPSRPNTTFRICSPSSTPTHRATHLRPVSAVEAPEKIEKIGSEISSLTLEEARVLVDYLQDKFGVSPLSLAPAAAAVAAPGDGGGAAAAVEEQTEFDVVINEVPSSARIAVIKAVRALTSLALKEAKELIEGLPKKFKEGVTKDEAEE

SEQ ID NO: 36998 - protein, 174 aa, Zea mays subsp. mays
  peptide (1)..(174): Ceres Seq. ID no. 13632684
  misc_feature (121)..(173): Pfam Name: Pfam Description:  Ribosomal protein L7/L12 C-terminal domain
  misc_feature (1)..(173): NCBI GI NO: 15232274 NR Description: 50S ribosomal protein L12-1, chloroplast precursor
  misc_feature (1)..(173): NCBI GI NO: 15232276 NR Description: 50S ribosomal protein L12-3, chloroplast precursor
  misc_feature (1)..(173): NCBI GI NO: 541897 NR Description: ribosomal protein L12
  misc_feature (1)..(173): NCBI GI NO: 21592776 NR Description: 50S ribosomal protein L12-C [Arabidopsis thaliana]
  misc_feature (1)..(173): NCBI GI NO: 541896 NR Description: ribosomal protein L12
  misc_feature (1)..(173): NCBI GI NO: 15232275 NR Description: 50S ribosomal protein L12-2, chloroplast precursor
  misc_feature (1)..(173): NCBI GI NO: 133085 NR Description: 50S RIBOSOMAL PROTEIN L12, CHLOROPLAST PRECURSOR
  misc_feature (1)..(173): NCBI GI NO: 548746 NR Description: 50S RIBOSOMAL PROTEIN L12, CHLOROPLAST PRECURSOR
  misc_feature (1)..(173): NCBI GI NO: 20020 NR Description: ribosomal protein L12-1a [Nicotiana tabacum]
  misc_feature (1)..(173): NCBI GI NO: 133088 NR Description: 50S RIBOSOMAL PROTEIN L12, CHLOROPLAST PRECURSOR
MAATSLSIATTFRSSSYLTHASPHGFFPSRPNTTFRICSPSSTPTHRATHLRPVSAVEAPEKIEKIGSEISSLTLEEARVLVDYLQDKFGVSPLSLAPAAAAVAAPGDGGGAAAAVEEQTEFDVVINEVPSSARIAVIKAVRALTSLALKEAKELIEGLPKKFKEGVTKDEAEE

SEQ ID NO: 36999 - protein, 132 aa, Zea mays subsp. mays
  peptide (1)..(132): Ceres Seq. ID no. 13632685
TNQRVQNGSDVSLHRNHIPLLVLPHSRFSPWLLPFPTQHNIPHLFTFLHTDPPCNPPPSRLRRRSSGEDREDWVRDLFSDSRGSPRPRGLPSGQVRCVAALVSSRCGGCGCSGRRWRCGGCGGGADGVRRGD

SEQ ID NO: 37000 - DNA, 1172 bp, Zea mays subsp. mays
  misc_feature (1)..(1172): Ceres Seq. ID no. 14309088
ctctctgttgcatttcccgtcctgtccttccacccggcggcttaaaccctagttctcactcccatcgccgcttcagctccgccgctgcagatggagttctggggtctcgaggtcaagcctggttccactgttaagtgtgagcctggatatggctttgtgctgcacctttcccaggctgctcttggggaatcgaagaagagtgataatgccttgatgtatgtcaaaattgatgatcagaaacttgccattggaaccctctctgttgacaagaacccacacatacaatttgatctgattttcgataaagagtttgagctgtcgcacacatcaaaaactaccagcgttttcttcactggctacaaggttgagcagccattcgaggaagatgaaatggatcttgattctgaagatgaagacgaggagctgaatgttccagtagtcaaggaaaatggcaaagctgatgagaagaaacagaaaagtcaagaaaaggcagttgctgcaccttcaaaatcaagtccggattccaagaagagcaaggatgacgacgattctgatgaggacgagactgatgattctgatgaggatgagacggacgattctgatgagggtttgtctcctgaagaaggcgatgatgattcaagtgatgaagatgataccagtgacgatgaggaggaagacactccaactcctaagaagcctgaggtaggcaagaagagagctgctgaaagttccgtgctgaaaactcctctatctgataagaaagcaaaggttgccacaccgtcatctcagaagacaggtggcaagaagggcgccgccgtccatgtggcaactccacacccagcaaaaggcaagaccattgtaaacaatgacaaatcggtcaagtctccaaaatctgcgccaaaatctggtgtcccttgcaaatcgtgcagcaagtcattcatcagtgagacggcacttcaggctcactcgaaggcgaagcatgggggcaagtgagtcgcaggtccaatagagtcaacaacaaatgcgaaacatgggagaggagggtaagcgagagtctcgaaagagtgtcggtggaagtaggcctaaccttattttgtttagagacgggctatgcgttcgatgtagcaaaacaaggctgtggtttgtgtacttcaatatttgggttgtgtgtt

SEQ ID NO: 37001 - protein, 300 aa, Zea mays subsp. mays
  peptide (1)..(300): Ceres Seq. ID no. 14309089
  misc_feature (19)..(196): Pfam Name: Pfam Description:  Nucleoplasmin
  misc_feature (1)..(300): NCBI GI NO: 7716950 NR Description: histone deacetylase 2 isoform c [Zea mays]
  misc_feature (1)..(298): NCBI GI NO: 7489751 NR Description: histone deacetylase (EC 3
  misc_feature (1)..(300): NCBI GI NO: 7716948 NR Description: histone deacetylase 2 isoform b [Zea mays]
  misc_feature (1)..(300): NCBI GI NO: 7804960 NR Description: putative histone deacetylase HD2 [Oryza sativa]
  misc_feature (1)..(300): NCBI GI NO: 22597156 NR Description: nucleolar histone deacetylase HD2-P39
  misc_feature (1)..(297): NCBI GI NO: 7804963 NR Description: putative histone deacetylase HD2c
  misc_feature (1)..(297): NCBI GI NO: 11282318 NR Description: histone deacetylase-like protein
  misc_feature (1)..(265): NCBI GI NO: 25352191 NR Description: probable histone deacetylase (EC 3.5.1.-)
  misc_feature (1)..(265): NCBI GI NO: 30688577 NR Description: histone deacetylase-related protein
  misc_feature (1)..(277): NCBI GI NO: 14550106 NR Description: HD2 type histone deacetylase HDA106 [Zea mays]
MEFWGLEVKPGSTVKCEPGYGFVLHLSQAALGESKKSDNALMYVKIDDQKLAIGTLSVDKNPHIQFDLIFDKEFELSHTSKTTSVFFTGYKVEQPFEEDEMDLDSEDEDEELNVPVVKENGKADEKKQKSQEKAVAAPSKSSPDSKKSKDDDDSDEDETDDSDEDETDDSDEGLSPEEGDDDSSDEDDTSDDEEEDTPTPKKPEVGKKRAAESSVLKTPLSDKKAKVATPSSQKTGGKKGAAVHVATPHPAKGKTIVNNDKSVKSPKSAPKSGVPCKSCSKSFISETALQAHSKAKHGGK

SEQ ID NO: 37002 - protein, 259 aa, Zea mays subsp. mays
  peptide (1)..(259): Ceres Seq. ID no. 14309090
  misc_feature (1)..(155): Pfam Name: Pfam Description:  Nucleoplasmin
  misc_feature (1)..(259): NCBI GI NO: 7716950 NR Description: histone deacetylase 2 isoform c [Zea mays]
  misc_feature (1)..(257): NCBI GI NO: 7489751 NR Description: histone deacetylase (EC 3
  misc_feature (1)..(259): NCBI GI NO: 7716948 NR Description: histone deacetylase 2 isoform b [Zea mays]
  misc_feature (1)..(259): NCBI GI NO: 7804960 NR Description: putative histone deacetylase HD2 [Oryza sativa]
  misc_feature (1)..(259): NCBI GI NO: 22597156 NR Description: nucleolar histone deacetylase HD2-P39
  misc_feature (1)..(256): NCBI GI NO: 7804963 NR Description: putative histone deacetylase HD2c
  misc_feature (1)..(256): NCBI GI NO: 11282318 NR Description: histone deacetylase-like protein
  misc_feature (1)..(224): NCBI GI NO: 25352191 NR Description: probable histone deacetylase (EC 3.5.1.-)
  misc_feature (1)..(224): NCBI GI NO: 30688577 NR Description: histone deacetylase-related protein
  misc_feature (1)..(236): NCBI GI NO: 14550106 NR Description: HD2 type histone deacetylase HDA106 [Zea mays]
MYVKIDDQKLAIGTLSVDKNPHIQFDLIFDKEFELSHTSKTTSVFFTGYKVEQPFEEDEMDLDSEDEDEELNVPVVKENGKADEKKQKSQEKAVAAPSKSSPDSKKSKDDDDSDEDETDDSDEDETDDSDEGLSPEEGDDDSSDEDDTSDDEEEDTPTPKKPEVGKKRAAESSVLKTPLSDKKAKVATPSSQKTGGKKGAAVHVATPHPAKGKTIVNNDKSVKSPKSAPKSGVPCKSCSKSFISETALQAHSKAKHGGK

SEQ ID NO: 37003 - protein, 200 aa, Zea mays subsp. mays
  peptide (1)..(200): Ceres Seq. ID no. 14309091
  misc_feature (1)..(96): Pfam Name: Pfam Description:  Nucleoplasmin
  misc_feature (1)..(200): NCBI GI NO: 7716950 NR Description: histone deacetylase 2 isoform c [Zea mays]
  misc_feature (1)..(198): NCBI GI NO: 7489751 NR Description: histone deacetylase (EC 3
  misc_feature (1)..(200): NCBI GI NO: 7716948 NR Description: histone deacetylase 2 isoform b [Zea mays]
  misc_feature (1)..(200): NCBI GI NO: 7804960 NR Description: putative histone deacetylase HD2 [Oryza sativa]
  misc_feature (1)..(200): NCBI GI NO: 22597156 NR Description: nucleolar histone deacetylase HD2-P39
  misc_feature (1)..(197): NCBI GI NO: 7804963 NR Description: putative histone deacetylase HD2c
  misc_feature (1)..(197): NCBI GI NO: 11282318 NR Description: histone deacetylase-like protein
  misc_feature (1)..(165): NCBI GI NO: 25352191 NR Description: probable histone deacetylase (EC 3.5.1.-)
  misc_feature (1)..(165): NCBI GI NO: 30688577 NR Description: histone deacetylase-related protein
  misc_feature (1)..(177): NCBI GI NO: 14550106 NR Description: HD2 type histone deacetylase HDA106 [Zea mays]
MDLDSEDEDEELNVPVVKENGKADEKKQKSQEKAVAAPSKSSPDSKKSKDDDDSDEDETDDSDEDETDDSDEGLSPEEGDDDSSDEDDTSDDEEEDTPTPKKPEVGKKRAAESSVLKTPLSDKKAKVATPSSQKTGGKKGAAVHVATPHPAKGKTIVNNDKSVKSPKSAPKSGVPCKSCSKSFISETALQAHSKAKHGGK

SEQ ID NO: 37004 - DNA, 1462 bp, Zea mays subsp. mays; identical to SEQ ID NO: 32498
  misc_feature (1)..(1462): Ceres Seq. ID no. 13579635

SEQ ID NO: 37005 - protein, 410 aa, Zea mays subsp. mays; identical to SEQ ID NO: 32499
  peptide (1)..(410): Ceres Seq. ID no. 13579636
  misc_feature (30)..(103): Pfam Name: Pfam Description:  Ubiquitin family
  misc_feature (27)..(410): NCBI GI NO: 100934 NR Description: polyubiquitin - maize
  misc_feature (27)..(410): NCBI GI NO: 481477 NR Description: polyubiquitin 6 - rice
  misc_feature (30)..(410): NCBI GI NO: 899608 NR Description: polyubiquitin
  misc_feature (27)..(409): NCBI GI NO: 902584 NR Description: polyubiquitin containing 7 ubiquitin monomers
  misc_feature (27)..(410): NCBI GI NO: 902584 NR Description: polyubiquitin containing 7 ubiquitin monomers
  misc_feature (30)..(410): NCBI GI NO: 4809266 NR Description: polyubiquitin [Sporobolus stapfianus]
  misc_feature (27)..(409): NCBI GI NO: 100524 NR Description: polyubiquitin 6 - common sunflower
  misc_feature (27)..(409): NCBI GI NO: 16660462 NR Description: polyubiquitin OUB2 [Olea europaea]
  misc_feature (27)..(409): NCBI GI NO: 4115337 NR Description: ubiquitin [Pisum sativum]
  misc_feature (27)..(409): NCBI GI NO: 100934 NR Description: polyubiquitin - maize

SEQ ID NO: 37006 - protein, 381 aa, Zea mays subsp. mays; identical to SEQ ID NO: 32500
  peptide (1)..(381): Ceres Seq. ID no. 13579637
  misc_feature (1)..(74): Pfam Name: Pfam Description:  Ubiquitin family
  misc_feature (1)..(381): NCBI GI NO: 100934 NR Description: polyubiquitin - maize
  misc_feature (1)..(381): NCBI GI NO: 481477 NR Description: polyubiquitin 6 - rice
  misc_feature (1)..(381): NCBI GI NO: 899608 NR Description: polyubiquitin
  misc_feature (1)..(380): NCBI GI NO: 902584 NR Description: polyubiquitin containing 7 ubiquitin monomers
  misc_feature (1)..(381): NCBI GI NO: 902584 NR Description: polyubiquitin containing 7 ubiquitin monomers
  misc_feature (1)..(381): NCBI GI NO: 4809266 NR Description: polyubiquitin [Sporobolus stapfianus]
  misc_feature (1)..(380): NCBI GI NO: 100524 NR Description: polyubiquitin 6 - common sunflower
  misc_feature (1)..(380): NCBI GI NO: 418854 NR Description: polyubiquitin 6 - parsley
  misc_feature (1)..(380): NCBI GI NO: 16660462 NR Description: polyubiquitin OUB2 [Olea europaea]
  misc_feature (1)..(380): NCBI GI NO: 4115337 NR Description: ubiquitin [Pisum sativum]

SEQ ID NO: 37007 - protein, 305 aa, Zea mays subsp. mays; identical to SEQ ID NO: 32501
  peptide (1)..(305): Ceres Seq. ID no. 13579638
  misc_feature (1)..(74): Pfam Name: Pfam Description:  Ubiquitin family
  misc_feature (1)..(305): NCBI GI NO: 100934 NR Description: polyubiquitin - maize
  misc_feature (1)..(305): NCBI GI NO: 481477 NR Description: polyubiquitin 6 - rice
  misc_feature (1)..(305): NCBI GI NO: 899608 NR Description: polyubiquitin
  misc_feature (1)..(304): NCBI GI NO: 902584 NR Description: polyubiquitin containing 7 ubiquitin monomers
  misc_feature (1)..(305): NCBI GI NO: 902584 NR Description: polyubiquitin containing 7 ubiquitin monomers
  misc_feature (1)..(305): NCBI GI NO: 4809266 NR Description: polyubiquitin [Sporobolus stapfianus]
  misc_feature (1)..(304): NCBI GI NO: 100524 NR Description: polyubiquitin 6 - common sunflower
  misc_feature (1)..(304): NCBI GI NO: 16660462 NR Description: polyubiquitin OUB2 [Olea europaea]
  misc_feature (1)..(304): NCBI GI NO: 4115337 NR Description: ubiquitin [Pisum sativum]
  misc_feature (1)..(304): NCBI GI NO: 170352 NR Description: hexameric polyubiquitin

SEQ ID NO: 37008 - DNA, 435 bp, Zea mays subsp. mays
  misc_feature (1)..(435): Ceres Seq. ID no. 13637179
tctctgcatttaggttttcattttagcggcgggcgaaagagaaggagaagaaggtcctatccatggcgactcaagcggctaaacaatccgttcaatgcttcgggcgtaagaagacagcagtggctgtaacccactgcaagcctggatgcggtatgatcaagctcaacggctccccgatcgagctgttcaacccagagatcctccgtttcaagatcttcgagccagtccttctcctcggcaagcaccgtttcgctggcgtcgacatgaggatccgtgtcaagggtggtggtcacacttcccaggtctacgccatccgtcagagtatcgccaaggcgctcgtggcgttctaccagaagtacgtgaacgagcagtcgaagaaggaggtgaaggatatccttatccgttacgataggactctccttgtggcggatccga

SEQ ID NO: 37009 - protein, 124 aa, Zea mays subsp. mays
  peptide (1)..(124): Ceres Seq. ID no. 13637180
  misc_feature (14)..(123): Pfam Name: Pfam Description:  Ribosomal protein S9/S16
  misc_feature (1)..(123): NCBI GI NO: 15238809 NR Description: 40S ribosomal protein S16 (RPS16C)
  misc_feature (1)..(123): NCBI GI NO: 15226676 NR Description: 40S ribosomal protein S16 (RPS16A)
  misc_feature (1)..(123): NCBI GI NO: 15229252 NR Description: 40S ribosomal protein S16 (RPS16B)
  misc_feature (8)..(123): NCBI GI NO: 6984222 NR Description: 40S ribosomal protein S16 [Euphorbia esula]
  misc_feature (1)..(123): NCBI GI NO: 3122800 NR Description: 40S RIBOSOMAL PROTEIN S16
  misc_feature (1)..(123): NCBI GI NO: 1173209 NR Description: 40S RIBOSOMAL PROTEIN S16
  misc_feature (5)..(123): NCBI GI NO: 17369864 NR Description: 40S ribosomal protein S16
  misc_feature (1)..(123): NCBI GI NO: 39850096 NR Description: Unknown (protein for IMAGE:6887619)
  misc_feature (1)..(123): NCBI GI NO: 4506691 NR Description: ribosomal protein S16; 40S ribosomal protein S16
  misc_feature (1)..(123): NCBI GI NO: 15294045 NR Description: 40S ribosomal protein S16 [Ictalurus punctatus]
MATQAAKQSVQCFGRKKTAVAVTHCKPGCGMIKLNGSPIELFNPEILRFKIFEPVLLLGKHRFAGVDMRIRVKGGGHTSQVYAIRQSIAKALVAFYQKYVNEQSKKEVKDILIRYDRTLLVADP

SEQ ID NO: 37010 - protein, 94 aa, Zea mays subsp. mays
  peptide (1)..(94): Ceres Seq. ID no. 13637181
  misc_feature (1)..(93): Pfam Name: Pfam Description:  Ribosomal protein S9/S16
  misc_feature (1)..(93): NCBI GI NO: 15238809 NR Description: 40S ribosomal protein S16 (RPS16C)
  misc_feature (1)..(93): NCBI GI NO: 15226676 NR Description: 40S ribosomal protein S16 (RPS16A)
  misc_feature (1)..(93): NCBI GI NO: 15229252 NR Description: 40S ribosomal protein S16 (RPS16B)
  misc_feature (1)..(93): NCBI GI NO: 6984222 NR Description: 40S ribosomal protein S16 [Euphorbia esula]
  misc_feature (1)..(93): NCBI GI NO: 3122800 NR Description: 40S RIBOSOMAL PROTEIN S16
  misc_feature (1)..(93): NCBI GI NO: 1173209 NR Description: 40S RIBOSOMAL PROTEIN S16
  misc_feature (1)..(93): NCBI GI NO: 17369864 NR Description: 40S ribosomal protein S16
  misc_feature (1)..(93): NCBI GI NO: 39850096 NR Description: Unknown (protein for IMAGE:6887619)
  misc_feature (1)..(93): NCBI GI NO: 4506691 NR Description: ribosomal protein S16; 40S ribosomal protein S16
  misc_feature (1)..(93): NCBI GI NO: 15294045 NR Description: 40S ribosomal protein S16 [Ictalurus punctatus]
MIKLNGSPIELFNPEILRFKIFEPVLLLGKHRFAGVDMRIRVKGGGHTSQVYAIRQSIAKALVAFYQKYVNEQSKKEVKDILIRYDRTLLVADP

SEQ ID NO: 37011 - protein, 88 aa, Zea mays subsp. mays
  peptide (1)..(88): Ceres Seq. ID no. 13637182
MRYDQAQRLPDRAVQPRDPPFQDLRASPSPRQAPFRWRRHEDPCQGWWSHFPGLRHPSEYRQGARGVLPEVRERAVEEGGEGYPYPLR

SEQ ID NO: 37012 - DNA, 1116 bp, Zea mays subsp. mays
  misc_feature (1)..(1116): Ceres Seq. ID no. 13630146
atcatcagtagctagctgykcgaacgctttcagccgatcgagcaccatcgtcacagtcagtagtagccaagcatatttctttctccgagtgatttgcgctgagcgatcagttcatccagagcgagcggagctgagctgagctgagcgagcttgcgttgcttgagagaccctgctgccatggcttcccaccaggacaaggctagctaccaggccggcgagaccaaggcccgcaccgaggagaagaccgggcaggcggtgggggcgaccaaggacacggcgcagcacgccaaggaccgggcggcggacgcggcggggcacgcggcgggcaagggccaggacgccaaggaggccaccaagcagaaggcgtccgacaccggcagctacctgggcaagaagaccgacgaggccaagcacaaggccggcgagacgacggaggccaccaagcasaaggccggcgagacgacggaggccgccaagcagaaggcmgscgacgmcgayggaggccgccaagcagaaggccgscgagacgacggagacgaccaagcagaaggccggcgagacgacggaggccgccaggcagaaggcagccgacgccatggaggccgccaagcagaaggccgccgaggccgggcagtacgccaaggacaccgccgtctccggcaaggacaagtccggcggcgtcatccagcaggccactgagcaggtgaagagcgcggcggcggggcgcaaggacgcggtgatgagcacgctggggatgggcggggacaacaagcagggcgacgccaacaccaacaccaacaccaacaccaccaaggactcctctaccatcaccagggatcactagacgcgtgtatgcacacgcagcacttggtccgatcctgtcgtccgtgaccctgtttgcttgttcgcgagtccagtatgggtttgtgcatgttttcagtgtcatggtttccttttctacgaatttggtgttgtaattttgatttgcaggtacgttgctgtgttttttctgcgtcatcaagtgtctgtaaacgagtcgggcgggtttgagtgtcctttgttgtgataataaagttggtaaatcctaattaatatatagcatgcgactgtcttgct

SEQ ID NO: 37013 - protein, 173 aa, Zea mays subsp. mays
  peptide (1)..(173): Ceres Seq. ID no. 15220747
  misc_feature (28)..(105): Pfam Name: Pfam Description:  Late embryogenesis abundant protein
  misc_feature (1)..(151): NCBI GI NO: 7387829 NR Description: Late embryogenesis abundant protein, group 3 (LEA)
  misc_feature (1)..(139): NCBI GI NO: 7489493 NR Description: LEA protein - rice
  misc_feature (1)..(108): NCBI GI NO: 4105441 NR Description: group 3 LEA protein [Oryza sativa]
  misc_feature (1)..(139): NCBI GI NO: 7489569 NR Description: protein LEA type 1 - rice
  misc_feature (1)..(153): NCBI GI NO: 1076757 NR Description: WSI18 protein - rice
  misc_feature (1)..(105): NCBI GI NO: 4929080 NR Description: ABA-inducible protein WRAB1 [Triticum aestivum]
  misc_feature (1)..(152): NCBI GI NO: 25989707 NR Description: LEA3 protein [Triticum aestivum]
  misc_feature (1)..(153): NCBI GI NO: 7387828 NR Description: Late embryogenesis abundant protein, group 3
  misc_feature (1)..(153): NCBI GI NO: 25989705 NR Description: LEA1 protein [Triticum aestivum]
  misc_feature (1)..(105): NCBI GI NO: 33342178 NR Description: ABA inducible protein [Triticum aestivum]
  misc_feature (90)..(90): Xaa is any aa, unknown or other
  misc_feature (103)..(103): Xaa is any aa, unknown or other
  misc_feature (104)..(104): Xaa is any aa, unknown or other
  misc_feature (106)..(106): Xaa is any aa, unknown or other
  misc_feature (107)..(107): Xaa is any aa, unknown or other
  misc_feature (115)..(115): Xaa is any aa, unknown or other
MASHQDKASYQAGETKARTEEKTGQAVGATKDTAQHAKDRAADAAGHAAGKGQDAKEATKQKASDTGSYLGKKTDEAKHKAGETTEATKXKAGETTEAAKQKXXDXXGGRQAEGXRDDGDDQAEGRRDDGGRQAEGSRRHGGRQAEGRRGRAVRQGHRRLRQGQVRRRHPAGH

SEQ ID NO: 37014 - DNA, 546 bp, Zea mays subsp. mays
  misc_feature (1)..(546): Ceres Seq. ID no. 13633184
atcccaacattctcgttccaacttgaaattcacatccaaatcttctccttcaactatcaccatggccagcatcaaagtccacggagtccccatgtccaccgccaccatgcgcgttctcgccgctctttacgagaaggagctcgagttcgagttgatccccgtcgacatgagagccggcgctcacaagcaggagcctttcctttccctcaaccccttcggtcagatccctgctctccaagacggtgacttaactctattcgagtcacgagccatcacagagtacatagcggatgagtacagtgagaaaggcgagaagcttatgtgcccaggctgcaacaaagtcaaggcactcaccaaggtctggcttaacgttgaaggtcaacagtttgaccctatcgcctctaagatcgccttcgagcgtgtcttcaaaggcatgtttggcatgaccaccgatcctgccgctgtccaagatctcgaaggcaaagctcgtcagggtcttggatatctacgaggcgaggtctccaaatccgagttcctcgcttgtga

SEQ ID NO: 37015 - protein, 181 aa, Zea mays subsp. mays
  peptide (1)..(181): Ceres Seq. ID no. 13633185
  misc_feature (1)..(180): NCBI GI NO: 30690772 NR Description: glutathione transferase, putative (GST6)
  misc_feature (21)..(180): NCBI GI NO: 12643792 NR Description: Glutathione S-transferase 6 (GST class phi)
  misc_feature (21)..(180): NCBI GI NO: 14532562 NR Description: At2g47730/F17A22.12 [Arabidopsis thaliana]
  misc_feature (21)..(180): NCBI GI NO: 1402898 NR Description: gst6 [Arabidopsis thaliana]
  misc_feature (21)..(179): NCBI GI NO: 7649155 NR Description: glutathione S-transferase [Euphorbia esula]
  misc_feature (23)..(179): NCBI GI NO: 7434067 NR Description: glutathione transferase (EC 2
  misc_feature (24)..(179): NCBI GI NO: 1170094 NR Description: Glutathione S-transferase
  misc_feature (23)..(179): NCBI GI NO: 232202 NR Description: GLUTATHIONE S-TRANSFERASE PARB (GST CLASS-PHI)
  misc_feature (23)..(179): NCBI GI NO: 1279588 NR Description: glutathione S-transferase
  misc_feature (23)..(179): NCBI GI NO: 417093 NR Description: GLUTATHIONE S-TRANSFERASE (GST CLASS-PHI)
SQHSRSNLKFTSKSSPSTITMASIKVHGVPMSTATMRVLAALYEKELEFELIPVDMRAGAHKQEPFLSLNPFGQIPALQDGDLTLFESRAITEYIADEYSEKGEKLMCPGCNKVKALTKVWLNVEGQQFDPIASKIAFERVFKGMFGMTTDPAAVQDLEGKARQGLGYLRGEVSKSEFLAC

SEQ ID NO: 37016 - protein, 161 aa, Zea mays subsp. mays
  peptide (1)..(161): Ceres Seq. ID no. 13633186
  misc_feature (1)..(160): NCBI GI NO: 30690772 NR Description: glutathione transferase, putative (GST6)
  misc_feature (1)..(160): NCBI GI NO: 12643792 NR Description: Glutathione S-transferase 6 (GST class phi)
  misc_feature (1)..(160): NCBI GI NO: 14532562 NR Description: At2g47730/F17A22.12 [Arabidopsis thaliana]
  misc_feature (1)..(160): NCBI GI NO: 1402898 NR Description: gst6 [Arabidopsis thaliana]
  misc_feature (1)..(159): NCBI GI NO: 7649155 NR Description: glutathione S-transferase [Euphorbia esula]
  misc_feature (3)..(159): NCBI GI NO: 7434067 NR Description: glutathione transferase (EC 2
  misc_feature (4)..(159): NCBI GI NO: 1170094 NR Description: Glutathione S-transferase
  misc_feature (3)..(159): NCBI GI NO: 232202 NR Description: GLUTATHIONE S-TRANSFERASE PARB (GST CLASS-PHI)
  misc_feature (3)..(159): NCBI GI NO: 1279588 NR Description: glutathione S-transferase
  misc_feature (3)..(159): NCBI GI NO: 417093 NR Description: GLUTATHIONE S-TRANSFERASE (GST CLASS-PHI)
MASIKVHGVPMSTATMRVLAALYEKELEFELIPVDMRAGAHKQEPFLSLNPFGQIPALQDGDLTLFESRAITEYIADEYSEKGEKLMCPGCNKVKALTKVWLNVEGQQFDPIASKIAFERVFKGMFGMTTDPAAVQDLEGKARQGLGYLRGEVSKSEFLAC

SEQ ID NO: 37017 - protein, 151 aa, Zea mays subsp. mays
  peptide (1)..(151): Ceres Seq. ID no. 13633187
  misc_feature (1)..(150): NCBI GI NO: 30690772 NR Description: glutathione transferase, putative (GST6)
  misc_feature (1)..(150): NCBI GI NO: 12643792 NR Description: Glutathione S-transferase 6 (GST class phi)
  misc_feature (1)..(150): NCBI GI NO: 14532562 NR Description: At2g47730/F17A22.12 [Arabidopsis thaliana]
  misc_feature (1)..(150): NCBI GI NO: 1402898 NR Description: gst6 [Arabidopsis thaliana]
  misc_feature (1)..(149): NCBI GI NO: 7649155 NR Description: glutathione S-transferase [Euphorbia esula]
  misc_feature (1)..(149): NCBI GI NO: 7434067 NR Description: glutathione transferase (EC 2
  misc_feature (1)..(149): NCBI GI NO: 1170094 NR Description: Glutathione S-transferase
  misc_feature (1)..(149): NCBI GI NO: 232202 NR Description: GLUTATHIONE S-TRANSFERASE PARB (GST CLASS-PHI)
  misc_feature (1)..(149): NCBI GI NO: 1279588 NR Description: glutathione S-transferase
  misc_feature (1)..(149): NCBI GI NO: 417093 NR Description: GLUTATHIONE S-TRANSFERASE (GST CLASS-PHI)
MSTATMRVLAALYEKELEFELIPVDMRAGAHKQEPFLSLNPFGQIPALQDGDLTLFESRAITEYIADEYSEKGEKLMCPGCNKVKALTKVWLNVEGQQFDPIASKIAFERVFKGMFGMTTDPAAVQDLEGKARQGLGYLRGEVSKSEFLAC

SEQ ID NO: 37018 - DNA, 556 bp, Zea mays subsp. mays
  misc_feature (1)..(556): Ceres Seq. ID no. 13628901
aaaaaaaaaagcacacaccacgcagggcacaaggagaagaagaggggaagaaatattcttcccgtcgaaagacggagagaggaaaagggacaagggcaaggcaagagagaggcgtcgtcgtttgatctgctgccggagtgcgaagaggaagaggaagaggagcgccggagttgtaaagatgttcctggtggactggttctatggggtgctggcatcgcttgggctgtggcagaaggaggctaagatcctcttccttggcctcgacaacgccggcaagaccaccctcctccacatgctgaaggacgagcggctcgtacagcaccagccgacgcaataccccacgtcagaagagttgagcatcggcaggatcaagttcaaggcgttcgaccttgggggccaccagatcgcccgccgcgtctggaaggactactacgccaaggttgatgctgttgtgtacttggtggatgctgttgacaaggaacgttttgccgagtcgaagaaggagctcgatgcgcttcttgcagatgactcccttgcaaacgttcctttcctcata

SEQ ID NO: 37019 - protein, 185 aa, Zea mays subsp. mays
  peptide (1)..(185): Ceres Seq. ID no. 13628902
  misc_feature (64)..(184): Pfam Name: Pfam Description:  ADP-ribosylation factor family
  misc_feature (60)..(184): NCBI GI NO: 34902852 NR Description: unnamed protein product
  misc_feature (60)..(184): NCBI GI NO: 7438456 NR Description: GTP-binding protein
  misc_feature (60)..(184): NCBI GI NO: 15228793 NR Description: GTP-binding protein SAR1A, putative
  misc_feature (60)..(184): NCBI GI NO: 25294172 NR Description: ras-like small monomeric GTP-binding protein
  misc_feature (60)..(184): NCBI GI NO: 15235226 NR Description: GTP-binding protein SAR1A [Arabidopsis thaliana]
  misc_feature (60)..(184): NCBI GI NO: 25294173 NR Description: small GTP-binding protein Sar1BNt
  misc_feature (60)..(184): NCBI GI NO: 3334321 NR Description: GTP-binding protein SAR1A
  misc_feature (60)..(184): NCBI GI NO: 34894960 NR Description: putative GTP-binding protein
  misc_feature (60)..(184): NCBI GI NO: 1549222 NR Description: NtSar1 protein [Nicotiana tabacum]
  misc_feature (60)..(184): NCBI GI NO: 3334322 NR Description: GTP-binding protein SAR1B
KKKAHTTQGTRRRRGEEIFFPSKDGERKRDKGKARERRRRLICCRSAKRKRKRSAGVVKMFLVDWFYGVLASLGLWQKEAKILFLGLDNAGKTTLLHMLKDERLVQHQPTQYPTSEELSIGRIKFKAFDLGGHQIARRVWKDYYAKVDAVVYLVDAVDKERFAESKKELDALLADDSLANVPFLI

SEQ ID NO: 37020 - protein, 126 aa, Zea mays subsp. mays
  peptide (1)..(126): Ceres Seq. ID no. 13628903
  misc_feature (5)..(125): Pfam Name: Pfam Description:  ADP-ribosylation factor family
  misc_feature (1)..(125): NCBI GI NO: 34902852 NR Description: unnamed protein product
  misc_feature (1)..(125): NCBI GI NO: 7438456 NR Description: GTP-binding protein
  misc_feature (1)..(125): NCBI GI NO: 15228793 NR Description: GTP-binding protein SAR1A, putative
  misc_feature (1)..(125): NCBI GI NO: 25294172 NR Description: ras-like small monomeric GTP-binding protein
  misc_feature (1)..(125): NCBI GI NO: 15235226 NR Description: GTP-binding protein SAR1A [Arabidopsis thaliana]
  misc_feature (1)..(125): NCBI GI NO: 25294173 NR Description: small GTP-binding protein Sar1BNt
  misc_feature (1)..(125): NCBI GI NO: 3334321 NR Description: GTP-binding protein SAR1A
  misc_feature (1)..(125): NCBI GI NO: 34894960 NR Description: putative GTP-binding protein
  misc_feature (1)..(125): NCBI GI NO: 1549222 NR Description: NtSar1 protein [Nicotiana tabacum]
  misc_feature (1)..(125): NCBI GI NO: 3334322 NR Description: GTP-binding protein SAR1B
MFLVDWFYGVLASLGLWQKEAKILFLGLDNAGKTTLLHMLKDERLVQHQPTQYPTSEELSIGRIKFKAFDLGGHQIARRVWKDYYAKVDAVVYLVDAVDKERFAESKKELDALLADDSLANVPFLI

SEQ ID NO: 37021 - DNA, 427 bp, Zea mays subsp. mays
  misc_feature (1)..(427): Ceres Seq. ID no. 13637160
atcccaaaacctaaatcccctcttcgtttccgagaaaaccaaagaaaaagagagagagactcacgatggcaccaaaggcaggaaagaaaccagcagagaagaaacccgccgccgcagagaagccagtggaggaagagaaggtagcggagaaagcaccagctgagaagaagcccaaggccggaaagaagctacctaaggaagccatcggcgcgaccgacaagaagaagaagcgcagcaagaagaacatcgagacgtacaagatatacatcttcaaggttcttaagcaagtccacccagacatcggaatctcgagtaaggccatggggatcatgaacagcttcatcaacgacatcttcgagaagcttgctcaggaagcgtcgaaactcgcaaggtacaacaagaagccgaccattacttctcgcgagat

SEQ ID NO: 37022 - protein, 120 aa, Zea mays subsp. mays
  peptide (1)..(120): Ceres Seq. ID no. 13637161
  misc_feature (32)..(119): Pfam Name: Pfam Description:  Core histone H2A/H2B/H3/H4
  misc_feature (1)..(119): NCBI GI NO: 15226943 NR Description: histone H2B, putative [Arabidopsis thaliana]
  misc_feature (1)..(119): NCBI GI NO: 15238563 NR Description: histone H2B [Arabidopsis thaliana]
  misc_feature (1)..(119): NCBI GI NO: 21617908 NR Description: histone H2B [Arabidopsis thaliana]
  misc_feature (1)..(119): NCBI GI NO: 21554180 NR Description: histone H2B-like protein [Arabidopsis thaliana]
  misc_feature (1)..(119): NCBI GI NO: 15223016 NR Description: histone H2B, putative [Arabidopsis thaliana]
  misc_feature (1)..(119): NCBI GI NO: 15231304 NR Description: histone H2B [Arabidopsis thaliana]
  misc_feature (1)..(119): NCBI GI NO: 7387726 NR Description: Histone H2B
  misc_feature (1)..(119): NCBI GI NO: 15231313 NR Description: histone H2B, putative [Arabidopsis thaliana]
  misc_feature (1)..(119): NCBI GI NO: 7387727 NR Description: Histone H2B (CaH2B)
  misc_feature (1)..(119): NCBI GI NO: 7439756 NR Description: histone H2B - tomato
MAPKAGKKPAEKKPAAAEKPVEEEKVAEKAPAEKKPKAGKKLPKEAIGATDKKKKRSKKNIETYKIYIFKVLKQVHPDIGISSKAMGIMNSFINDIFEKLAQEASKLARYNKKPTITSRE

SEQ ID NO: 37023 - DNA, 386 bp, Zea mays subsp. mays
  misc_feature (1)..(386): Ceres Seq. ID no. 13633461
  misc_feature (176)..(176): n is a, c, t, g, unknown, or other
  misc_feature (177)..(177): n is a, c, t, g, unknown, or other
  misc_feature (175)..(175): n is a, c, t, g, unknown, or other
acaacaacgagttaacgaaagccttttatccaagctcaggaaagctcacagtttcgttggatccaatcttagttttatccaagctcagcaatggcttctcgtcagcagcatcctactagctaccacgccggcgagacaaaggcccgtgccgaggagaagacgggtcaagtgatgnnngcggcgcaggagaaaggcagggaggccaagcacaaggcgtccgacgccgccgaccgcgccatggggatgggccacgaccccagggaggcgaccagggagaacgcgcgcgccgccgcgaaccgaatcatggggatgggccacgacgtcgctaagacggccaaggacagggagtagcgggtcaaggacgcggcctccggtgccgatgtccg

SEQ ID NO: 37024 - protein, 86 aa, Zea mays subsp. mays
  peptide (1)..(86): Ceres Seq. ID no. 13633462
  misc_feature (31)..(86): Pfam Name: Pfam Description:  Late embryogenesis abundant protein
  misc_feature (1)..(86): NCBI GI NO: 34910364 NR Description: WSI18 protein
  misc_feature (1)..(86): NCBI GI NO: 1076757 NR Description: WSI18 protein - rice
  misc_feature (1)..(86): NCBI GI NO: 7489493 NR Description: LEA protein - rice
  misc_feature (1)..(86): NCBI GI NO: 4105441 NR Description: group 3 LEA protein [Oryza sativa]
  misc_feature (1)..(85): NCBI GI NO: 7489569 NR Description: protein LEA type 1 - rice
  misc_feature (1)..(80): NCBI GI NO: 7387829 NR Description: Late embryogenesis abundant protein, group 3 (LEA)
  misc_feature (1)..(85): NCBI GI NO: 20126724 NR Description: late embryogenesis-abundant protein
  misc_feature (1)..(85): NCBI GI NO: 20126722 NR Description: late embryogenesis-abundant protein
  misc_feature (1)..(85): NCBI GI NO: 1592677 NR Description: LEA76 homologue type2 [Arabidopsis thaliana]
  misc_feature (1)..(85): NCBI GI NO: 15232660 NR Description: late embryogenesis abundant
  misc_feature (29)..(29): Xaa is any aa, unknown or other
MASRQQHPTSYHAGETKARAEEKTGQVMXAAQEKGREAKHKASDAADRAMGMGHDPREATRENARAAANRIMGMGHDVAKTAKDRE

SEQ ID NO: 37025 - protein, 59 aa, Zea mays subsp. mays
  peptide (1)..(59): Ceres Seq. ID no. 13633463
  misc_feature (4)..(59): Pfam Name: Pfam Description:  Late embryogenesis abundant protein
  misc_feature (1)..(59): NCBI GI NO: 34910364 NR Description: WSI18 protein
  misc_feature (1)..(59): NCBI GI NO: 1076757 NR Description: WSI18 protein - rice
  misc_feature (1)..(59): NCBI GI NO: 7489493 NR Description: LEA protein - rice
  misc_feature (1)..(59): NCBI GI NO: 4105441 NR Description: group 3 LEA protein [Oryza sativa]
  misc_feature (1)..(58): NCBI GI NO: 7489569 NR Description: protein LEA type 1 - rice
  misc_feature (1)..(53): NCBI GI NO: 7387829 NR Description: Late embryogenesis abundant protein, group 3 (LEA)
  misc_feature (1)..(58): NCBI GI NO: 20126724 NR Description: late embryogenesis-abundant protein
  misc_feature (1)..(58): NCBI GI NO: 20126722 NR Description: late embryogenesis-abundant protein
  misc_feature (1)..(58): NCBI GI NO: 1592677 NR Description: LEA76 homologue type2 [Arabidopsis thaliana]
  misc_feature (1)..(58): NCBI GI NO: 15232660 NR Description: late embryogenesis abundant
  misc_feature (2)..(2): Xaa is any aa, unknown or other
MXAAQEKGREAKHKASDAADRAMGMGHDPREATRENARAAANRIMGMGHDVAKTAKDRE

SEQ ID NO: 37026 - protein, 56 aa, Zea mays subsp. mays
  peptide (1)..(56): Ceres Seq. ID no. 13633464
QQRVNESLLSKLRKAHSFVGSNLSFIQAQQWLLVSSILLATTPARQRPVPRRRRVK

SEQ ID NO: 37027 - DNA, 1628 bp, Zea mays subsp. mays; identical to SEQ ID NO: 27418
  misc_feature (1)..(1628): Ceres Seq. ID no. 13636255

SEQ ID NO: 37028 - protein, 270 aa, Zea mays subsp. mays; identical to SEQ ID NO: 27419
  peptide (1)..(270): Ceres Seq. ID no. 13636256
  misc_feature (108)..(141): Pfam Name: Pfam Description:  TPR Domain
  misc_feature (1)..(256): NCBI GI NO: 18397936 NR Description: cyclophilin-40 [Arabidopsis thaliana]
  misc_feature (1)..(244): NCBI GI NO: 25411671 NR Description: hypothetical protein At2g15790
  misc_feature (1)..(256): NCBI GI NO: 34857103 NR Description: similar to peptidylprolyl isomerase D
  misc_feature (1)..(256): NCBI GI NO: 13385854 NR Description: peptidylprolyl isomerase D (cyclophilin D)
  misc_feature (1)..(256): NCBI GI NO: 27806463 NR Description: peptidylprolyl isomerase D (cyclophilin D)
  misc_feature (1)..(256): NCBI GI NO: 27687349 NR Description: similar to peptidylprolyl isomerase D
  misc_feature (1)..(256): NCBI GI NO: 4826932 NR Description: peptidylprolyl isomerase D (cyclophilin D); hCyP40
  misc_feature (1)..(256): NCBI GI NO: 38174405 NR Description: Unknown (protein for MGC:75854)
  misc_feature (1)..(256): NCBI GI NO: 32405118 NR Description: hypothetical protein
  misc_feature (1)..(258): NCBI GI NO: 40741736 NR Description: hypothetical protein AN4583.2

SEQ ID NO: 37029 - protein, 267 aa, Zea mays subsp. mays; identical to SEQ ID NO: 27420
  peptide (1)..(267): Ceres Seq. ID no. 13636257
  misc_feature (105)..(138): Pfam Name: Pfam Description:  TPR Domain
  misc_feature (1)..(253): NCBI GI NO: 18397936 NR Description: cyclophilin-40 [Arabidopsis thaliana]
  misc_feature (1)..(241): NCBI GI NO: 25411671 NR Description: hypothetical protein At2g15790
  misc_feature (1)..(253): NCBI GI NO: 34857103 NR Description: similar to peptidylprolyl isomerase D
  misc_feature (1)..(253): NCBI GI NO: 13385854 NR Description: peptidylprolyl isomerase D (cyclophilin D)
  misc_feature (1)..(253): NCBI GI NO: 27806463 NR Description: peptidylprolyl isomerase D (cyclophilin D)
  misc_feature (1)..(253): NCBI GI NO: 27687349 NR Description: similar to peptidylprolyl isomerase D
  misc_feature (1)..(253): NCBI GI NO: 4826932 NR Description: peptidylprolyl isomerase D (cyclophilin D); hCyP40
  misc_feature (1)..(253): NCBI GI NO: 38174405 NR Description: Unknown (protein for MGC:75854)
  misc_feature (1)..(253): NCBI GI NO: 32405118 NR Description: hypothetical protein
  misc_feature (1)..(255): NCBI GI NO: 40741736 NR Description: hypothetical protein AN4583.2

SEQ ID NO: 37030 - protein, 234 aa, Zea mays subsp. mays; identical to SEQ ID NO: 27421
  peptide (1)..(234): Ceres Seq. ID no. 13636258
  misc_feature (72)..(105): Pfam Name: Pfam Description:  TPR Domain
  misc_feature (1)..(220): NCBI GI NO: 18397936 NR Description: cyclophilin-40 [Arabidopsis thaliana]
  misc_feature (1)..(208): NCBI GI NO: 25411671 NR Description: hypothetical protein At2g15790
  misc_feature (1)..(220): NCBI GI NO: 34857103 NR Description: similar to peptidylprolyl isomerase D
  misc_feature (1)..(220): NCBI GI NO: 13385854 NR Description: peptidylprolyl isomerase D (cyclophilin D)
  misc_feature (1)..(220): NCBI GI NO: 27806463 NR Description: peptidylprolyl isomerase D (cyclophilin D)
  misc_feature (1)..(220): NCBI GI NO: 27687349 NR Description: similar to peptidylprolyl isomerase D
  misc_feature (1)..(220): NCBI GI NO: 4826932 NR Description: peptidylprolyl isomerase D (cyclophilin D); hCyP40
  misc_feature (1)..(220): NCBI GI NO: 38174405 NR Description: Unknown (protein for MGC:75854)
  misc_feature (1)..(220): NCBI GI NO: 32405118 NR Description: hypothetical protein
  misc_feature (1)..(222): NCBI GI NO: 40741736 NR Description: hypothetical protein AN4583.2

SEQ ID NO: 37031 - DNA, 1733 bp, Zea mays subsp. mays
  misc_feature (1)..(1733): Ceres Seq. ID no. 15176870
aagctactaagtaataaaaccacgcgggcaccagcaggcagcagctagctagccatccagtccagagatggccacgagcggccccgtccttctggtctcgcaggcgcagcagcgcaagtcacggacctacaccccgagcccatggggtgacttcttcctccaccacgtcccatgcactccgtcacagctcttgtccatgaaggagagggcaaaggtcaaggagcaacaagtgaggcagatgatacacgaaacgatcgcctcctccgacctgcttcgtaagatggagctcgtggacacactacagcgcctcggggtggactaccactacaacgaggagatcgaccagttgctttgctctatctacgaccaccacgacgacggaggagacggcctcgacgatctctacgtcacctccctgcggttctatttgctcaggaagcatgggtacacaatctcttcagatggtggaatgatttccgatcgcatatagacctgagctttgcgcgggacagaatggtggagcttcatttctggatgctcggagtaatacatgatccctattgctcacggatcatgatagtcaagatcttcgtattcataagcttgtttgatgaccttatggacaactatagcaccacagaggagagcaatgtcttcaccgcagccatggaaaggttggttacatttatttgaaatcatatcattagagcgcaactatatacaactcagaatatatttaccatttctttgcttgaagaaataaaaacaaccctaattaatgagataggtgggacgaacagatggcacagcagcttccagcaggcttgaaggcactcttggtcaggatatttaacgctacgaacaagatcgaggaggagttaaaacttcaggggaacatgcatgctgaactcatcaaaaaaatggtgattaatagtgccaagttctaccatgctgaggtcaaatggcgcgacgaacacttcgtgccaactagtcttgaggagcacctccaaaaatctatccctaccagtgcttgtatgcagatggcaaatcttgcgttggtttcactgggaaatgtgactactagagaggacgtcgagtgggttttcaccttccccaaaatcatcagaggtgcttgtattgtgggccgcatctccaacgacatcgtgtcacatgaggtttaccaaaacctctccaccacattctagctagtcatatattccccatcagctgactatatacgtattctctaaagactcacattgcttgttcttgctttaatttccttgatgaagcgggaacaagcttcttcagaccatgtggcatccacggttcaaacttgcatgaagcagtacaacgtgacaataaaggaagccaacgagaaacttagagcggtaatcgaagaggcatggatggacatcgtccaagatagcctcgagcaggaacgccctagagcacttctcgacatagccatcaatgttgcacgagttgcagatttcatgtacaagcgcgaagacgcgtacacgctctcattcgtcatcaaggacattatagcttcaatgtacatctattccgtgtgagcttattgatctactgctagtaagaaagactttttcagtaatgtacatgaattgaaaaaggtccgttaattgatggtacatttaattaatcccaaaattattgtataagtagtatgtgtgatgtactgcatatcctaataaatgtgtttgtgttcc

SEQ ID NO: 37032 - protein, 140 aa, Zea mays subsp. mays
  peptide (1)..(140): Ceres Seq. ID no. 15176871
  misc_feature (26)..(132): Pfam Name: Pfam Description:  Terpene synthase, N-terminal domain
  misc_feature (23)..(132): NCBI GI NO: 38636781 NR Description: putative sesquiterpene cyclase 1
  misc_feature (1)..(132): NCBI GI NO: 11545431 NR Description: sesquiterpene cyclase 1 [Zea mays]
  misc_feature (15)..(131): NCBI GI NO: 34894946 NR Description: putative sesquiterpene cyclase 1
  misc_feature (1)..(132): NCBI GI NO: 18092338 NR Description: sesquiterpene cyclase [Zea mays]
  misc_feature (21)..(132): NCBI GI NO: 4733937 NR Description: sesquiterpene synthase [Elaeis oleifera]
  misc_feature (1)..(132): NCBI GI NO: 3287835 NR Description:
  misc_feature (1)..(132): NCBI GI NO: 3970689 NR Description: (+)-delta-cadinene synthase [Gossypium arboreum]
  misc_feature (23)..(132): NCBI GI NO: 15321626 NR Description: cyclase [Nicotiana tabacum]
  misc_feature (21)..(132): NCBI GI NO: 18766934 NR Description: beta-caryophyllene synthase QHS1 [Artemisia annua]
  misc_feature (1)..(132): NCBI GI NO: 8389329 NR Description: (+)-delta-cadinene synthase [Gossypium hirsutum]
MATSGPVLLVSQAQQRKSRTYTPSPWGDFFLHHVPCTPSQLLSMKERAKVKEQQVRQMIHETIASSDLLRKMELVDTLQRLGVDYHYNEEIDQLLCSIYDHHDDGGDGLDDLYVTSLRFYLLRKHGYTISSDGGMISDRI

SEQ ID NO: 37033 - protein, 134 aa, Zea mays subsp. mays
  peptide (1)..(134): Ceres Seq. ID no. 15176872
  misc_feature (1)..(133): NCBI GI NO: 38636781 NR Description: putative sesquiterpene cyclase 1
  misc_feature (1)..(125): NCBI GI NO: 11545431 NR Description: sesquiterpene cyclase 1 [Zea mays]
  misc_feature (1)..(125): NCBI GI NO: 34894946 NR Description: putative sesquiterpene cyclase 1
  misc_feature (1)..(125): NCBI GI NO: 18092338 NR Description: sesquiterpene cyclase [Zea mays]
  misc_feature (1)..(125): NCBI GI NO: 4733937 NR Description: sesquiterpene synthase [Elaeis oleifera]
  misc_feature (1)..(125): NCBI GI NO: 3287835 NR Description:
  misc_feature (1)..(125): NCBI GI NO: 3970689 NR Description: (+)-delta-cadinene synthase [Gossypium arboreum]
  misc_feature (1)..(128): NCBI GI NO: 15321626 NR Description: cyclase [Nicotiana tabacum]
  misc_feature (1)..(125): NCBI GI NO: 18766934 NR Description: beta-caryophyllene synthase QHS1 [Artemisia annua]
  misc_feature (1)..(125): NCBI GI NO: 8389329 NR Description: (+)-delta-cadinene synthase [Gossypium hirsutum]
MAQQLPAGLKALLVRIFNATNKIEEELKLQGNMHAELIKKMVINSAKFYHAEVKWRDEHFVPTSLEEHLQKSIPTSACMQMANLALVSLGNVTTREDVEWVFTFPKIIRGACIVGRISNDIVSHEVYQNLSTTF

SEQ ID NO: 37034 - protein, 102 aa, Zea mays subsp. mays
  peptide (1)..(102): Ceres Seq. ID no. 15176873
  misc_feature (1)..(101): NCBI GI NO: 38636781 NR Description: putative sesquiterpene cyclase 1
  misc_feature (1)..(93): NCBI GI NO: 11545431 NR Description: sesquiterpene cyclase 1 [Zea mays]
  misc_feature (1)..(93): NCBI GI NO: 34894946 NR Description: putative sesquiterpene cyclase 1
  misc_feature (1)..(93): NCBI GI NO: 18092338 NR Description: sesquiterpene cyclase [Zea mays]
  misc_feature (1)..(93): NCBI GI NO: 4733937 NR Description: sesquiterpene synthase [Elaeis oleifera]
  misc_feature (1)..(93): NCBI GI NO: 3287835 NR Description:
  misc_feature (1)..(93): NCBI GI NO: 3970689 NR Description: (+)-delta-cadinene synthase [Gossypium arboreum]
  misc_feature (1)..(96): NCBI GI NO: 15321626 NR Description: cyclase [Nicotiana tabacum]
  misc_feature (1)..(93): NCBI GI NO: 18766934 NR Description: beta-caryophyllene synthase QHS1 [Artemisia annua]
  misc_feature (1)..(93): NCBI GI NO: 8389329 NR Description: (+)-delta-cadinene synthase [Gossypium hirsutum]
MHAELIKKMVINSAKFYHAEVKWRDEHFVPTSLEEHLQKSIPTSACMQMANLALVSLGNVTTREDVEWVFTFPKIIRGACIVGRISNDIVSHEVYQNLSTTF

SEQ ID NO: 37035 - DNA, 556 bp, Zea mays subsp. mays
  misc_feature (1)..(556): Ceres Seq. ID no. 13635982
gaaccaagtcctgctagcggtgtccggtccggcgcccccctatttcctctcgcagcctcttctccccaaaccctaatcttgctcctgcctatctctgctccaatccgtcggtggagcggcggcgatggaggggaaggaggaaggtcggatcttcgtgggcggcctgtcgtggcaaacggacgagcgcaagcttcaggacgcctttggtcgcttcggcaaggtcgtcgatgttcagatcatgctggagaggcacacaaaccgccacaggggctttggcttcgtgacattcgaagatcgaagggcagttgacagcgctatcaaagagatgcgtggccaagagttagatggtcgtaccatctcagtgaacaaggctgagcctaagatgaatacagatgacacaaggttcgacaatggcggtggacgagactatcgaggtggtagaggtgatggtccaccccctggcaattgctatgagtgtggccgtcctggtcattgggtccgtgactgccctagtgctgctggtggtcgttctggcagattcccgtccaagttcagt

SEQ ID NO: 37036 - protein, 144 aa, Zea mays subsp. mays
  peptide (1)..(144): Ceres Seq. ID no. 13635983
  misc_feature (10)..(80): Pfam Name: a.k.a. RRM, RBD, or RNP domain Pfam Description: RNA recognition motif.
  misc_feature (1)..(143): NCBI GI NO: 31712074 NR Description: putative RNA-binding protein
  misc_feature (1)..(138): NCBI GI NO: 33146923 NR Description: glycine-rich RNA-binding protein-like
  misc_feature (1)..(137): NCBI GI NO: 15237666 NR Description: glycine-rich RNA-binding protein
  misc_feature (2)..(139): NCBI GI NO: 18406831 NR Description: glycine-rich RNA-binding protein, putative
  misc_feature (1)..(143): NCBI GI NO: 12659074 NR Description: RNA-binding protein [Triticum aestivum]
  misc_feature (5)..(139): NCBI GI NO: 2129944 NR Description: RNA-binding protein RZ-1 - wood tobacco
  misc_feature (1)..(139): NCBI GI NO: 40714682 NR Description: putative RNA binding protein
  misc_feature (1)..(142): NCBI GI NO: 15231557 NR Description: glycine-rich RNA-binding protein
  misc_feature (1)..(130): NCBI GI NO: 15982739 NR Description: AT3g26420/F20C19_14 [Arabidopsis thaliana]
  misc_feature (3)..(142): NCBI GI NO: 15226605 NR Description: glycine-rich RNA-binding protein (AtGRP7)
MEGKEEGRIFVGGLSWQTDERKLQDAFGRFGKVVDVQIMLERHTNRHRGFGFVTFEDRRAVDSAIKEMRGQELDGRTISVNKAEPKMNTDDTRFDNGGGRDYRGGRGDGPPPGNCYECGRPGHWVRDCPSAAGGRSGRFPSKFS

SEQ ID NO: 37037 - protein, 106 aa, Zea mays subsp. mays
  peptide (1)..(106): Ceres Seq. ID no. 13635984
  misc_feature (1)..(105): NCBI GI NO: 31712074 NR Description: putative RNA-binding protein
  misc_feature (1)..(100): NCBI GI NO: 33146923 NR Description: glycine-rich RNA-binding protein-like
  misc_feature (1)..(99): NCBI GI NO: 15237666 NR Description: glycine-rich RNA-binding protein
  misc_feature (1)..(101): NCBI GI NO: 18406831 NR Description: glycine-rich RNA-binding protein, putative
  misc_feature (1)..(105): NCBI GI NO: 12659074 NR Description: RNA-binding protein [Triticum aestivum]
  misc_feature (1)..(101): NCBI GI NO: 2129944 NR Description: RNA-binding protein RZ-1 - wood tobacco
  misc_feature (1)..(101): NCBI GI NO: 40714682 NR Description: putative RNA binding protein
  misc_feature (1)..(104): NCBI GI NO: 15231557 NR Description: glycine-rich RNA-binding protein
  misc_feature (1)..(92): NCBI GI NO: 15982739 NR Description: AT3g26420/F20C19_14 [Arabidopsis thaliana]
  misc_feature (1)..(104): NCBI GI NO: 15226605 NR Description: glycine-rich RNA-binding protein (AtGRP7)
MLERHTNRHRGFGFVTFEDRRAVDSAIKEMRGQELDGRTISVNKAEPKMNTDDTRFDNGGGRDYRGGRGDGPPPGNCYECGRPGHWVRDCPSAAGGRSGRFPSKFS

SEQ ID NO: 37038 - protein, 102 aa, Zea mays subsp. mays
  peptide (1)..(102): Ceres Seq. ID no. 13635985
EPSPASGVRSGAPLFPLAASSPQTLILLLPISAPIRRWSGGDGGEGGRSDLRGRPVVANGRAQASGRLWSLRQGRRCSDHAGEAHKPPQGLWLRDIRRSKGS

SEQ ID NO: 37039 - DNA, 2628 bp, Zea mays subsp. mays
  misc_feature (1)..(2628): Ceres Seq. ID no. 13627034
atcacttgttcttcttcgagctaccagctgcctatcatggtcatcatggtcgagctgctgcccccacttgcctctctaatcctcagtcctctgtagagctggtcctcctacccctcactttgccttgagcaatttggtttctagcatctgtggggtggcttgtgggtggtcgccttggactgctccttcctccacctgccgcgccggcagggcgacgaggtccaaaagcctggtggggctcatcatcaagaacaccgaagcggcgagagtggcatgggatctgatccgaggcggagctcgaggagctgagggctgtacgtgctcttggatccggtagagatcacgtgccctcgtgttcgtccccggccgccgcgatggggaacacgtgcgtcggccccagcatcaccatgaacggcttcttccagtccgtgtccacggcgctgtggaagacgccgcaggaaggcgacgcgctgcccgccgccgccaatggccccggcgggccagccggggccggttcgcagtcggcgctgccgaagccggcgtccgacgtgcaccacgtcgccgtgcagagcgaggcccctgagcccgtcaagatcgccgcctaccactcggagccggcgcccgccgtgcggagcgaggcccctgagcccgtcaagatcgccgcctctcactcggagccggcgcccatggccgccaagcctggtggcgccgccgccaacgccagccccagccccagccccaggccgcgtccgcaggtgaagcgcgtgtcgagcgccgggctgctgctggggtcggtgctgaggcgcaagacggagaacctcaaggacaagtacagcctggggcggcggctcgggcaggggcagttcggcacgacgcacctgtgcgtggagcgcgccacggggaaggagctcgcgtgcaagtcgatcctgaagcgcaagctgggcagcgacgacgacgtggaggacgtgcggcgggagatccagataatgcaccacctggcgggccaccccagcgtggtcggcatccgcggcgcgtacgaggacgccgtggccgtgcacctcgtcatggagctctgcggcggcggcgagctgttcgaccggatcgtgcggaggggccactacaccgagaggaaggccgccgagctcgcccgcgtcatcgtcggcgtcgtggaggcgtgccactccatgggcgtcatgcaccgggacctcaagcccgagaacttcctcttcgctgaccactcggaggaggccgctctcaagaccattgacttcggtctctccatcttctttcgccctggccaaattttcaccgacgtcgtgggcagcccttactacgtggcgccggaggtactgaagaagagatacgggccagaggcggacgtctggagcgctggcgtaatcatctacatcctgctgtgcggagtgccgccattctgggcagagaacgagcagggcatattcgaggaggttctgcacgggaggctggacttcgagtcggagccgtggcccagcatctccgacggcgccaaggatctcgtgaggaggatgcttgtcagggacccgaggaagagactgaccgctcacgaagttctacggcatccgtgggttcaggtcggtggagtggctcctgacaggccgctggactcggccgttctgtctcgcatgaagcagttctcggctatgaataagctgaagaagatggctcttagggtgatcgccgagaacctgtcggaggacgagatcgccgggctgagggagatgttcaagatgatcgacgcggacaacagcgggcagatcacgttcgaggagctcaaggttggcctggagaaggtgggcgccaacctgcaggagtcggagatctacgcgctcatgcaagccgcggacgtggacaacaacggcacgatcgactacggcgagttcatcgcggccacgctgcacctgaacaaggtggagcgggaggaccacctgttcgcggcgttccagtacttcgacaaggacggcagcggctacatcaccgccgacgagctgcaggtggcgtgcgaggagttcggcctgggcgacgtccagctggaggacttgatcggggaagtcgaccaggacaacgacgggcgcatagactacaacgagttcgtggcgatgatgcagaagccgacggtggggggatcccgaagaaggccgatctgcagaacagcttcagcatcgggttcagcatcgggttcagggaggcgctcaggatggcctagacctctgtgtctctggcttccctgctgcctgcgtgtaggtgtagatgattgaattgagtgggtgtcagtgcagttgctgtagagaccaccgtagcatagagatctgatgagatgcgagttgaggcgggccaggagacgtgtacatgtgccatagccatacaggcggccctgcatcggtttgatttgattgcttggttccaaacggtcctgtgtttcatgtcgcgtgcacatgtgccatatctgcctgctgctgctactactgctatatgccgtgcacgtgcacgtcggtgacctgaaacttggctgtccggcggtccggccaccgagctctaaggctatccatagcggtttttctaaatttttatccttatatcattttttgcgtc

SEQ ID NO: 37040 - protein, 639 aa, Zea mays subsp. mays
  peptide (1)..(639): Ceres Seq. ID no. 13627035
  misc_feature (153)..(411): Pfam Name: Pfam Description:  Protein kinase domain
  misc_feature (84)..(599): NCBI GI NO: 16215471 NR Description: calcium-dependent protein kinase 3
  misc_feature (1)..(96): NCBI GI NO: 16215471 NR Description: calcium-dependent protein kinase 3
  misc_feature (84)..(599): NCBI GI NO: 15289758 NR Description: calcium dependent protein kinase
  misc_feature (1)..(96): NCBI GI NO: 15289758 NR Description: calcium dependent protein kinase
  misc_feature (85)..(594): NCBI GI NO: 7434364 NR Description: calcium-dependent protein kinase (EC 2
  misc_feature (1)..(93): NCBI GI NO: 7434364 NR Description: calcium-dependent protein kinase (EC 2
  misc_feature (1)..(596): NCBI GI NO: 15238353 NR Description: calcium-dependent protein kinase (CDPK)(AK1)
  misc_feature (65)..(596): NCBI GI NO: 15228350 NR Description: calcium-dependent protein kinase (CDPK)(CPK2)
  misc_feature (1)..(123): NCBI GI NO: 15228350 NR Description: calcium-dependent protein kinase (CDPK)(CPK2)
  misc_feature (80)..(599): NCBI GI NO: 16215467 NR Description: calcium-dependent protein kinase 2
MGNTCVGPSITMNGFFQSVSTALWKTPQEGDALPAAANGPGGPAGAGSQSALPKPASDVHHVAVQSEAPEPVKIAAYHSEPAPAVRSEAPEPVKIAASHSEPAPMAAKPGGAAANASPSPSPRPRPQVKRVSSAGLLLGSVLRRKTENLKDKYSLGRRLGQGQFGTTHLCVERATGKELACKSILKRKLGSDDDVEDVRREIQIMHHLAGHPSVVGIRGAYEDAVAVHLVMELCGGGELFDRIVRRGHYTERKAAELARVIVGVVEACHSMGVMHRDLKPENFLFADHSEEAALKTIDFGLSIFFRPGQIFTDVVGSPYYVAPEVLKKRYGPEADVWSAGVIIYILLCGVPPFWAENEQGIFEEVLHGRLDFESEPWPSISDGAKDLVRRMLVRDPRKRLTAHEVLRHPWVQVGGVAPDRPLDSAVLSRMKQFSAMNKLKKMALRVIAENLSEDEIAGLREMFKMIDADNSGQITFEELKVGLEKVGANLQESEIYALMQAADVDNNGTIDYGEFIAATLHLNKVEREDHLFAAFQYFDKDGSGYITADELQVACEEFGLGDVQLEDLIGEVDQDNDGRIDYNEFVAMMQKPTVGGSRRRPICRTASASGSASGSGRRSGWPRPLCLWLPCCLRVGVDD

SEQ ID NO: 37041 - protein, 628 aa, Zea mays subsp. mays
  peptide (1)..(628): Ceres Seq. ID no. 13627036
  misc_feature (142)..(400): Pfam Name: Pfam Description:  Protein kinase domain
  misc_feature (73)..(588): NCBI GI NO: 16215471 NR Description: calcium-dependent protein kinase 3
  misc_feature (1)..(85): NCBI GI NO: 16215471 NR Description: calcium-dependent protein kinase 3
  misc_feature (73)..(588): NCBI GI NO: 15289758 NR Description: calcium dependent protein kinase
  misc_feature (1)..(85): NCBI GI NO: 15289758 NR Description: calcium dependent protein kinase
  misc_feature (74)..(583): NCBI GI NO: 7434364 NR Description: calcium-dependent protein kinase (EC 2
  misc_feature (1)..(82): NCBI GI NO: 7434364 NR Description: calcium-dependent protein kinase (EC 2
  misc_feature (1)..(585): NCBI GI NO: 15238353 NR Description: calcium-dependent protein kinase (CDPK)(AK1)
  misc_feature (54)..(585): NCBI GI NO: 15228350 NR Description: calcium-dependent protein kinase (CDPK)(CPK2)
  misc_feature (1)..(112): NCBI GI NO: 15228350 NR Description: calcium-dependent protein kinase (CDPK)(CPK2)
  misc_feature (69)..(588): NCBI GI NO: 16215467 NR Description: calcium-dependent protein kinase 2
MNGFFQSVSTALWKTPQEGDALPAAANGPGGPAGAGSQSALPKPASDVHHVAVQSEAPEPVKIAAYHSEPAPAVRSEAPEPVKIAASHSEPAPMAAKPGGAAANASPSPSPRPRPQVKRVSSAGLLLGSVLRRKTENLKDKYSLGRRLGQGQFGTTHLCVERATGKELACKSILKRKLGSDDDVEDVRREIQIMHHLAGHPSVVGIRGAYEDAVAVHLVMELCGGGELFDRIVRRGHYTERKAAELARVIVGVVEACHSMGVMHRDLKPENFLFADHSEEAALKTIDFGLSIFFRPGQIFTDVVGSPYYVAPEVLKKRYGPEADVWSAGVIIYILLCGVPPFWAENEQGIFEEVLHGRLDFESEPWPSISDGAKDLVRRMLVRDPRKRLTAHEVLRHPWVQVGGVAPDRPLDSAVLSRMKQFSAMNKLKKMALRVIAENLSEDEIAGLREMFKMIDADNSGQITFEELKVGLEKVGANLQESEIYALMQAADVDNNGTIDYGEFIAATLHLNKVEREDHLFAAFQYFDKDGSGYITADELQVACEEFGLGDVQLEDLIGEVDQDNDGRIDYNEFVAMMQKPTVGGSRRRPICRTASASGSASGSGRRSGWPRPLCLWLPCCLRVGVDD

SEQ ID NO: 37042 - protein, 535 aa, Zea mays subsp. mays
  peptide (1)..(535): Ceres Seq. ID no. 13627037
  misc_feature (49)..(307): Pfam Name: Pfam Description:  Protein kinase domain
  misc_feature (1)..(495): NCBI GI NO: 16215471 NR Description: calcium-dependent protein kinase 3
  misc_feature (1)..(495): NCBI GI NO: 15289758 NR Description: calcium dependent protein kinase
  misc_feature (1)..(490): NCBI GI NO: 7434364 NR Description: calcium-dependent protein kinase (EC 2
  misc_feature (1)..(492): NCBI GI NO: 15238353 NR Description: calcium-dependent protein kinase (CDPK)(AK1)
  misc_feature (1)..(492): NCBI GI NO: 15228350 NR Description: calcium-dependent protein kinase (CDPK)(CPK2)
  misc_feature (1)..(19): NCBI GI NO: 15228350 NR Description: calcium-dependent protein kinase (CDPK)(CPK2)
  misc_feature (1)..(495): NCBI GI NO: 16215467 NR Description: calcium-dependent protein kinase 2
  misc_feature (1)..(495): NCBI GI NO: 16215475 NR Description: calcium-dependent protein kinase 2
  misc_feature (1)..(487): NCBI GI NO: 27819504 NR Description: putative calcium-dependent protein kinase
  misc_feature (1)..(491): NCBI GI NO: 15224978 NR Description: calcium-dependent protein kinase, putative (CDPK)
MAAKPGGAAANASPSPSPRPRPQVKRVSSAGLLLGSVLRRKTENLKDKYSLGRRLGQGQFGTTHLCVERATGKELACKSILKRKLGSDDDVEDVRREIQIMHHLAGHPSVVGIRGAYEDAVAVHLVMELCGGGELFDRIVRRGHYTERKAAELARVIVGVVEACHSMGVMHRDLKPENFLFADHSEEAALKTIDFGLSIFFRPGQIFTDVVGSPYYVAPEVLKKRYGPEADVWSAGVIIYILLCGVPPFWAENEQGIFEEVLHGRLDFESEPWPSISDGAKDLVRRMLVRDPRKRLTAHEVLRHPWVQVGGVAPDRPLDSAVLSRMKQFSAMNKLKKMALRVIAENLSEDEIAGLREMFKMIDADNSGQITFEELKVGLEKVGANLQESEIYALMQAADVDNNGTIDYGEFIAATLHLNKVEREDHLFAAFQYFDKDGSGYITADELQVACEEFGLGDVQLEDLIGEVDQDNDGRIDYNEFVAMMQKPTVGGSRRRPICRTASASGSASGSGRRSGWPRPLCLWLPCCLRVGVDD

SEQ ID NO: 37043 - DNA, 485 bp, Zea mays subsp. mays
  misc_feature (1)..(485): Ceres Seq. ID no. 13634595
aaagcaccacgcacgatcgccttcgccaaccgcgccgctctctctctctttctctctcgcacgagccgcgccggcgccgccaccacgcgcgcgggagacagagaccacagccgcagccaccgacgggcggaataggaatggtggcgccggggggaggagcaggaggaggtccgttgcggtggccggcggcggaggagcttgacactgtacggaagaaggtggtggagattagtggaagggatgaacaagaggttatggttgctgcttgcccctacagaatttgccctttgggggctcatattgatcatcagggtggagtagtcacagctatgaccataaattatggagtactccttggtttcgttccctctaatggttctgagcaacctttatttttctttcaggttttacttcattctggtcagtttgaaggtgctataagattcagagttgatgacttgcaaaagcctattgataaacctgag

SEQ ID NO: 37044 - protein, 161 aa, Zea mays subsp. mays
  peptide (1)..(161): Ceres Seq. ID no. 13634596
  misc_feature (46)..(160): NCBI GI NO: 38567889 NR Description: OSJNBa0060N03.9
  misc_feature (58)..(157): NCBI GI NO: 22330971 NR Description: GHMP kinase family [Arabidopsis thaliana]
  misc_feature (58)..(156): NCBI GI NO: 6630560 NR Description: galactokinase-like protein [Arabidopsis thaliana]
STTHDRLRQPRRSLSLSLSHEPRRRRHHARGRQRPQPQPPTGGIGMVAPGGGAGGGPLRWPAAEELDTVRKKVVEISGRDEQEVMVAACPYRICPLGAHIDHQGGVVTAMTINYGVLLGFVPSNGSEQPLFFFQVLLHSGQFEGAIRFRVDDLQKPIDKPE

SEQ ID NO: 37045 - protein, 116 aa, Zea mays subsp. mays
  peptide (1)..(116): Ceres Seq. ID no. 13634597
  misc_feature (1)..(115): NCBI GI NO: 38567889 NR Description: OSJNBa0060N03.9
  misc_feature (13)..(112): NCBI GI NO: 22330971 NR Description: GHMP kinase family [Arabidopsis thaliana]
  misc_feature (13)..(111): NCBI GI NO: 6630560 NR Description: galactokinase-like protein [Arabidopsis thaliana]
MVAPGGGAGGGPLRWPAAEELDTVRKKVVEISGRDEQEVMVAACPYRICPLGAHIDHQGGVVTAMTINYGVLLGFVPSNGSEQPLFFFQVLLHSGQFEGAIRFRVDDLQKPIDKPE

SEQ ID NO: 37046 - DNA, 1396 bp, Zea mays subsp. mays; identical to SEQ ID NO: 36146
  misc_feature (1)..(1396): Ceres Seq. ID no. 13636262

SEQ ID NO: 37047 - protein, 233 aa, Zea mays subsp. mays; identical to SEQ ID NO: 36147
  peptide (1)..(233): Ceres Seq. ID no. 13636263
  misc_feature (27)..(96): Pfam Name: Pfam Description:  Glycosyl hydrolases family 16
  misc_feature (12)..(96): NCBI GI NO: 7447413 NR Description: xyloglucan endo-1,4-beta-D-glucanase (EC 3
  misc_feature (5)..(81): NCBI GI NO: 14330332 NR Description: Xet1 protein [Festuca pratensis]
  misc_feature (9)..(96): NCBI GI NO: 8886867 NR Description: xyloglucan endotransglycosylase XET2
  misc_feature (1)..(96): NCBI GI NO: 8886865 NR Description: xyloglucan endotransglycosylase XET1
  misc_feature (9)..(96): NCBI GI NO: 7447412 NR Description: xyloglucan endo-1,4-beta-D-glucanase (EC 3
  misc_feature (6)..(96): NCBI GI NO: 15242781 NR Description: xyloglucan endotransglycosylase (TCH4)
  misc_feature (1)..(96): NCBI GI NO: 15235997 NR Description: xyloglucan endotransglycosylase (XTR-6)
  misc_feature (1)..(96): NCBI GI NO: 17064792 NR Description: xyloglucan endo-1, 4-beta-D-glucanase (XTR-6)
  misc_feature (7)..(96): NCBI GI NO: 22947852 NR Description: xyloglucan endotransglycosylase
  misc_feature (26)..(96): NCBI GI NO: 29500891 NR Description: putative xyloglucan endotransglycosylase

SEQ ID NO: 37048 - protein, 201 aa, Zea mays subsp. mays; identical to SEQ ID NO: 36148
  peptide (1)..(201): Ceres Seq. ID no. 13636264
  misc_feature (1)..(64): Pfam Name: Pfam Description:  Glycosyl hydrolases family 16
  misc_feature (1)..(64): NCBI GI NO: 7447413 NR Description: xyloglucan endo-1,4-beta-D-glucanase (EC 3
  misc_feature (1)..(49): NCBI GI NO: 14330332 NR Description: Xet1 protein [Festuca pratensis]
  misc_feature (1)..(64): NCBI GI NO: 8886867 NR Description: xyloglucan endotransglycosylase XET2
  misc_feature (1)..(64): NCBI GI NO: 8886865 NR Description: xyloglucan endotransglycosylase XET1
  misc_feature (1)..(64): NCBI GI NO: 7447412 NR Description: xyloglucan endo-1,4-beta-D-glucanase (EC 3
  misc_feature (1)..(64): NCBI GI NO: 15242781 NR Description: xyloglucan endotransglycosylase (TCH4)
  misc_feature (1)..(64): NCBI GI NO: 15235997 NR Description: xyloglucan endotransglycosylase (XTR-6)
  misc_feature (1)..(64): NCBI GI NO: 17064792 NR Description: xyloglucan endo-1, 4-beta-D-glucanase (XTR-6)
  misc_feature (1)..(64): NCBI GI NO: 22947852 NR Description: xyloglucan endotransglycosylase
  misc_feature (1)..(64): NCBI GI NO: 29500891 NR Description: putative xyloglucan endotransglycosylase

SEQ ID NO: 37049 - protein, 160 aa, Zea mays subsp. mays; identical to SEQ ID NO: 36149
  peptide (1)..(160): Ceres Seq. ID no. 13636265
  misc_feature (1)..(23): NCBI GI NO: 7447413 NR Description: xyloglucan endo-1,4-beta-D-glucanase (EC 3
  misc_feature (1)..(23): NCBI GI NO: 8886867 NR Description: xyloglucan endotransglycosylase XET2
  misc_feature (1)..(23): NCBI GI NO: 8886865 NR Description: xyloglucan endotransglycosylase XET1
  misc_feature (1)..(23): NCBI GI NO: 7447412 NR Description: xyloglucan endo-1,4-beta-D-glucanase (EC 3
  misc_feature (1)..(23): NCBI GI NO: 15242781 NR Description: xyloglucan endotransglycosylase (TCH4)
  misc_feature (1)..(23): NCBI GI NO: 15235997 NR Description: xyloglucan endotransglycosylase (XTR-6)
  misc_feature (1)..(23): NCBI GI NO: 17064792 NR Description: xyloglucan endo-1, 4-beta-D-glucanase (XTR-6)
  misc_feature (1)..(23): NCBI GI NO: 22947852 NR Description: xyloglucan endotransglycosylase
  misc_feature (1)..(23): NCBI GI NO: 29500891 NR Description: putative xyloglucan endotransglycosylase
  misc_feature (1)..(21): NCBI GI NO: 28804632 NR Description: xyloglucan endotransglycosylase [Pyrus communis]

SEQ ID NO: 37050 - DNA, 562 bp, Zea mays subsp. mays
  misc_feature (1)..(562): Ceres Seq. ID no. 13632771
  misc_feature (487)..(487): n is a, c, t, g, unknown, or other
  misc_feature (508)..(508): n is a, c, t, g, unknown, or other
  misc_feature (488)..(488): n is a, c, t, g, unknown, or other
  misc_feature (486)..(486): n is a, c, t, g, unknown, or other
  misc_feature (509)..(509): n is a, c, t, g, unknown, or other
  misc_feature (507)..(507): n is a, c, t, g, unknown, or other
  misc_feature (478)..(478): n is a, c, t, g, unknown, or other
agaatctaccgtcgaccagaagagccctagaaaaccctagtagcatccacaattccacataacctcgcccgcgccgcctcccccacgagacgccttcttgctctcgcttccggtgacgcccgccacttcctccccgacgagatgacgaaacgcaccaagaaggcaggaatcgttggcaaatatggtaccaggtatggtgccagtttacgtaaacagatcaagaagatggaggtctcgcagcactccaaatacttctgtgagttctgtggcaagtttgccgtgaagaggaaagcagttggtatctggggatgcaaggactgtgggaaggttaaggccggtggcgcctacacaatgaacactgctagtgcggtcactgtgagaagcacaatccggcgcctgcgggagcagaccgaagcatgattgcgggcagcttgaaaaggagtacctggatttttggtagtcagccaagagccgtgancccatttnnntttttagctaaatgaacannnaatgtttatctatctgtagtgaccactttgtactcatggtttgtcatgctaaa

SEQ ID NO: 37051 - protein, 92 aa, Zea mays subsp. mays; identical to SEQ ID NO: 33238
  peptide (1)..(92): Ceres Seq. ID no. 13632772
  misc_feature (1)..(92): NCBI GI NO: 34911166 NR Description: putative 60S ribosomal protein L37a
  misc_feature (1)..(91): NCBI GI NO: 6831607 NR Description: 60S ribosomal protein L37a
  misc_feature (1)..(92): NCBI GI NO: 6831602 NR Description: 60S RIBOSOMAL PROTEIN L37A
  misc_feature (1)..(92): NCBI GI NO: 15228411 NR Description: 60S ribosomal protein L37a (RPL37aB)
  misc_feature (1)..(91): NCBI GI NO: 18411538 NR Description: 60S ribosomal protein L37a (RPL37aC)
  misc_feature (1)..(91): NCBI GI NO: 1173045 NR Description: 60S RIBOSOMAL PROTEIN L37A
  misc_feature (6)..(91): NCBI GI NO: 11358898 NR Description: translation initiation factor eIF-4 gamma homologF27H5
  misc_feature (1)..(92): NCBI GI NO: 6093889 NR Description: 60S RIBOSOMAL PROTEIN L37A
  misc_feature (1)..(88): NCBI GI NO: 7441206 NR Description: ribosomal protein L37a
  misc_feature (1)..(89): NCBI GI NO: 33637090 NR Description: N1 [Toxoplasma gondii]

SEQ ID NO: 37052 - protein, 64 aa, Zea mays subsp. mays; identical to SEQ ID NO: 33239
  peptide (1)..(64): Ceres Seq. ID no. 13632773
  misc_feature (1)..(64): NCBI GI NO: 34911166 NR Description: putative 60S ribosomal protein L37a
  misc_feature (1)..(63): NCBI GI NO: 6831607 NR Description: 60S ribosomal protein L37a
  misc_feature (1)..(64): NCBI GI NO: 6831602 NR Description: 60S RIBOSOMAL PROTEIN L37A
  misc_feature (1)..(64): NCBI GI NO: 15228411 NR Description: 60S ribosomal protein L37a (RPL37aB)
  misc_feature (1)..(63): NCBI GI NO: 18411538 NR Description: 60S ribosomal protein L37a (RPL37aC)
  misc_feature (1)..(63): NCBI GI NO: 1173045 NR Description: 60S RIBOSOMAL PROTEIN L37A
  misc_feature (1)..(63): NCBI GI NO: 11358898 NR Description: translation initiation factor eIF-4 gamma homologF27H5
  misc_feature (1)..(64): NCBI GI NO: 6093889 NR Description: 60S RIBOSOMAL PROTEIN L37A
  misc_feature (1)..(60): NCBI GI NO: 7441206 NR Description: ribosomal protein L37a
  misc_feature (1)..(61): NCBI GI NO: 33637090 NR Description: N1 [Toxoplasma gondii]

SEQ ID NO: 37053 - DNA, 1932 bp, Zea mays subsp. mays; identical to SEQ ID NO: 26886
  misc_feature (1)..(1932): Ceres Seq. ID no. 13637288

SEQ ID NO: 37054 - protein, 538 aa, Zea mays subsp. mays; identical to SEQ ID NO: 26887
  peptide (1)..(538): Ceres Seq. ID no. 13637289
  misc_feature (22)..(538): NCBI GI NO: 14550104 NR Description: histone deacetylase HDA101 [Zea mays]
  misc_feature (22)..(538): NCBI GI NO: 3023947 NR Description: Probable histone deacetylase (RPD3 homolog)
  misc_feature (22)..(537): NCBI GI NO: 31324093 NR Description: histone deacetylase HDAC1
  misc_feature (22)..(527): NCBI GI NO: 31324097 NR Description: histone deacetylase HDAC3
  misc_feature (22)..(503): NCBI GI NO: 12698880 NR Description: histone deacetylase HD1 [Oryza sativa]
  misc_feature (29)..(527): NCBI GI NO: 15233694 NR Description: Histone deacetylase [Arabidopsis thaliana]
  misc_feature (29)..(527): NCBI GI NO: 2318131 NR Description: histone deacetylase [Arabidopsis thaliana]
  misc_feature (29)..(527): NCBI GI NO: 9022439 NR Description: histone deacetylase
  misc_feature (41)..(505): NCBI GI NO: 13128860 NR Description: histone deacetylase 1
  misc_feature (41)..(505): NCBI GI NO: 30583783 NR Description: Homo sapiens histone deacetylase 1

SEQ ID NO: 37055 - protein, 517 aa, Zea mays subsp. mays; identical to SEQ ID NO: 26888
  peptide (1)..(517): Ceres Seq. ID no. 13637290
  misc_feature (1)..(517): NCBI GI NO: 14550104 NR Description: histone deacetylase HDA101 [Zea mays]
  misc_feature (1)..(517): NCBI GI NO: 3023947 NR Description: Probable histone deacetylase (RPD3 homolog)
  misc_feature (1)..(516): NCBI GI NO: 31324093 NR Description: histone deacetylase HDAC1
  misc_feature (1)..(506): NCBI GI NO: 31324097 NR Description: histone deacetylase HDAC3
  misc_feature (1)..(482): NCBI GI NO: 12698880 NR Description: histone deacetylase HD1 [Oryza sativa]
  misc_feature (8)..(506): NCBI GI NO: 15233694 NR Description: Histone deacetylase [Arabidopsis thaliana]
  misc_feature (8)..(506): NCBI GI NO: 2318131 NR Description: histone deacetylase [Arabidopsis thaliana]
  misc_feature (8)..(506): NCBI GI NO: 9022439 NR Description: histone deacetylase
  misc_feature (20)..(484): NCBI GI NO: 13128860 NR Description: histone deacetylase 1
  misc_feature (20)..(484): NCBI GI NO: 30583783 NR Description: Homo sapiens histone deacetylase 1

SEQ ID NO: 37056 - protein, 474 aa, Zea mays subsp. mays; identical to SEQ ID NO: 26889
  peptide (1)..(474): Ceres Seq. ID no. 13637291
  misc_feature (1)..(474): NCBI GI NO: 14550104 NR Description: histone deacetylase HDA101 [Zea mays]
  misc_feature (1)..(474): NCBI GI NO: 3023947 NR Description: Probable histone deacetylase (RPD3 homolog)
  misc_feature (1)..(473): NCBI GI NO: 31324093 NR Description: histone deacetylase HDAC1
  misc_feature (1)..(463): NCBI GI NO: 31324097 NR Description: histone deacetylase HDAC3
  misc_feature (1)..(439): NCBI GI NO: 12698880 NR Description: histone deacetylase HD1 [Oryza sativa]
  misc_feature (1)..(463): NCBI GI NO: 15233694 NR Description: Histone deacetylase [Arabidopsis thaliana]
  misc_feature (1)..(463): NCBI GI NO: 2318131 NR Description: histone deacetylase [Arabidopsis thaliana]
  misc_feature (1)..(463): NCBI GI NO: 9022439 NR Description: histone deacetylase
  misc_feature (1)..(441): NCBI GI NO: 13128860 NR Description: histone deacetylase 1
  misc_feature (1)..(441): NCBI GI NO: 30583783 NR Description: Homo sapiens histone deacetylase 1

SEQ ID NO: 37057 - DNA, 2430 bp, Zea mays subsp. mays
  misc_feature (1)..(2430): Ceres Seq. ID no. 15180086
aaaaaaaaccgagtcgagtccacagtccacaccaccaccgcgaggtccactaaaaaaacaagagcattaccggcaccaatcaatcaggctggcagtggagtgacagcggcggcaacaccacgcccacgcggcgccggagccgatcccccgatggatctcccgccgctctcccaccaggccctcttcgccgtcgtccgatccgccgacgcgcccgccgtccgcgcggtcctggccgacgccgaggcgtcggccacctccttggccgcgctcgccgccgctcagacggacgccggggaaaccgcgctgtacgttgccgcggaggccggcagcgaggaggtcgtgcgcctcctcctccctctctacgacttcgaggcagccaccgtccgctcacgccttgacctcgacgccttccatgtcgccgccaagcagggccacaccggggttgtgaaagagttcttggggcggtgcccagggctttgctcagtctgtgactcttccaacactagtcccctctactcggctgctgtcaaggatcacttggatgtggtaaatgctatactggacactgatgatagctgcataaagattgtgcggaagaatgggaaaacatccctacatactgctgcaagaattggataccatcgtattgtcaaagcactcatagagagagatccaggaatcgttccgatcaatgataggaagggacaaactgcacttcacatggctgtgaagggcaaaaatacagatgtagtggaagagttattgatggctgatgtttccattctcaatgtgagggacaagaaaggaaatactgctttgcacatagctacacggaaatggaggccccagaatatctcaatgtgaaaaacatgtcgtatgtaagccatggtggtttcttagtggagcagagcatctattggaagagcaaccatatatctaagaacacacgaccatcttataaagcactataaagacattagttgctgctgctattaactgtctgccactagtcttactaagtcattgcaacggcgcaggaatgtatctggatgctaatatctcggtatcactattgtggaagtgtggctgacttctcaacacactattctagcagtccagcccaccccacataggccttaaagtattatataaatgatgcttgtgtgttaaaggaagatcaaaaatagccatccagaaactcacagaacgatggggtgcttttctattttatggagtatttacgattagtgttctaacttctaagttaccttactctcaaactccgaacatatgtttatattatttgtgggaattgttcatacttgattccaaacatgctttgctctgacttgccaactttattttaccttactagtcactattgttttcagatggtacagcttcttcttagctatgaatcacttgaagttaatgctatcaacagtcaaaatgaaacagctatggatttggctgacaaagttccttatggtgagtctaaaacggaaataatagagtggctgacagaagctggtgcaaagaatgccagaaatgttgggaaaattgatgaggcatcagaactgaggagaactgtgagcgatatcaagcacaatgttcaggcacagcttagcgagaatgctaaaaccaacaaacgagtgactgggattcgcaaagagttgcagaaactgcatagagaagctatccaaaacaccatcaattcagtcaccttggtagcgaccctgattgcctccattgccttcgtcgccatattcaatctgccaggtcaatacttccaggatgtgaatagtgggggagacattggtgaggctgaaatagccaagcttaccggtttccgtgtcttctgccttctgaacgctactgctctcttcatctccctcgcggtggtcgtggtgcagatcaccttggttgcctgggaaactggtgcccagaagcaagttatcaagatcgtgaataagctcatgtggacggcatgccttagcacgggtgtggcttttatctcgctggcctatgttgtagttggcccgcagcatgcctggatggccttcacggcatcagccatcggagggccgatcatgattggaactttcctgttcctagcctatcttctgttgcgcccacggttcaagttcggcgaagacagacagcgccgcatcaagagggcaagcggcagcaaatccttctcctggtcaatccatgatgggttttcagatctggaagccttctctgatcatgagaagaggatctatgccctgtaggagggtgtaacagtaactactcccacaagaggcaactgggagagtacaaatggttcatgtatatatttggtttagccgttttagcctagccgctgttagacctttctccccatgtacaatatctaataatgaagagctgcagctattgtaaagtgct

SEQ ID NO: 37058 - protein, 312 aa, Zea mays subsp. mays
  peptide (1)..(312): Ceres Seq. ID no. 15180087
  misc_feature (19)..(312): NCBI GI NO: 21537142 NR Description: unknown [Arabidopsis thaliana]
  misc_feature (19)..(312): NCBI GI NO: 18379277 NR Description: ankyrin repeat protein family
  misc_feature (19)..(312): NCBI GI NO: 15225141 NR Description: ankyrin repeat protein family
  misc_feature (19)..(312): NCBI GI NO: 15222993 NR Description: ankyrin repeat protein family
  misc_feature (19)..(312): NCBI GI NO: 15220595 NR Description: ankyrin repeat protein family
  misc_feature (20)..(312): NCBI GI NO: 24796797 NR Description: putative ankyrin repeat containing protein
  misc_feature (19)..(312): NCBI GI NO: 34908074 NR Description: P0506B12.26
  misc_feature (19)..(312): NCBI GI NO: 15238604 NR Description: ankyrin repeat protein family
  misc_feature (19)..(300): NCBI GI NO: 15230470 NR Description: ankyrin repeat protein family
  misc_feature (13)..(300): NCBI GI NO: 15795155 NR Description: ankyrin-like protein [Arabidopsis thaliana]
MLCSDLPTLFYLTSHYCFQMVQLLLSYESLEVNAINSQNETAMDLADKVPYGESKTEIIEWLTEAGAKNARNVGKIDEASELRRTVSDIKHNVQAQLSENAKTNKRVTGIRKELQKLHREAIQNTINSVTLVATLIASIAFVAIFNLPGQYFQDVNSGGDIGEAEIAKLTGFRVFCLLNATALFISLAVVVVQITLVAWETGAQKQVIKIVNKLMWTACLSTGVAFISLAYVVVGPQHAWMAFTASAIGGPIMIGTFLFLAYLLLRPRFKFGEDRQRRIKRASGSKSFSWSIHDGFSDLEAFSDHEKRIYAL

SEQ ID NO: 37059 - protein, 293 aa, Zea mays subsp. mays; identical to SEQ ID NO: 25049
  peptide (1)..(293): Ceres Seq. ID no. 15180088
  misc_feature (1)..(293): NCBI GI NO: 21537142 NR Description: unknown [Arabidopsis thaliana]
  misc_feature (1)..(293): NCBI GI NO: 18379277 NR Description: ankyrin repeat protein family
  misc_feature (1)..(293): NCBI GI NO: 15225141 NR Description: ankyrin repeat protein family
  misc_feature (1)..(293): NCBI GI NO: 15222993 NR Description: ankyrin repeat protein family
  misc_feature (1)..(293): NCBI GI NO: 15220595 NR Description: ankyrin repeat protein family
  misc_feature (1)..(293): NCBI GI NO: 24796797 NR Description: putative ankyrin repeat containing protein
  misc_feature (1)..(293): NCBI GI NO: 34908074 NR Description: P0506B12.26
  misc_feature (1)..(293): NCBI GI NO: 15238604 NR Description: ankyrin repeat protein family
  misc_feature (1)..(281): NCBI GI NO: 15230470 NR Description: ankyrin repeat protein family
  misc_feature (1)..(281): NCBI GI NO: 15795155 NR Description: ankyrin-like protein [Arabidopsis thaliana]

SEQ ID NO: 37060 - protein, 287 aa, Zea mays subsp. mays
  peptide (1)..(287): Ceres Seq. ID no. 15180089
  misc_feature (166)..(196): Pfam Name: Pfam Description:  Ankyrin repeat
  misc_feature (56)..(287): NCBI GI NO: 21537142 NR Description: unknown [Arabidopsis thaliana]
  misc_feature (56)..(287): NCBI GI NO: 18379277 NR Description: ankyrin repeat protein family
  misc_feature (101)..(278): NCBI GI NO: 18379277 NR Description: ankyrin repeat protein family
  misc_feature (101)..(278): NCBI GI NO: 21537142 NR Description: unknown [Arabidopsis thaliana]
  misc_feature (87)..(281): NCBI GI NO: 15225141 NR Description: ankyrin repeat protein family
  misc_feature (61)..(287): NCBI GI NO: 15222993 NR Description: ankyrin repeat protein family
  misc_feature (87)..(281): NCBI GI NO: 15220595 NR Description: ankyrin repeat protein family
  misc_feature (60)..(281): NCBI GI NO: 24796797 NR Description: putative ankyrin repeat containing protein
  misc_feature (61)..(287): NCBI GI NO: 34908074 NR Description: P0506B12.26
  misc_feature (61)..(281): NCBI GI NO: 15238604 NR Description: ankyrin repeat protein family
KKNRVESTVHTTTARSTKKTRALPAPINQAGSGVTAAATPRPRGAGADPPMDLPPLSHQALFAVVRSADAPAVRAVLADAEASATSLAALAAAQTDAGETALYVAAEAGSEEVVRLLLPLYDFEAATVRSRLDLDAFHVAAKQGHTGVVKEFLGRCPGLCSVCDSSNTSPLYSAAVKDHLDVVNAILDTDDSCIKIVRKNGKTSLHTAARIGYHRIVKALIERDPGIVPINDRKGQTALHMAVKGKNTDVVEELLMADVSILNVRDKKGNTALHIATRKWRPQNISM

SEQ ID NO: 37061 - DNA, 537 bp, Zea mays subsp. mays
  misc_feature (1)..(537): Ceres Seq. ID no. 15176189
aaccagaacagtccctccctcggcctatccggctactcagcaccaagaacagacggccaagtgcactcgcgcctttatataaaggaatccaccagcagcattagctttggtttcttctccttgtatgcacacaaacccatcgcagggcattctcgagcatagcttctctgcctctctctcccctcctctcctctcgtccactcctttgtccaaagcttcgagatggctcagcagcagaaggtggtggtcagggttccaaccatgacagatgacaagatcaagcagaaggccatcgaagctgttgcggacatttacggtattgactccatagcagcggatctgaaggagaacaagatgaccatcataggcgagatggatgcagtagcgattgccaagaagttaaagaagattggaaagattgacattgtgtctgttggacctgcaaaagaagaaaagaaggaagaaaagaaagaggagaaaaagaaggaaaagaaagaagagaagaaagaggagaagaaagaagagaagaaagaagag

SEQ ID NO: 37062 - protein, 105 aa, Zea mays subsp. mays
  peptide (1)..(105): Ceres Seq. ID no. 15176190
  misc_feature (1)..(104): Pfam Name: Pfam Description:  Ubiquitin carboxyl-terminal hydrolase
  misc_feature (1)..(104): NCBI GI NO: 37535864 NR Description: hypothetical protein
  misc_feature (5)..(104): NCBI GI NO: 21554550 NR Description: unknown [Arabidopsis thaliana]
  misc_feature (5)..(104): NCBI GI NO: 18420713 NR Description: heavy-metal-associated domain-containing protein
  misc_feature (5)..(104): NCBI GI NO: 26452654 NR Description: unknown protein [Arabidopsis thaliana]
  misc_feature (1)..(87): NCBI GI NO: 32489836 NR Description: OSJNBb0039L24.19
  misc_feature (40)..(104): NCBI GI NO: 10176843 NR Description: gene_id:MRO11.20~unknown protein
  misc_feature (5)..(104): NCBI GI NO: 13543783 NR Description: Unknown (protein for MGC:7642) [Mus musculus]
  misc_feature (1)..(104): NCBI GI NO: 25517980 NR Description: F22L4.5 protein - Arabidopsis thaliana
  misc_feature (5)..(104): NCBI GI NO: 15223416 NR Description: heavy-metal-associated domain-containing protein
  misc_feature (5)..(100): NCBI GI NO: 37536388 NR Description: hypothetical protein
MAQQQKVVVRVPTMTDDKIKQKAIEAVADIYGIDSIAADLKENKMTIIGEMDAVAIAKKLKKIGKIDIVSVGPAKEEKKEEKKEEKKKEKKEEKKEEKKEEKKEE

SEQ ID NO: 37063 - protein, 92 aa, Zea mays subsp. mays
  peptide (1)..(92): Ceres Seq. ID no. 15176191
  misc_feature (1)..(91): Pfam Name: Pfam Description:  Ubiquitin carboxyl-terminal hydrolase
  misc_feature (1)..(91): NCBI GI NO: 37535864 NR Description: hypothetical protein
  misc_feature (1)..(91): NCBI GI NO: 21554550 NR Description: unknown [Arabidopsis thaliana]
  misc_feature (1)..(91): NCBI GI NO: 18420713 NR Description: heavy-metal-associated domain-containing protein
  misc_feature (1)..(91): NCBI GI NO: 26452654 NR Description: unknown protein [Arabidopsis thaliana]
  misc_feature (1)..(74): NCBI GI NO: 32489836 NR Description: OSJNBb0039L24.19
  misc_feature (27)..(91): NCBI GI NO: 10176843 NR Description: gene_id:MRO11.20~unknown protein
  misc_feature (1)..(91): NCBI GI NO: 13543783 NR Description: Unknown (protein for MGC:7642) [Mus musculus]
  misc_feature (1)..(91): NCBI GI NO: 25517980 NR Description: F22L4.5 protein - Arabidopsis thaliana
  misc_feature (1)..(91): NCBI GI NO: 15223416 NR Description: heavy-metal-associated domain-containing protein
  misc_feature (1)..(87): NCBI GI NO: 37536388 NR Description: hypothetical protein
MTDDKIKQKAIEAVADIYGIDSIAADLKENKMTIIGEMDAVAIAKKLKKIGKIDIVSVGPAKEEKKEEKKEEKKKEKKEEKKEEKKEEKKEE

SEQ ID NO: 37064 - protein, 61 aa, Zea mays subsp. mays
  peptide (1)..(61): Ceres Seq. ID no. 15176192
  misc_feature (1)..(60): Pfam Name: Pfam Description:  Ubiquitin carboxyl-terminal hydrolase
  misc_feature (1)..(60): NCBI GI NO: 37535864 NR Description: hypothetical protein
  misc_feature (1)..(60): NCBI GI NO: 21554550 NR Description: unknown [Arabidopsis thaliana]
  misc_feature (1)..(60): NCBI GI NO: 18420713 NR Description: heavy-metal-associated domain-containing protein
  misc_feature (1)..(60): NCBI GI NO: 26452654 NR Description: unknown protein [Arabidopsis thaliana]
  misc_feature (1)..(43): NCBI GI NO: 32489836 NR Description: OSJNBb0039L24.19
  misc_feature (1)..(60): NCBI GI NO: 10176843 NR Description: gene_id:MRO11.20~unknown protein
  misc_feature (1)..(60): NCBI GI NO: 13543783 NR Description: Unknown (protein for MGC:7642) [Mus musculus]
  misc_feature (1)..(60): NCBI GI NO: 25517980 NR Description: F22L4.5 protein - Arabidopsis thaliana
  misc_feature (1)..(60): NCBI GI NO: 15223416 NR Description: heavy-metal-associated domain-containing protein
  misc_feature (1)..(56): NCBI GI NO: 37536388 NR Description: hypothetical protein
MTIIGEMDAVAIAKKLKKIGKIDIVSVGPAKEEKKEEKKEEKKKEKKEEKKEEKKEEKKEE

SEQ ID NO: 37065 - DNA, 1396 bp, Zea mays subsp. mays; identical to SEQ ID NO: 36146
  misc_feature (1)..(1396): Ceres Seq. ID no. 13636262

SEQ ID NO: 37066 - protein, 233 aa, Zea mays subsp. mays; identical to SEQ ID NO: 36147
  peptide (1)..(233): Ceres Seq. ID no. 13636263
  misc_feature (27)..(96): Pfam Name: Pfam Description:  Glycosyl hydrolases family 16
  misc_feature (12)..(96): NCBI GI NO: 7447413 NR Description: xyloglucan endo-1,4-beta-D-glucanase (EC 3
  misc_feature (5)..(81): NCBI GI NO: 14330332 NR Description: Xet1 protein [Festuca pratensis]
  misc_feature (9)..(96): NCBI GI NO: 8886867 NR Description: xyloglucan endotransglycosylase XET2
  misc_feature (1)..(96): NCBI GI NO: 8886865 NR Description: xyloglucan endotransglycosylase XET1
  misc_feature (9)..(96): NCBI GI NO: 7447412 NR Description: xyloglucan endo-1,4-beta-D-glucanase (EC 3
  misc_feature (6)..(96): NCBI GI NO: 15242781 NR Description: xyloglucan endotransglycosylase (TCH4)
  misc_feature (1)..(96): NCBI GI NO: 15235997 NR Description: xyloglucan endotransglycosylase (XTR-6)
  misc_feature (1)..(96): NCBI GI NO: 17064792 NR Description: xyloglucan endo-1, 4-beta-D-glucanase (XTR-6)
  misc_feature (7)..(96): NCBI GI NO: 22947852 NR Description: xyloglucan endotransglycosylase
  misc_feature (26)..(96): NCBI GI NO: 29500891 NR Description: putative xyloglucan endotransglycosylase

SEQ ID NO: 37067 - protein, 201 aa, Zea mays subsp. mays; identical to SEQ ID NO: 36148
  peptide (1)..(201): Ceres Seq. ID no. 13636264
  misc_feature (1)..(64): Pfam Name: Pfam Description:  Glycosyl hydrolases family 16
  misc_feature (1)..(64): NCBI GI NO: 7447413 NR Description: xyloglucan endo-1,4-beta-D-glucanase (EC 3
  misc_feature (1)..(49): NCBI GI NO: 14330332 NR Description: Xet1 protein [Festuca pratensis]
  misc_feature (1)..(64): NCBI GI NO: 8886867 NR Description: xyloglucan endotransglycosylase XET2
  misc_feature (1)..(64): NCBI GI NO: 8886865 NR Description: xyloglucan endotransglycosylase XET1
  misc_feature (1)..(64): NCBI GI NO: 7447412 NR Description: xyloglucan endo-1,4-beta-D-glucanase (EC 3
  misc_feature (1)..(64): NCBI GI NO: 15242781 NR Description: xyloglucan endotransglycosylase (TCH4)
  misc_feature (1)..(64): NCBI GI NO: 15235997 NR Description: xyloglucan endotransglycosylase (XTR-6)
  misc_feature (1)..(64): NCBI GI NO: 17064792 NR Description: xyloglucan endo-1, 4-beta-D-glucanase (XTR-6)
  misc_feature (1)..(64): NCBI GI NO: 22947852 NR Description: xyloglucan endotransglycosylase
  misc_feature (1)..(64): NCBI GI NO: 29500891 NR Description: putative xyloglucan endotransglycosylase

SEQ ID NO: 37068 - protein, 160 aa, Zea mays subsp. mays; identical to SEQ ID NO: 36149
  peptide (1)..(160): Ceres Seq. ID no. 13636265
  misc_feature (1)..(23): NCBI GI NO: 7447413 NR Description: xyloglucan endo-1,4-beta-D-glucanase (EC 3
  misc_feature (1)..(23): NCBI GI NO: 8886867 NR Description: xyloglucan endotransglycosylase XET2
  misc_feature (1)..(23): NCBI GI NO: 8886865 NR Description: xyloglucan endotransglycosylase XET1
  misc_feature (1)..(23): NCBI GI NO: 7447412 NR Description: xyloglucan endo-1,4-beta-D-glucanase (EC 3
  misc_feature (1)..(23): NCBI GI NO: 15242781 NR Description: xyloglucan endotransglycosylase (TCH4)
  misc_feature (1)..(23): NCBI GI NO: 15235997 NR Description: xyloglucan endotransglycosylase (XTR-6)
  misc_feature (1)..(23): NCBI GI NO: 17064792 NR Description: xyloglucan endo-1, 4-beta-D-glucanase (XTR-6)
  misc_feature (1)..(23): NCBI GI NO: 22947852 NR Description: xyloglucan endotransglycosylase
  misc_feature (1)..(23): NCBI GI NO: 29500891 NR Description: putative xyloglucan endotransglycosylase
  misc_feature (1)..(21): NCBI GI NO: 28804632 NR Description: xyloglucan endotransglycosylase [Pyrus communis]

SEQ ID NO: 37069 - DNA, 553 bp, Zea mays subsp. mays
  misc_feature (1)..(553): Ceres Seq. ID no. 13631750
atcggagtctcctagttgtgctcaaatcccacaatcttcttgtagcacaccactgtcttcgtccaactcggcggcgatgtctgggcgcggcaagggcggcaaggggctgggcaagggtggtgcgaaacgccaccgtaaggttctccgcgacaacatccagggtatcacgaagccggcaatccggaggctggcgaggaggagcgacgtgaagcgtatctccgggcttatctacgaggagacccgcggcgtgctcaagatcttcctcgagaatgtcatccgcgacgcgggcacctacaccgagcacgctcgccgcaagaccgtcaccgccatggatgttgtggacgccctcaagcggcaggggcgcactctgtacgggttcggtgggtgagcgcatctcttccctcgtctgcagcggctgccggtggcgtttcctcagttccctctgccttgcttggcttgatgtagagagttatcagattaaaatatctctgatgtgcttcgttattgggtggaatcatgtgtcccagcagtgctgggaaatcgagatcaagat

SEQ ID NO: 37070 - protein, 128 aa, Zea mays subsp. mays
  peptide (1)..(128): Ceres Seq. ID no. 13631751
  misc_feature (20)..(128): NCBI GI NO: 34876368 NR Description: similar to germinal histone H4 gene
  misc_feature (26)..(128): NCBI GI NO: 15226944 NR Description: histone H4 [Arabidopsis thaliana]
  misc_feature (20)..(128): NCBI GI NO: 17540668 NR Description: Histone H4 family member [Caenorhabditis elegans]
  misc_feature (26)..(128): NCBI GI NO: 462243 NR Description: Histone H4
  misc_feature (26)..(128): NCBI GI NO: 1806283 NR Description: Histone H4 homologue [Sesbania rostrata]
  misc_feature (26)..(128): NCBI GI NO: 4504301 NR Description: H4 histone family, member A [Homo sapiens]
  misc_feature (26)..(128): NCBI GI NO: 27692960 NR Description: Similar to germinal histone H4 gene [Mus musculus]
  misc_feature (26)..(128): NCBI GI NO: 27692935 NR Description: Hist1h4i protein [Mus musculus]
  misc_feature (26)..(128): NCBI GI NO: 37590121 NR Description: Hist1h4h protein [Mus musculus]
  misc_feature (26)..(128): NCBI GI NO: 17352498 NR Description: histone H4; Bicoid interacting protein 2; histone
SESPSCAQIPQSSCSTPLSSSNSAAMSGRGKGGKGLGKGGAKRHRKVLRDNIQGITKPAIRRLARRSDVKRISGLIYEETRGVLKIFLENVIRDAGTYTEHARRKTVTAMDVVDALKRQGRTLYGFGG

SEQ ID NO: 37071 - protein, 103 aa, Zea mays subsp. mays
  peptide (1)..(103): Ceres Seq. ID no. 13631752
  misc_feature (1)..(103): NCBI GI NO: 34876368 NR Description: similar to germinal histone H4 gene
  misc_feature (1)..(103): NCBI GI NO: 15226944 NR Description: histone H4 [Arabidopsis thaliana]
  misc_feature (1)..(103): NCBI GI NO: 17540668 NR Description: Histone H4 family member [Caenorhabditis elegans]
  misc_feature (1)..(103): NCBI GI NO: 462243 NR Description: Histone H4
  misc_feature (1)..(103): NCBI GI NO: 1806283 NR Description: Histone H4 homologue [Sesbania rostrata]
  misc_feature (1)..(103): NCBI GI NO: 4504301 NR Description: H4 histone family, member A [Homo sapiens]
  misc_feature (1)..(103): NCBI GI NO: 27692960 NR Description: Similar to germinal histone H4 gene [Mus musculus]
  misc_feature (1)..(103): NCBI GI NO: 27692935 NR Description: Hist1h4i protein [Mus musculus]
  misc_feature (1)..(103): NCBI GI NO: 37590121 NR Description: Hist1h4h protein [Mus musculus]
  misc_feature (1)..(103): NCBI GI NO: 17352498 NR Description: histone H4; Bicoid interacting protein 2; histone
MSGRGKGGKGLGKGGAKRHRKVLRDNIQGITKPAIRRLARRSDVKRISGLIYEETRGVLKIFLENVIRDAGTYTEHARRKTVTAMDVVDALKRQGRTLYGFGG

SEQ ID NO: 37072 - protein, 94 aa, Zea mays subsp. mays
  peptide (1)..(94): Ceres Seq. ID no. 13631753
MSSATRAPTPSTLAARPSPPWMLWTPSSGRGALCTGSVGERISSLVCSGCRWRFLSSLCLAWLDVESYQIKISLMCFVIGWNHVSQQCWEIEIK

SEQ ID NO: 37073 - DNA, 1211 bp, Zea mays subsp. mays
  misc_feature (1)..(1211): Ceres Seq. ID no. 13636562
acaccttccctcggtcccttccatctcctagccgccgccgccgccgccgctgcccaaaaccctacctaccctcttcttcccctcactctcctttcatctccattctaatggcggcccaacccgtccggcgaagctgctagtgcttgtatctactatcttcatcaggtacttcgcgatcctactgaagtattccccgccgccgctgccatggccaccctcaaccctttcgaactccttggcgccgacgacaacgacgacccgacgcagctgattgcggcggcggcggctgctgctcagaaagccgaggcgaagaagtccgccgtggcgcctgctgggaaggctgcccagcctgcggcgaccaccaagttcccgaccaagcccgctcctccctcgcagacggttcgggatgcacgcggcggtggctcatcagctcgtggaggctttggccgtggtgaacgtggccgtggcagaggtggacggggatatggccagaaccgtggcttcagtggtgacaatggcaatgagttccagggaggttatggtggcggaggctatggggatggtgctgtaactgggtggatctgcaaggatgctactgcaaatgaggaggaagaaaaggaagaggacaaggagatgactctggaggaatttgagaaaataagagaggagaagaggaaagcactacttgcattgaaggctgaggagaggaaagttgaagttgacaaggatttgcagtctctgcagccactttcaaacaagaaagaaaatgatgaagttttcattaagctgggttctgacaaggataagaagaaggaaaatgcttgagcgtgatgagcgtgccaagaagtcggtgagcatcaacgagttcctgaaacctgctgaaggagaaaggtactacggcggccgtggccgtggaaggggccgtggggatcgtggtggttttagaggcggatacagagggggatacagtcgtggcccagctgctgctgctccatccattgaggatcaagctcagttcccaagccttggtgggaagtgaagggcgcccagctgctgctgtcaccgagcgttgtgttgtctgctgttgtcatatttaaattttgtccgacgttaaatttctgtgccacggtttaaacggaacaaataatgatgttgcatgtggctatctttagttatgtggtacttgacgttgaataccggagttgttgttt

SEQ ID NO: 37074 - protein, 205 aa, Zea mays subsp. mays
  peptide (1)..(205): Ceres Seq. ID no. 13636563
  misc_feature (78)..(205): Pfam Name: Pfam Description:  Hyaluronan / mRNA binding family
  misc_feature (1)..(121): NCBI GI NO: 34910712 NR Description: putative nuclear RNA binding protein A
  misc_feature (1)..(118): NCBI GI NO: 39725276 NR Description: salt tolerance protein 1 [Beta vulgaris]
  misc_feature (127)..(205): NCBI GI NO: 39725276 NR Description: salt tolerance protein 1 [Beta vulgaris]
  misc_feature (78)..(205): NCBI GI NO: 34910712 NR Description: putative nuclear RNA binding protein A
  misc_feature (1)..(117): NCBI GI NO: 39725278 NR Description: salt tolerance protein 2 [Beta vulgaris]
  misc_feature (127)..(205): NCBI GI NO: 39725278 NR Description: salt tolerance protein 2 [Beta vulgaris]
  misc_feature (1)..(141): NCBI GI NO: 6492266 NR Description: nuclear RNA binding protein A [Spinacia oleracea]
  misc_feature (127)..(205): NCBI GI NO: 6492266 NR Description: nuclear RNA binding protein A [Spinacia oleracea]
  misc_feature (69)..(204): NCBI GI NO: 34912396 NR Description: putative putative nuclear RNA binding protein A
  misc_feature (1)..(121): NCBI GI NO: 34912396 NR Description: putative putative nuclear RNA binding protein A
MATLNPFELLGADDNDDPTQLIAAAAAAAQKAEAKKSAVAPAGKAAQPAATTKFPTKPAPPSQTVRDARGGGSSARGGFGRGERGRGRGGRGYGQNRGFSGDNGNEFQGGYGGGGYGDGAVTGWICKDATANEEEEKEEDKEMTLEEFEKIREEKRKALLALKAEERKVEVDKDLQSLQPLSNKKENDEVFIKLGSDKDKKKENA

SEQ ID NO: 37075 - DNA, 1346 bp, Zea mays subsp. mays; identical to SEQ ID NO: 21249
  misc_feature (1)..(1346): Ceres Seq. ID no. 12633565

SEQ ID NO: 37076 - protein, 266 aa, Zea mays subsp. mays; identical to SEQ ID NO: 21250
  peptide (1)..(266): Ceres Seq. ID no. 12633566
  misc_feature (1)..(264): NCBI GI NO: 34895744 NR Description: P0019D06.30
  misc_feature (1)..(262): NCBI GI NO: 18408931 NR Description: expressed protein; protein id: At3g49720
  misc_feature (1)..(262): NCBI GI NO: 21593192 NR Description: unknown [Arabidopsis thaliana]
  misc_feature (1)..(262): NCBI GI NO: 18424995 NR Description: putative protein; protein id: At5g65810
  misc_feature (96)..(262): NCBI GI NO: 16649137 NR Description: Unknown protein [Arabidopsis thaliana]
  misc_feature (1)..(216): NCBI GI NO: 9758568 NR Description: emb|CAB66910

SEQ ID NO: 37077 - protein, 185 aa, Zea mays subsp. mays; identical to SEQ ID NO: 21251
  peptide (1)..(185): Ceres Seq. ID no. 12633567
  misc_feature (1)..(183): NCBI GI NO: 34895744 NR Description: P0019D06.30
  misc_feature (1)..(181): NCBI GI NO: 18408931 NR Description: expressed protein; protein id: At3g49720
  misc_feature (1)..(181): NCBI GI NO: 21593192 NR Description: unknown [Arabidopsis thaliana]
  misc_feature (1)..(181): NCBI GI NO: 18424995 NR Description: putative protein; protein id: At5g65810
  misc_feature (15)..(181): NCBI GI NO: 16649137 NR Description: Unknown protein [Arabidopsis thaliana]
  misc_feature (1)..(135): NCBI GI NO: 9758568 NR Description: emb|CAB66910

SEQ ID NO: 37078 - protein, 171 aa, Zea mays subsp. mays; identical to SEQ ID NO: 21252
  peptide (1)..(171): Ceres Seq. ID no. 12633568
  misc_feature (1)..(169): NCBI GI NO: 34895744 NR Description: P0019D06.30
  misc_feature (1)..(167): NCBI GI NO: 18408931 NR Description: expressed protein; protein id: At3g49720
  misc_feature (1)..(167): NCBI GI NO: 21593192 NR Description: unknown [Arabidopsis thaliana]
  misc_feature (1)..(167): NCBI GI NO: 18424995 NR Description: putative protein; protein id: At5g65810
  misc_feature (1)..(167): NCBI GI NO: 16649137 NR Description: Unknown protein [Arabidopsis thaliana]
  misc_feature (1)..(121): NCBI GI NO: 9758568 NR Description: emb|CAB66910

SEQ ID NO: 37079 - DNA, 388 bp, Zea mays subsp. mays
  misc_feature (1)..(388): Ceres Seq. ID no. 13636823
  misc_feature (289)..(289): n is a, c, t, g, unknown, or other
  misc_feature (288)..(288): n is a, c, t, g, unknown, or other
  misc_feature (292)..(292): n is a, c, t, g, unknown, or other
  misc_feature (290)..(290): n is a, c, t, g, unknown, or other
  misc_feature (291)..(291): n is a, c, t, g, unknown, or other
  misc_feature (293)..(293): n is a, c, t, g, unknown, or other
aagcaaatcgtaaaccgctacaaaaccgtcaaataggaaaaagtaatttgtgtttgtttagtttgttaagaagaatccgatggagtcgtcaccagcagcagcagcgaagccggcgagaggcacaggaggaaggaaaggaggtgatcggaagaagagtgtttccaagtccgtcaaggctggtcttcagtttcccgtcggtcgtatctctcgttacttgaagaaaggtcgttacgcgatcaggtacggcgccggtgctcccgtctacctcgccgccgtcctcgagtaccnnnnnngccgaggttctggagcttgctgggaacgcagcgagggacaacaagaagaacaggataaacccgaggcatctctgcttggcgataaggaacgatga

SEQ ID NO: 37080 - protein, 102 aa, Zea mays subsp. mays
  peptide (1)..(102): Ceres Seq. ID no. 13636824
  misc_feature (7)..(69): Pfam Name: Pfam Description:  Core histone H2A/H2B/H3/H4
  misc_feature (1)..(69): NCBI GI NO: 5777792 NR Description: histone H2A [Brassica napus]
  misc_feature (1)..(69): NCBI GI NO: 15241016 NR Description: histone H2A, putative [Arabidopsis thaliana]
  misc_feature (8)..(69): NCBI GI NO: 122003 NR Description: HISTONE H2A
  misc_feature (8)..(69): NCBI GI NO: 122007 NR Description: Histone H2A
  misc_feature (7)..(69): NCBI GI NO: 122006 NR Description: HISTONE H2A
  misc_feature (7)..(69): NCBI GI NO: 27529852 NR Description: H2A histone [Nicotiana tabacum]
  misc_feature (7)..(69): NCBI GI NO: 729669 NR Description: Histone H2A
  misc_feature (1)..(69): NCBI GI NO: 34914498 NR Description: putative histone H2A
  misc_feature (17)..(69): NCBI GI NO: 1076776 NR Description: histone H2A.2 - wheat
  misc_feature (17)..(69): NCBI GI NO: 2130104 NR Description: histone H2A.9 - wheat
  misc_feature (70)..(70): Xaa is any aa, unknown or other
  misc_feature (71)..(71): Xaa is any aa, unknown or other
  misc_feature (72)..(72): Xaa is any aa, unknown or other
MESSPAAAAKPARGTGGRKGGDRKKSVSKSVKAGLQFPVGRISRYLKKGRYAIRYGAGAPVYLAAVLEYXXXRGSGACWERSEGQQEEQDKPEASLLGDKER

SEQ ID NO: 37081 - protein, 71 aa, Zea mays subsp. mays
  peptide (1)..(71): Ceres Seq. ID no. 13636825
  misc_feature (55)..(71): NCBI GI NO: 31240521 NR Description: ENSANGP00000008789 [Anopheles gambiae]
ANRKPLQNRQIGKSNLCLFSLLRRIRWSRHQQQQRSRREAQEEGKEVIGRRVFPSPSRLVFSFPSVVSLVT

SEQ ID NO: 37082 - DNA, 1401 bp, Zea mays subsp. mays; identical to SEQ ID NO: 33172
  misc_feature (1)..(1401): Ceres Seq. ID no. 13636633

SEQ ID NO: 37083 - protein, 393 aa, Zea mays subsp. mays; identical to SEQ ID NO: 33173
  peptide (1)..(393): Ceres Seq. ID no. 15220370
  misc_feature (150)..(379): Pfam Name: Pfam Description:  O-methyltransferase
  misc_feature (150)..(393): NCBI GI NO: 4098238 NR Description: o-methyltransferase [Triticum aestivum]
  misc_feature (145)..(393): NCBI GI NO: 1353193 NR Description: O-METHYLTRANSFERASE ZRP4 (OMT)
  misc_feature (147)..(393): NCBI GI NO: 37530600 NR Description: putative o-methyltransferase ZRP4
  misc_feature (150)..(393): NCBI GI NO: 37530606 NR Description: putative o-methyltransferase ZRP4
  misc_feature (142)..(393): NCBI GI NO: 22093735 NR Description: putative o-methyltransferase
  misc_feature (150)..(393): NCBI GI NO: 34909608 NR Description: putative o-methyltransferase
  misc_feature (138)..(393): NCBI GI NO: 6177792 NR Description: O-methyltransferase [Pyrus pyrifolia]
  misc_feature (142)..(393): NCBI GI NO: 20514367 NR Description: orcinol O-methyltransferase [Rosa hybrid cultivar]
  misc_feature (142)..(393): NCBI GI NO: 38175602 NR Description: putative catechol O-methyltransferase
  misc_feature (142)..(393): NCBI GI NO: 16903138 NR Description: chavicol O-methyltransferase [Ocimum basilicum]

SEQ ID NO: 37084 - protein, 232 aa, Zea mays subsp. mays; identical to SEQ ID NO: 33174
  peptide (1)..(232): Ceres Seq. ID no. 15220371
  misc_feature (1)..(218): Pfam Name: Pfam Description:  O-methyltransferase
  misc_feature (1)..(232): NCBI GI NO: 4098238 NR Description: o-methyltransferase [Triticum aestivum]
  misc_feature (1)..(232): NCBI GI NO: 1353193 NR Description: O-METHYLTRANSFERASE ZRP4 (OMT)
  misc_feature (1)..(232): NCBI GI NO: 37530600 NR Description: putative o-methyltransferase ZRP4
  misc_feature (1)..(232): NCBI GI NO: 37530606 NR Description: putative o-methyltransferase ZRP4
  misc_feature (1)..(232): NCBI GI NO: 22093735 NR Description: putative o-methyltransferase
  misc_feature (1)..(232): NCBI GI NO: 34909608 NR Description: putative o-methyltransferase
  misc_feature (1)..(232): NCBI GI NO: 6177792 NR Description: O-methyltransferase [Pyrus pyrifolia]
  misc_feature (1)..(232): NCBI GI NO: 20514367 NR Description: orcinol O-methyltransferase [Rosa hybrid cultivar]
  misc_feature (1)..(232): NCBI GI NO: 38175602 NR Description: putative catechol O-methyltransferase
  misc_feature (1)..(232): NCBI GI NO: 16903138 NR Description: chavicol O-methyltransferase [Ocimum basilicum]

SEQ ID NO: 37085 - protein, 228 aa, Zea mays subsp. mays; identical to SEQ ID NO: 33175
  peptide (1)..(228): Ceres Seq. ID no. 15220372
  misc_feature (1)..(214): Pfam Name: Pfam Description:  O-methyltransferase
  misc_feature (1)..(228): NCBI GI NO: 4098238 NR Description: o-methyltransferase [Triticum aestivum]
  misc_feature (1)..(228): NCBI GI NO: 1353193 NR Description: O-METHYLTRANSFERASE ZRP4 (OMT)
  misc_feature (1)..(228): NCBI GI NO: 37530600 NR Description: putative o-methyltransferase ZRP4
  misc_feature (1)..(228): NCBI GI NO: 37530606 NR Description: putative o-methyltransferase ZRP4
  misc_feature (1)..(228): NCBI GI NO: 22093735 NR Description: putative o-methyltransferase
  misc_feature (1)..(228): NCBI GI NO: 34909608 NR Description: putative o-methyltransferase
  misc_feature (1)..(228): NCBI GI NO: 6177792 NR Description: O-methyltransferase [Pyrus pyrifolia]
  misc_feature (1)..(228): NCBI GI NO: 20514367 NR Description: orcinol O-methyltransferase [Rosa hybrid cultivar]
  misc_feature (1)..(228): NCBI GI NO: 38175602 NR Description: putative catechol O-methyltransferase
  misc_feature (1)..(228): NCBI GI NO: 16903138 NR Description: chavicol O-methyltransferase [Ocimum basilicum]

SEQ ID NO: 37086 - DNA, 717 bp, Zea mays subsp. mays
  misc_feature (1)..(717): Ceres Seq. ID no. 13628146
ccaactacggtaactcgtctgctcgcatttcctcccaatccatcccgcctccaaacccgaactccaagtcgccccgcatcgatggcgcccaaggccgagaagaagcccgcggcgaagaagccggcggaggaggagcccgctgccgagaaggcgccggccgggaagaagcccaaggcggagaagcgtgtcccagcaggcaagtccgccggcaaggagggcggcgagggaaagaggggccggaagaagggcaagaagagcgtggagacctacaagatctacatcttcaaggtgctgaagcaggtgcacccggacatcggcatctcctctaaggccatgtccatcatgaactccttcatcaacgacatcttcgagaagctcgccgccgaggccgccaagctcgcgcggtacaacaagaagcccaccatcacctcccgtgagatccagacctccgtgcgcctcgtcctccccggggagctcgccaagcacgccgtctccgagggcaccaaggccgtcaccaagttcacctcgtcctaggctgcgtggcctccgcttgcaggcttccctcgtatgttcgcgtgtcttgctgtagttaggtgctgctgtgtctggtctcctccggtagcaactgttatctgatggaacagtaacaatgcttattgaatccagctagttgcttatttgtggatcctctctctttgttgttggccacctttatct

SEQ ID NO: 37087 - protein, 177 aa, Zea mays subsp. mays
  peptide (1)..(177): Ceres Seq. ID no. 13628147
  misc_feature (53)..(176): Pfam Name: Pfam Description:  Core histone H2A/H2B/H3/H4
  misc_feature (28)..(177): NCBI GI NO: 399854 NR Description: Histone H2B.2
  misc_feature (28)..(177): NCBI GI NO: 3913804 NR Description: Histone H2B.3
  misc_feature (28)..(177): NCBI GI NO: 122022 NR Description: Histone H2B
  misc_feature (28)..(177): NCBI GI NO: 399853 NR Description: Histone H2B.1
  misc_feature (28)..(177): NCBI GI NO: 1708107 NR Description: Histone H2B
  misc_feature (28)..(177): NCBI GI NO: 34895904 NR Description: putative histone H2B
  misc_feature (6)..(177): NCBI GI NO: 34876159 NR Description: similar to Histone H2B 291B [Rattus norvegicus]
  misc_feature (6)..(174): NCBI GI NO: 15223150 NR Description: histone H2B family [Arabidopsis thaliana]
  misc_feature (115)..(165): NCBI GI NO: 30923862 NR Description: CG40461-PA [Drosophila melanogaster]
PTTVTRLLAFPPNPSRLQTRTPSRPASMAPKAEKKPAAKKPAEEEPAAEKAPAGKKPKAEKRVPAGKSAGKEGGEGKRGRKKGKKSVETYKIYIFKVLKQVHPDIGISSKAMSIMNSFINDIFEKLAAEAAKLARYNKKPTITSREIQTSVRLVLPGELAKHAVSEGTKAVTKFTSS

SEQ ID NO: 37088 - protein, 150 aa, Zea mays subsp. mays
  peptide (1)..(150): Ceres Seq. ID no. 13628148
  misc_feature (26)..(149): Pfam Name: Pfam Description:  Core histone H2A/H2B/H3/H4
  misc_feature (1)..(150): NCBI GI NO: 399854 NR Description: Histone H2B.2
  misc_feature (1)..(150): NCBI GI NO: 3913804 NR Description: Histone H2B.3
  misc_feature (1)..(150): NCBI GI NO: 122022 NR Description: Histone H2B
  misc_feature (1)..(150): NCBI GI NO: 399853 NR Description: Histone H2B.1
  misc_feature (1)..(150): NCBI GI NO: 1708107 NR Description: Histone H2B
  misc_feature (1)..(150): NCBI GI NO: 34895904 NR Description: putative histone H2B
  misc_feature (1)..(150): NCBI GI NO: 34876159 NR Description: similar to Histone H2B 291B [Rattus norvegicus]
  misc_feature (1)..(147): NCBI GI NO: 15223150 NR Description: histone H2B family [Arabidopsis thaliana]
  misc_feature (88)..(138): NCBI GI NO: 30923862 NR Description: CG40461-PA [Drosophila melanogaster]
MAPKAEKKPAAKKPAEEEPAAEKAPAGKKPKAEKRVPAGKSAGKEGGEGKRGRKKGKKSVETYKIYIFKVLKQVHPDIGISSKAMSIMNSFINDIFEKLAAEAAKLARYNKKPTITSREIQTSVRLVLPGELAKHAVSEGTKAVTKFTSS

SEQ ID NO: 37089 - protein, 108 aa, Zea mays subsp. mays
  peptide (1)..(108): Ceres Seq. ID no. 13628149
  misc_feature (76)..(108): NCBI GI NO: 17505204 NR Description: histone 1, H2bc; H2B histone family, member S
NYGNSSARISSQSIPPPNPNSKSPRIDGAQGREEARGEEAGGGGARCREGAGREEAQGGEACPSRQVRRQGGRRGKEGPEEGQEERGDLQDLHLQGAEAGAPGHRHLL

SEQ ID NO: 37090 - DNA, 998 bp, Zea mays subsp. mays
  misc_feature (1)..(998): Ceres Seq. ID no. 13636513
ggacctttccaagtctcaaaccagagcgaggccgcactgcccgcgagtcctccactccgaccgcacgatggctgcgctgcgcctcgcctccttcaccctccgccccgccgctgccgcggcctccgcctcctccggcgggaccccagccgcgtccggctccgtctccgtctccttcgcccgcgcggcgcgagggctgccctccctccgcctggccccgccccgccrccgcrgggacmtcrccaggycycgcgccgcggccgaggccgcggcggagagctacgcrtccgcgctgtcggaggtggccgtcgagaacggcaccctcgagcagacggtctccgacctsgagaagctggagaagrtcttckcsgacgaggccgtcgccgagttcttcgacaaccccaccgtcccgcgcgaggagaaggccgagctcatcgrcgagatcgccargtcgtccgagctgcagccgcacgtcgtcaacttcctcaacgtcgtcgtcgacaacttccgcgcgkccatcgtgccgcagatcgtcgycgagttcgagaacgtctacaactcgctcacgggcaccgaggtcgccaccgtcacctccgtcgtgcagctcgagtcgcaggacctcgcgcagatcgcgcagcacgtccagaagatgaccggcgccaagaacgtccgcctcaagacgcagctcgacccggcgctcatcgccggcttcaccgtgcagtacggccgcgacggctccaacttgatcgacatgagcgtccggaagcagatcgaggagatcgcgtccgagttcgagttgcccgccgtcccgctcgaagtctgaggccggcttgaggcgtccatcctcgccctcgaagctataggtcctttttctgctgcctctctccctgctctgctattcatctgtatcattctctggttgttgaatgttttgagtgaatggtgaatgctgcatacctggattttaggattcatatttgaatgaatggtgaatacactgc

SEQ ID NO: 37091 - protein, 276 aa, Zea mays subsp. mays
  peptide (1)..(276): Ceres Seq. ID no. 15219366
  misc_feature (75)..(75): Xaa is any aa, unknown or other
  misc_feature (77)..(77): Xaa is any aa, unknown or other
  misc_feature (79)..(79): Xaa is any aa, unknown or other
  misc_feature (80)..(80): Xaa is any aa, unknown or other
  misc_feature (82)..(82): Xaa is any aa, unknown or other
  misc_feature (83)..(83): Xaa is any aa, unknown or other
  misc_feature (95)..(95): Xaa is any aa, unknown or other
  misc_feature (115)..(115): Xaa is any aa, unknown or other
  misc_feature (120)..(120): Xaa is any aa, unknown or other
  misc_feature (122)..(122): Xaa is any aa, unknown or other
  misc_feature (123)..(123): Xaa is any aa, unknown or other
  misc_feature (145)..(145): Xaa is any aa, unknown or other
  misc_feature (149)..(149): Xaa is any aa, unknown or other
  misc_feature (171)..(171): Xaa is any aa, unknown or other
  misc_feature (178)..(178): Xaa is any aa, unknown or other
GPFQVSNQSEAALPASPPLRPHDGCAAPRLLHPPPRRCRGLRLLRRDPSRVRLRLRLLRPRGARAALPPPGPAPXPXGXXQXXRRGRGRGGELRXRAVGGGRRERHPRADGLRPXEAGEXLXXRGRRRVLRQPHRPARGEGRAHXRDRXVVRAAAARRQLPQRRRRQLPRXHRAADRXRVRERLQLAHGHRGRHRHLRRAARVAGPRADRAARPEDDRRQERPPQDAARPGAHRRLHRAVRPRRLQLDRHERPEADRGDRVRVRVARRPARSLRPA

SEQ ID NO: 37092 - protein, 272 aa, Zea mays subsp. mays
  peptide (1)..(272): Ceres Seq. ID no. 15219367
  misc_feature (89)..(263): Pfam Name: OSCP Pfam Description: ATP synthase delta
  misc_feature (23)..(272): NCBI GI NO: 1168587 NR Description: ATP synthase delta chain, chloroplast precursor
  misc_feature (88)..(272): NCBI GI NO: 1084479 NR Description: H+-transporting two-sector ATPase (EC 3
  misc_feature (23)..(272): NCBI GI NO: 416681 NR Description: ATP synthase delta chain, chloroplast precursor
  misc_feature (23)..(272): NCBI GI NO: 114584 NR Description: ATP synthase delta chain, chloroplast precursor
  misc_feature (23)..(272): NCBI GI NO: 170098 NR Description: ATP synthase delta subunit precursor
  misc_feature (57)..(270): NCBI GI NO: 15233985 NR Description: H+-transporting ATP synthase-related protein
  misc_feature (57)..(270): NCBI GI NO: 18491181 NR Description: putative H+-transporting ATP synthase
  misc_feature (89)..(272): NCBI GI NO: 399082 NR Description: ATP synthase delta chain, chloroplast precursor
  misc_feature (139)..(270): NCBI GI NO: 1480014 NR Description: putative delta subunit of ATP synthase
  misc_feature (55)..(262): NCBI GI NO: 5902612 NR Description: ATP synthase-delta chain
  misc_feature (75)..(75): Xaa is any aa, unknown or other
  misc_feature (77)..(77): Xaa is any aa, unknown or other
  misc_feature (79)..(79): Xaa is any aa, unknown or other
  misc_feature (80)..(80): Xaa is any aa, unknown or other
  misc_feature (82)..(82): Xaa is any aa, unknown or other
  misc_feature (94)..(94): Xaa is any aa, unknown or other
  misc_feature (114)..(114): Xaa is any aa, unknown or other
  misc_feature (120)..(120): Xaa is any aa, unknown or other
  misc_feature (122)..(122): Xaa is any aa, unknown or other
  misc_feature (145)..(145): Xaa is any aa, unknown or other
  misc_feature (149)..(149): Xaa is any aa, unknown or other
  misc_feature (171)..(171): Xaa is any aa, unknown or other
  misc_feature (178)..(178): Xaa is any aa, unknown or other
DLSKSQTRARPHCPRVLHSDRTMAALRLASFTLRPAAAAASASSGGTPAASGSVSVSFARAARGLPSLRLAPPRXRXDXXRXRAAAEAAAESYXSALSEVAVENGTLEQTVSDXEKLEKXFXDEAVAEFFDNPTVPREEKAELIXEIAXSSELQPHVVNFLNVVVDNFRAXIVPQIVXEFENVYNSLTGTEVATVTSVVQLESQDLAQIAQHVQKMTGAKNVRLKTQLDPALIAGFTVQYGRDGSNLIDMSVRKQIEEIASEFELPAVPLEV

SEQ ID NO: 37093 - protein, 250 aa, Zea mays subsp. mays
  peptide (1)..(250): Ceres Seq. ID no. 15219368
  misc_feature (67)..(241): Pfam Name: OSCP Pfam Description: ATP synthase delta
  misc_feature (1)..(250): NCBI GI NO: 1168587 NR Description: ATP synthase delta chain, chloroplast precursor
  misc_feature (66)..(250): NCBI GI NO: 1084479 NR Description: H+-transporting two-sector ATPase (EC 3
  misc_feature (1)..(250): NCBI GI NO: 416681 NR Description: ATP synthase delta chain, chloroplast precursor
  misc_feature (1)..(250): NCBI GI NO: 114584 NR Description: ATP synthase delta chain, chloroplast precursor
  misc_feature (1)..(250): NCBI GI NO: 170098 NR Description: ATP synthase delta subunit precursor
  misc_feature (35)..(248): NCBI GI NO: 15233985 NR Description: H+-transporting ATP synthase-related protein
  misc_feature (35)..(248): NCBI GI NO: 18491181 NR Description: putative H+-transporting ATP synthase
  misc_feature (67)..(250): NCBI GI NO: 399082 NR Description: ATP synthase delta chain, chloroplast precursor
  misc_feature (117)..(248): NCBI GI NO: 1480014 NR Description: putative delta subunit of ATP synthase
  misc_feature (33)..(240): NCBI GI NO: 5902612 NR Description: ATP synthase-delta chain
  misc_feature (53)..(53): Xaa is any aa, unknown or other
  misc_feature (55)..(55): Xaa is any aa, unknown or other
  misc_feature (57)..(57): Xaa is any aa, unknown or other
  misc_feature (58)..(58): Xaa is any aa, unknown or other
  misc_feature (60)..(60): Xaa is any aa, unknown or other
  misc_feature (72)..(72): Xaa is any aa, unknown or other
  misc_feature (92)..(92): Xaa is any aa, unknown or other
  misc_feature (98)..(98): Xaa is any aa, unknown or other
  misc_feature (100)..(100): Xaa is any aa, unknown or other
  misc_feature (123)..(123): Xaa is any aa, unknown or other
  misc_feature (127)..(127): Xaa is any aa, unknown or other
  misc_feature (149)..(149): Xaa is any aa, unknown or other
  misc_feature (156)..(156): Xaa is any aa, unknown or other
MAALRLASFTLRPAAAAASASSGGTPAASGSVSVSFARAARGLPSLRLAPPRXRXDXXRXRAAAEAAAESYXSALSEVAVENGTLEQTVSDXEKLEKXFXDEAVAEFFDNPTVPREEKAELIXEIAXSSELQPHVVNFLNVVVDNFRAXIVPQIVXEFENVYNSLTGTEVATVTSVVQLESQDLAQIAQHVQKMTGAKNVRLKTQLDPALIAGFTVQYGRDGSNLIDMSVRKQIEEIASEFELPAVPLEV

SEQ ID NO: 37094 - DNA, 2065 bp, Zea mays subsp. mays; identical to SEQ ID NO: 36637
  misc_feature (1)..(2065): Ceres Seq. ID no. 13636855

SEQ ID NO: 37095 - protein, 565 aa, Zea mays subsp. mays; identical to SEQ ID NO: 36638
  peptide (1)..(565): Ceres Seq. ID no. 13636856
  misc_feature (4)..(488): Pfam Name: Pfam Description:  Mlo family
  misc_feature (1)..(565): NCBI GI NO: 13784977 NR Description: seven transmembrane protein Mlo2 [Zea mays]
  misc_feature (1)..(561): NCBI GI NO: 37536520 NR Description: putative Mlo (pathogen resistance) protein
  misc_feature (108)..(455): NCBI GI NO: 13784985 NR Description: seven transmembrane protein Mlo6 [Zea mays]
  misc_feature (1)..(110): NCBI GI NO: 13784985 NR Description: seven transmembrane protein Mlo6 [Zea mays]
  misc_feature (1)..(443): NCBI GI NO: 15217453 NR Description: seven transmembrane MLO protein family (MLO9)
  misc_feature (1)..(440): NCBI GI NO: 14091580 NR Description: membrane protein Mlo5 [Arabidopsis thaliana]
  misc_feature (1)..(440): NCBI GI NO: 15226140 NR Description: seven transmembrane MLO protein family (MLO5)
  misc_feature (1)..(510): NCBI GI NO: 15239213 NR Description: seven transmembrane MLO protein family (MLO10)
  misc_feature (7)..(558): NCBI GI NO: 18398444 NR Description: seven transmembrane MLO protein family (MLO8)
  misc_feature (1)..(507): NCBI GI NO: 33112635 NR Description: MLO-like protein 7 (AtMlo7)

SEQ ID NO: 37096 - protein, 504 aa, Zea mays subsp. mays; identical to SEQ ID NO: 36639
  peptide (1)..(504): Ceres Seq. ID no. 13636857
  misc_feature (1)..(427): Pfam Name: Pfam Description:  Mlo family
  misc_feature (1)..(504): NCBI GI NO: 13784977 NR Description: seven transmembrane protein Mlo2 [Zea mays]
  misc_feature (1)..(500): NCBI GI NO: 37536520 NR Description: putative Mlo (pathogen resistance) protein
  misc_feature (47)..(394): NCBI GI NO: 13784985 NR Description: seven transmembrane protein Mlo6 [Zea mays]
  misc_feature (1)..(49): NCBI GI NO: 13784985 NR Description: seven transmembrane protein Mlo6 [Zea mays]
  misc_feature (1)..(382): NCBI GI NO: 15217453 NR Description: seven transmembrane MLO protein family (MLO9)
  misc_feature (1)..(379): NCBI GI NO: 14091580 NR Description: membrane protein Mlo5 [Arabidopsis thaliana]
  misc_feature (1)..(379): NCBI GI NO: 15226140 NR Description: seven transmembrane MLO protein family (MLO5)
  misc_feature (1)..(449): NCBI GI NO: 15239213 NR Description: seven transmembrane MLO protein family (MLO10)
  misc_feature (1)..(497): NCBI GI NO: 18398444 NR Description: seven transmembrane MLO protein family (MLO8)
  misc_feature (1)..(446): NCBI GI NO: 33112635 NR Description: MLO-like protein 7 (AtMlo7)

SEQ ID NO: 37097 - protein, 475 aa, Zea mays subsp. mays; identical to SEQ ID NO: 36640
  peptide (1)..(475): Ceres Seq. ID no. 13636858
  misc_feature (1)..(398): Pfam Name: Pfam Description:  Mlo family
  misc_feature (1)..(475): NCBI GI NO: 13784977 NR Description: seven transmembrane protein Mlo2 [Zea mays]
  misc_feature (1)..(471): NCBI GI NO: 37536520 NR Description: putative Mlo (pathogen resistance) protein
  misc_feature (18)..(365): NCBI GI NO: 13784985 NR Description: seven transmembrane protein Mlo6 [Zea mays]
  misc_feature (1)..(20): NCBI GI NO: 13784985 NR Description: seven transmembrane protein Mlo6 [Zea mays]
  misc_feature (1)..(353): NCBI GI NO: 15217453 NR Description: seven transmembrane MLO protein family (MLO9)
  misc_feature (1)..(350): NCBI GI NO: 14091580 NR Description: membrane protein Mlo5 [Arabidopsis thaliana]
  misc_feature (1)..(350): NCBI GI NO: 15226140 NR Description: seven transmembrane MLO protein family (MLO5)
  misc_feature (1)..(420): NCBI GI NO: 15239213 NR Description: seven transmembrane MLO protein family (MLO10)
  misc_feature (1)..(468): NCBI GI NO: 18398444 NR Description: seven transmembrane MLO protein family (MLO8)
  misc_feature (1)..(417): NCBI GI NO: 33112635 NR Description: MLO-like protein 7 (AtMlo7)

SEQ ID NO: 37098 - DNA, 685 bp, Zea mays subsp. mays; identical to SEQ ID NO: 31941
  misc_feature (1)..(685): Ceres Seq. ID no. 13628874

SEQ ID NO: 37099 - protein, 175 aa, Zea mays subsp. mays; identical to SEQ ID NO: 31942
  peptide (1)..(175): Ceres Seq. ID no. 13628875
  misc_feature (51)..(174): Pfam Name: Pfam Description:  Core histone H2A/H2B/H3/H4
  misc_feature (26)..(175): NCBI GI NO: 399854 NR Description: Histone H2B.2
  misc_feature (26)..(175): NCBI GI NO: 3913804 NR Description: Histone H2B.3
  misc_feature (26)..(175): NCBI GI NO: 122022 NR Description: Histone H2B
  misc_feature (26)..(175): NCBI GI NO: 399853 NR Description: Histone H2B.1
  misc_feature (26)..(175): NCBI GI NO: 1708107 NR Description: Histone H2B
  misc_feature (26)..(175): NCBI GI NO: 34895904 NR Description: putative histone H2B
  misc_feature (51)..(175): NCBI GI NO: 39595176 NR Description: Hypothetical protein CBG03777
  misc_feature (27)..(172): NCBI GI NO: 15223150 NR Description: histone H2B family [Arabidopsis thaliana]
  misc_feature (113)..(163): NCBI GI NO: 30923862 NR Description: CG40461-PA [Drosophila melanogaster]
  misc_feature (16)..(80): NCBI GI NO: 571480 NR Description: histone H1

SEQ ID NO: 37100 - protein, 150 aa, Zea mays subsp. mays; identical to SEQ ID NO: 31943
  peptide (1)..(150): Ceres Seq. ID no. 13628876
  misc_feature (26)..(149): Pfam Name: Pfam Description:  Core histone H2A/H2B/H3/H4
  misc_feature (1)..(150): NCBI GI NO: 399854 NR Description: Histone H2B.2
  misc_feature (1)..(150): NCBI GI NO: 3913804 NR Description: Histone H2B.3
  misc_feature (1)..(150): NCBI GI NO: 122022 NR Description: Histone H2B
  misc_feature (1)..(150): NCBI GI NO: 399853 NR Description: Histone H2B.1
  misc_feature (1)..(150): NCBI GI NO: 1708107 NR Description: Histone H2B
  misc_feature (1)..(150): NCBI GI NO: 34895904 NR Description: putative histone H2B
  misc_feature (26)..(150): NCBI GI NO: 39595176 NR Description: Hypothetical protein CBG03777
  misc_feature (2)..(147): NCBI GI NO: 15223150 NR Description: histone H2B family [Arabidopsis thaliana]
  misc_feature (88)..(138): NCBI GI NO: 30923862 NR Description: CG40461-PA [Drosophila melanogaster]
  misc_feature (1)..(55): NCBI GI NO: 571480 NR Description: histone H1

SEQ ID NO: 37101 - protein, 96 aa, Zea mays subsp. mays; identical to SEQ ID NO: 31944
  peptide (1)..(96): Ceres Seq. ID no. 13628877
  misc_feature (11)..(90): Pfam Name: Pfam Description:  Sperm histone P2
  misc_feature (1)..(96): NCBI GI NO: 34784016 NR Description: Unknown (protein for MGC:63802) [Danio rerio]
  misc_feature (26)..(96): NCBI GI NO: 29250446 NR Description: GLP_39_87477_88058 [Giardia lamblia ATCC 50803]
  misc_feature (14)..(96): NCBI GI NO: 25143299 NR Description: pre-mRNA splicing SR protein related RSR-1 (68
  misc_feature (12)..(96): NCBI GI NO: 11095327 NR Description: unknown [Paracoccus pantotrophus]
  misc_feature (18)..(96): NCBI GI NO: 23274133 NR Description: Similar to serine/arginine repetitive matrix 1
  misc_feature (14)..(96): NCBI GI NO: 25143299 NR Description: pre-mRNA splicing SR protein related RSR-1 (68
  misc_feature (40)..(96): NCBI GI NO: 25143299 NR Description: pre-mRNA splicing SR protein related RSR-1 (68

SEQ ID NO: 37102 - DNA, 616 bp, Zea mays subsp. mays
  misc_feature (1)..(616): Ceres Seq. ID no. 13636790
atgcacactcactcactccagtgcccactgcccactgcccactgcccgacgaggaagtttcacgatcccaacccgtataaatcgacgccgcgagggggagcgacgagcgatccccgtaattaacctgtcccagccgcaccgatccaccccccctcggcctcggcctccctccggccatggaggtgttctactacgtcgtgttcggcgcgctggccgccgtcgtggcggggctcgagctcggcaagagcggcaaggaccgcgtcgccaccacctccgcattcaactccttcaagaacaactacgtcctcgtctactccctcatgatgtccggggactggctgcagggcccctacgtctactacctctacagccagtatggcttcgacaagggcgacatcggccgcctcttcatcgccggcttcggatcctccatgctcttcggcaccatcgtcggctccctcgccgacaaacagggccgcaagagggcctgcgtcacctattgcatcagctacatcctcagctgcatcaccaagcactcccccgagtacagggtcctcatgatcggccgcatcctcgggggcatcgccacctcgctgctcttctccgccttcgagtc

SEQ ID NO: 37103 - protein, 205 aa, Zea mays subsp. mays
  peptide (1)..(205): Ceres Seq. ID no. 13636791
CTLTHSSAHCPLPTARRGSFTIPTRINRRREGERRAIPVINLSQPHRSTPPRPRPPSGHGGVLLRRVRRAGRRRGGARARQERQGPRRHHLRIQLLQEQLRPRLLPHDVRGLAAGPLRLLPLQPVWLRQGRHRPPLHRRLRILHALRHHRRLPRRQTGPQEGLRHLLHQLHPQLHHQALPRVQGPHDRPHPRGHRHLAALLRLRV

SEQ ID NO: 37104 - protein, 146 aa, Zea mays subsp. mays
  peptide (1)..(146): Ceres Seq. ID no. 13636792
  misc_feature (4)..(145): Pfam Name: DUF791 Pfam Description: Protein of unknown function
  misc_feature (1)..(145): NCBI GI NO: 37536124 NR Description: putative transporter
  misc_feature (1)..(145): NCBI GI NO: 34902182 NR Description: Putative transporter
  misc_feature (1)..(145): NCBI GI NO: 6633826 NR Description: F1N19.22 [Arabidopsis thaliana]
  misc_feature (1)..(145): NCBI GI NO: 15217708 NR Description: expressed protein [Arabidopsis thaliana]
  misc_feature (1)..(145): NCBI GI NO: 7487513 NR Description: hypothetical protein T29A15
  misc_feature (1)..(145): NCBI GI NO: 18417054 NR Description: expressed protein [Arabidopsis thaliana]
  misc_feature (1)..(145): NCBI GI NO: 11292198 NR Description: hypothetical protein F2K15
  misc_feature (1)..(145): NCBI GI NO: 30693172 NR Description: expressed protein [Arabidopsis thaliana]
  misc_feature (8)..(145): NCBI GI NO: 25148676 NR Description: Transporter (48.1 kD) [Caenorhabditis elegans]
  misc_feature (8)..(145): NCBI GI NO: 39587911 NR Description: Hypothetical protein CBG13530
MEVFYYVVFGALAAVVAGLELGKSGKDRVATTSAFNSFKNNYVLVYSLMMSGDWLQGPYVYYLYSQYGFDKGDIGRLFIAGFGSSMLFGTIVGSLADKQGRKRACVTYCISYILSCITKHSPEYRVLMIGRILGGIATSLLFSAFE

SEQ ID NO: 37105 - DNA, 540 bp, Zea mays subsp. mays
  misc_feature (1)..(540): Ceres Seq. ID no. 13628365
ctttccattagccatcctagccttcgccccctcgacgagaagaaccacctcaaaaccgaacagccgcaaaagaaagctgctagctactctatacatgataactagaacaggaccgtgaagtaatatatatataatgacgaagtcaggggcgctacaacttgctcggagcaccggagggtcgcttagcaaggaccaagtcaaatccgccgttgatcagtatgtgaagtaccacgacctccacggaggcgaacaagaatcaagaaagtcaaattacgctgatttggcaaacaagtactatgatcttgtcactggcttctacgaatatggatgaggcgactcattccattttgctggcggatatccgggtgaaacttcccgtgaagccattaagcggcaccagcattttatggcactacaattggggctcaagaagggtatgaaggttctggacgtgggatgtggaattgggggacctttaatagaaattgccagattcagctcaacttcaataactggattgaccaacaatgactaccatgt

SEQ ID NO: 37106 - protein, 65 aa, Zea mays subsp. mays
  peptide (1)..(65): Ceres Seq. ID no. 13628366
  misc_feature (1)..(65): NCBI GI NO: 7443715 NR Description: sterol 24-C-methyltransferase (EC 2
  misc_feature (1)..(65): NCBI GI NO: 7443716 NR Description: sterol 24-C-methyltransferase (EC 2
  misc_feature (1)..(65): NCBI GI NO: 3560531 NR Description: cycloartenol-C24-methyltransferase
  misc_feature (1)..(65): NCBI GI NO: 34393309 NR Description: cycloartenol-C24-methyltransferase
  misc_feature (1)..(65): NCBI GI NO: 3560474 NR Description: S-adenosyl-methionine-sterol-C- methyltransferase
  misc_feature (1)..(65): NCBI GI NO: 3603295 NR Description: S-adenosyl-methionine cycloartenol-C24-methyltransferase
  misc_feature (1)..(65): NCBI GI NO: 7443719 NR Description: sterol 24-C-methyltransferase (EC 2
  misc_feature (2)..(65): NCBI GI NO: 7443720 NR Description: probable sterol 24-C-methyltransferase (EC2
  misc_feature (7)..(65): NCBI GI NO: 21434843 NR Description: cephalopod [Arabidopsis thaliana]
  misc_feature (24)..(65): NCBI GI NO: 30103006 NR Description: putative endosperm C-24 sterol methyltransferase
MTKSGALQLARSTGGSLSKDQVKSAVDQYVKYHDLHGGEQESRKSNYADLANKYYDLVTGFYEYG

SEQ ID NO: 37107 - protein, 47 aa, Zea mays subsp. mays
  peptide (1)..(47): Ceres Seq. ID no. 13628367
MILSLASTNMDEATHSILLADIRVKLPVKPLSGTSILWHYNWGSRRV

SEQ ID NO: 37108 - protein, 44 aa, Zea mays subsp. mays
  peptide (1)..(44): Ceres Seq. ID no. 13628368
  misc_feature (1)..(43): NCBI GI NO: 7443715 NR Description: sterol 24-C-methyltransferase (EC 2
  misc_feature (1)..(43): NCBI GI NO: 7443716 NR Description: sterol 24-C-methyltransferase (EC 2
  misc_feature (1)..(43): NCBI GI NO: 3560531 NR Description: cycloartenol-C24-methyltransferase
  misc_feature (1)..(43): NCBI GI NO: 34393309 NR Description: cycloartenol-C24-methyltransferase
  misc_feature (1)..(43): NCBI GI NO: 3560474 NR Description: S-adenosyl-methionine-sterol-C- methyltransferase
  misc_feature (1)..(43): NCBI GI NO: 3603295 NR Description: S-adenosyl-methionine cycloartenol-C24-methyltransferase
  misc_feature (1)..(43): NCBI GI NO: 7443719 NR Description: sterol 24-C-methyltransferase (EC 2
  misc_feature (1)..(43): NCBI GI NO: 7443720 NR Description: probable sterol 24-C-methyltransferase (EC2
  misc_feature (1)..(43): NCBI GI NO: 21434843 NR Description: cephalopod [Arabidopsis thaliana]
  misc_feature (1)..(43): NCBI GI NO: 30103006 NR Description: putative endosperm C-24 sterol methyltransferase
MALQLGLKKGMKVLDVGCGIGGPLIEIARFSSTSITGLTNNDYH

SEQ ID NO: 37109 - DNA, 2368 bp, Zea mays subsp. mays
  misc_feature (1)..(2368): Ceres Seq. ID no. 15179435
atcttcgccgccgctaaacgttccccccacgccccaacctatccacgcgaaaccttctttcccccgggagacgattcgtcagggagaggaaagaggcaagaggggccatggacgctgccaagttggtgacgccggtcgctgtgtctcacattctggcgcacccgtcggcgggctccgacggcgcagtgaccgatctcgtcgttcaggtcctcgacctgaagtccgtcggcacgggcagccggttcagtttcacagcaactgacgggaaggataagatcaaggcgatgcttcccaccaacttcgggtcggaggtccgctctggcaacctgaagaacctcggcctcatccgcatcatcgactacacttgcaacgtcgtcaaaggcaaagatgacaaagtcttggttgtcatcaaatgcgagcttgtgtgccaagcgcttgacgccgagatcaacggcgaggccaaaaaagaggagcctccaattgtgctgaagcctaaggacgaatggatgggcgtgacatccccactcgctatgaagcccaagcaggaggtgaagtctgcgtcccagatcgtgaatgagcagcgtggaaatactgctcctgtcaagcccctttccatgacaaagagggtccatcctttgatcactctgaacccctaccagggtaactgggtcattaaggtgcgggtcacgagcaaaggcaacctgagaacctacaggaatgctcgcggagaaggctgtgtcttcaatgtagagctcaccgatgaggatggcacccagatccaagccaccatgtttaatgacgctgcaaagaagttctatccgatttttgagctgggaaaggtctattatgtctcaaaaggatctcttagaattgctaacaagcagttcaagactgtccaaaatgactacgagatgtcactaaacgagaatgctattgttgaagaagcagagggggagacttgcattccgcaagtgcaatacaaccttgtcaagattgatcaactaggatcatatgtcggtggcagggaacttgtagatattattggtgtggttcagagcgtatctcccacactcagtgtcaggagaaagattgacaacgagacaataccgaagcgtgacattgttgtggcggatgactctggcaaaactgttagtatctctctttggaatgatcttactactacgactgggcaagagcttttggacatggctgacagttcgcctgttgttgcgataaagagcctaaaagtgtctgacttccaaggcgtgtctctttctactgtaggcaaaagtactcttgcgattaatcctgatctacacgaggctcagaatcttaagtcatggtatgactctgaaggcaaagatacttcgctggcaccaattggtgcagaaatgggtgccgcacgggccggtggcttcaagtccacgtattctgatagagtttttctgtctcacattactagtgatcctgccatgggccaggaaaagcctgttttcttcagtttgtatgccaccataagccacatcaagcctgaccagaacatgtggtaccgtgcttgcaagacctgcaacaagaaggtgactgaaacttttggatctggatactggtgtgagggatgccaaaagaatgactcggaatgctcactgagatacatcatggtcatcaaggtttccgatcctactggcgaagcatgggtctctgtgttcaacgagcatgcagagaagatcattggctgcagcgccgacgagcttgatcggatcaggaaagaggagggggacgacagttatgttctgaagctcaaggaagccacctgggttcctcacctgttccgcgtcagcgtcacacagcatgaatacaataacgagaaaaggcagagaatcactgtgaggagtgaagcgccggtcgagcacgcagctgaatccaagtacctgcttgaacagatagcgaagcttactgcttgctagtagaagatgcaacctttctggtggttcgttaagggctgccctccgagatgtttcctctgggttttagcacttctgtaagatatatgtagaggtttggttaccttgatgtcaagcaacagatgctaggacagttcaagcatgatgcatgaagcctttgccgaattgcagtttcagttccctcattccgtgccaatgcaactttgttgagcaaatagcgagaattattaggactaattgatggtgtcaggtcattgcggccctaagctttagctctgtatcagcagtcagatgtattaaccattccctgctctaatagtcatctatcagcagtcagatgtatttaaccattccctgcttaatagctctctaccaggagtcggaagtttttaaccattccctgctcc

SEQ ID NO: 37110 - protein, 618 aa, Zea mays subsp. mays
  peptide (1)..(618): Ceres Seq. ID no. 15179436
  misc_feature (187)..(271): Pfam Name: Pfam Description:  OB-fold nucleic acid binding domain
  misc_feature (2)..(618): NCBI GI NO: 7440032 NR Description: probable replication protein A1 - rice
  misc_feature (2)..(618): NCBI GI NO: 31580977 NR Description: replication protein A 70b
  misc_feature (7)..(614): NCBI GI NO: 15241489 NR Description: replication protein, putative
  misc_feature (7)..(613): NCBI GI NO: 15239494 NR Description: replication protein, putative
  misc_feature (161)..(614): NCBI GI NO: 15225129 NR Description: replication protein, putative
  misc_feature (24)..(108): NCBI GI NO: 15225129 NR Description: replication protein, putative
  misc_feature (161)..(615): NCBI GI NO: 15242405 NR Description: replication protein, putative
  misc_feature (28)..(108): NCBI GI NO: 15242405 NR Description: replication protein, putative
  misc_feature (30)..(612): NCBI GI NO: 32404590 NR Description: hypothetical protein [Neurospora crassa]
  misc_feature (31)..(615): NCBI GI NO: 7488291 NR Description: replication protein A1 homolog T18B16
MDAAKLVTPVAVSHILAHPSAGSDGAVTDLVVQVLDLKSVGTGSRFSFTATDGKDKIKAMLPTNFGSEVRSGNLKNLGLIRIIDYTCNVVKGKDDKVLVVIKCELVCQALDAEINGEAKKEEPPIVLKPKDEWMGVTSPLAMKPKQEVKSASQIVNEQRGNTAPVKPLSMTKRVHPLITLNPYQGNWVIKVRVTSKGNLRTYRNARGEGCVFNVELTDEDGTQIQATMFNDAAKKFYPIFELGKVYYVSKGSLRIANKQFKTVQNDYEMSLNENAIVEEAEGETCIPQVQYNLVKIDQLGSYVGGRELVDIIGVVQSVSPTLSVRRKIDNETIPKRDIVVADDSGKTVSISLWNDLTTTTGQELLDMADSSPVVAIKSLKVSDFQGVSLSTVGKSTLAINPDLHEAQNLKSWYDSEGKDTSLAPIGAEMGAARAGGFKSTYSDRVFLSHITSDPAMGQEKPVFFSLYATISHIKPDQNMWYRACKTCNKKVTETFGSGYWCEGCQKNDSECSLRYIMVIKVSDPTGEAWVSVFNEHAEKIIGCSADELDRIRKEEGDDSYVLKLKEATWVPHLFRVSVTQHEYNNEKRQRITVRSEAPVEHAAESKYLLEQIAKLTAC

SEQ ID NO: 37111 - protein, 559 aa, Zea mays subsp. mays
  peptide (1)..(559): Ceres Seq. ID no. 15179437
  misc_feature (128)..(212): Pfam Name: Pfam Description:  OB-fold nucleic acid binding domain
  misc_feature (1)..(559): NCBI GI NO: 7440032 NR Description: probable replication protein A1 - rice
  misc_feature (1)..(559): NCBI GI NO: 31580977 NR Description: replication protein A 70b
  misc_feature (1)..(555): NCBI GI NO: 15241489 NR Description: replication protein, putative
  misc_feature (1)..(554): NCBI GI NO: 15239494 NR Description: replication protein, putative
  misc_feature (102)..(555): NCBI GI NO: 15225129 NR Description: replication protein, putative
  misc_feature (1)..(49): NCBI GI NO: 15225129 NR Description: replication protein, putative
  misc_feature (102)..(556): NCBI GI NO: 15242405 NR Description: replication protein, putative
  misc_feature (1)..(49): NCBI GI NO: 15242405 NR Description: replication protein, putative
  misc_feature (1)..(553): NCBI GI NO: 32404590 NR Description: hypothetical protein [Neurospora crassa]
  misc_feature (1)..(556): NCBI GI NO: 7488291 NR Description: replication protein A1 homolog T18B16
MLPTNFGSEVRSGNLKNLGLIRIIDYTCNVVKGKDDKVLVVIKCELVCQALDAEINGEAKKEEPPIVLKPKDEWMGVTSPLAMKPKQEVKSASQIVNEQRGNTAPVKPLSMTKRVHPLITLNPYQGNWVIKVRVTSKGNLRTYRNARGEGCVFNVELTDEDGTQIQATMFNDAAKKFYPIFELGKVYYVSKGSLRIANKQFKTVQNDYEMSLNENAIVEEAEGETCIPQVQYNLVKIDQLGSYVGGRELVDIIGVVQSVSPTLSVRRKIDNETIPKRDIVVADDSGKTVSISLWNDLTTTTGQELLDMADSSPVVAIKSLKVSDFQGVSLSTVGKSTLAINPDLHEAQNLKSWYDSEGKDTSLAPIGAEMGAARAGGFKSTYSDRVFLSHITSDPAMGQEKPVFFSLYATISHIKPDQNMWYRACKTCNKKVTETFGSGYWCEGCQKNDSECSLRYIMVIKVSDPTGEAWVSVFNEHAEKIIGCSADELDRIRKEEGDDSYVLKLKEATWVPHLFRVSVTQHEYNNEKRQRITVRSEAPVEHAAESKYLLEQIAKLTAC

SEQ ID NO: 37112 - protein, 485 aa, Zea mays subsp. mays
  peptide (1)..(485): Ceres Seq. ID no. 15179438
  misc_feature (54)..(138): Pfam Name: Pfam Description:  OB-fold nucleic acid binding domain
  misc_feature (1)..(485): NCBI GI NO: 7440032 NR Description: probable replication protein A1 - rice
  misc_feature (1)..(485): NCBI GI NO: 31580977 NR Description: replication protein A 70b
  misc_feature (1)..(481): NCBI GI NO: 15241489 NR Description: replication protein, putative
  misc_feature (1)..(480): NCBI GI NO: 15239494 NR Description: replication protein, putative
  misc_feature (28)..(481): NCBI GI NO: 15225129 NR Description: replication protein, putative
  misc_feature (28)..(482): NCBI GI NO: 15242405 NR Description: replication protein, putative
  misc_feature (1)..(479): NCBI GI NO: 32404590 NR Description: hypothetical protein [Neurospora crassa]
  misc_feature (1)..(482): NCBI GI NO: 7488291 NR Description: replication protein A1 homolog T18B16
  misc_feature (1)..(482): NCBI GI NO: 400975 NR Description: REPLICATION PROTEIN A 70 KD DNA-BINDING SUBUNIT
  misc_feature (1)..(481): NCBI GI NO: 34872759 NR Description: similar to replication protein A1
MGVTSPLAMKPKQEVKSASQIVNEQRGNTAPVKPLSMTKRVHPLITLNPYQGNWVIKVRVTSKGNLRTYRNARGEGCVFNVELTDEDGTQIQATMFNDAAKKFYPIFELGKVYYVSKGSLRIANKQFKTVQNDYEMSLNENAIVEEAEGETCIPQVQYNLVKIDQLGSYVGGRELVDIIGVVQSVSPTLSVRRKIDNETIPKRDIVVADDSGKTVSISLWNDLTTTTGQELLDMADSSPVVAIKSLKVSDFQGVSLSTVGKSTLAINPDLHEAQNLKSWYDSEGKDTSLAPIGAEMGAARAGGFKSTYSDRVFLSHITSDPAMGQEKPVFFSLYATISHIKPDQNMWYRACKTCNKKVTETFGSGYWCEGCQKNDSECSLRYIMVIKVSDPTGEAWVSVFNEHAEKIIGCSADELDRIRKEEGDDSYVLKLKEATWVPHLFRVSVTQHEYNNEKRQRITVRSEAPVEHAAESKYLLEQIAKLTAC

SEQ ID NO: 37113 - DNA, 2171 bp, Zea mays subsp. mays
  misc_feature (1)..(2171): Ceres Seq. ID no. 15179408
ataaataccactcctgcgattccaccttgcagttggaccggccgttgttgctttgcttcttcgcaaaaaaaaaacaaaaaaacaaaataggcctgtcttgctccgatcaggcgtgttcttaggcttcgctgcccctaccgcgtcttcgccgggatcggtccatggccggcgccgagcgcgcggaggcggtcgcgctggaacaagggctcctcgatccggaggaatccaaccaagtagtatacactggagatggatcagtcgacttttctggaaatcctgttgtcaaggaaagaacgggtagatggaaggcatgtccattcatattaggtaatgaatgctgtgaacgactggcctactatggcatctccacaaaccttgttacttacttgacaaaaaaactgcatgctggcaatgcctctgctgctagcagtgtgactacatggtcgggaacttgctacctaactccacttattggagcaatcctggctgatgcatactgggggaggtactggacaatcgcaacattttccacagtatacttcatcgggatgacactgctgactctttcagcatcagttcctatgctcatgcctccatcttgtgaaggatccttttgcccagcagcaagcccttttcagtatactgtcttttttcttggtctttatctgattgccctgggtactggtggaattaagccgtgtgtctcatcctttggagcggatcaatttgatgatacagatccagctgagcgaatccagaagggctctttcttcaattggttttatttttcaataaacattggtgctctcatatcaagcagctttctggtttgggtgcaagacaatgtaggatggggactggggtttggcattccgactgtattcatggggctggcaatcataagcttcttctctggtacatcactttataggttccaaaaaccaggaggtagtccaattacacgagtatgtcaggtgattgttgcctctttgcgcaagtggaatgtgcctgtcccagaggatagctctctcttgtatgagctacctaatggggtatcaacaattgaggggagtcggcaaatagagcacacagatgaactcagatgtttagataaggctgctacagttaccgaagttgatgtgaaaacggctgacttcaacaacccatggcggatatgcactgtcacccaggtggaagaactgaagatactagtaaggatgttccctgtctgggcaacaacaatagtgttttctgctgtatatgctcagatgtcaacaatgtttgtggaacaagggatggtgcttgacccatccttgggctctttcaagatccctccagcttcactatctactttcgacaccctaagtgtcatcatatgtgtcccgatgtatgattacatcgtggttccgatagccaggagattcactggcaacgagaggggctttacagagttgcagaggatgggtattggcctggtaatttccatcatggctatgtcagtcgccgcagtcctcgaaatcaagcggctagcagttgccagggaagcacacctggtggatcagaatgtcccggtcccactgagcatattctggcaaatccctcagtatttcctgattggtctagcggagattttcacattcattggggcgctcgagttcttctatgaccagtcaccagacgccatgaggagcctctgcagcgcgcttaatcttctcactactgcgtttgggaactatctcagcacgttcattttgacaatggttgcgtactttactacgaggggaggtaaccctgggtggattcctgacaacttgaacgaaggccatcttgattacttcttcttgctcatcgctggcatcagttttctgaacctgattgtttatgtcctctgtgctggcaaatacaagagcaagaaggcagcttgagttgtgaaggccaggggctggatggcgtgctgcgcgccatgttatggtggacacttcagttcaaaatctgtatatatgtttcccgcattaaccaccctagctgaagcaaccatctgcaattgttgcaaagtttatattcttcattgtgctggactaagttgattatacattcgtgcttctactttgtgtatgtatatatctgacctaaagttgctgaacatagacaatttcacttgccaaaaaaat

SEQ ID NO: 37114 - protein, 587 aa, Zea mays subsp. mays
  peptide (1)..(587): Ceres Seq. ID no. 15179409
  misc_feature (116)..(520): Pfam Name: Pfam Description:  POT family
  misc_feature (4)..(587): NCBI GI NO: 15076661 NR Description: peptide transporter
  misc_feature (15)..(587): NCBI GI NO: 4102839 NR Description: LeOPT1 [Lycopersicon esculentum]
  misc_feature (3)..(587): NCBI GI NO: 31088360 NR Description: peptide transporter 1 [Vicia faba]
  misc_feature (3)..(559): NCBI GI NO: 6635838 NR Description: amino acid/peptide transporter [Prunus dulcis]
  misc_feature (1)..(587): NCBI GI NO: 15226861 NR Description: histidine transport protein (PTR2-B)
  misc_feature (1)..(587): NCBI GI NO: 1076331 NR Description: histidine transport protein - Arabidopsis thaliana
  misc_feature (12)..(586): NCBI GI NO: 30696666 NR Description: oligopeptide transporter -related
  misc_feature (28)..(586): NCBI GI NO: 25404366 NR Description: hypothetical protein F19K23.13
  misc_feature (26)..(586): NCBI GI NO: 15232435 NR Description: peptide transport - like protein
  misc_feature (21)..(585): NCBI GI NO: 15240905 NR Description: oligopeptide transporter - like protein
MAGAERAEAVALEQGLLDPEESNQVVYTGDGSVDFSGNPVVKERTGRWKACPFILGNECCERLAYYGISTNLVTYLTKKLHAGNASAASSVTTWSGTCYLTPLIGAILADAYWGRYWTIATFSTVYFIGMTLLTLSASVPMLMPPSCEGSFCPAASPFQYTVFFLGLYLIALGTGGIKPCVSSFGADQFDDTDPAERIQKGSFFNWFYFSINIGALISSSFLVWVQDNVGWGLGFGIPTVFMGLAIISFFSGTSLYRFQKPGGSPITRVCQVIVASLRKWNVPVPEDSSLLYELPNGVSTIEGSRQIEHTDELRCLDKAATVTEVDVKTADFNNPWRICTVTQVEELKILVRMFPVWATTIVFSAVYAQMSTMFVEQGMVLDPSLGSFKIPPASLSTFDTLSVIICVPMYDYIVVPIARRFTGNERGFTELQRMGIGLVISIMAMSVAAVLEIKRLAVAREAHLVDQNVPVPLSIFWQIPQYFLIGLAEIFTFIGALEFFYDQSPDAMRSLCSALNLLTTAFGNYLSTFILTMVAYFTTRGGNPGWIPDNLNEGHLDYFFLLIAGISFLNLIVYVLCAGKYKSKKAA

SEQ ID NO: 37115 - protein, 458 aa, Zea mays subsp. mays
  peptide (1)..(458): Ceres Seq. ID no. 15179410
  misc_feature (1)..(391): Pfam Name: Pfam Description:  POT family
  misc_feature (1)..(458): NCBI GI NO: 15076661 NR Description: peptide transporter
  misc_feature (1)..(458): NCBI GI NO: 4102839 NR Description: LeOPT1 [Lycopersicon esculentum]
  misc_feature (1)..(458): NCBI GI NO: 31088360 NR Description: peptide transporter 1 [Vicia faba]
  misc_feature (1)..(430): NCBI GI NO: 6635838 NR Description: amino acid/peptide transporter [Prunus dulcis]
  misc_feature (1)..(458): NCBI GI NO: 15226861 NR Description: histidine transport protein (PTR2-B)
  misc_feature (1)..(458): NCBI GI NO: 1076331 NR Description: histidine transport protein - Arabidopsis thaliana
  misc_feature (1)..(457): NCBI GI NO: 30696666 NR Description: oligopeptide transporter -related
  misc_feature (1)..(457): NCBI GI NO: 25404366 NR Description: hypothetical protein F19K23.13
  misc_feature (1)..(457): NCBI GI NO: 15232435 NR Description: peptide transport - like protein
  misc_feature (1)..(456): NCBI GI NO: 15240905 NR Description: oligopeptide transporter - like protein
MTLLTLSASVPMLMPPSCEGSFCPAASPFQYTVFFLGLYLIALGTGGIKPCVSSFGADQFDDTDPAERIQKGSFFNWFYFSINIGALISSSFLVWVQDNVGWGLGFGIPTVFMGLAIISFFSGTSLYRFQKPGGSPITRVCQVIVASLRKWNVPVPEDSSLLYELPNGVSTIEGSRQIEHTDELRCLDKAATVTEVDVKTADFNNPWRICTVTQVEELKILVRMFPVWATTIVFSAVYAQMSTMFVEQGMVLDPSLGSFKIPPASLSTFDTLSVIICVPMYDYIVVPIARRFTGNERGFTELQRMGIGLVISIMAMSVAAVLEIKRLAVAREAHLVDQNVPVPLSIFWQIPQYFLIGLAEIFTFIGALEFFYDQSPDAMRSLCSALNLLTTAFGNYLSTFILTMVAYFTTRGGNPGWIPDNLNEGHLDYFFLLIAGISFLNLIVYVLCAGKYKSKKAA

SEQ ID NO: 37116 - protein, 447 aa, Zea mays subsp. mays
  peptide (1)..(447): Ceres Seq. ID no. 15179411
  misc_feature (1)..(380): Pfam Name: Pfam Description:  POT family
  misc_feature (1)..(447): NCBI GI NO: 15076661 NR Description: peptide transporter
  misc_feature (1)..(447): NCBI GI NO: 4102839 NR Description: LeOPT1 [Lycopersicon esculentum]
  misc_feature (1)..(447): NCBI GI NO: 31088360 NR Description: peptide transporter 1 [Vicia faba]
  misc_feature (1)..(419): NCBI GI NO: 6635838 NR Description: amino acid/peptide transporter [Prunus dulcis]
  misc_feature (1)..(447): NCBI GI NO: 15226861 NR Description: histidine transport protein (PTR2-B)
  misc_feature (1)..(447): NCBI GI NO: 1076331 NR Description: histidine transport protein - Arabidopsis thaliana
  misc_feature (1)..(446): NCBI GI NO: 30696666 NR Description: oligopeptide transporter -related
  misc_feature (1)..(446): NCBI GI NO: 25404366 NR Description: hypothetical protein F19K23.13
  misc_feature (1)..(446): NCBI GI NO: 15232435 NR Description: peptide transport - like protein
  misc_feature (1)..(445): NCBI GI NO: 15240905 NR Description: oligopeptide transporter - like protein
MLMPPSCEGSFCPAASPFQYTVFFLGLYLIALGTGGIKPCVSSFGADQFDDTDPAERIQKGSFFNWFYFSINIGALISSSFLVWVQDNVGWGLGFGIPTVFMGLAIISFFSGTSLYRFQKPGGSPITRVCQVIVASLRKWNVPVPEDSSLLYELPNGVSTIEGSRQIEHTDELRCLDKAATVTEVDVKTADFNNPWRICTVTQVEELKILVRMFPVWATTIVFSAVYAQMSTMFVEQGMVLDPSLGSFKIPPASLSTFDTLSVIICVPMYDYIVVPIARRFTGNERGFTELQRMGIGLVISIMAMSVAAVLEIKRLAVAREAHLVDQNVPVPLSIFWQIPQYFLIGLAEIFTFIGALEFFYDQSPDAMRSLCSALNLLTTAFGNYLSTFILTMVAYFTTRGGNPGWIPDNLNEGHLDYFFLLIAGISFLNLIVYVLCAGKYKSKKAA

SEQ ID NO: 37117 - DNA, 2013 bp, Zea mays subsp. mays
  misc_feature (1)..(2013): Ceres Seq. ID no. 12417337
gcacgagaccattacctagaacatcctaatcgaaaacttcagtaatcagtgctcgctagcccaccacgccctgaacctagcccggacaccagccagaacaggccatgtccatgggctccccggtgcagctcaggcggctgaagcctctgtaccagttcgtggtgaacaacatcctggccatcgtggccgtgccgctcgccaccgcggtcctgctcaaggcgtcgtcgctcgggcccgaggagatcctggcgctccggccggcgcacctgttcctggccgcgttcctgcctgccgcggccacggtgctgtacctgatgctccggccgcgcacggtgtacctggtggactacgcgtgcttccgcaccagccccaactgccgcgtcccgttcgcgacgttcctggagcactcccgcgtgtggccgggcttcgacgagcgcagcgtccggttcatgacgcgcctgctggagcggtcggggctcggggaggagacgtgcctgccgtacgcgcagcactacatcccgccgtcgcgcgacctggagtcctcccgcgccgaggccgagctcgtcatcttctcggccatcgacgacctgctcgccaagaccggggtctccccgcgggacatcgacatcctggtggtgaactgcagcctgttcgcgccgacgccgtccttcgcggacatggtcacgcaccggtacaggctccgcggggacgtgcgcaacgtgcacctcgccgggatggggtgcagcgcggggctcgtctccgtggagctggcccggaacctgctgcaggtggcgccgcggggcacgcgcgctctggtggtgtccacggagaccatcacccccaattactacatgggcgaggagcgcgcgatgctgctgcccaactgcctgttccgcatgggcggcgcggcggcgctgctgtccaccgacggcgccggcgcgcggttccgcctggcgcgcgtggtgcgcacgctgcgcggcgcgtcggacggcgcgtaccgctgcgtgtaccaggaggaggacgagcgcggcaacgtgggcatcaacctgtccaaggacctgatgagcatccgcgggcgacgcgctgaaggcgaacatcacggcgatggggcccctggtgctgccggcgtcggagcagctgctgttcgcgctgtccttcatcgcgcgcaaggtgctgaacaaccggatcaggccctacatcccggacttccgcacggcgttcgagcacttctgcatccacgcgggcgggcgcgccgtgatcgacgagctccagcgcagcctgacgctgtcggacgagcaggtggaggcgtcgcggatgacgctgcaccggttcggcaacacctccagcagctccctctggtacgagctcgcctacgtcgaggccaagggccgcatgcgcaggggagaccgcgtctggatgatcggcttcggctccggtttcaagtgcaacagcgccgcctgggagtgcatccgccccgccgccaacgccgacgggccgtgggccaactgcatccaccggtaccccgtgcacattcccgacgtgctcaagcactgagcccggcgccagctccagttccgtgccgtgccttgcctttcccttttcctcctcgcccggttgccattgcacctgctgctacatttggtttgtggacatcaaaacgaaccgctggaacagcgattggccgtggtcgtgaactaggttggtggaatatgtgatggagagtgacagagtacttgtcgtgtcgtatcaaggcggcggggtggtcgtcataaaggaggcgaggtcgggccaggctgccgtacatgggcgcccggggaacggacgtgtgttgtgcttgtccggggcgttgtattatctaccattttcctatttcttattacaattcattcctgcagtataccatgaaaagagatatgacatgagctagagctactagtagacgacaagacgagcaaaagctttgatgtatgtgtgcacctactctttatacaatcaagtgttctcatttaagtg

SEQ ID NO: 37118 - protein, 536 aa, Zea mays subsp. mays
  peptide (1)..(536): Ceres Seq. ID no. 12417338
  misc_feature (116)..(272): Pfam Name: Pfam Description:  Chalcone and stilbene synthases
  misc_feature (1)..(324): NCBI GI NO: 17979464 NR Description: At1g68530/T26J14_10 [Arabidopsis thaliana]
  misc_feature (5)..(324): NCBI GI NO: 21618184 NR Description: fatty acid condensing enzyme CUT1, putative
  misc_feature (1)..(324): NCBI GI NO: 15221431 NR Description: very-long-chain fatty acid condensing enzyme
  misc_feature (5)..(324): NCBI GI NO: 15222592 NR Description: fatty acid condensing enzyme CUT1, putative
  misc_feature (5)..(324): NCBI GI NO: 21593111 NR Description: very-long-chain fatty acid condensing enzyme CUT1
  misc_feature (5)..(324): NCBI GI NO: 28393607 NR Description: putative fatty acid condensing enzyme CUT1
  misc_feature (12)..(324): NCBI GI NO: 34913436 NR Description: putative fatty acid condensing enzyme CUT1
  misc_feature (7)..(324): NCBI GI NO: 15223556 NR Description: very-long-chain fatty acid condensing enzyme CUT1
  misc_feature (7)..(324): NCBI GI NO: 15226724 NR Description: putative beta-ketoacyl-CoA synthase
  misc_feature (4)..(324): NCBI GI NO: 15236133 NR Description: putative ketoacyl-CoA synthase
MSMGSPVQLRRLKPLYQFVVNNILAIVAVPLATAVLLKASSLGPEEILALRPAHLFLAAFLPAAATVLYLMLRPRTVYLVDYACFRTSPNCRVPFATFLEHSRVWPGFDERSVRFMTRLLERSGLGEETCLPYAQHYIPPSRDLESSRAEAELVIFSAIDDLLAKTGVSPRDIDILVVNCSLFAPTPSFADMVTHRYRLRGDVRNVHLAGMGCSAGLVSVELARNLLQVAPRGTRALVVSTETITPNYYMGEERAMLLPNCLFRMGGAAALLSTDGAGARFRLARVVRTLRGASDGAYRCVYQEEDERGNVGINLSKDLMSIRGRRAEGEHHGDGAPGAAGVGAAAVRAVLHRAQGAEQPDQALHPGLPHGVRALLHPRGRARRDRRAPAQPDAVGRAGGGVADDAAPVRQHLQQLPLVRARLRRGQGPHAQGRPRLDDRLRLRFQVQQRRLGVHPPRRQRRRAVGQLHPPVPRAHSRRAQALSPAPAPVPCRALPFPFPPRPVAIAPAATFGLWTSKRTAGTAIGRGRELGWWNM

SEQ ID NO: 37119 - protein, 534 aa, Zea mays subsp. mays
  peptide (1)..(534): Ceres Seq. ID no. 12417339
  misc_feature (114)..(270): Pfam Name: Pfam Description:  Chalcone and stilbene synthases
  misc_feature (1)..(322): NCBI GI NO: 17979464 NR Description: At1g68530/T26J14_10 [Arabidopsis thaliana]
  misc_feature (3)..(322): NCBI GI NO: 21618184 NR Description: fatty acid condensing enzyme CUT1, putative
  misc_feature (1)..(322): NCBI GI NO: 15221431 NR Description: very-long-chain fatty acid condensing enzyme
  misc_feature (3)..(322): NCBI GI NO: 15222592 NR Description: fatty acid condensing enzyme CUT1, putative
  misc_feature (3)..(322): NCBI GI NO: 21593111 NR Description: very-long-chain fatty acid condensing enzyme CUT1
  misc_feature (3)..(322): NCBI GI NO: 28393607 NR Description: putative fatty acid condensing enzyme CUT1
  misc_feature (10)..(322): NCBI GI NO: 34913436 NR Description: putative fatty acid condensing enzyme CUT1
  misc_feature (5)..(322): NCBI GI NO: 15223556 NR Description: very-long-chain fatty acid condensing enzyme CUT1
  misc_feature (5)..(322): NCBI GI NO: 15226724 NR Description: putative beta-ketoacyl-CoA synthase
  misc_feature (2)..(322): NCBI GI NO: 15236133 NR Description: putative ketoacyl-CoA synthase
MGSPVQLRRLKPLYQFVVNNILAIVAVPLATAVLLKASSLGPEEILALRPAHLFLAAFLPAAATVLYLMLRPRTVYLVDYACFRTSPNCRVPFATFLEHSRVWPGFDERSVRFMTRLLERSGLGEETCLPYAQHYIPPSRDLESSRAEAELVIFSAIDDLLAKTGVSPRDIDILVVNCSLFAPTPSFADMVTHRYRLRGDVRNVHLAGMGCSAGLVSVELARNLLQVAPRGTRALVVSTETITPNYYMGEERAMLLPNCLFRMGGAAALLSTDGAGARFRLARVVRTLRGASDGAYRCVYQEEDERGNVGINLSKDLMSIRGRRAEGEHHGDGAPGAAGVGAAAVRAVLHRAQGAEQPDQALHPGLPHGVRALLHPRGRARRDRRAPAQPDAVGRAGGGVADDAAPVRQHLQQLPLVRARLRRGQGPHAQGRPRLDDRLRLRFQVQQRRLGVHPPRRQRRRAVGQLHPPVPRAHSRRAQALSPAPAPVPCRALPFPFPPRPVAIAPAATFGLWTSKRTAGTAIGRGRELGWWNM

SEQ ID NO: 37120 - protein, 466 aa, Zea mays subsp. mays
  peptide (1)..(466): Ceres Seq. ID no. 12417340
  misc_feature (46)..(202): Pfam Name: Pfam Description:  Chalcone and stilbene synthases
  misc_feature (1)..(254): NCBI GI NO: 17979464 NR Description: At1g68530/T26J14_10 [Arabidopsis thaliana]
  misc_feature (1)..(254): NCBI GI NO: 21618184 NR Description: fatty acid condensing enzyme CUT1, putative
  misc_feature (1)..(254): NCBI GI NO: 15221431 NR Description: very-long-chain fatty acid condensing enzyme
  misc_feature (1)..(254): NCBI GI NO: 15222592 NR Description: fatty acid condensing enzyme CUT1, putative
  misc_feature (1)..(254): NCBI GI NO: 21593111 NR Description: very-long-chain fatty acid condensing enzyme CUT1
  misc_feature (1)..(254): NCBI GI NO: 28393607 NR Description: putative fatty acid condensing enzyme CUT1
  misc_feature (1)..(254): NCBI GI NO: 34913436 NR Description: putative fatty acid condensing enzyme CUT1
  misc_feature (1)..(254): NCBI GI NO: 15223556 NR Description: very-long-chain fatty acid condensing enzyme CUT1
  misc_feature (1)..(254): NCBI GI NO: 15226724 NR Description: putative beta-ketoacyl-CoA synthase
  misc_feature (1)..(254): NCBI GI NO: 15236133 NR Description: putative ketoacyl-CoA synthase
MLRPRTVYLVDYACFRTSPNCRVPFATFLEHSRVWPGFDERSVRFMTRLLERSGLGEETCLPYAQHYIPPSRDLESSRAEAELVIFSAIDDLLAKTGVSPRDIDILVVNCSLFAPTPSFADMVTHRYRLRGDVRNVHLAGMGCSAGLVSVELARNLLQVAPRGTRALVVSTETITPNYYMGEERAMLLPNCLFRMGGAAALLSTDGAGARFRLARVVRTLRGASDGAYRCVYQEEDERGNVGINLSKDLMSIRGRRAEGEHHGDGAPGAAGVGAAAVRAVLHRAQGAEQPDQALHPGLPHGVRALLHPRGRARRDRRAPAQPDAVGRAGGGVADDAAPVRQHLQQLPLVRARLRRGQGPHAQGRPRLDDRLRLRFQVQQRRLGVHPPRRQRRRAVGQLHPPVPRAHSRRAQALSPAPAPVPCRALPFPFPPRPVAIAPAATFGLWTSKRTAGTAIGRGRELGWWNM

SEQ ID NO: 37121 - DNA, 1958 bp, Zea mays subsp. mays; identical to SEQ ID NO: 29904
  misc_feature (1)..(1958): Ceres Seq. ID no. 13636500
  misc_feature (208)..(208): n is a, c, t, g, unknown, or other
  misc_feature (247)..(247): n is a, c, t, g, unknown, or other

SEQ ID NO: 37122 - protein, 427 aa, Zea mays subsp. mays; identical to SEQ ID NO: 29905
  peptide (1)..(427): Ceres Seq. ID no. 13636501
  misc_feature (1)..(188): NCBI GI NO: 27819499 NR Description: putative arabinogalactan-protein
  misc_feature (11)..(274): NCBI GI NO: 33146739 NR Description: GPI-anchored protein -like
  misc_feature (11)..(274): NCBI GI NO: 34899886 NR Description: OJ1714_H10.26
  misc_feature (1)..(274): NCBI GI NO: 15240029 NR Description: expressed protein [Arabidopsis thaliana]
  misc_feature (48)..(272): NCBI GI NO: 25370583 NR Description: hypothetical protein At2g35860
  misc_feature (48)..(272): NCBI GI NO: 30686588 NR Description: expressed protein [Arabidopsis thaliana]
  misc_feature (35)..(279): NCBI GI NO: 6041822 NR Description: unknown protein [Arabidopsis thaliana]
  misc_feature (35)..(279): NCBI GI NO: 18399319 NR Description: expressed protein [Arabidopsis thaliana]
  misc_feature (48)..(274): NCBI GI NO: 15231197 NR Description: predicted GPI-anchored protein
  misc_feature (200)..(427): NCBI GI NO: 23018055 NR Description: hypothetical protein [Thermobifida fusca]
  misc_feature (29)..(29): Xaa is any aa, unknown or other
  misc_feature (42)..(42): Xaa is any aa, unknown or other

SEQ ID NO: 37123 - protein, 382 aa, Zea mays subsp. mays; identical to SEQ ID NO: 29906
  peptide (1)..(382): Ceres Seq. ID no. 13636502
  misc_feature (299)..(382): Pfam Name: Pfam Description:  Equine herpesvirus glycoprotein gp2
  misc_feature (13)..(382): NCBI GI NO: 29247944 NR Description: GLP_26_54603_52153 [Giardia lamblia ATCC 50803]
  misc_feature (164)..(382): NCBI GI NO: 39592411 NR Description: Hypothetical protein CBG07956
  misc_feature (115)..(382): NCBI GI NO: 25143299 NR Description: pre-mRNA splicing SR protein related RSR-1 (68
  misc_feature (2)..(382): NCBI GI NO: 30424862 NR Description: RIKEN cDNA 5033413A03 [Mus musculus]
  misc_feature (3)..(382): NCBI GI NO: 11360494 NR Description: antifreeze glycopeptide AFGP polyprotein precursor
  misc_feature (261)..(382): NCBI GI NO: 6322209 NR Description: Required for invasion and pseudohyphae formation inresponse to nitrogen starvation
  misc_feature (164)..(382): NCBI GI NO: 11360318 NR Description: probable mucin DKFZp434C196.1 - human (fragment)
  misc_feature (15)..(382): NCBI GI NO: 5821145 NR Description: RNA binding protein [Homo sapiens]
  misc_feature (15)..(382): NCBI GI NO: 5821143 NR Description: RNA binding protein [Homo sapiens]
  misc_feature (220)..(382): NCBI GI NO: 28574039 NR Description: Salivary gland secretion 1 CG3047-PA
  misc_feature (70)..(70): Xaa is any aa, unknown or other
  misc_feature (83)..(83): Xaa is any aa, unknown or other

SEQ ID NO: 37124 - protein, 269 aa, Zea mays subsp. mays; identical to SEQ ID NO: 29907
  peptide (1)..(269): Ceres Seq. ID no. 13636503
  misc_feature (1)..(30): NCBI GI NO: 27819499 NR Description: putative arabinogalactan-protein
  misc_feature (1)..(116): NCBI GI NO: 33146739 NR Description: GPI-anchored protein -like
  misc_feature (1)..(116): NCBI GI NO: 34899886 NR Description: OJ1714_H10.26
  misc_feature (1)..(116): NCBI GI NO: 15240029 NR Description: expressed protein [Arabidopsis thaliana]
  misc_feature (1)..(114): NCBI GI NO: 25370583 NR Description: hypothetical protein At2g35860
  misc_feature (1)..(114): NCBI GI NO: 30686588 NR Description: expressed protein [Arabidopsis thaliana]
  misc_feature (1)..(121): NCBI GI NO: 6041822 NR Description: unknown protein [Arabidopsis thaliana]
  misc_feature (1)..(121): NCBI GI NO: 18399319 NR Description: expressed protein [Arabidopsis thaliana]
  misc_feature (1)..(116): NCBI GI NO: 15231197 NR Description: predicted GPI-anchored protein
  misc_feature (42)..(269): NCBI GI NO: 23018055 NR Description: hypothetical protein [Thermobifida fusca]

SEQ ID NO: 37125 - DNA, 455 bp, Zea mays subsp. mays
  misc_feature (1)..(455): Ceres Seq. ID no. 7113127
gaacaaaaaccttttgattccaattgttcttctctcttcttcttcttcttcttcttcttcttcttcgccgcttcttctctctcgaattcaccccatctcaagtgtacgttagcctcctccctctaatggcgactcgtcttcagtttgagaacaactgcgaagttggtgtcttttccaaactcactaatgcctattgcttagtcgctataggaggctctgagaacttttacagtgcttttgagtcggagttagcagatgttatccctattgttaagacctctattggaggaacacgaattattgggcgtctttgtgctggaaacaagaatgggcttcttgtacctcatacaacaactgaccaagagcttcaacacttaaggaacagtctacctgatcaagttgtggtccagcgaattgatgaacgtctgtctgctcttggaaattgcattgcctgc

SEQ ID NO: 37126 - protein, 110 aa, Zea mays subsp. mays
  peptide (1)..(110): Ceres Seq. ID no. 7113128
  misc_feature (3)..(109): Pfam Name: Pfam Description:  eIF-6 family
  misc_feature (1)..(109): NCBI GI NO: 15228161 NR Description: eukaryotic translation initiation factor 6
  misc_feature (1)..(109): NCBI GI NO: 27261099 NR Description: putative eukaryotic translation initiation factor 6
  misc_feature (1)..(109): NCBI GI NO: 6016330 NR Description: EUKARYOTIC TRANSLATION INITIATION FACTOR 6 (EIF-6)
  misc_feature (1)..(109): NCBI GI NO: 34903364 NR Description: unnamed protein product
  misc_feature (1)..(109): NCBI GI NO: 6325273 NR Description: similar to human translation initiation factor 6
  misc_feature (1)..(109): NCBI GI NO: 11513605 NR Description: Chain A, Crystal Structure Of S.Cerevisiae Eif6
  misc_feature (1)..(109): NCBI GI NO: 31242655 NR Description: ENSANGP00000017466 [Anopheles gambiae]
  misc_feature (1)..(109): NCBI GI NO: 27501448 NR Description: integrin beta 4 binding protein [Mus musculus]
  misc_feature (1)..(109): NCBI GI NO: 6381991 NR Description: b4 integrin interactor homolog [Mus musculus]
  misc_feature (1)..(109): NCBI GI NO: 4504771 NR Description: integrin beta 4 binding protein
MATRLQFENNCEVGVFSKLTNAYCLVAIGGSENFYSAFESELADVIPIVKTSIGGTRIIGRLCAGNKNGLLVPHTTTDQELQHLRNSLPDQVVVQRIDERLSALGNCIAC

SEQ ID NO: 37127 - DNA, 1080 bp, Zea mays subsp. mays
  misc_feature (1)..(1080): Ceres Seq. ID no. 13600524
atttctcaaacaagagcagattccattacatatgatgttaaagttcagatgattgaaatatacaatgagcaagagggatttattaatgactgatggtgcaaacaaaagattagagatacgcaataattctcatgtaaatggactcaacatcccagatgccaatattgtgccagtcaagtgcgcacaagatgttttggatctgatgaaagttggccagagaaaccgagcagttggatcaactgctcttaatgaacgaagtagccgctcacacagtgtgttgacagctcatgtacaaggaaaggaggtaatttcaggctcaactctaagagggtgtcttcatctagtggatctcgcgggaagtgagagggtagacaaatctgaagcgactggagaaagactaactgaagccaagcacataaacaaatctctgtcagcacttggtgatgttatatctgcacttgcccaaaagagttcccatgttccatatagaaatagcaagtttacacaagtgctgcaggatgccttaggtggtcaagcaaaaacattgatgtttgtgcatgtgaaccctgaaacagactcttttagtgaaacaatgagcactctcaaattcgctgagcgtgtagctacaatagaacttggtgccgcccgtgcaaacaaggaagcaggccaggtcaaagacctaaaggaagagatcgccaagcttaaattggcattagatgaaaaggaaaatgaagtggcacagtttaaagatcttgctaaccgtgtgacttctgagatgagaaatgcaagaacaagatcacctttaaccgccagcatgtccttgaaacctgaagtcagtcaagaatccagtgtagacacctgtacaagtgagataagaagttcatcatctggcaagcaaagaaggttccgttcaccgttgtcagtgagagagctagacgataagtcacctgtcatcagcagggaactgtacctgagtgcgcgaaagtacaagactccctctcctccggttagaagctcactctctgtcgagagaggcagctttgccaaaatcgtggagaacactggaagcatcgactgcac

SEQ ID NO: 37128 - protein, 338 aa, Zea mays subsp. mays
  peptide (1)..(338): Ceres Seq. ID no. 13600525
  misc_feature (17)..(337): NCBI GI NO: 38606523 NR Description: OSJNBa0016O02.10
  misc_feature (1)..(328): NCBI GI NO: 18201934 NR Description: kinesin-like protein heavy chain
  misc_feature (1)..(328): NCBI GI NO: 30692267 NR Description: kinesin-related protein [Arabidopsis thaliana]
  misc_feature (1)..(267): NCBI GI NO: 28393382 NR Description: putative kinesin [Arabidopsis thaliana]
  misc_feature (29)..(307): NCBI GI NO: 2392771 NR Description: putative kinesin-like protein
  misc_feature (1)..(300): NCBI GI NO: 18421069 NR Description: kinesin-related protein [Arabidopsis thaliana]
  misc_feature (1)..(300): NCBI GI NO: 11358474 NR Description: kinesin-like heavy chain
  misc_feature (3)..(267): NCBI GI NO: 7487566 NR Description: probable kinesin heavy chain
  misc_feature (3)..(267): NCBI GI NO: 30690701 NR Description: kinesin-related protein [Arabidopsis thaliana]
  misc_feature (1)..(267): NCBI GI NO: 15208469 NR Description: kinesin heavy chain [Zea mays]
MSKRDLLMTDGANKRLEIRNNSHVNGLNIPDANIVPVKCAQDVLDLMKVGQRNRAVGSTALNERSSRSHSVLTAHVQGKEVISGSTLRGCLHLVDLAGSERVDKSEATGERLTEAKHINKSLSALGDVISALAQKSSHVPYRNSKFTQVLQDALGGQAKTLMFVHVNPETDSFSETMSTLKFAERVATIELGAARANKEAGQVKDLKEEIAKLKLALDEKENEVAQFKDLANRVTSEMRNARTRSPLTASMSLKPEVSQESSVDTCTSEIRSSSSGKQRRFRSPLSVRELDDKSPVISRELYLSARKYKTPSPPVRSSLSVERGSFAKIVENTGSIDC

SEQ ID NO: 37129 - protein, 331 aa, Zea mays subsp. mays
  peptide (1)..(331): Ceres Seq. ID no. 13600526
  misc_feature (10)..(330): NCBI GI NO: 38606523 NR Description: OSJNBa0016O02.10
  misc_feature (1)..(321): NCBI GI NO: 18201934 NR Description: kinesin-like protein heavy chain
  misc_feature (1)..(321): NCBI GI NO: 30692267 NR Description: kinesin-related protein [Arabidopsis thaliana]
  misc_feature (1)..(260): NCBI GI NO: 28393382 NR Description: putative kinesin [Arabidopsis thaliana]
  misc_feature (22)..(300): NCBI GI NO: 2392771 NR Description: putative kinesin-like protein
  misc_feature (1)..(293): NCBI GI NO: 18421069 NR Description: kinesin-related protein [Arabidopsis thaliana]
  misc_feature (1)..(293): NCBI GI NO: 11358474 NR Description: kinesin-like heavy chain
  misc_feature (1)..(260): NCBI GI NO: 7487566 NR Description: probable kinesin heavy chain
  misc_feature (1)..(260): NCBI GI NO: 30690701 NR Description: kinesin-related protein [Arabidopsis thaliana]
  misc_feature (1)..(260): NCBI GI NO: 15208469 NR Description: kinesin heavy chain [Zea mays]
MTDGANKRLEIRNNSHVNGLNIPDANIVPVKCAQDVLDLMKVGQRNRAVGSTALNERSSRSHSVLTAHVQGKEVISGSTLRGCLHLVDLAGSERVDKSEATGERLTEAKHINKSLSALGDVISALAQKSSHVPYRNSKFTQVLQDALGGQAKTLMFVHVNPETDSFSETMSTLKFAERVATIELGAARANKEAGQVKDLKEEIAKLKLALDEKENEVAQFKDLANRVTSEMRNARTRSPLTASMSLKPEVSQESSVDTCTSEIRSSSSGKQRRFRSPLSVRELDDKSPVISRELYLSARKYKTPSPPVRSSLSVERGSFAKIVENTGSIDC

SEQ ID NO: 37130 - protein, 292 aa, Zea mays subsp. mays
  peptide (1)..(292): Ceres Seq. ID no. 13600527
  misc_feature (1)..(291): NCBI GI NO: 38606523 NR Description: OSJNBa0016O02.10
  misc_feature (1)..(282): NCBI GI NO: 18201934 NR Description: kinesin-like protein heavy chain
  misc_feature (1)..(282): NCBI GI NO: 30692267 NR Description: kinesin-related protein [Arabidopsis thaliana]
  misc_feature (1)..(221): NCBI GI NO: 28393382 NR Description: putative kinesin [Arabidopsis thaliana]
  misc_feature (1)..(261): NCBI GI NO: 2392771 NR Description: putative kinesin-like protein
  misc_feature (1)..(254): NCBI GI NO: 18421069 NR Description: kinesin-related protein [Arabidopsis thaliana]
  misc_feature (1)..(254): NCBI GI NO: 11358474 NR Description: kinesin-like heavy chain
  misc_feature (1)..(221): NCBI GI NO: 7487566 NR Description: probable kinesin heavy chain
  misc_feature (1)..(221): NCBI GI NO: 30690701 NR Description: kinesin-related protein [Arabidopsis thaliana]
  misc_feature (1)..(221): NCBI GI NO: 15208469 NR Description: kinesin heavy chain [Zea mays]
MKVGQRNRAVGSTALNERSSRSHSVLTAHVQGKEVISGSTLRGCLHLVDLAGSERVDKSEATGERLTEAKHINKSLSALGDVISALAQKSSHVPYRNSKFTQVLQDALGGQAKTLMFVHVNPETDSFSETMSTLKFAERVATIELGAARANKEAGQVKDLKEEIAKLKLALDEKENEVAQFKDLANRVTSEMRNARTRSPLTASMSLKPEVSQESSVDTCTSEIRSSSSGKQRRFRSPLSVRELDDKSPVISRELYLSARKYKTPSPPVRSSLSVERGSFAKIVENTGSIDC

SEQ ID NO: 37131 - DNA, 1222 bp, Zea mays subsp. mays; identical to SEQ ID NO: 36092
  misc_feature (1)..(1222): Ceres Seq. ID no. 13623625

SEQ ID NO: 37132 - protein, 351 aa, Zea mays subsp. mays; identical to SEQ ID NO: 36093
  peptide (1)..(351): Ceres Seq. ID no. 13623626
  misc_feature (15)..(300): Pfam Name: Hly-III / UPF0073 Pfam Description: Uncharacterised protein family
  misc_feature (1)..(300): NCBI GI NO: 20330770 NR Description: Hypothetical protein
  misc_feature (48)..(351): NCBI GI NO: 15235657 NR Description: expressed protein [Arabidopsis thaliana]
  misc_feature (48)..(340): NCBI GI NO: 15233813 NR Description: expressed protein [Arabidopsis thaliana]
  misc_feature (153)..(335): NCBI GI NO: 13272399 NR Description: hypothetical protein [Arabidopsis thaliana]
  misc_feature (153)..(335): NCBI GI NO: 18400468 NR Description: expressed protein [Arabidopsis thaliana]
  misc_feature (1)..(44): NCBI GI NO: 13272399 NR Description: hypothetical protein [Arabidopsis thaliana]
  misc_feature (1)..(44): NCBI GI NO: 18400468 NR Description: expressed protein [Arabidopsis thaliana]
  misc_feature (153)..(346): NCBI GI NO: 18377749 NR Description: unknown protein [Arabidopsis thaliana]
  misc_feature (153)..(346): NCBI GI NO: 30688829 NR Description: expressed protein [Arabidopsis thaliana]
  misc_feature (1)..(44): NCBI GI NO: 18377749 NR Description: unknown protein [Arabidopsis thaliana]

SEQ ID NO: 37133 - protein, 252 aa, Zea mays subsp. mays; identical to SEQ ID NO: 36094
  peptide (1)..(252): Ceres Seq. ID no. 13623627
  misc_feature (1)..(201): Pfam Name: Hly-III / UPF0073 Pfam Description: Uncharacterised protein family
  misc_feature (1)..(201): NCBI GI NO: 20330770 NR Description: Hypothetical protein
  misc_feature (1)..(252): NCBI GI NO: 15235657 NR Description: expressed protein [Arabidopsis thaliana]
  misc_feature (1)..(241): NCBI GI NO: 15233813 NR Description: expressed protein [Arabidopsis thaliana]
  misc_feature (54)..(236): NCBI GI NO: 13272399 NR Description: hypothetical protein [Arabidopsis thaliana]
  misc_feature (54)..(236): NCBI GI NO: 18400468 NR Description: expressed protein [Arabidopsis thaliana]
  misc_feature (54)..(247): NCBI GI NO: 18377749 NR Description: unknown protein [Arabidopsis thaliana]
  misc_feature (54)..(247): NCBI GI NO: 30688829 NR Description: expressed protein [Arabidopsis thaliana]
  misc_feature (1)..(252): NCBI GI NO: 15241302 NR Description: expressed protein [Arabidopsis thaliana]
  misc_feature (41)..(247): NCBI GI NO: 25407688 NR Description: hypothetical protein AT4g30850
  misc_feature (73)..(236): NCBI GI NO: 25309925 NR Description: hypothetical protein At2g24150

SEQ ID NO: 37134 - protein, 215 aa, Zea mays subsp. mays; identical to SEQ ID NO: 36095
  peptide (1)..(215): Ceres Seq. ID no. 13623628
  misc_feature (1)..(164): Pfam Name: Hly-III / UPF0073 Pfam Description: Uncharacterised protein family
  misc_feature (1)..(164): NCBI GI NO: 20330770 NR Description: Hypothetical protein
  misc_feature (1)..(215): NCBI GI NO: 15235657 NR Description: expressed protein [Arabidopsis thaliana]
  misc_feature (1)..(204): NCBI GI NO: 15233813 NR Description: expressed protein [Arabidopsis thaliana]
  misc_feature (17)..(199): NCBI GI NO: 13272399 NR Description: hypothetical protein [Arabidopsis thaliana]
  misc_feature (17)..(199): NCBI GI NO: 18400468 NR Description: expressed protein [Arabidopsis thaliana]
  misc_feature (17)..(210): NCBI GI NO: 18377749 NR Description: unknown protein [Arabidopsis thaliana]
  misc_feature (17)..(210): NCBI GI NO: 30688829 NR Description: expressed protein [Arabidopsis thaliana]
  misc_feature (1)..(215): NCBI GI NO: 15241302 NR Description: expressed protein [Arabidopsis thaliana]
  misc_feature (4)..(210): NCBI GI NO: 25407688 NR Description: hypothetical protein AT4g30850
  misc_feature (36)..(199): NCBI GI NO: 25309925 NR Description: hypothetical protein At2g24150

SEQ ID NO: 37135 - DNA, 1027 bp, Zea mays subsp. mays
  misc_feature (1)..(1027): Ceres Seq. ID no. 13600228
gaccagatcgctacgagacgccgcgcgatcggacccaggccgacgccgacgacccctctcgccgccggcggccatggcgtacggcgaccgcgtcaccaccttcgaggactccgagaaggagagcgagtacggctatgtccgcaaggtctctggacctgtggttgtggctgatggaatgggtggtgctgccatgtatgaacttgttcgtgtcggacatgataacctcattggggaaattatccgtcttgagggcgattcagctacaatccaagtttatgaggaaacagctggactgatggttaatgaccctgtattgagaacaagaaagcctctttcagttgaattgggacctggaattcttggaaacatttttgacggtatccagcggcctctaaaaaccatcgctattaagtcaggagatgtgtatattcctcgtggtgtttcagttcctgcccttgacaaagatgtattgtgggaatttcagccaacgaagctaggtgttggagatgtcatcacaggtggagatctatacgctactgtttttgagaacacattgatgcagcaccatgttgctcttccaccgggttctatggggaaaataagttacattgcaccagctggccagtacaacctgcaggacacagtgctagaattggaatttcagggcataaaaaagaaatttaccatgcttcagacatggcctgtgcgttcaccaaggcctgttgcatcgaagcttgctgcggatacacctcttctgacagggcagcgtgtactggatgcactattcccctcggttctgggaggcacttgctgtattccaggagcatttggctgtggtaaaactgtcattagtcaggcactttccaagtactccaattccgaagctgtggtttatgtgggctgtggtgaacgaggaaacgagatggctgaggttctcatggactttccccagttgacaatgcaattcgctgatggccgtagagagtctgtcatgaaaagaacaacactggtggctaacacatcaaac

SEQ ID NO: 37136 - protein, 342 aa, Zea mays subsp. mays
  peptide (1)..(342): Ceres Seq. ID no. 13600229
  misc_feature (46)..(107): Pfam Name: Pfam Description:  ATP synthase alpha/beta family
  misc_feature (25)..(341): NCBI GI NO: 11527563 NR Description: vacuolar proton-ATPase
  misc_feature (27)..(341): NCBI GI NO: 137460 NR Description: Vacuolar ATP synthase catalytic subunit A
  misc_feature (27)..(341): NCBI GI NO: 15982954 NR Description: V-ATPase catalytic subunit A [Prunus persica]
  misc_feature (27)..(341): NCBI GI NO: 401322 NR Description: Vacuolar ATP synthase catalytic subunit A
  misc_feature (27)..(341): NCBI GI NO: 2506211 NR Description: Vacuolar ATP synthase catalytic subunit A
  misc_feature (27)..(341): NCBI GI NO: 3169287 NR Description: vacuolar H+-ATPase catalytic subunit
  misc_feature (27)..(341): NCBI GI NO: 12585490 NR Description: Vacuolar ATP synthase catalytic subunit A
  misc_feature (27)..(341): NCBI GI NO: 27884018 NR Description: vacuolar H+-ATPase A2 subunit isoform
  misc_feature (28)..(341): NCBI GI NO: 27883932 NR Description: vacuolar H+-ATPase A1 subunit isoform
  misc_feature (27)..(341): NCBI GI NO: 1929027 NR Description: BV-70/5 [Beta vulgaris]
TRSLRDAARSDPGRRRRPLSPPAAMAYGDRVTTFEDSEKESEYGYVRKVSGPVVVADGMGGAAMYELVRVGHDNLIGEIIRLEGDSATIQVYEETAGLMVNDPVLRTRKPLSVELGPGILGNIFDGIQRPLKTIAIKSGDVYIPRGVSVPALDKDVLWEFQPTKLGVGDVITGGDLYATVFENTLMQHHVALPPGSMGKISYIAPAGQYNLQDTVLELEFQGIKKKFTMLQTWPVRSPRPVASKLAADTPLLTGQRVLDALFPSVLGGTCCIPGAFGCGKTVISQALSKYSNSEAVVYVGCGERGNEMAEVLMDFPQLTMQFADGRRESVMKRTTLVANTSN

SEQ ID NO: 37137 - protein, 318 aa, Zea mays subsp. mays
  peptide (1)..(318): Ceres Seq. ID no. 13600230
  misc_feature (22)..(83): Pfam Name: Pfam Description:  ATP synthase alpha/beta family
  misc_feature (1)..(317): NCBI GI NO: 11527563 NR Description: vacuolar proton-ATPase
  misc_feature (3)..(317): NCBI GI NO: 137460 NR Description: Vacuolar ATP synthase catalytic subunit A
  misc_feature (3)..(317): NCBI GI NO: 15982954 NR Description: V-ATPase catalytic subunit A [Prunus persica]
  misc_feature (3)..(317): NCBI GI NO: 401322 NR Description: Vacuolar ATP synthase catalytic subunit A
  misc_feature (3)..(317): NCBI GI NO: 2506211 NR Description: Vacuolar ATP synthase catalytic subunit A
  misc_feature (3)..(317): NCBI GI NO: 3169287 NR Description: vacuolar H+-ATPase catalytic subunit
  misc_feature (3)..(317): NCBI GI NO: 12585490 NR Description: Vacuolar ATP synthase catalytic subunit A
  misc_feature (3)..(317): NCBI GI NO: 27884018 NR Description: vacuolar H+-ATPase A2 subunit isoform
  misc_feature (4)..(317): NCBI GI NO: 27883932 NR Description: vacuolar H+-ATPase A1 subunit isoform
  misc_feature (3)..(317): NCBI GI NO: 1929027 NR Description: BV-70/5 [Beta vulgaris]
MAYGDRVTTFEDSEKESEYGYVRKVSGPVVVADGMGGAAMYELVRVGHDNLIGEIIRLEGDSATIQVYEETAGLMVNDPVLRTRKPLSVELGPGILGNIFDGIQRPLKTIAIKSGDVYIPRGVSVPALDKDVLWEFQPTKLGVGDVITGGDLYATVFENTLMQHHVALPPGSMGKISYIAPAGQYNLQDTVLELEFQGIKKKFTMLQTWPVRSPRPVASKLAADTPLLTGQRVLDALFPSVLGGTCCIPGAFGCGKTVISQALSKYSNSEAVVYVGCGERGNEMAEVLMDFPQLTMQFADGRRESVMKRTTLVANTSN

SEQ ID NO: 37138 - protein, 284 aa, Zea mays subsp. mays
  peptide (1)..(284): Ceres Seq. ID no. 13600231
  misc_feature (1)..(49): Pfam Name: Pfam Description:  ATP synthase alpha/beta family
  misc_feature (1)..(283): NCBI GI NO: 11527563 NR Description: vacuolar proton-ATPase
  misc_feature (1)..(283): NCBI GI NO: 137460 NR Description: Vacuolar ATP synthase catalytic subunit A
  misc_feature (1)..(283): NCBI GI NO: 15982954 NR Description: V-ATPase catalytic subunit A [Prunus persica]
  misc_feature (1)..(283): NCBI GI NO: 401322 NR Description: Vacuolar ATP synthase catalytic subunit A
  misc_feature (1)..(283): NCBI GI NO: 2506211 NR Description: Vacuolar ATP synthase catalytic subunit A
  misc_feature (1)..(283): NCBI GI NO: 3169287 NR Description: vacuolar H+-ATPase catalytic subunit
  misc_feature (1)..(283): NCBI GI NO: 12585490 NR Description: Vacuolar ATP synthase catalytic subunit A
  misc_feature (1)..(283): NCBI GI NO: 27884018 NR Description: vacuolar H+-ATPase A2 subunit isoform
  misc_feature (1)..(283): NCBI GI NO: 27883932 NR Description: vacuolar H+-ATPase A1 subunit isoform
  misc_feature (1)..(283): NCBI GI NO: 1929027 NR Description: BV-70/5 [Beta vulgaris]
MGGAAMYELVRVGHDNLIGEIIRLEGDSATIQVYEETAGLMVNDPVLRTRKPLSVELGPGILGNIFDGIQRPLKTIAIKSGDVYIPRGVSVPALDKDVLWEFQPTKLGVGDVITGGDLYATVFENTLMQHHVALPPGSMGKISYIAPAGQYNLQDTVLELEFQGIKKKFTMLQTWPVRSPRPVASKLAADTPLLTGQRVLDALFPSVLGGTCCIPGAFGCGKTVISQALSKYSNSEAVVYVGCGERGNEMAEVLMDFPQLTMQFADGRRESVMKRTTLVANTSN

SEQ ID NO: 37139 - DNA, 1984 bp, Zea mays subsp. mays; identical to SEQ ID NO: 23835
  misc_feature (1)..(1984): Ceres Seq. ID no. 12595533

SEQ ID NO: 37140 - protein, 598 aa, Zea mays subsp. mays; identical to SEQ ID NO: 23836
  peptide (1)..(598): Ceres Seq. ID no. 12595534
  misc_feature (79)..(582): Pfam Name: Pfam Description:  TCP-1/cpn60 chaperonin family
  misc_feature (57)..(598): NCBI GI NO: 134102 NR Description: RuBisCO subunit binding-protein alpha subunit
  misc_feature (54)..(598): NCBI GI NO: 31193919 NR Description: putative rubisco subunit binding-protein alphasubunit precursor
  misc_feature (27)..(598): NCBI GI NO: 1710807 NR Description: RuBisCO subunit binding-protein alpha subunit
  misc_feature (52)..(596): NCBI GI NO: 1351030 NR Description: RuBisCO subunit binding-protein alpha subunit
  misc_feature (27)..(596): NCBI GI NO: 15226314 NR Description: putative rubisco subunit binding-protein alphasubunit
  misc_feature (27)..(596): NCBI GI NO: 21554572 NR Description: putative rubisco subunit binding-protein alphasubunit
  misc_feature (27)..(598): NCBI GI NO: 3790441 NR Description: chaperonin 60 alpha subunit [Canavalia lineata]
  misc_feature (51)..(596): NCBI GI NO: 99801 NR Description: chaperonine 60K alpha chain - rape (fragment)
  misc_feature (27)..(596): NCBI GI NO: 464727 NR Description: RuBisCO subunit binding-protein alpha subunit
  misc_feature (69)..(564): NCBI GI NO: 5650721 NR Description: rubisco subunit binding-protein alpha subunit

SEQ ID NO: 37141 - protein, 572 aa, Zea mays subsp. mays; identical to SEQ ID NO: 23837
  peptide (1)..(572): Ceres Seq. ID no. 12595535
  misc_feature (53)..(556): Pfam Name: Pfam Description:  TCP-1/cpn60 chaperonin family
  misc_feature (31)..(572): NCBI GI NO: 134102 NR Description: RuBisCO subunit binding-protein alpha subunit
  misc_feature (28)..(572): NCBI GI NO: 31193919 NR Description: putative rubisco subunit binding-protein alphasubunit precursor
  misc_feature (1)..(572): NCBI GI NO: 1710807 NR Description: RuBisCO subunit binding-protein alpha subunit
  misc_feature (26)..(570): NCBI GI NO: 1351030 NR Description: RuBisCO subunit binding-protein alpha subunit
  misc_feature (1)..(570): NCBI GI NO: 15226314 NR Description: putative rubisco subunit binding-protein alphasubunit
  misc_feature (1)..(570): NCBI GI NO: 21554572 NR Description: putative rubisco subunit binding-protein alphasubunit
  misc_feature (1)..(572): NCBI GI NO: 3790441 NR Description: chaperonin 60 alpha subunit [Canavalia lineata]
  misc_feature (25)..(570): NCBI GI NO: 99801 NR Description: chaperonine 60K alpha chain - rape (fragment)
  misc_feature (1)..(570): NCBI GI NO: 464727 NR Description: RuBisCO subunit binding-protein alpha subunit
  misc_feature (43)..(538): NCBI GI NO: 5650721 NR Description: rubisco subunit binding-protein alpha subunit

SEQ ID NO: 37142 - protein, 478 aa, Zea mays subsp. mays; identical to SEQ ID NO: 23838
  peptide (1)..(478): Ceres Seq. ID no. 12595536
  misc_feature (1)..(462): Pfam Name: Pfam Description:  TCP-1/cpn60 chaperonin family
  misc_feature (1)..(478): NCBI GI NO: 134102 NR Description: RuBisCO subunit binding-protein alpha subunit
  misc_feature (1)..(478): NCBI GI NO: 31193919 NR Description: putative rubisco subunit binding-protein alphasubunit precursor
  misc_feature (1)..(478): NCBI GI NO: 1710807 NR Description: RuBisCO subunit binding-protein alpha subunit
  misc_feature (1)..(476): NCBI GI NO: 1351030 NR Description: RuBisCO subunit binding-protein alpha subunit
  misc_feature (1)..(476): NCBI GI NO: 15226314 NR Description: putative rubisco subunit binding-protein alphasubunit
  misc_feature (1)..(476): NCBI GI NO: 21554572 NR Description: putative rubisco subunit binding-protein alphasubunit
  misc_feature (1)..(478): NCBI GI NO: 3790441 NR Description: chaperonin 60 alpha subunit [Canavalia lineata]
  misc_feature (1)..(476): NCBI GI NO: 99801 NR Description: chaperonine 60K alpha chain - rape (fragment)
  misc_feature (1)..(476): NCBI GI NO: 464727 NR Description: RuBisCO subunit binding-protein alpha subunit
  misc_feature (1)..(444): NCBI GI NO: 5650721 NR Description: rubisco subunit binding-protein alpha subunit

SEQ ID NO: 37143 - DNA, 1129 bp, Zea mays subsp. mays
  misc_feature (1)..(1129): Ceres Seq. ID no. 13589476
ttctcgccgaacggaaaaccctgcccggaccttcgttgcagcgctacgagcttcgacgggccgctcgatctccacctctgaagtggctgcttgtgatctagatctgaaagctgcagtggttgacagctgagtgtgaaactgtgaatcgaagatgagcgtggtgggcttcgacctcggcaatgagagctgcatcgtggcggtcgcgcggcagcgcggcatcgacgtggtcctcaacgaggagtccaagcgcgagacacccgccatcgtctgcttcggggacaagcagcggttcatcggcaccgccggcgccgcgtcctctaccatgaaccccaagaactccatttctcagatcaagcgcttgctaggccgcaagtactccgaccccgagctacagagagatctcgcctccttcccgttccgtgtcacggagggccccgatggttttcccctggtccatgtacgatacctgggcgaggaacggacgttcacctctaccaagctgcttgccatggtgctgtccaatttgaagggcattgctgagggtaacctgaatgctgcagttgttgattgttgcattggtattccagtctactttacggatctgcagcgcagggctgttcttgatgctgctactattgcgggtctccagccattgcgattgttccatgagacaacagccactgcactggcatatggtatttataagactgatctcccggagaatgaccagttgaacgttgcatttgttgatgtcggtcatgcaagcatgcaggtcagtgttgtcggttacaagaagggacagctcaagatgttgtcgcatacgtatgaccagtctcttggcgggagggactttgatgaggccctgtttaagcactttgcagctaaattcaaagaggaatataagattgatgtgtaccagaatgcgcgtgcatgcattaggttgcgtgtggcatgtgagaaacttaagaaggtactgagcgccaacccagaggccccactgaacattgagtgtttgatggatgagaaggatgtgcggggttttattaaaagggaggagttcgaacagatcagtgcctcggtgctggaacgcgtgaaaggaccactggaaaaggccttggctgaagctggg

SEQ ID NO: 37144 - protein, 326 aa, Zea mays subsp. mays
  peptide (1)..(326): Ceres Seq. ID no. 13589477
  misc_feature (3)..(325): Pfam Name: Pfam Description:  Hsp70 protein
  misc_feature (1)..(325): NCBI GI NO: 34906196 NR Description: putative heat-shock protein
  misc_feature (1)..(325): NCBI GI NO: 15220026 NR Description: putative heat-shock protein [Arabidopsis thaliana]
  misc_feature (1)..(325): NCBI GI NO: 7450157 NR Description: heat shock protein 91 - Arabidopsis thaliana
  misc_feature (1)..(325): NCBI GI NO: 17473863 NR Description: putative heat-shock protein [Arabidopsis thaliana]
  misc_feature (1)..(325): NCBI GI NO: 30699467 NR Description: heat shock protein hsp70, putative
  misc_feature (1)..(325): NCBI GI NO: 30699465 NR Description: heat shock protein hsp70, putative
  misc_feature (1)..(325): NCBI GI NO: 15221072 NR Description: heat shock protein, putative
  misc_feature (1)..(325): NCBI GI NO: 25326732 NR Description: hypothetical protein
  misc_feature (1)..(324): NCBI GI NO: 2495362 NR Description: 97 KDA HEAT SHOCK PROTEIN (HEAT SHOCK PROTEIN 110)
  misc_feature (1)..(324): NCBI GI NO: 1649012 NR Description: egg receptor for sperm
MSVVGFDLGNESCIVAVARQRGIDVVLNEESKRETPAIVCFGDKQRFIGTAGAASSTMNPKNSISQIKRLLGRKYSDPELQRDLASFPFRVTEGPDGFPLVHVRYLGEERTFTSTKLLAMVLSNLKGIAEGNLNAAVVDCCIGIPVYFTDLQRRAVLDAATIAGLQPLRLFHETTATALAYGIYKTDLPENDQLNVAFVDVGHASMQVSVVGYKKGQLKMLSHTYDQSLGGRDFDEALFKHFAAKFKEEYKIDVYQNARACIRLRVACEKLKKVLSANPEAPLNIECLMDEKDVRGFIKREEFEQISASVLERVKGPLEKALAEAG

SEQ ID NO: 37145 - protein, 269 aa, Zea mays subsp. mays
  peptide (1)..(269): Ceres Seq. ID no. 13589478
  misc_feature (1)..(268): Pfam Name: Pfam Description:  Hsp70 protein
  misc_feature (1)..(268): NCBI GI NO: 34906196 NR Description: putative heat-shock protein
  misc_feature (1)..(268): NCBI GI NO: 15220026 NR Description: putative heat-shock protein [Arabidopsis thaliana]
  misc_feature (1)..(268): NCBI GI NO: 7450157 NR Description: heat shock protein 91 - Arabidopsis thaliana
  misc_feature (1)..(268): NCBI GI NO: 17473863 NR Description: putative heat-shock protein [Arabidopsis thaliana]
  misc_feature (1)..(268): NCBI GI NO: 30699465 NR Description: heat shock protein hsp70, putative
  misc_feature (1)..(268): NCBI GI NO: 30699467 NR Description: heat shock protein hsp70, putative
  misc_feature (1)..(268): NCBI GI NO: 15221072 NR Description: heat shock protein, putative
  misc_feature (1)..(268): NCBI GI NO: 25326732 NR Description: hypothetical protein
  misc_feature (1)..(267): NCBI GI NO: 2495362 NR Description: 97 KDA HEAT SHOCK PROTEIN (HEAT SHOCK PROTEIN 110)
  misc_feature (1)..(267): NCBI GI NO: 1649012 NR Description: egg receptor for sperm
MNPKNSISQIKRLLGRKYSDPELQRDLASFPFRVTEGPDGFPLVHVRYLGEERTFTSTKLLAMVLSNLKGIAEGNLNAAVVDCCIGIPVYFTDLQRRAVLDAATIAGLQPLRLFHETTATALAYGIYKTDLPENDQLNVAFVDVGHASMQVSVVGYKKGQLKMLSHTYDQSLGGRDFDEALFKHFAAKFKEEYKIDVYQNARACIRLRVACEKLKKVLSANPEAPLNIECLMDEKDVRGFIKREEFEQISASVLERVKGPLEKALAEAG

SEQ ID NO: 37146 - protein, 207 aa, Zea mays subsp. mays
  peptide (1)..(207): Ceres Seq. ID no. 13589479
  misc_feature (1)..(206): Pfam Name: Pfam Description:  Hsp70 protein
  misc_feature (1)..(206): NCBI GI NO: 34906196 NR Description: putative heat-shock protein
  misc_feature (1)..(206): NCBI GI NO: 15220026 NR Description: putative heat-shock protein [Arabidopsis thaliana]
  misc_feature (1)..(206): NCBI GI NO: 7450157 NR Description: heat shock protein 91 - Arabidopsis thaliana
  misc_feature (1)..(206): NCBI GI NO: 17473863 NR Description: putative heat-shock protein [Arabidopsis thaliana]
  misc_feature (1)..(206): NCBI GI NO: 30699467 NR Description: heat shock protein hsp70, putative
  misc_feature (1)..(206): NCBI GI NO: 30699465 NR Description: heat shock protein hsp70, putative
  misc_feature (1)..(206): NCBI GI NO: 15221072 NR Description: heat shock protein, putative
  misc_feature (1)..(206): NCBI GI NO: 25326732 NR Description: hypothetical protein
  misc_feature (1)..(205): NCBI GI NO: 2495362 NR Description: 97 KDA HEAT SHOCK PROTEIN (HEAT SHOCK PROTEIN 110)
  misc_feature (1)..(205): NCBI GI NO: 1649012 NR Description: egg receptor for sperm
MVLSNLKGIAEGNLNAAVVDCCIGIPVYFTDLQRRAVLDAATIAGLQPLRLFHETTATALAYGIYKTDLPENDQLNVAFVDVGHASMQVSVVGYKKGQLKMLSHTYDQSLGGRDFDEALFKHFAAKFKEEYKIDVYQNARACIRLRVACEKLKKVLSANPEAPLNIECLMDEKDVRGFIKREEFEQISASVLERVKGPLEKALAEAG

SEQ ID NO: 37147 - DNA, 986 bp, Zea mays subsp. mays
  misc_feature (1)..(986): Ceres Seq. ID no. 13589517
  misc_feature (756)..(756): n is a, c, t, g, unknown, or other
  misc_feature (831)..(831): n is a, c, t, g, unknown, or other
  misc_feature (826)..(826): n is a, c, t, g, unknown, or other
  misc_feature (708)..(708): n is a, c, t, g, unknown, or other
  misc_feature (913)..(913): n is a, c, t, g, unknown, or other
  misc_feature (861)..(861): n is a, c, t, g, unknown, or other
  misc_feature (858)..(858): n is a, c, t, g, unknown, or other
gaggccagggcggagtccgagccctggggtcgggcgaggcggagtttcgtcgtcttccgggtcttagcccgagtccgagccctggggtcgggcggagcggagttcgccgtcttccgggtcttagcccgagtccgagccctggggtcgggcggagcggagttcgccgtcttccgggtcttagcccgagtccgagccctggggtcgggcggagcggagttcgccgtcttccgggtcttagcccgagtccgagccctggggtcgggcggagcggagttcgccgtcttccgggtcttagcccgagtccgagccctggggtcgggcggagcggagttcgccgtcttccgggtcttagcccgagtccgagccctggggtcgggcggagcggagttcgccgtggcgcctctggcaaggcctgactgcctgtcagactcactctgtcgagtggcaccgcagtcggggtggcgcaggcggcgctgtccttctgtcagactggtcagtggagcggtggagtgacagcggtcacttcggctctgccgggggggcgcgtgtcaggataaaggtgtcaggccacctttgcgttaaatgctcctgcaacttggtcagtcggtgtggtgatttagtcagggttgcttctgagcgaagccaaggcctcgggcgagccggtgatgtgtccgccgtaaaaaggggggcctcgggcgagacggaagntctctcgaggtcggctgccttcggccgaggctaggctcgggtggaagngcgatcgagtcactcgtgtggactggatccctggacttaatcggtgcccatcaggcctttgcagcttttngcttnatgggggttaccaagctgagaaattangcngtcttggagggtacccctaattatggtccccgacagtagcccccgaagctcncaaggggagtggtagcactcgcttgggaggcttttgtcgcactttttttgcaaggggacagcccttttctccg

SEQ ID NO: 37148 - protein, 170 aa, Zea mays subsp. mays
  peptide (1)..(170): Ceres Seq. ID no. 13589518
EARAESEPWGRARRSFVVFRVLARVRALGSGGAEFAVFRVLARVRALGSGGAEFAVFRVLARVRALGSGGAEFAVFRVLARVRALGSGGAEFAVFRVLARVRALGSGGAEFAVFRVLARVRALGSGGAEFAVAPLARPDCLSDSLCRVAPQSGWRRRRCPSVRLVSGAVE

SEQ ID NO: 37149 - protein, 137 aa, Zea mays subsp. mays
  peptide (1)..(137): Ceres Seq. ID no. 13589519
  misc_feature (1)..(137): NCBI GI NO: 40745634 NR Description: hypothetical protein AN1670.2
  misc_feature (4)..(137): NCBI GI NO: 12644429 NR Description: Aggrecan core protein precursor
GQGGVRALGSGEAEFRRLPGLSPSPSPGVGRSGVRRLPGLSPSPSPGVGRSGVRRLPGLSPSPSPGVGRSGVRRLPGLSPSPSPGVGRSGVRRLPGLSPSPSPGVGRSGVRRLPGLSPSPSPGVGRSGVRRGASGKA

SEQ ID NO: 37150 - DNA, 606 bp, Zea mays subsp. mays
  misc_feature (1)..(606): Ceres Seq. ID no. 12594624
tttgccgtgtgctgcatctggggaagagctacgtacccatcagcctaaagcatctggggaagctgttgcatctcaagttcctagagatagtatacacgcctattgatgagctccctaaggaaattgggcatctgaggtctcttcagacactgatattagaccgtactggactagacgagctgccaccggttgtttgctcgcttacacggttgatgtgcctgatagcccaggggttcgaaaggttgccagctgacaggatggggaacctaacgtccctggaggagctacgactacgtagggtagttggccggagtgccacccaagccctagtggcagagcttggcaagctgacgaggttgagggtggtcgacatcaccttttcagagcagctagaggagagcttgcaagaagcattggtgcaatctctgtccaatctgcggggactccaggaactaacgcttttgtttaaaatgacacggtggggaagcgatatgtggggagactgggagccaccaaggcagctccggcgcctgattattgaaggcatcatcgtcttctcacgacagcctcgatggatcaaccgctcctgtctgccacgcctctgct

SEQ ID NO: 37151 - protein, 201 aa, Zea mays subsp. mays
  peptide (1)..(201): Ceres Seq. ID no. 12594625
  misc_feature (15)..(200): NCBI GI NO: 34394780 NR Description: putative CC-NBS-LRR resistance protein MLA13
  misc_feature (15)..(200): NCBI GI NO: 34904708 NR Description: P0446G09.19
  misc_feature (2)..(197): NCBI GI NO: 22208468 NR Description: putative stripe rust resistance protein Yr10/Mla1
  misc_feature (2)..(197): NCBI GI NO: 22208504 NR Description: putative stripe rust resistance protein Yr10
  misc_feature (13)..(200): NCBI GI NO: 34912398 NR Description: putative Mla1
  misc_feature (14)..(200): NCBI GI NO: 40253772 NR Description: putative RGH1A
  misc_feature (5)..(200): NCBI GI NO: 40253763 NR Description: putative RGH1A
  misc_feature (5)..(197): NCBI GI NO: 20513867 NR Description: RGH1A [Hordeum vulgare]
  misc_feature (7)..(175): NCBI GI NO: 38532140 NR Description: Mal-like protein [Triticum aestivum]
  misc_feature (15)..(200): NCBI GI NO: 22208466 NR Description: putative Mla1 [Sorghum bicolor]
CRVLHLGKSYVPISLKHLGKLLHLKFLEIVYTPIDELPKEIGHLRSLQTLILDRTGLDELPPVVCSLTRLMCLIAQGFERLPADRMGNLTSLEELRLRRVVGRSATQALVAELGKLTRLRVVDITFSEQLEESLQEALVQSLSNLRGLQELTLLFKMTRWGSDMWGDWEPPRQLRRLIIEGIIVFSRQPRWINRSCLPRLC

SEQ ID NO: 37152 - protein, 131 aa, Zea mays subsp. mays
  peptide (1)..(131): Ceres Seq. ID no. 12594626
  misc_feature (1)..(130): NCBI GI NO: 34394780 NR Description: putative CC-NBS-LRR resistance protein MLA13
  misc_feature (1)..(130): NCBI GI NO: 34904708 NR Description: P0446G09.19
  misc_feature (1)..(127): NCBI GI NO: 22208468 NR Description: putative stripe rust resistance protein Yr10/Mla1
  misc_feature (1)..(127): NCBI GI NO: 22208504 NR Description: putative stripe rust resistance protein Yr10
  misc_feature (1)..(130): NCBI GI NO: 34912398 NR Description: putative Mla1
  misc_feature (1)..(130): NCBI GI NO: 40253772 NR Description: putative RGH1A
  misc_feature (1)..(130): NCBI GI NO: 40253763 NR Description: putative RGH1A
  misc_feature (1)..(127): NCBI GI NO: 20513867 NR Description: RGH1A [Hordeum vulgare]
  misc_feature (1)..(105): NCBI GI NO: 38532140 NR Description: Mal-like protein [Triticum aestivum]
  misc_feature (1)..(130): NCBI GI NO: 22208466 NR Description: putative Mla1 [Sorghum bicolor]
MCLIAQGFERLPADRMGNLTSLEELRLRRVVGRSATQALVAELGKLTRLRVVDITFSEQLEESLQEALVQSLSNLRGLQELTLLFKMTRWGSDMWGDWEPPRQLRRLIIEGIIVFSRQPRWINRSCLPRLC

SEQ ID NO: 37153 - protein, 116 aa, Zea mays subsp. mays
  peptide (1)..(116): Ceres Seq. ID no. 12594627
  misc_feature (1)..(115): NCBI GI NO: 34394780 NR Description: putative CC-NBS-LRR resistance protein MLA13
  misc_feature (1)..(115): NCBI GI NO: 34904708 NR Description: P0446G09.19
  misc_feature (1)..(112): NCBI GI NO: 22208468 NR Description: putative stripe rust resistance protein Yr10/Mla1
  misc_feature (1)..(112): NCBI GI NO: 22208504 NR Description: putative stripe rust resistance protein Yr10
  misc_feature (1)..(115): NCBI GI NO: 34912398 NR Description: putative Mla1
  misc_feature (1)..(115): NCBI GI NO: 40253772 NR Description: putative RGH1A
  misc_feature (1)..(115): NCBI GI NO: 40253763 NR Description: putative RGH1A
  misc_feature (1)..(112): NCBI GI NO: 20513867 NR Description: RGH1A [Hordeum vulgare]
  misc_feature (1)..(90): NCBI GI NO: 38532140 NR Description: Mal-like protein [Triticum aestivum]
  misc_feature (1)..(115): NCBI GI NO: 22208466 NR Description: putative Mla1 [Sorghum bicolor]
MGNLTSLEELRLRRVVGRSATQALVAELGKLTRLRVVDITFSEQLEESLQEALVQSLSNLRGLQELTLLFKMTRWGSDMWGDWEPPRQLRRLIIEGIIVFSRQPRWINRSCLPRLC

SEQ ID NO: 37154 - DNA, 2388 bp, Zea mays subsp. mays
  misc_feature (1)..(2388): Ceres Seq. ID no. 13579684
cggatttggaggagtcgaataaacaaggaaactcctcccggcccagaaagcacttcacttgcaacagtccccgtcagggagggagcattgctgtgcgggatggcgataaggaagagcggaggcggtggcggggtggggggtgtggcgcggcggctgctgcttctggcctgctgctgcatttggcctggtggacggatcttcactgctgcggacactgaccccaacgatcttaatgtcctcaatacgctcttcaccagtctgaattctcctgggcagctcagagcttggcgggcgaatggcggtgatccttgtggccagtcatggcagggcattacctgctcaggatcaggggtcactaaaatcctattaccaaacttgtcactcaccggaaatctggcctacaacatgaataacttgggttcattagttgagcttgacatgagccaaaataaccttggcggtggaggtcaaatacagtacaatcttcccaatatgaagcttgagaaactcaatcttgcaggaaatcaatttggtggaaatttaccctactcaatttcgacgatgcctaatcttaagtatttaaaccttaatcataaccaactacaaggaaacatcactgatgtattttccaacctttatagtttgtcagagctggatctctcctttaattctcttactggtgatctaccacaaagtttcactggattgtcaagcctgaaaagaatgtatttgcagaacaaccaatttactggttatatcaatgtcttagccaaccttccccttgaaaccctgaatgttggaaacaaccatttcactggttggattcccagtcagcttaagaagataaacaatctacagaccgacggaaattcttggagcacaggaccagcgccacctccacctccatatacagcgcctcctcctccaaaccattggaatggcgcgggtcagaatggtgatggttcatcaagttctggtggaagacctgggataggtggtggaggtgtagcaggaatcattatatcattgctgattgttggatcagttgttgcattttttctaatcaaaagaagaaaacacaaagctattatggaagaacaatttgaacagcatcagccgttcacttccttcccttcaaatgaagttaacgacatgaagcctatctatgagtccaccacagtagacatagagtctttggcttcacctgcttcgattaatctgaaaccacccccgaagatagaacagaacaaatcatttgatgatgatgatgatttttcaaacaagactgctgcaaatagaagtaatataacacctatgaaggcaactgtttattcagttgcagatctacagatggcaacagatagcttcagcttcgataaccttgttggagagggtacttttggacgtgtttacagggcacagttcaatggtggaaaggttctggccatcaagaaattagacattactgtgatgccatttcaatcgtctgatgactttgctgaactggtctcgaacatttcaaaattgcaccatccgaatctgaatgagcttgtaggctattgcatggaacatggccagcacttgcttgtgtatgatttccataggaatggatcgcttcatgatctacgccacctttcagatgagtacagcaaggcacttagctggaactctcgcatcaagttcgcactcggctctgcccgtgcactggagtaccttcatgaaatatgttctccatccatcatccataagaatttcaaggcatcaaatattttgctggactcagaattcaatccacacctttcagatactggacttgcaagcttcattcctggtgctgaattccaggcagcagaacaaagtgccggatacactgccccagaagtggacatgaccggtcagtacaccctcaagagtgatgtttacagctttggagttgtcatgcttgagctactgacaggacgtagaccatttgacagctctagacccaggtcagagcagtcacttgtgcggtgggcagcacctcagctgcatgacatcgatgcattggacagaatggtcgatcctgcactcaagggtctatacccagccaaatctctatcccgatttgctgatgtcctcgccctgtgtgtccagcctgaaccagaattcaggccaccaatgtcagaggtggtgcaagcattggttcgacttgtgcagagggccaacatgacgaagaggatgcttgatggaggagatacttctcgtggaccagatgatcaggaccaatatttcatatgacaagctgaactcgagcttttcagctacctctcagattgtatttatctcgtctcgttccactagcgcccggcagagacataatcacacaagtggaagagacagaactctgtc

SEQ ID NO: 37155 - protein, 758 aa, Zea mays subsp. mays
  peptide (1)..(758): Ceres Seq. ID no. 13579685
  misc_feature (52)..(758): NCBI GI NO: 29367551 NR Description: putative leucine-rich repeat transmembrane proteinkinase
  misc_feature (151)..(483): NCBI GI NO: 37533916 NR Description: putative leucine-rich repeat transmembrane proteinkinase 1
  misc_feature (479)..(758): NCBI GI NO: 37533916 NR Description: putative leucine-rich repeat transmembrane proteinkinase 1
  misc_feature (67)..(754): NCBI GI NO: 15220928 NR Description: leucine-rich repeat transmembrane protein kinase 1
  misc_feature (50)..(752): NCBI GI NO: 30683104 NR Description: leucine-rich repeat transmembrane protein kinase
  misc_feature (69)..(755): NCBI GI NO: 34906746 NR Description: similar to leucine-rich repeat transmembraneprotein kinase 1
  misc_feature (52)..(345): NCBI GI NO: 37533916 NR Description: putative leucine-rich repeat transmembrane proteinkinase 1
  misc_feature (94)..(451): NCBI GI NO: 7489785 NR Description: leucine-rich repeat transmembrane protein kinase 3
  misc_feature (70)..(754): NCBI GI NO: 15219262 NR Description: leucine-rich repeat transmembrane protein kinase
  misc_feature (444)..(733): NCBI GI NO: 34899766 NR Description: putative leucine-rich repeat transmembrane proteinkinase
RIWRSRINKETPPGPESTSLATVPVREGALLCGMAIRKSGGGGGVGGVARRLLLLACCCIWPGGRIFTAADTDPNDLNVLNTLFTSLNSPGQLRAWRANGGDPCGQSWQGITCSGSGVTKILLPNLSLTGNLAYNMNNLGSLVELDMSQNNLGGGGQIQYNLPNMKLEKLNLAGNQFGGNLPYSISTMPNLKYLNLNHNQLQGNITDVFSNLYSLSELDLSFNSLTGDLPQSFTGLSSLKRMYLQNNQFTGYINVLANLPLETLNVGNNHFTGWIPSQLKKINNLQTDGNSWSTGPAPPPPPYTAPPPPNHWNGAGQNGDGSSSSGGRPGIGGGGVAGIIISLLIVGSVVAFFLIKRRKHKAIMEEQFEQHQPFTSFPSNEVNDMKPIYESTTVDIESLASPASINLKPPPKIEQNKSFDDDDDFSNKTAANRSNITPMKATVYSVADLQMATDSFSFDNLVGEGTFGRVYRAQFNGGKVLAIKKLDITVMPFQSSDDFAELVSNISKLHHPNLNELVGYCMEHGQHLLVYDFHRNGSLHDLRHLSDEYSKALSWNSRIKFALGSARALEYLHEICSPSIIHKNFKASNILLDSEFNPHLSDTGLASFIPGAEFQAAEQSAGYTAPEVDMTGQYTLKSDVYSFGVVMLELLTGRRPFDSSRPRSEQSLVRWAAPQLHDIDALDRMVDPALKGLYPAKSLSRFADVLALCVQPEPEFRPPMSEVVQALVRLVQRANMTKRMLDGGDTSRGPDDQDQYFI

SEQ ID NO: 37156 - protein, 725 aa, Zea mays subsp. mays
  peptide (1)..(725): Ceres Seq. ID no. 13579686
  misc_feature (19)..(725): NCBI GI NO: 29367551 NR Description: putative leucine-rich repeat transmembrane proteinkinase
  misc_feature (118)..(450): NCBI GI NO: 37533916 NR Description: putative leucine-rich repeat transmembrane proteinkinase 1
  misc_feature (446)..(725): NCBI GI NO: 37533916 NR Description: putative leucine-rich repeat transmembrane proteinkinase 1
  misc_feature (34)..(721): NCBI GI NO: 15220928 NR Description: leucine-rich repeat transmembrane protein kinase 1
  misc_feature (17)..(719): NCBI GI NO: 30683104 NR Description: leucine-rich repeat transmembrane protein kinase
  misc_feature (36)..(722): NCBI GI NO: 34906746 NR Description: similar to leucine-rich repeat transmembraneprotein kinase 1
  misc_feature (19)..(312): NCBI GI NO: 37533916 NR Description: putative leucine-rich repeat transmembrane proteinkinase 1
  misc_feature (61)..(418): NCBI GI NO: 7489785 NR Description: leucine-rich repeat transmembrane protein kinase 3
  misc_feature (37)..(721): NCBI GI NO: 15219262 NR Description: leucine-rich repeat transmembrane protein kinase
  misc_feature (411)..(700): NCBI GI NO: 34899766 NR Description: putative leucine-rich repeat transmembrane proteinkinase
MAIRKSGGGGGVGGVARRLLLLACCCIWPGGRIFTAADTDPNDLNVLNTLFTSLNSPGQLRAWRANGGDPCGQSWQGITCSGSGVTKILLPNLSLTGNLAYNMNNLGSLVELDMSQNNLGGGGQIQYNLPNMKLEKLNLAGNQFGGNLPYSISTMPNLKYLNLNHNQLQGNITDVFSNLYSLSELDLSFNSLTGDLPQSFTGLSSLKRMYLQNNQFTGYINVLANLPLETLNVGNNHFTGWIPSQLKKINNLQTDGNSWSTGPAPPPPPYTAPPPPNHWNGAGQNGDGSSSSGGRPGIGGGGVAGIIISLLIVGSVVAFFLIKRRKHKAIMEEQFEQHQPFTSFPSNEVNDMKPIYESTTVDIESLASPASINLKPPPKIEQNKSFDDDDDFSNKTAANRSNITPMKATVYSVADLQMATDSFSFDNLVGEGTFGRVYRAQFNGGKVLAIKKLDITVMPFQSSDDFAELVSNISKLHHPNLNELVGYCMEHGQHLLVYDFHRNGSLHDLRHLSDEYSKALSWNSRIKFALGSARALEYLHEICSPSIIHKNFKASNILLDSEFNPHLSDTGLASFIPGAEFQAAEQSAGYTAPEVDMTGQYTLKSDVYSFGVVMLELLTGRRPFDSSRPRSEQSLVRWAAPQLHDIDALDRMVDPALKGLYPAKSLSRFADVLALCVQPEPEFRPPMSEVVQALVRLVQRANMTKRMLDGGDTSRGPDDQDQYFI

SEQ ID NO: 37157 - protein, 623 aa, Zea mays subsp. mays
  peptide (1)..(623): Ceres Seq. ID no. 13579687
  misc_feature (1)..(623): NCBI GI NO: 29367551 NR Description: putative leucine-rich repeat transmembrane proteinkinase
  misc_feature (16)..(348): NCBI GI NO: 37533916 NR Description: putative leucine-rich repeat transmembrane proteinkinase 1
  misc_feature (344)..(623): NCBI GI NO: 37533916 NR Description: putative leucine-rich repeat transmembrane proteinkinase 1
  misc_feature (1)..(619): NCBI GI NO: 15220928 NR Description: leucine-rich repeat transmembrane protein kinase 1
  misc_feature (1)..(617): NCBI GI NO: 30683104 NR Description: leucine-rich repeat transmembrane protein kinase
  misc_feature (1)..(620): NCBI GI NO: 34906746 NR Description: similar to leucine-rich repeat transmembraneprotein kinase 1
  misc_feature (1)..(210): NCBI GI NO: 37533916 NR Description: putative leucine-rich repeat transmembrane proteinkinase 1
  misc_feature (1)..(316): NCBI GI NO: 7489785 NR Description: leucine-rich repeat transmembrane protein kinase 3
  misc_feature (1)..(619): NCBI GI NO: 15219262 NR Description: leucine-rich repeat transmembrane protein kinase
  misc_feature (309)..(598): NCBI GI NO: 34899766 NR Description: putative leucine-rich repeat transmembrane proteinkinase
MNNLGSLVELDMSQNNLGGGGQIQYNLPNMKLEKLNLAGNQFGGNLPYSISTMPNLKYLNLNHNQLQGNITDVFSNLYSLSELDLSFNSLTGDLPQSFTGLSSLKRMYLQNNQFTGYINVLANLPLETLNVGNNHFTGWIPSQLKKINNLQTDGNSWSTGPAPPPPPYTAPPPPNHWNGAGQNGDGSSSSGGRPGIGGGGVAGIIISLLIVGSVVAFFLIKRRKHKAIMEEQFEQHQPFTSFPSNEVNDMKPIYESTTVDIESLASPASINLKPPPKIEQNKSFDDDDDFSNKTAANRSNITPMKATVYSVADLQMATDSFSFDNLVGEGTFGRVYRAQFNGGKVLAIKKLDITVMPFQSSDDFAELVSNISKLHHPNLNELVGYCMEHGQHLLVYDFHRNGSLHDLRHLSDEYSKALSWNSRIKFALGSARALEYLHEICSPSIIHKNFKASNILLDSEFNPHLSDTGLASFIPGAEFQAAEQSAGYTAPEVDMTGQYTLKSDVYSFGVVMLELLTGRRPFDSSRPRSEQSLVRWAAPQLHDIDALDRMVDPALKGLYPAKSLSRFADVLALCVQPEPEFRPPMSEVVQALVRLVQRANMTKRMLDGGDTSRGPDDQDQYFI

SEQ ID NO: 37158 - DNA, 487 bp, Zea mays subsp. mays
  misc_feature (1)..(487): Ceres Seq. ID no. 7117870
  misc_feature (391)..(391): n is a, c, t, g, unknown, or other
  misc_feature (452)..(452): n is a, c, t, g, unknown, or other
  misc_feature (441)..(441): n is a, c, t, g, unknown, or other
  misc_feature (359)..(359): n is a, c, t, g, unknown, or other
aatctgattggggagaaaacaaaggctcaagatcgtattgctggtgcacacttctttagtcctgcgcatgtgatgccacttctggaaatagttcgtactcagcacacttcaccacaagttgttgttgacttgctggatgttgggaagaagattaaaaagacaccaatagtcgtcgggaactgtactggctttgcagttaataggatgttctttccatacactcaatcagcactcttttatgttgatcttgggtatggatgtttataagattgatcgtgcttgtaccaaatttggaatgcctatgggtcctttcagactggagaatctggtggggtttggggggggctggggccactggnatgcaataccttgaaaatttcccagagagggnctacaaatcaatgctacttcctctggatgatggaggacaatagggcaggngaagccacccnaaaaggattttacaagtatgagggcaagaggaaag

SEQ ID NO: 37159 - protein, 88 aa, Zea mays subsp. mays
  peptide (1)..(88): Ceres Seq. ID no. 7117871
  misc_feature (1)..(61): Pfam Name: Pfam Description:  3-hydroxyacyl-CoA dehydrogenase
  misc_feature (1)..(88): NCBI GI NO: 34895142 NR Description: putative tetrafunctional protein of glyoxysomalfatty acid beta-oxidation
  misc_feature (1)..(88): NCBI GI NO: 15231317 NR Description: fatty acid multifunctional protein
  misc_feature (1)..(88): NCBI GI NO: 39931684 NR Description: Peroxisomal fatty acid beta-oxidationmultifunctional
  misc_feature (1)..(88): NCBI GI NO: 15235527 NR Description: AIM1 protein; protein id: At4g29010
  misc_feature (3)..(77): NCBI GI NO: 23061608 NR Description: hypothetical protein
  misc_feature (3)..(84): NCBI GI NO: 22975280 NR Description: hypothetical protein [Ralstonia metallidurans]
  misc_feature (3)..(82): NCBI GI NO: 15600381 NR Description: probable 3-hydroxyacyl-CoA dehydrogenase
  misc_feature (1)..(73): NCBI GI NO: 23060657 NR Description: hypothetical protein
  misc_feature (1)..(73): NCBI GI NO: 15598210 NR Description: fatty-acid oxidation complex alpha-subunit
  misc_feature (1)..(73): NCBI GI NO: 13310123 NR Description: FadB [Pseudomonas putida]
NLIGEKTKAQDRIAGAHFFSPAHVMPLLEIVRTQHTSPQVVVDLLDVGKKIKKTPIVVGNCTGFAVNRMFFPYTQSALFYVDLGYGCL

SEQ ID NO: 37160 - protein, 64 aa, Zea mays subsp. mays
  peptide (1)..(64): Ceres Seq. ID no. 7117872
  misc_feature (1)..(64): NCBI GI NO: 34895142 NR Description: putative tetrafunctional protein of glyoxysomalfatty acid beta-oxidation
  misc_feature (1)..(64): NCBI GI NO: 15231317 NR Description: fatty acid multifunctional protein
  misc_feature (1)..(64): NCBI GI NO: 39931684 NR Description: Peroxisomal fatty acid beta-oxidationmultifunctional
  misc_feature (1)..(64): NCBI GI NO: 15235527 NR Description: AIM1 protein; protein id: At4g29010
  misc_feature (1)..(53): NCBI GI NO: 23061608 NR Description: hypothetical protein
  misc_feature (1)..(60): NCBI GI NO: 22975280 NR Description: hypothetical protein [Ralstonia metallidurans]
  misc_feature (1)..(58): NCBI GI NO: 15600381 NR Description: probable 3-hydroxyacyl-CoA dehydrogenase
  misc_feature (1)..(49): NCBI GI NO: 23060657 NR Description: hypothetical protein
  misc_feature (1)..(49): NCBI GI NO: 15598210 NR Description: fatty-acid oxidation complex alpha-subunit
  misc_feature (1)..(49): NCBI GI NO: 13310123 NR Description: FadB [Pseudomonas putida]
MPLLEIVRTQHTSPQVVVDLLDVGKKIKKTPIVVGNCTGFAVNRMFFPYTQSALFYVDLGYGCL

SEQ ID NO: 37161 - protein, 58 aa, Zea mays subsp. mays
  peptide (1)..(58): Ceres Seq. ID no. 7117873
  misc_feature (26)..(53): NCBI GI NO: 34897626 NR Description: putative tetrafunctional protein for glyoxysomalfatty acid beta-oxidation
  misc_feature (26)..(53): NCBI GI NO: 34922417 NR Description: Glyoxysomal fatty acid beta-oxidationmultifunctional protein MFP-a
  misc_feature (26)..(53): NCBI GI NO: 551444 NR Description: protein MFP-b [Cucumis sativus]
  misc_feature (26)..(53): NCBI GI NO: 34922495 NR Description: Glyoxysomal fatty acid beta-oxidationmultifunctional protein MFP-a
  misc_feature (34)..(34): Xaa is any aa, unknown or other
  misc_feature (45)..(45): Xaa is any aa, unknown or other
MFIRLIVLVPNLECLWVLSDWRIWWGLGGAGATXMQYLENFPERXYKSMLLPLDDGGQ

SEQ ID NO: 37162 - DNA, 1856 bp, Zea mays subsp. mays; identical to SEQ ID NO: 25749
  misc_feature (1)..(1856): Ceres Seq. ID no. 13635560
  misc_feature (1488)..(1488): n is a, c, t, g, unknown, or other

SEQ ID NO: 37163 - protein, 549 aa, Zea mays subsp. mays; identical to SEQ ID NO: 25750
  peptide (1)..(549): Ceres Seq. ID no. 13635561
  misc_feature (25)..(381): Pfam Name: Pfam Description:  Calreticulin family
  misc_feature (1)..(531): NCBI GI NO: 21740628 NR Description: OSJNBb0012E08.10
  misc_feature (107)..(482): NCBI GI NO: 7441503 NR Description: calnexin - maize (fragment)
  misc_feature (2)..(531): NCBI GI NO: 3334138 NR Description: CALNEXIN HOMOLOG PRECURSOR
  misc_feature (7)..(533): NCBI GI NO: 15240353 NR Description: calnexin 1 (CNX1) [Arabidopsis thaliana]
  misc_feature (6)..(533): NCBI GI NO: 31321896 NR Description: putative papillar cell-specific calnexin
  misc_feature (2)..(531): NCBI GI NO: 11131469 NR Description: Calnexin homolog precursor
  misc_feature (7)..(531): NCBI GI NO: 15240773 NR Description: calnexin, putative [Arabidopsis thaliana]
  misc_feature (7)..(531): NCBI GI NO: 473878 NR Description: calnexin homolog
  misc_feature (10)..(531): NCBI GI NO: 11131766 NR Description: Calnexin homolog precursor
  misc_feature (24)..(535): NCBI GI NO: 18564808 NR Description: calnexin [Aspergillus niger]
  misc_feature (496)..(496): Xaa is any aa, unknown or other

SEQ ID NO: 37164 - protein, 548 aa, Zea mays subsp. mays; identical to SEQ ID NO: 25751
  peptide (1)..(548): Ceres Seq. ID no. 13635562
  misc_feature (24)..(380): Pfam Name: Pfam Description:  Calreticulin family
  misc_feature (1)..(530): NCBI GI NO: 21740628 NR Description: OSJNBb0012E08.10
  misc_feature (106)..(481): NCBI GI NO: 7441503 NR Description: calnexin - maize (fragment)
  misc_feature (1)..(530): NCBI GI NO: 3334138 NR Description: CALNEXIN HOMOLOG PRECURSOR
  misc_feature (6)..(532): NCBI GI NO: 15240353 NR Description: calnexin 1 (CNX1) [Arabidopsis thaliana]
  misc_feature (5)..(532): NCBI GI NO: 31321896 NR Description: putative papillar cell-specific calnexin
  misc_feature (1)..(530): NCBI GI NO: 11131469 NR Description: Calnexin homolog precursor
  misc_feature (6)..(530): NCBI GI NO: 15240773 NR Description: calnexin, putative [Arabidopsis thaliana]
  misc_feature (6)..(530): NCBI GI NO: 473878 NR Description: calnexin homolog
  misc_feature (9)..(530): NCBI GI NO: 11131766 NR Description: Calnexin homolog precursor
  misc_feature (23)..(534): NCBI GI NO: 18564808 NR Description: calnexin [Aspergillus niger]
  misc_feature (495)..(495): Xaa is any aa, unknown or other

SEQ ID NO: 37165 - protein, 418 aa, Zea mays subsp. mays; identical to SEQ ID NO: 25752
  peptide (1)..(418): Ceres Seq. ID no. 13635563
  misc_feature (1)..(250): Pfam Name: Pfam Description:  Calreticulin family
  misc_feature (1)..(400): NCBI GI NO: 21740628 NR Description: OSJNBb0012E08.10
  misc_feature (1)..(351): NCBI GI NO: 7441503 NR Description: calnexin - maize (fragment)
  misc_feature (1)..(400): NCBI GI NO: 3334138 NR Description: CALNEXIN HOMOLOG PRECURSOR
  misc_feature (1)..(402): NCBI GI NO: 15240353 NR Description: calnexin 1 (CNX1) [Arabidopsis thaliana]
  misc_feature (1)..(402): NCBI GI NO: 31321896 NR Description: putative papillar cell-specific calnexin
  misc_feature (1)..(400): NCBI GI NO: 11131469 NR Description: Calnexin homolog precursor
  misc_feature (1)..(400): NCBI GI NO: 15240773 NR Description: calnexin, putative [Arabidopsis thaliana]
  misc_feature (1)..(400): NCBI GI NO: 473878 NR Description: calnexin homolog
  misc_feature (1)..(400): NCBI GI NO: 11131766 NR Description: Calnexin homolog precursor
  misc_feature (1)..(404): NCBI GI NO: 18564808 NR Description: calnexin [Aspergillus niger]
  misc_feature (365)..(365): Xaa is any aa, unknown or other

SEQ ID NO: 37166 - DNA, 767 bp, Zea mays subsp. mays
  misc_feature (1)..(767): Ceres Seq. ID no. 13635648
acggcccggggaagggtttcaccgactttgctgctgtgaggaaagagattgctgatgaaacagatcgcataactgggaaaactaaagctatttcaaacgttcccatccatttgagtatatattcaccacatgttgttaacttgacacttatcgatcttcctggactgacaaaggtcgctgtagaggggcaaccagaatctattgttcaagatattgaaaacatggttcgagcttatgttgacaagccaaattgcatcatcttggctatctccccagctaaccaagatattgcaacgtcagatgctatcaagcttgctagggatgttgatccttcaggtgacaggacttttggagtcttaacaaagcttgatttaatggacaagggtaccaatgctgttgatgtgcttgaagggaggcaatatcgcttacaacacccctgggttggaattgtcaatcgctcacaagctgatatcaacaagaatgtcgatatgctctcagcaagacgcaaagaaaaagagtactttgagagtagtcctgaatatggtcacttggcacataaaatgggtgcagagtatcttgccaagcttctgtcacagcatttagaggctgtgatcagggcaaaaattccaagtattatagctatgattaacaaaacaattgatgaaatagaagcccagttggatcgacttggtaggccaattggaggtgacgctggggctcagttgtacacaatcttggatatgtgtcgggcatttgaccgtgtcttt

SEQ ID NO: 37167 - protein, 255 aa, Zea mays subsp. mays
  peptide (1)..(255): Ceres Seq. ID no. 13635649
  misc_feature (131)..(254): Pfam Name: Pfam Description:  Dynamin central region
  misc_feature (2)..(254): NCBI GI NO: 18071348 NR Description: putative GTP-binding protein
  misc_feature (2)..(254): NCBI GI NO: 37536976 NR Description: putative phragmoplastin
  misc_feature (2)..(254): NCBI GI NO: 6651403 NR Description: dynamin-like protein 5 [Arabidopsis thaliana]
  misc_feature (2)..(254): NCBI GI NO: 19569772 NR Description: dynamin-like protein C [Arabidopsis thaliana]
  misc_feature (2)..(254): NCBI GI NO: 21537304 NR Description: dynamin, putative [Arabidopsis thaliana]
  misc_feature (2)..(254): NCBI GI NO: 15223914 NR Description: dynamin -related [Arabidopsis thaliana]
  misc_feature (2)..(254): NCBI GI NO: 11357275 NR Description: dynamin-like protein 4
  misc_feature (2)..(254): NCBI GI NO: 18411520 NR Description: dynamin-related protein 4 (ADL4)
  misc_feature (2)..(254): NCBI GI NO: 6651401 NR Description: dynamin-like protein 4 [Arabidopsis thaliana]
  misc_feature (4)..(254): NCBI GI NO: 7484944 NR Description: probable phragmoplastin At2g44590
GPGKGFTDFAAVRKEIADETDRITGKTKAISNVPIHLSIYSPHVVNLTLIDLPGLTKVAVEGQPESIVQDIENMVRAYVDKPNCIILAISPANQDIATSDAIKLARDVDPSGDRTFGVLTKLDLMDKGTNAVDVLEGRQYRLQHPWVGIVNRSQADINKNVDMLSARRKEKEYFESSPEYGHLAHKMGAEYLAKLLSQHLEAVIRAKIPSIIAMINKTIDEIEAQLDRLGRPIGGDAGAQLYTILDMCRAFDRVF

SEQ ID NO: 37168 - protein, 182 aa, Zea mays subsp. mays
  peptide (1)..(182): Ceres Seq. ID no. 13635650
  misc_feature (58)..(181): Pfam Name: Pfam Description:  Dynamin central region
  misc_feature (1)..(181): NCBI GI NO: 18071348 NR Description: putative GTP-binding protein
  misc_feature (1)..(181): NCBI GI NO: 37536976 NR Description: putative phragmoplastin
  misc_feature (1)..(181): NCBI GI NO: 6651403 NR Description: dynamin-like protein 5 [Arabidopsis thaliana]
  misc_feature (1)..(181): NCBI GI NO: 19569772 NR Description: dynamin-like protein C [Arabidopsis thaliana]
  misc_feature (1)..(181): NCBI GI NO: 21537304 NR Description: dynamin, putative [Arabidopsis thaliana]
  misc_feature (1)..(181): NCBI GI NO: 15223914 NR Description: dynamin -related [Arabidopsis thaliana]
  misc_feature (1)..(181): NCBI GI NO: 11357275 NR Description: dynamin-like protein 4
  misc_feature (1)..(181): NCBI GI NO: 18411520 NR Description: dynamin-related protein 4 (ADL4)
  misc_feature (1)..(181): NCBI GI NO: 6651401 NR Description: dynamin-like protein 4 [Arabidopsis thaliana]
  misc_feature (1)..(181): NCBI GI NO: 7484944 NR Description: probable phragmoplastin At2g44590
MVRAYVDKPNCIILAISPANQDIATSDAIKLARDVDPSGDRTFGVLTKLDLMDKGTNAVDVLEGRQYRLQHPWVGIVNRSQADINKNVDMLSARRKEKEYFESSPEYGHLAHKMGAEYLAKLLSQHLEAVIRAKIPSIIAMINKTIDEIEAQLDRLGRPIGGDAGAQLYTILDMCRAFDRVF

SEQ ID NO: 37169 - protein, 131 aa, Zea mays subsp. mays
  peptide (1)..(131): Ceres Seq. ID no. 13635651
  misc_feature (7)..(130): Pfam Name: Pfam Description:  Dynamin central region
  misc_feature (1)..(130): NCBI GI NO: 18071348 NR Description: putative GTP-binding protein
  misc_feature (1)..(130): NCBI GI NO: 37536976 NR Description: putative phragmoplastin
  misc_feature (1)..(130): NCBI GI NO: 6651403 NR Description: dynamin-like protein 5 [Arabidopsis thaliana]
  misc_feature (1)..(130): NCBI GI NO: 21537304 NR Description: dynamin, putative [Arabidopsis thaliana]
  misc_feature (1)..(130): NCBI GI NO: 19569772 NR Description: dynamin-like protein C [Arabidopsis thaliana]
  misc_feature (1)..(130): NCBI GI NO: 15223914 NR Description: dynamin -related [Arabidopsis thaliana]
  misc_feature (1)..(130): NCBI GI NO: 11357275 NR Description: dynamin-like protein 4
  misc_feature (1)..(130): NCBI GI NO: 18411520 NR Description: dynamin-related protein 4 (ADL4)
  misc_feature (1)..(130): NCBI GI NO: 6651401 NR Description: dynamin-like protein 4 [Arabidopsis thaliana]
  misc_feature (1)..(130): NCBI GI NO: 7484944 NR Description: probable phragmoplastin At2g44590
MDKGTNAVDVLEGRQYRLQHPWVGIVNRSQADINKNVDMLSARRKEKEYFESSPEYGHLAHKMGAEYLAKLLSQHLEAVIRAKIPSIIAMINKTIDEIEAQLDRLGRPIGGDAGAQLYTILDMCRAFDRVF

SEQ ID NO: 37170 - DNA, 936 bp, Zea mays subsp. mays
  misc_feature (1)..(936): Ceres Seq. ID no. 12636639
agagagagagagctcactagtccccccccccccccccgagcccatcaaggaggagttccccaccctctcctatgccgacttctaccagcttgccggagttgtggccgtcgaggtcaccggtgggcctgagatccccttccacccaggcagggaggacaagcctcagccgccacctgagggccgtcttcctgatgccaccaagggttctgaccacctgaggcaagtctttggcaagcagatgggtttgagtgatcaggacatcgttgccctctctggtggccacaccttgggaaggtgccacaaagagcggtctggttttgagggtgcctggactacgaaccctttggtctttgacaactcttacttcaaggaacttctgagtggtgacaaggagggccttcttcagctcccaagtgacaaagccctgctgagcgaccctgtcttccgccctcttgtggagaaatatgctgcagatgagaaggcattctttgatgactacaaagaggcccacctcaagctctccgaactggggtatgctgatgcttaaatggtccatatcctggagcgggacacaaactgctgcctgtatggactcgtgcgattcagggtgaaccatcagattgtctagtgtcttctctgtaataaatttatctgttcttggtactttgtctatggttgaatcggaacccattttccgtttgcctagattcttaatttctggtgctgtatccagctgaaactagtagatctatgatcttgtggctgcagcatgttcttgtcacttaccttttatctggtctccgttggttcggttcacaggttgtgtgctttaaaaggctgtgcttaagtcctgcaattcgagtccaccaaactgtagggtgcaagtcgagattttattagtgatgcaagttgctggtattggtgcattatcgggct

SEQ ID NO: 37171 - protein, 181 aa, Zea mays subsp. mays
  peptide (1)..(181): Ceres Seq. ID no. 12636640
  misc_feature (13)..(158): Pfam Name: Pfam Description:  Peroxidase
  misc_feature (13)..(181): NCBI GI NO: 3688398 NR Description: ascorbate peroxidase
  misc_feature (13)..(181): NCBI GI NO: 7489542 NR Description: L-ascorbate peroxidase (EC 1.11.1.11)
  misc_feature (13)..(181): NCBI GI NO: 18265379 NR Description: ascorbate peroxidase [Brassica oleracea]
  misc_feature (13)..(181): NCBI GI NO: 1076800 NR Description: L-ascorbate peroxidase (EC 1
  misc_feature (13)..(181): NCBI GI NO: 541927 NR Description: L-ascorbate peroxidase (EC 1.11.1.11) - radish
  misc_feature (13)..(180): NCBI GI NO: 2997688 NR Description: ascorbate peroxidase [Zantedeschia aethiopica]
  misc_feature (13)..(181): NCBI GI NO: 18265381 NR Description: ascorbate peroxidase [Brassica oleracea]
  misc_feature (13)..(181): NCBI GI NO: 24421233 NR Description: ascorbate peroxidase [Brassica juncea]
  misc_feature (13)..(181): NCBI GI NO: 28627542 NR Description: putative ascorbate peroxidase [Capsicum annuum]
  misc_feature (13)..(181): NCBI GI NO: 1420938 NR Description: ascorbate peroxidase [Vigna unguiculata]
ERESSLVPPPPPEPIKEEFPTLSYADFYQLAGVVAVEVTGGPEIPFHPGREDKPQPPPEGRLPDATKGSDHLRQVFGKQMGLSDQDIVALSGGHTLGRCHKERSGFEGAWTTNPLVFDNSYFKELLSGDKEGLLQLPSDKALLSDPVFRPLVEKYAADEKAFFDDYKEAHLKLSELGYADA

SEQ ID NO: 37172 - protein, 102 aa, Zea mays subsp. mays
  peptide (1)..(102): Ceres Seq. ID no. 12636641
  misc_feature (1)..(79): Pfam Name: Pfam Description:  Peroxidase
  misc_feature (1)..(102): NCBI GI NO: 3688398 NR Description: ascorbate peroxidase
  misc_feature (1)..(102): NCBI GI NO: 7489542 NR Description: L-ascorbate peroxidase (EC 1.11.1.11)
  misc_feature (1)..(102): NCBI GI NO: 18265379 NR Description: ascorbate peroxidase [Brassica oleracea]
  misc_feature (1)..(102): NCBI GI NO: 1076800 NR Description: L-ascorbate peroxidase (EC 1
  misc_feature (1)..(102): NCBI GI NO: 541927 NR Description: L-ascorbate peroxidase (EC 1.11.1.11) - radish
  misc_feature (1)..(101): NCBI GI NO: 2997688 NR Description: ascorbate peroxidase [Zantedeschia aethiopica]
  misc_feature (1)..(102): NCBI GI NO: 18265381 NR Description: ascorbate peroxidase [Brassica oleracea]
  misc_feature (1)..(102): NCBI GI NO: 28627542 NR Description: putative ascorbate peroxidase [Capsicum annuum]
  misc_feature (1)..(102): NCBI GI NO: 24421233 NR Description: ascorbate peroxidase [Brassica juncea]
  misc_feature (1)..(102): NCBI GI NO: 1420938 NR Description: ascorbate peroxidase [Vigna unguiculata]
MGLSDQDIVALSGGHTLGRCHKERSGFEGAWTTNPLVFDNSYFKELLSGDKEGLLQLPSDKALLSDPVFRPLVEKYAADEKAFFDDYKEAHLKLSELGYADA

SEQ ID NO: 37173 - DNA, 1709 bp, Zea mays subsp. mays
  misc_feature (1)..(1709): Ceres Seq. ID no. 13600415
gagctactactgttgaagcgattctcactaaaaccctcgaacacatcgcctttatctctttctctagatctactcgctatggctactatcaccgttgttaaggctagacagatcttcgacagtcgtggtaatcccaccgttgaggtggatatccacacgtcaaatggtgttaaggttacagcagctgttccaagtggagcttccactggtatctatgaggctcttgagctgagggatggaggatctgactaccttggaaagggtgtatctaaggctgttggcaatgtgaacaacatcatcgggccagcacttattggaaaggacccaactcagcagactgctattgacaacttcatggtccatgaacttgacggaacccaaaacgagtgggggtggtgcaagcaaaagcttggagccaatgcgattcttgctgtgtctcttgctgtctgcaaagctggggctgttgtcagcggcattcctctatacaagcacattgccaaccttgctggtaaccccaagattgtgctaccagttcctgccttcaacgtcatcaatggtggatcccatgccggaaacaagcttgctatgcaggagtttatgatcctccctgttggagctgcttctttcaaggaagccatgaagatgggtgtggaagtttaccaccacttgaagtctgtgattaagaagaagtacggccaggatgccacaaatgttggtgatgaaggtgggtttgcaccaaacattcaggagaacaaggagggtcttgaattgctcaagactgctatcgagaaggctggatacactggaaaggttgtcattggaatggatgttgccgcttcagagttctactcagaagacaagacctacgacttgaacttcaaagaagagaacaacaatggctctcagaagatttctggtgatgctctaaaggacctgtacaagtcctttgtcgctgagtacccaatcgtgtccattgaggacccatttgaccaagatgactgggagcactatgctaagatgaccactgagtgtggaaccgaggttcagattgtcggtgatgatttgttggtcactaaccccaagagagttgctaaggcaatcgccgagaagtcttgcaatgctcttcttttgaaggttaaccaaatcggatctgtaaccgagagtatcgaggcagttaagatgtcgaagaaagcaggttggggagtgatgaccagccacagaagtggtgaaaccgaggacacattcattgctgacttagccgttggcttgtctactggacaaatcaaaaccggtgctccttgcagatccgagcgtcttgccaagtacaaccagcttttgcgtattgaggaggagttgggatcagaggcaatttacgctggagtcaacttccgcaaacctgtagaaccctactaaatggagcttttagaagcaaagtggtcttctttgtgacgaggagaagatgacctgagtttgatcatttgctttaattaaataaaacgttctgtttttgtttcttctttgtttggtttcttacgtcttttgttgaaccctttttgggaaaagttactcatttttgtaagggaaacatgagaatgctctgcctttgtcgaggacggtagccccttatttcaatctaatttcggctttactcaaaaaaaaaaaaaaaaaaaactcgagggggggcccggtacccaattgttaaacacaat

SEQ ID NO: 37174 - protein, 470 aa, Zea mays subsp. mays
  peptide (1)..(470): Ceres Seq. ID no. 13600416
  misc_feature (173)..(467): Pfam Name: Pfam Description:  Enolase, C-terminal TIM barrel domain
  misc_feature (27)..(470): NCBI GI NO: 15227987 NR Description: enolase (2-phospho-D-glycerate hydroylase)
  misc_feature (27)..(470): NCBI GI NO: 15809970 NR Description: At2g36530/F1O11.16 [Arabidopsis thaliana]
  misc_feature (27)..(470): NCBI GI NO: 18175728 NR Description: putative enolase
  misc_feature (27)..(470): NCBI GI NO: 20260174 NR Description: enolase (2-phospho-D-glycerate hydroylase)
  misc_feature (27)..(470): NCBI GI NO: 119354 NR Description: Enolase
  misc_feature (27)..(470): NCBI GI NO: 7436883 NR Description: phosphopyruvate hydratase (EC 4
  misc_feature (29)..(470): NCBI GI NO: 14423688 NR Description: Enolase 1
  misc_feature (29)..(470): NCBI GI NO: 14423687 NR Description: Enolase 2
  misc_feature (27)..(470): NCBI GI NO: 3023714 NR Description: Enolase
  misc_feature (29)..(470): NCBI GI NO: 1169534 NR Description: Enolase
ELLLLKRFSLKPSNTSPLSLSLDLLAMATITVVKARQIFDSRGNPTVEVDIHTSNGVKVTAAVPSGASTGIYEALELRDGGSDYLGKGVSKAVGNVNNIIGPALIGKDPTQQTAIDNFMVHELDGTQNEWGWCKQKLGANAILAVSLAVCKAGAVVSGIPLYKHIANLAGNPKIVLPVPAFNVINGGSHAGNKLAMQEFMILPVGAASFKEAMKMGVEVYHHLKSVIKKKYGQDATNVGDEGGFAPNIQENKEGLELLKTAIEKAGYTGKVVIGMDVAASEFYSEDKTYDLNFKEENNNGSQKISGDALKDLYKSFVAEYPIVSIEDPFDQDDWEHYAKMTTECGTEVQIVGDDLLVTNPKRVAKAIAEKSCNALLLKVNQIGSVTESIEAVKMSKKAGWGVMTSHRSGETEDTFIADLAVGLSTGQIKTGAPCRSERLAKYNQLLRIEEELGSEAIYAGVNFRKPVEPY

SEQ ID NO: 37175 - protein, 444 aa, Zea mays subsp. mays
  peptide (1)..(444): Ceres Seq. ID no. 13600417
  misc_feature (147)..(441): Pfam Name: Pfam Description:  Enolase, C-terminal TIM barrel domain
  misc_feature (1)..(444): NCBI GI NO: 15227987 NR Description: enolase (2-phospho-D-glycerate hydroylase)
  misc_feature (1)..(444): NCBI GI NO: 15809970 NR Description: At2g36530/F1O11.16 [Arabidopsis thaliana]
  misc_feature (1)..(444): NCBI GI NO: 18175728 NR Description: putative enolase
  misc_feature (1)..(444): NCBI GI NO: 20260174 NR Description: enolase (2-phospho-D-glycerate hydroylase)
  misc_feature (1)..(444): NCBI GI NO: 119354 NR Description: Enolase
  misc_feature (1)..(444): NCBI GI NO: 7436883 NR Description: phosphopyruvate hydratase (EC 4
  misc_feature (3)..(444): NCBI GI NO: 14423688 NR Description: Enolase 1
  misc_feature (3)..(444): NCBI GI NO: 14423687 NR Description: Enolase 2
  misc_feature (1)..(444): NCBI GI NO: 3023714 NR Description: Enolase
  misc_feature (3)..(444): NCBI GI NO: 1169534 NR Description: Enolase
MATITVVKARQIFDSRGNPTVEVDIHTSNGVKVTAAVPSGASTGIYEALELRDGGSDYLGKGVSKAVGNVNNIIGPALIGKDPTQQTAIDNFMVHELDGTQNEWGWCKQKLGANAILAVSLAVCKAGAVVSGIPLYKHIANLAGNPKIVLPVPAFNVINGGSHAGNKLAMQEFMILPVGAASFKEAMKMGVEVYHHLKSVIKKKYGQDATNVGDEGGFAPNIQENKEGLELLKTAIEKAGYTGKVVIGMDVAASEFYSEDKTYDLNFKEENNNGSQKISGDALKDLYKSFVAEYPIVSIEDPFDQDDWEHYAKMTTECGTEVQIVGDDLLVTNPKRVAKAIAEKSCNALLLKVNQIGSVTESIEAVKMSKKAGWGVMTSHRSGETEDTFIADLAVGLSTGQIKTGAPCRSERLAKYNQLLRIEEELGSEAIYAGVNFRKPVEPY

SEQ ID NO: 37176 - protein, 352 aa, Zea mays subsp. mays
  peptide (1)..(352): Ceres Seq. ID no. 13600418
  misc_feature (55)..(349): Pfam Name: Pfam Description:  Enolase, C-terminal TIM barrel domain
  misc_feature (1)..(352): NCBI GI NO: 15227987 NR Description: enolase (2-phospho-D-glycerate hydroylase)
  misc_feature (1)..(352): NCBI GI NO: 15809970 NR Description: At2g36530/F1O11.16 [Arabidopsis thaliana]
  misc_feature (1)..(352): NCBI GI NO: 18175728 NR Description: putative enolase
  misc_feature (1)..(352): NCBI GI NO: 20260174 NR Description: enolase (2-phospho-D-glycerate hydroylase)
  misc_feature (1)..(352): NCBI GI NO: 119354 NR Description: Enolase
  misc_feature (1)..(352): NCBI GI NO: 7436883 NR Description: phosphopyruvate hydratase (EC 4
  misc_feature (1)..(352): NCBI GI NO: 14423688 NR Description: Enolase 1
  misc_feature (1)..(352): NCBI GI NO: 14423687 NR Description: Enolase 2
  misc_feature (1)..(352): NCBI GI NO: 3023714 NR Description: Enolase
  misc_feature (1)..(352): NCBI GI NO: 1169534 NR Description: Enolase
MVHELDGTQNEWGWCKQKLGANAILAVSLAVCKAGAVVSGIPLYKHIANLAGNPKIVLPVPAFNVINGGSHAGNKLAMQEFMILPVGAASFKEAMKMGVEVYHHLKSVIKKKYGQDATNVGDEGGFAPNIQENKEGLELLKTAIEKAGYTGKVVIGMDVAASEFYSEDKTYDLNFKEENNNGSQKISGDALKDLYKSFVAEYPIVSIEDPFDQDDWEHYAKMTTECGTEVQIVGDDLLVTNPKRVAKAIAEKSCNALLLKVNQIGSVTESIEAVKMSKKAGWGVMTSHRSGETEDTFIADLAVGLSTGQIKTGAPCRSERLAKYNQLLRIEEELGSEAIYAGVNFRKPVEPY

SEQ ID NO: 37177 - DNA, 470 bp, Zea mays subsp. mays
  misc_feature (1)..(470): Ceres Seq. ID no. 7118147
aactgagcctaagaaaaagaccaaaactgttattgagaagtattgggattgggagctttcaaatgagacacaacctatttggcttcggaaccccaaagaggtttcaactgaggaatacaatgattttttcaagaaaaccttcaatgagtacttgggccctttggcatcatcacacttcactacagagggtgaggtagaatttaggtcaattctttttgttcctgctacaaggaaaggaagatgtaactgctgatagtaggaagaccaagaatatcagactatatgttaagcgtgtattcatatcagatgactttgatggagaattgttcccaagatatttgagttttgtggaaggggtgttgttgactcaaatgaccttccattgaatgtttctcgtgagattccttcaagaaaagtcgaattgttcgtataaatgagaaaaaggctgggtgcggaaagcctttgatatg

SEQ ID NO: 37178 - protein, 83 aa, Zea mays subsp. mays
  peptide (1)..(83): Ceres Seq. ID no. 7118148
  misc_feature (1)..(74): Pfam Name: Pfam Description:  Hsp90 protein
  misc_feature (1)..(74): NCBI GI NO: 15231505 NR Description: putative heat-shock protein; protein id:At3g07770
  misc_feature (2)..(74): NCBI GI NO: 15228059 NR Description: putative heat shock protein; protein id:At2g04030
  misc_feature (2)..(74): NCBI GI NO: 20453106 NR Description: At2g04030/F3C11.14 [Arabidopsis thaliana]
  misc_feature (2)..(74): NCBI GI NO: 30678090 NR Description: heat shock protein, putative
  misc_feature (2)..(74): NCBI GI NO: 1076758 NR Description: heat-shock protein, 82K, precursor - rye
  misc_feature (2)..(74): NCBI GI NO: 1906830 NR Description: heat shock protein [Arabidopsis thaliana]
  misc_feature (4)..(74): NCBI GI NO: 23957584 NR Description: heat shock protein-90 [Capra hircus]
  misc_feature (2)..(74): NCBI GI NO: 21357739 NR Description: Glycoprotein 93 CG5520-PA
  misc_feature (2)..(75): NCBI GI NO: 27803586 NR Description: heat shock protein gp96
  misc_feature (4)..(74): NCBI GI NO: 31242551 NR Description: ENSANGP00000015826 [Anopheles gambiae]
TEPKKKTKTVIEKYWDWELSNETQPIWLRNPKEVSTEEYNDFFKKTFNEYLGPLASSHFTTEGEVEFRSILFVPATRKGRCNC

SEQ ID NO: 37179 - protein, 64 aa, Zea mays subsp. mays
  peptide (1)..(64): Ceres Seq. ID no. 7118149
LSLRKRPKLLLRSIGIGSFQMRHNLFGFGTPKRFQLRNTMIFSRKPSMSTWALWHHHTSLQRVR

SEQ ID NO: 37180 - protein, 44 aa, Zea mays subsp. mays
  peptide (1)..(44): Ceres Seq. ID no. 7118150
MRHNLFGFGTPKRFQLRNTMIFSRKPSMSTWALWHHHTSLQRVR

SEQ ID NO: 37181 - DNA, 2887 bp, Zea mays subsp. mays; identical to SEQ ID NO: 32436
  misc_feature (1)..(2887): Ceres Seq. ID no. 13635664

SEQ ID NO: 37182 - protein, 897 aa, Zea mays subsp. mays; identical to SEQ ID NO: 32437
  peptide (1)..(897): Ceres Seq. ID no. 13635665
  misc_feature (464)..(892): NCBI GI NO: 15208447 NR Description: kinesin heavy chain [Zea mays]
  misc_feature (80)..(395): NCBI GI NO: 15208447 NR Description: kinesin heavy chain [Zea mays]
  misc_feature (1)..(395): NCBI GI NO: 30693419 NR Description: expressed protein [Arabidopsis thaliana]
  misc_feature (676)..(896): NCBI GI NO: 30693419 NR Description: expressed protein [Arabidopsis thaliana]
  misc_feature (1)..(524): NCBI GI NO: 30698217 NR Description: kinesin heavy chain DNA binding protein-related
  misc_feature (694)..(896): NCBI GI NO: 30698217 NR Description: kinesin heavy chain DNA binding protein-related
  misc_feature (1)..(506): NCBI GI NO: 18416291 NR Description: hypothetical protein [Arabidopsis thaliana]
  misc_feature (485)..(894): NCBI GI NO: 18416291 NR Description: hypothetical protein [Arabidopsis thaliana]
  misc_feature (1)..(400): NCBI GI NO: 15234898 NR Description: kinesin like protein [Arabidopsis thaliana]
  misc_feature (607)..(896): NCBI GI NO: 15234898 NR Description: kinesin like protein [Arabidopsis thaliana]

SEQ ID NO: 37183 - protein, 808 aa, Zea mays subsp. mays; identical to SEQ ID NO: 32438
  peptide (1)..(808): Ceres Seq. ID no. 13635666
  misc_feature (375)..(803): NCBI GI NO: 15208447 NR Description: kinesin heavy chain [Zea mays]
  misc_feature (1)..(306): NCBI GI NO: 15208447 NR Description: kinesin heavy chain [Zea mays]
  misc_feature (1)..(306): NCBI GI NO: 30693419 NR Description: expressed protein [Arabidopsis thaliana]
  misc_feature (587)..(807): NCBI GI NO: 30693419 NR Description: expressed protein [Arabidopsis thaliana]
  misc_feature (1)..(435): NCBI GI NO: 30698217 NR Description: kinesin heavy chain DNA binding protein-related
  misc_feature (605)..(807): NCBI GI NO: 30698217 NR Description: kinesin heavy chain DNA binding protein-related
  misc_feature (1)..(417): NCBI GI NO: 18416291 NR Description: hypothetical protein [Arabidopsis thaliana]
  misc_feature (396)..(805): NCBI GI NO: 18416291 NR Description: hypothetical protein [Arabidopsis thaliana]
  misc_feature (1)..(311): NCBI GI NO: 15234898 NR Description: kinesin like protein [Arabidopsis thaliana]
  misc_feature (518)..(807): NCBI GI NO: 15234898 NR Description: kinesin like protein [Arabidopsis thaliana]

SEQ ID NO: 37184 - protein, 573 aa, Zea mays subsp. mays; identical to SEQ ID NO: 32439
  peptide (1)..(573): Ceres Seq. ID no. 13635667
  misc_feature (140)..(568): NCBI GI NO: 15208447 NR Description: kinesin heavy chain [Zea mays]
  misc_feature (1)..(71): NCBI GI NO: 15208447 NR Description: kinesin heavy chain [Zea mays]
  misc_feature (1)..(71): NCBI GI NO: 30693419 NR Description: expressed protein [Arabidopsis thaliana]
  misc_feature (352)..(572): NCBI GI NO: 30693419 NR Description: expressed protein [Arabidopsis thaliana]
  misc_feature (1)..(200): NCBI GI NO: 30698217 NR Description: kinesin heavy chain DNA binding protein-related
  misc_feature (370)..(572): NCBI GI NO: 30698217 NR Description: kinesin heavy chain DNA binding protein-related
  misc_feature (1)..(182): NCBI GI NO: 18416291 NR Description: hypothetical protein [Arabidopsis thaliana]
  misc_feature (161)..(570): NCBI GI NO: 18416291 NR Description: hypothetical protein [Arabidopsis thaliana]
  misc_feature (1)..(76): NCBI GI NO: 15234898 NR Description: kinesin like protein [Arabidopsis thaliana]
  misc_feature (283)..(572): NCBI GI NO: 15234898 NR Description: kinesin like protein [Arabidopsis thaliana]

SEQ ID NO: 37185 - DNA, 2150 bp, Zea mays subsp. mays
  misc_feature (1)..(2150): Ceres Seq. ID no. 13666124
cactagtcccccccccccccccccttttcagagatggggcttaaactgcgggttgacatgcctcagcaggctatggatattgccacagtattctttcgtcagtcaaccacagcaagtgaagcaaaggagaacataaaaacacttaatgaccaaagagagagaaatgtcaaagctcttcaagaaaagatgaaattgaacaagaaggaggttcaacgctttaatcctgttgatgctttccccggggatgccataatatttatgagggtcttgaatctcctcagaggtctttcagcttcactaaatgttaggatagtttatctggacatcatgaggccatctgctgaatcaactttgttagggagtttgacacacggacaaatacctaacagtcagtggatttttgactcacctgctaactctgatgtggagtctaaactgagaaattatctgcttgagttgggaagcgacaaaattttaggaatacaagtctgcgcatataaagatggaaaggtcataatagatactgctgctggtatgctggggaagtatatccccgacctgttcaacctgattctctttttcctgttttctcagtgactaagggtatcactgctgggatggtacattggcttgtggacaaagggaagctgaagtacgaggaaacagttgccaacatatggccgaattttggaactaacggaaaggagttaataaaggtccatcatcttctaaatcacacatccggtttgcacaatgcactgggtgatgtggtaaagaatgatcctttgttggtatgtgactgggaggagacactaaaccagattacgaagagtacacctgagaccgaacctggttcagcacaaatttaccattacctctccttcggttggctgtgtgggggagtcatagagcatgcatctgggaagaagtttcaagagattctagaagaggctattgttcgtcctcttcacattgagggggagttgtatgttggcattccaccaggtgtcgagtctcggctggcagcgctgacagttgacaccgaggagctccagaagctatcaggaatcagggcaggtgcagatgtgccagcagctctgctgaacaacatcgcgcagatggcgtccggtgtgcccgctattttcaacacgctaaacgtccgtcgggccatcatccctgccgccaacggccactgctctgcccgcgcgctcgctcgatactacgcggcgctagcggccggcggttctgttcccccgccgcactcttcgggcgccatgccgcccctcggcagccacgtgcacacccccaagttcccgaccgcgccgctcaagaagaagaagaagggcgccggaaagaagaagggcgccggcggcggctccatgggagacctcaaggtccaggatataagcggcggcagcagcgacaggaacgggtactgccagctgcgcaccagcgacgccgacagcgaggcggggagcggcagcggcggaggcggcaggatgttcggcagcgacaggatcctcgacgcgttcatgggcgtcggcgagtacgagggcatggcgcaccgggacggcaagttcgggctcgggttcaggaggtacgacgacgccggcagcggcagaggcaggctgaggtgcttcgggcactccgggatgggcggctcgaccgggttctgcgacgtggagaacggcttcgccatcgcggtgacggtgaacaagctgtctctgggcagcgtcacgcgcggcgtcgtccggctcgtcctcgaggaactgggcctgcccgtgccggacgagtactcggccaccggggagaaggggcctgacatgatgctcaacctgacgacaacgacgacgactacgccgccgcaactgagatgacgacggcgaaactgagattaccaggttgggttcgtaataatctgtggaacgagatatatagcgagcagaaggaaggtggggtacagggatttggtggacagtatatatacgcgtgccattttgattttgacgtggcatgtaaaactcggcaaattctggtatattacgaagcaagctgggtgctgggaattgtggccagcagtacaagaaatggacatgctagtttgttgaccaaaaaaaaaaaaaaaaaaaactcgagggggggcccggtac

SEQ ID NO: 37186 - protein, 419 aa, Zea mays subsp. mays
  peptide (1)..(419): Ceres Seq. ID no. 13666125
  misc_feature (1)..(405): NCBI GI NO: 18420844 NR Description: expressed protein [Arabidopsis thaliana]
  misc_feature (1)..(315): NCBI GI NO: 15081731 NR Description: AT5g24810/F6A4_20 [Arabidopsis thaliana]
  misc_feature (1)..(211): NCBI GI NO: 16124510 NR Description: esterase A [Caulobacter crescentus CB15]
  misc_feature (292)..(367): NCBI GI NO: 16124510 NR Description: esterase A [Caulobacter crescentus CB15]
  misc_feature (1)..(210): NCBI GI NO: 29827845 NR Description: putative esterase A
  misc_feature (297)..(368): NCBI GI NO: 29827845 NR Description: putative esterase A
  misc_feature (1)..(209): NCBI GI NO: 13475683 NR Description: esterase [Mesorhizobium loti]
  misc_feature (321)..(371): NCBI GI NO: 13475683 NR Description: esterase [Mesorhizobium loti]
  misc_feature (1)..(206): NCBI GI NO: 15609600 NR Description: lipP [Mycobacterium tuberculosis H37Rv]
  misc_feature (318)..(367): NCBI GI NO: 15609600 NR Description: lipP [Mycobacterium tuberculosis H37Rv]
MVHWLVDKGKLKYEETVANIWPNFGTNGKELIKVHHLLNHTSGLHNALGDVVKNDPLLVCDWEETLNQITKSTPETEPGSAQIYHYLSFGWLCGGVIEHASGKKFQEILEEAIVRPLHIEGELYVGIPPGVESRLAALTVDTEELQKLSGIRAGADVPAALLNNIAQMASGVPAIFNTLNVRRAIIPAANGHCSARALARYYAALAAGGSVPPPHSSGAMPPLGSHVHTPKFPTAPLKKKKKGAGKKKGAGGGSMGDLKVQDISGGSSDRNGYCQLRTSDADSEAGSGSGGGGRMFGSDRILDAFMGVGEYEGMAHRDGKFGLGFRRYDDAGSGRGRLRCFGHSGMGGSTGFCDVENGFAIAVTVNKLSLGSVTRGVVRLVLEELGLPVPDEYSATGEKGPDMMLNLTTTTTTTPPQLR

SEQ ID NO: 37187 - protein, 252 aa, Zea mays subsp. mays
  peptide (1)..(252): Ceres Seq. ID no. 13666126
  misc_feature (1)..(238): NCBI GI NO: 18420844 NR Description: expressed protein [Arabidopsis thaliana]
  misc_feature (1)..(148): NCBI GI NO: 15081731 NR Description: AT5g24810/F6A4_20 [Arabidopsis thaliana]
  misc_feature (1)..(44): NCBI GI NO: 16124510 NR Description: esterase A [Caulobacter crescentus CB15]
  misc_feature (125)..(200): NCBI GI NO: 16124510 NR Description: esterase A [Caulobacter crescentus CB15]
  misc_feature (1)..(43): NCBI GI NO: 29827845 NR Description: putative esterase A
  misc_feature (130)..(201): NCBI GI NO: 29827845 NR Description: putative esterase A
  misc_feature (1)..(42): NCBI GI NO: 13475683 NR Description: esterase [Mesorhizobium loti]
  misc_feature (154)..(204): NCBI GI NO: 13475683 NR Description: esterase [Mesorhizobium loti]
  misc_feature (1)..(39): NCBI GI NO: 15609600 NR Description: lipP [Mycobacterium tuberculosis H37Rv]
  misc_feature (151)..(200): NCBI GI NO: 15609600 NR Description: lipP [Mycobacterium tuberculosis H37Rv]
MASGVPAIFNTLNVRRAIIPAANGHCSARALARYYAALAAGGSVPPPHSSGAMPPLGSHVHTPKFPTAPLKKKKKGAGKKKGAGGGSMGDLKVQDISGGSSDRNGYCQLRTSDADSEAGSGSGGGGRMFGSDRILDAFMGVGEYEGMAHRDGKFGLGFRRYDDAGSGRGRLRCFGHSGMGGSTGFCDVENGFAIAVTVNKLSLGSVTRGVVRLVLEELGLPVPDEYSATGEKGPDMMLNLTTTTTTTPPQLR

SEQ ID NO: 37188 - DNA, 1035 bp, Zea mays subsp. mays
  misc_feature (1)..(1035): Ceres Seq. ID no. 13579701
agtcgtgtgcccgagccgaggttccccaaacacgcacagcacacgaacacacaccgcgcccagctccgaggtgatcttccggcggccggcgagatgagccgtggcacaggcgcgggctatgaccgccacatcaccatcttctccccggagggacgcctgtaccaagtcgagtacgcgttcaaggcggtgaagtcggcgggtgtcacgtcgatcggcgtccgcggcgcggactccgtctgcgttgttacgcagaagaaagtcccggataagttgctggatcagacgagcgtgacacacctgttcccgatcaccaagtacgtcggattgcttgccactggccttacagctgatggtaggtcattggtttcccaagcaaggaacgaagcagctgagtttcgtttcaaatggggctaccgagatgccagttgatgtgttagcaaaatggattgctgacaaagctcaagtttacacgcagcatgcatacatgagaccccttggagtagttgctatggtcttgggctacgatgaagagaaaaatgcccaactattcaagtgcgaccctgctggtcacttctttggacataaggcaactagtgccgggctcaaggagcaggaagcaataaattttctggagaagaaaatgaaggatgacccgaaattcacctatgacgaaactgtgcagattgcaatatctgcgttgcaatcagttctccaggaagatttcaaggccactgagatcgaagttggtgttgtgagaaaagatgaccgcgttttcagagctctcacgacagaggagatcgatcagcacctgacggcaattagtgaacgtgactgagatgtcatatgctgcacatttcagcgctgcacacactgcgccgtgccattgtgcttcggcagtcattaagtttcatagtcatcaaaggaactgagtgtaccatttcacgtttaagaccgaaaacaagccccctctcgatgtactcgtttcatatcgttctgtggttgattgaaattggcacggtttggttttgggttgct

SEQ ID NO: 37189 - protein, 161 aa, Zea mays subsp. mays
  peptide (1)..(161): Ceres Seq. ID no. 13579702
  misc_feature (23)..(135): Pfam Name: Pfam Description:  Proteasome A-type and B-type
  misc_feature (23)..(161): NCBI GI NO: 11967891 NR Description: maize 20S proteasome alpha subunit [Zea mays]
  misc_feature (23)..(161): NCBI GI NO: 12229922 NR Description: Proteasome subunit alpha type 6
  misc_feature (23)..(161): NCBI GI NO: 12229948 NR Description: Proteasome subunit alpha type 6
  misc_feature (23)..(161): NCBI GI NO: 15224993 NR Description: 20S proteasome alpha subunit A2 (PAA2)
  misc_feature (23)..(161): NCBI GI NO: 12229897 NR Description: Proteasome subunit alpha type 6
  misc_feature (23)..(161): NCBI GI NO: 15238554 NR Description: 20S proteasome alpha subunit A1 (PAA1)
  misc_feature (23)..(161): NCBI GI NO: 20260140 NR Description: multicatalytic endopeptidase complex alpha subunit-like
  misc_feature (23)..(161): NCBI GI NO: 2511588 NR Description: multicatalytic endopeptidase complex
  misc_feature (23)..(161): NCBI GI NO: 3421070 NR Description: 20S proteasome subunit PAA1 [Arabidopsis thaliana]
  misc_feature (23)..(161): NCBI GI NO: 38512262 NR Description: Proteasome
MVGHWFPKQGTKQLSFVSNGATEMPVDVLAKWIADKAQVYTQHAYMRPLGVVAMVLGYDEEKNAQLFKCDPAGHFFGHKATSAGLKEQEAINFLEKKMKDDPKFTYDETVQIAISALQSVLQEDFKATEIEVGVVRKDDRVFRALTTEEIDQHLTAISERD

SEQ ID NO: 37190 - protein, 142 aa, Zea mays subsp. mays
  peptide (1)..(142): Ceres Seq. ID no. 13579703
  misc_feature (63)..(138): Pfam Name: Pfam Description:  Proteasome A-type and B-type
  misc_feature (32)..(138): NCBI GI NO: 11967891 NR Description: maize 20S proteasome alpha subunit [Zea mays]
  misc_feature (32)..(138): NCBI GI NO: 12229922 NR Description: Proteasome subunit alpha type 6
  misc_feature (32)..(138): NCBI GI NO: 12229948 NR Description: Proteasome subunit alpha type 6
  misc_feature (32)..(138): NCBI GI NO: 15224993 NR Description: 20S proteasome alpha subunit A2 (PAA2)
  misc_feature (32)..(138): NCBI GI NO: 12229897 NR Description: Proteasome subunit alpha type 6
  misc_feature (32)..(138): NCBI GI NO: 15238554 NR Description: 20S proteasome alpha subunit A1 (PAA1)
  misc_feature (32)..(138): NCBI GI NO: 20260140 NR Description: multicatalytic endopeptidase complex alpha subunit-like
  misc_feature (33)..(138): NCBI GI NO: 2511588 NR Description: multicatalytic endopeptidase complex
  misc_feature (32)..(138): NCBI GI NO: 3421070 NR Description: 20S proteasome subunit PAA1 [Arabidopsis thaliana]
  misc_feature (32)..(138): NCBI GI NO: 38512262 NR Description: Proteasome
SRVPEPRFPKHAQHTNTHRAQLRGDLPAAGEMSRGTGAGYDRHITIFSPEGRLYQVEYAFKAVKSAGVTSIGVRGADSVCVVTQKKVPDKLLDQTSVTHLFPITKYVGLLATGLTADGRSLVSQARNEAAEFRFKWGYRDAS

SEQ ID NO: 37191 - protein, 138 aa, Zea mays subsp. mays
  peptide (1)..(138): Ceres Seq. ID no. 13579704
  misc_feature (1)..(112): Pfam Name: Pfam Description:  Proteasome A-type and B-type
  misc_feature (1)..(138): NCBI GI NO: 11967891 NR Description: maize 20S proteasome alpha subunit [Zea mays]
  misc_feature (1)..(138): NCBI GI NO: 12229922 NR Description: Proteasome subunit alpha type 6
  misc_feature (1)..(138): NCBI GI NO: 12229948 NR Description: Proteasome subunit alpha type 6
  misc_feature (1)..(138): NCBI GI NO: 15224993 NR Description: 20S proteasome alpha subunit A2 (PAA2)
  misc_feature (1)..(138): NCBI GI NO: 12229897 NR Description: Proteasome subunit alpha type 6
  misc_feature (1)..(138): NCBI GI NO: 15238554 NR Description: 20S proteasome alpha subunit A1 (PAA1)
  misc_feature (1)..(138): NCBI GI NO: 20260140 NR Description: multicatalytic endopeptidase complex alpha subunit-like
  misc_feature (1)..(138): NCBI GI NO: 2511588 NR Description: multicatalytic endopeptidase complex
  misc_feature (1)..(138): NCBI GI NO: 3421070 NR Description: 20S proteasome subunit PAA1 [Arabidopsis thaliana]
  misc_feature (1)..(138): NCBI GI NO: 38512262 NR Description: Proteasome
MPVDVLAKWIADKAQVYTQHAYMRPLGVVAMVLGYDEEKNAQLFKCDPAGHFFGHKATSAGLKEQEAINFLEKKMKDDPKFTYDETVQIAISALQSVLQEDFKATEIEVGVVRKDDRVFRALTTEEIDQHLTAISERD

SEQ ID NO: 37192 - DNA, 2134 bp, Zea mays subsp. mays
  misc_feature (1)..(2134): Ceres Seq. ID no. 13600631
tttttctctacgaattccttcagttcagttccgttgcgttcatttcctttcctccatgaatgattcgtgattgatgcctggatcgcgatcgcttctatttttcttcttcttttggtgcctaaacaaaaatattttatattgttattgggatggacttggtttctattgctttttcgtggggaatttccaaatttgtttcttcctgcgggtttatcggttaacgcgcgatgcatctgaggaggaggatcgattcactactctttgagattccgtatccgtctctgaaatgggaatatgacaatttttttaaaatccggtaccaacaggtataaccccccagaactacgatttccttccacggaaggagaattttgtccggagctcgaatttgtgccacgtttcacttcgttttttggagttttctgctcaactgagggaaagcagagccaccagagcttggccgtttcagatctctgtctgctaggctgccctttgctcaagggcaatcctcccttttcattcaacgcaaaaaaaaagatctttttttgcgtctttctatgaaatctggtgacaaatgttcagttgaactcagattcttcagatgcaattgaagatctcaaatcatcacatcattttttctgtcgaaataatttatgtgtgtgtgtgtttttcttaaaaaaactgttttttatgcttctgaatgcttgctgcattttcccgtgcatttgaaacaggaaaaacgtactagcgaaagctatagctgtgatctgaactcaattgctccgtaccgttttactttgcttcatgatccgttaatgaaagcaaaaagtaagcgcacggtgcgcatggatctgggttagttatgtactttgcttacttctgacataaagggcgcatttcaattttcaacaacacaaaagttgacgtccaagtggcctttgccttttccgctttctaagcaacttcgcttactgttcacttcacgaaatttccttatgctttacttgttttgcaactgaatgtggagtagcaatgtaacaaagtgaaaaagggtgtctggctgattcatttagtttctgctcgttttgctttcttgagatggttcgtgttagccttaacctttgtgatagcacaagaccaatgtggttgggactctgaacatgctcggattagcaaagaggatcaacgccaggttcctcctcaccagtaccagtgaggtctatggtgatcctctccagcacccgcaggtggagacttactggggcaatgtcaatcccatcggtgtcaggagctgttacgatgagggcaagcgtacagctgaaacgttgaccatggattaccaccgtggtgccaaccttgaggttaggatcgcacgtatcttcaatacatatggccctcgcatgtgcattgacgatggccgtgttgtcagtaactttgttgctcaggcactgaggaaggagcccttgacggtttatggtgatggaaagcaaaccaggagtttccaatatgtttctgatctggttgagggtctgatgaagctgatggaaggcgagcatgtggggccattcaacctgggtaaccctggcgagttcaccatgcttgagcttgccaaggttgtccaggacaccatcgaccccaacgcacggatcgagttccgcaagaacacccaggacgacccgcacaagcgcaagcccgacatcagccgcgccaaggagttcctcgggtgggagccgaagatccccctgcgtgagggccttcccctcatggtctccgacttccgcaagcgcatcttcggcgaccaagacgctgctgccaccaccaccggaaaccagcaaggttaggatgaaggagcgcacatgacatggaaatttttggtggccctgcttctagctgcttggttgctctctccttactgacaaaagctatgggccacgtagttcgttgggaatgtgttactggaatacctcggcacggctgatgctgtaatgccattctttttttcccctgtattttttctttctcagttctctcagtccttagctatacaaaaaaagttcagttgaacagttggagatgaacccggatgatctaattctttgttgagagcatagcatcatatatatggtataaatcc

SEQ ID NO: 37193 - protein, 226 aa, Zea mays subsp. mays; identical to SEQ ID NO: 23698
  peptide (1)..(226): Ceres Seq. ID no. 13600632
  misc_feature (1)..(210): Pfam Name: Pfam Description:  NAD dependent epimerase/dehydratase family
  misc_feature (1)..(216): NCBI GI NO: 18201659 NR Description: dTDP-glucose 4-6-dehydratase-like protein
  misc_feature (1)..(221): NCBI GI NO: 15229334 NR Description: NAD-dependent epimerase/dehydratase family
  misc_feature (1)..(223): NCBI GI NO: 15227109 NR Description: NAD-dependent epimerase/dehydratase family
  misc_feature (1)..(221): NCBI GI NO: 2129578 NR Description: dTDP-glucose 4-6-dehydratase homolog D18 -Arabidopsis thaliana
  misc_feature (1)..(215): NCBI GI NO: 30693847 NR Description: NAD-dependent epimerase/dehydratase family
  misc_feature (1)..(215): NCBI GI NO: 17473549 NR Description: dTDP-glucose 4-6-dehydratase-like protein
  misc_feature (1)..(213): NCBI GI NO: 25396402 NR Description: UDP-glucuronic acid decarboxylase
  misc_feature (1)..(213): NCBI GI NO: 34908082 NR Description: P0506B12.30
  misc_feature (1)..(215): NCBI GI NO: 11270116 NR Description: dTDP-glucose 4-6-dehydratase-like protein -Arabidopsis thaliana
  misc_feature (1)..(201): NCBI GI NO: 32401371 NR Description: dTDP-glucose-4-6-dehydratase-like protein

SEQ ID NO: 37194 - protein, 169 aa, Zea mays subsp. mays
  peptide (1)..(169): Ceres Seq. ID no. 13600633
  misc_feature (1)..(153): Pfam Name: Pfam Description:  NAD dependent epimerase/dehydratase family
  misc_feature (1)..(159): NCBI GI NO: 18201659 NR Description: dTDP-glucose 4-6-dehydratase-like protein
  misc_feature (1)..(164): NCBI GI NO: 15229334 NR Description: NAD-dependent epimerase/dehydratase family
  misc_feature (1)..(166): NCBI GI NO: 15227109 NR Description: NAD-dependent epimerase/dehydratase family
  misc_feature (1)..(164): NCBI GI NO: 2129578 NR Description: dTDP-glucose 4-6-dehydratase homolog D18 -Arabidopsis thaliana
  misc_feature (1)..(158): NCBI GI NO: 30693847 NR Description: NAD-dependent epimerase/dehydratase family
  misc_feature (1)..(158): NCBI GI NO: 17473549 NR Description: dTDP-glucose 4-6-dehydratase-like protein
  misc_feature (1)..(156): NCBI GI NO: 25396402 NR Description: UDP-glucuronic acid decarboxylase
  misc_feature (1)..(156): NCBI GI NO: 34908082 NR Description: P0506B12.30
  misc_feature (1)..(158): NCBI GI NO: 11270116 NR Description: dTDP-glucose 4-6-dehydratase-like protein -Arabidopsis thaliana
  misc_feature (1)..(144): NCBI GI NO: 32401371 NR Description: dTDP-glucose-4-6-dehydratase-like protein
MDYHRGANLEVRIARIFNTYGPRMCIDDGRVVSNFVAQALRKEPLTVYGDGKQTRSFQYVSDLVEGLMKLMEGEHVGPFNLGNPGEFTMLELAKVVQDTIDPNARIEFRKNTQDDPHKRKPDISRAKEFLGWEPKIPLREGLPLMVSDFRKRIFGDQDAAATTTGNQQG

SEQ ID NO: 37195 - protein, 146 aa, Zea mays subsp. mays
  peptide (1)..(146): Ceres Seq. ID no. 13600634
  misc_feature (1)..(130): Pfam Name: Pfam Description:  NAD dependent epimerase/dehydratase family
  misc_feature (1)..(136): NCBI GI NO: 18201659 NR Description: dTDP-glucose 4-6-dehydratase-like protein
  misc_feature (1)..(141): NCBI GI NO: 15229334 NR Description: NAD-dependent epimerase/dehydratase family
  misc_feature (1)..(143): NCBI GI NO: 15227109 NR Description: NAD-dependent epimerase/dehydratase family
  misc_feature (1)..(141): NCBI GI NO: 2129578 NR Description: dTDP-glucose 4-6-dehydratase homolog D18 -Arabidopsis thaliana
  misc_feature (1)..(135): NCBI GI NO: 30693847 NR Description: NAD-dependent epimerase/dehydratase family
  misc_feature (1)..(135): NCBI GI NO: 17473549 NR Description: dTDP-glucose 4-6-dehydratase-like protein
  misc_feature (1)..(133): NCBI GI NO: 25396402 NR Description: UDP-glucuronic acid decarboxylase
  misc_feature (1)..(133): NCBI GI NO: 34908082 NR Description: P0506B12.30
  misc_feature (1)..(135): NCBI GI NO: 11270116 NR Description: dTDP-glucose 4-6-dehydratase-like protein -Arabidopsis thaliana
  misc_feature (1)..(121): NCBI GI NO: 32401371 NR Description: dTDP-glucose-4-6-dehydratase-like protein
MCIDDGRVVSNFVAQALRKEPLTVYGDGKQTRSFQYVSDLVEGLMKLMEGEHVGPFNLGNPGEFTMLELAKVVQDTIDPNARIEFRKNTQDDPHKRKPDISRAKEFLGWEPKIPLREGLPLMVSDFRKRIFGDQDAAATTTGNQQG

SEQ ID NO: 37196 - DNA, 828 bp, Zea mays subsp. mays; identical to SEQ ID NO: 36570
  misc_feature (1)..(828): Ceres Seq. ID no. 12595473

SEQ ID NO: 37197 - protein, 230 aa, Zea mays subsp. mays; identical to SEQ ID NO: 36571
  peptide (1)..(230): Ceres Seq. ID no. 12595474
  misc_feature (106)..(208): Pfam Name: Pfam Description:  Protease inhibitor/seed storage/LTP family
  misc_feature (53)..(230): NCBI GI NO: 16305115 NR Description: 15kD beta zein [Zea mays]
  misc_feature (53)..(230): NCBI GI NO: 419803 NR Description: zein protein - maize
  misc_feature (53)..(230): NCBI GI NO: 168664 NR Description: zein protein precursor
  misc_feature (53)..(230): NCBI GI NO: 141616 NR Description: ZEIN-BETA PRECURSOR (16 KD) (ZEIN 2) (CLONE 15A3)
  misc_feature (53)..(230): NCBI GI NO: 100552 NR Description: beta-coixin, 17K, precursor - Job's tears

SEQ ID NO: 37198 - protein, 222 aa, Zea mays subsp. mays; identical to SEQ ID NO: 36572
  peptide (1)..(222): Ceres Seq. ID no. 12595475
  misc_feature (98)..(200): Pfam Name: Pfam Description:  Protease inhibitor/seed storage/LTP family
  misc_feature (45)..(222): NCBI GI NO: 16305115 NR Description: 15kD beta zein [Zea mays]
  misc_feature (45)..(222): NCBI GI NO: 419803 NR Description: zein protein - maize
  misc_feature (45)..(222): NCBI GI NO: 168664 NR Description: zein protein precursor
  misc_feature (45)..(222): NCBI GI NO: 141616 NR Description: ZEIN-BETA PRECURSOR (16 KD) (ZEIN 2) (CLONE 15A3)
  misc_feature (45)..(222): NCBI GI NO: 100552 NR Description: beta-coixin, 17K, precursor - Job's tears

SEQ ID NO: 37199 - protein, 178 aa, Zea mays subsp. mays; identical to SEQ ID NO: 36573
  peptide (1)..(178): Ceres Seq. ID no. 12595476
  misc_feature (54)..(156): Pfam Name: Pfam Description:  Protease inhibitor/seed storage/LTP family
  misc_feature (1)..(178): NCBI GI NO: 16305115 NR Description: 15kD beta zein [Zea mays]
  misc_feature (1)..(178): NCBI GI NO: 419803 NR Description: zein protein - maize
  misc_feature (1)..(178): NCBI GI NO: 168664 NR Description: zein protein precursor
  misc_feature (1)..(178): NCBI GI NO: 141616 NR Description: ZEIN-BETA PRECURSOR (16 KD) (ZEIN 2) (CLONE 15A3)
  misc_feature (1)..(178): NCBI GI NO: 100552 NR Description: beta-coixin, 17K, precursor - Job's tears

SEQ ID NO: 37200 - DNA, 608 bp, Zea mays subsp. mays
  misc_feature (1)..(608): Ceres Seq. ID no. 13600372
gaccagtcctccaacctcccagcgaacccaccccacacctttccccggcgaagcagcagcagccgcagcggcatccatggcccccaaggcggagaagaagccggtggcggagaaggccgagaagaccactgcggcgaagaagaccaaggccgagaagcggccgccggcgtccaaggagggcggcgagaagaagggcaagaagaagtcgaagaagagcgtggagacgtacaagatctacatcttcaaggtgctgaagcaggtgcacccggacatcggcatctcctccaaggccatgtccatcatgaactccttcatcaacgacatcttcgagaagctcgccggcgagtccgccaagctcgcccgctacaacaagaagcccaccatcacgtcccgggagatccagacctccgtccgcctcgtcctccccggcgagctcgccaagcacgccgtctccgagggcaccaaggccgtcaccaagttcacctccgcttagatagtctgttccggtttcttggtcgatcgatggtactctgtaatagtcatgtgttcggaccatgtcgtcttgtaagtgtttcattatcttgtgaaatagtaatggcgcttctttg

SEQ ID NO: 37201 - protein, 202 aa, Zea mays subsp. mays
  peptide (1)..(202): Ceres Seq. ID no. 13600373
  misc_feature (57)..(161): NCBI GI NO: 17505204 NR Description: histone 1, H2bc; H2B histone family, member S
DQSSNLPANPPHTFPRRSSSSRSGIHGPQGGEEAGGGEGREDHCGEEDQGREAAAGVQGGRREEGQEEVEEERGDVQDLHLQGAEAGAPGHRHLLQGHVHHELLHQRHLREARRRVRQARPLQQEAHHHVPGDPDLRPPRPPRRARQARRLRGHQGRHQVHLRLDSLFRFLGRSMVLCNSHVFGPCRLVSVSLSCEIVMALL

SEQ ID NO: 37202 - protein, 163 aa, Zea mays subsp. mays
  peptide (1)..(163): Ceres Seq. ID no. 13600374
  misc_feature (39)..(163): Pfam Name: Pfam Description:  Core histone H2A/H2B/H3/H4
  misc_feature (26)..(163): NCBI GI NO: 1362184 NR Description: histone H2B-8 - wheat
  misc_feature (26)..(163): NCBI GI NO: 1362186 NR Description: histone H2B153 - wheat
  misc_feature (26)..(163): NCBI GI NO: 122022 NR Description: Histone H2B
  misc_feature (26)..(163): NCBI GI NO: 1346251 NR Description: Histone H2B.4
  misc_feature (26)..(163): NCBI GI NO: 34908130 NR Description: putative histone H2B
  misc_feature (26)..(163): NCBI GI NO: 399853 NR Description: Histone H2B.1
  misc_feature (26)..(163): NCBI GI NO: 3913804 NR Description: Histone H2B.3
  misc_feature (26)..(163): NCBI GI NO: 399854 NR Description: Histone H2B.2
  misc_feature (26)..(163): NCBI GI NO: 1708107 NR Description: Histone H2B
  misc_feature (26)..(163): NCBI GI NO: 1362183 NR Description: histone H2B-6 - wheat
TSPPTSQRTHPTPFPGEAAAAAAASMAPKAEKKPVAEKAEKTTAAKKTKAEKRPPASKEGGEKKGKKKSKKSVETYKIYIFKVLKQVHPDIGISSKAMSIMNSFINDIFEKLAGESAKLARYNKKPTITSREIQTSVRLVLPGELAKHAVSEGTKAVTKFTSA

SEQ ID NO: 37203 - protein, 138 aa, Zea mays subsp. mays
  peptide (1)..(138): Ceres Seq. ID no. 13600375
  misc_feature (14)..(138): Pfam Name: Pfam Description:  Core histone H2A/H2B/H3/H4
  misc_feature (1)..(138): NCBI GI NO: 1362184 NR Description: histone H2B-8 - wheat
  misc_feature (1)..(138): NCBI GI NO: 1362186 NR Description: histone H2B153 - wheat
  misc_feature (1)..(138): NCBI GI NO: 122022 NR Description: Histone H2B
  misc_feature (1)..(138): NCBI GI NO: 1346251 NR Description: Histone H2B.4
  misc_feature (1)..(138): NCBI GI NO: 34908130 NR Description: putative histone H2B
  misc_feature (1)..(138): NCBI GI NO: 399853 NR Description: Histone H2B.1
  misc_feature (1)..(138): NCBI GI NO: 3913804 NR Description: Histone H2B.3
  misc_feature (1)..(138): NCBI GI NO: 399854 NR Description: Histone H2B.2
  misc_feature (1)..(138): NCBI GI NO: 1708107 NR Description: Histone H2B
  misc_feature (1)..(138): NCBI GI NO: 1362183 NR Description: histone H2B-6 - wheat
MAPKAEKKPVAEKAEKTTAAKKTKAEKRPPASKEGGEKKGKKKSKKSVETYKIYIFKVLKQVHPDIGISSKAMSIMNSFINDIFEKLAGESAKLARYNKKPTITSREIQTSVRLVLPGELAKHAVSEGTKAVTKFTSA

SEQ ID NO: 37204 - DNA, 437 bp, Zea mays subsp. mays
  misc_feature (1)..(437): Ceres Seq. ID no. 7119037
  misc_feature (342)..(342): n is a, c, t, g, unknown, or other
  misc_feature (338)..(338): n is a, c, t, g, unknown, or other
tccgccgccacccgaaaccccgacccgcgccgcctcgccgccgcgctaccagcagccaagcacaccgccgcgctcacagcaaccaagcacaccgccgcagccaccatggcagccgttctcacccgcccgacgccgggcaccgtccagtgcttcggccggaagaagaccgccgtcgccgtggcctactgcaagcccgggcgcggcctcatcaaggtcaacggcgcgccgatcgagctcatccgccctgagatgctccgtctgaaggccttcgagccgatcctgcttgccggcaggtcccgcttcaaggacatcgacatgcgcatccgcgttcgcggcgncggnaagacgagccagatctactccatccgccaggccatcgccaagtcgctcgtcgcctactaccagaagtacgtcgacgaggcggcccaagaaggagg

SEQ ID NO: 37205 - protein, 145 aa, Zea mays subsp. mays
  peptide (1)..(145): Ceres Seq. ID no. 7119038
  misc_feature (52)..(144): Pfam Name: Pfam Description:  Ribosomal protein S9/S16
  misc_feature (36)..(144): NCBI GI NO: 1172818 NR Description: 40S RIBOSOMAL PROTEIN S16
  misc_feature (44)..(144): NCBI GI NO: 3122800 NR Description: 40S RIBOSOMAL PROTEIN S16
  misc_feature (43)..(144): NCBI GI NO: 6984222 NR Description: 40S ribosomal protein S16 [Euphorbia esula]
  misc_feature (47)..(144): NCBI GI NO: 1173209 NR Description: 40S RIBOSOMAL PROTEIN S16
  misc_feature (41)..(144): NCBI GI NO: 15226676 NR Description: 40S ribosomal protein S16; protein id: At2g09990
  misc_feature (41)..(144): NCBI GI NO: 15238809 NR Description: 40S RIBOSOMAL PROTEIN S16; protein id: At5g18380
  misc_feature (41)..(144): NCBI GI NO: 15229252 NR Description: putative 40S ribosomal protein S16
  misc_feature (47)..(144): NCBI GI NO: 17369864 NR Description: 40S ribosomal protein S16
  misc_feature (44)..(143): NCBI GI NO: 17563670 NR Description: Ribosomal Protein, Small subunit RPS-16 (16
  misc_feature (44)..(143): NCBI GI NO: 39583364 NR Description: Hypothetical protein CBG11589
  misc_feature (113)..(113): Xaa is any aa, unknown or other
  misc_feature (114)..(114): Xaa is any aa, unknown or other
SAATRNPDPRRLAAALPAAKHTAALTATKHTAAATMAAVLTRPTPGTVQCFGRKKTAVAVAYCKPGRGLIKVNGAPIELIRPEMLRLKAFEPILLAGRSRFKDIDMRIRVRGXXKTSQIYSIRQAIAKSLVAYYQKYVDEAAQEG

SEQ ID NO: 37206 - protein, 110 aa, Zea mays subsp. mays
  peptide (1)..(110): Ceres Seq. ID no. 7119039
  misc_feature (17)..(109): Pfam Name: Pfam Description:  Ribosomal protein S9/S16
  misc_feature (1)..(109): NCBI GI NO: 1172818 NR Description: 40S RIBOSOMAL PROTEIN S16
  misc_feature (9)..(109): NCBI GI NO: 3122800 NR Description: 40S RIBOSOMAL PROTEIN S16
  misc_feature (8)..(109): NCBI GI NO: 6984222 NR Description: 40S ribosomal protein S16 [Euphorbia esula]
  misc_feature (12)..(109): NCBI GI NO: 1173209 NR Description: 40S RIBOSOMAL PROTEIN S16
  misc_feature (6)..(109): NCBI GI NO: 15226676 NR Description: 40S ribosomal protein S16; protein id: At2g09990
  misc_feature (6)..(109): NCBI GI NO: 15238809 NR Description: 40S RIBOSOMAL PROTEIN S16; protein id: At5g18380
  misc_feature (6)..(109): NCBI GI NO: 15229252 NR Description: putative 40S ribosomal protein S16
  misc_feature (12)..(109): NCBI GI NO: 17369864 NR Description: 40S ribosomal protein S16
  misc_feature (9)..(108): NCBI GI NO: 17563670 NR Description: Ribosomal Protein, Small subunit RPS-16 (16
  misc_feature (9)..(108): NCBI GI NO: 39583364 NR Description: Hypothetical protein CBG11589
  misc_feature (78)..(78): Xaa is any aa, unknown or other
  misc_feature (79)..(79): Xaa is any aa, unknown or other
MAAVLTRPTPGTVQCFGRKKTAVAVAYCKPGRGLIKVNGAPIELIRPEMLRLKAFEPILLAGRSRFKDIDMRIRVRGXXKTSQIYSIRQAIAKSLVAYYQKYVDEAAQEG

SEQ ID NO: 37207 - protein, 86 aa, Zea mays subsp. mays
  peptide (1)..(86): Ceres Seq. ID no. 7119040
  misc_feature (2)..(60): Pfam Name: Pfam Description:  Rieske [2Fe-2S] domain
  misc_feature (1)..(86): NCBI GI NO: 32422095 NR Description: predicted protein [Neurospora crassa]
  misc_feature (2)..(86): NCBI GI NO: 15226023 NR Description: putative extensin; protein id: At2g46630.1
  misc_feature (2)..(86): NCBI GI NO: 11360318 NR Description: probable mucin DKFZp434C196.1 - human (fragment)
  misc_feature (1)..(86): NCBI GI NO: 81286 NR Description: extensin - Volvox carteri (fragment)
  misc_feature (7)..(86): NCBI GI NO: 15226023 NR Description: putative extensin; protein id: At2g46630.1
  misc_feature (2)..(86): NCBI GI NO: 2429362 NR Description: proline rich protein [Santalum album]
  misc_feature (1)..(86): NCBI GI NO: 27375632 NR Description: blr0521 [Bradyrhizobium japonicum]
  misc_feature (3)..(86): NCBI GI NO: 12851999 NR Description: unnamed protein product [Mus musculus]
  misc_feature (1)..(86): NCBI GI NO: 15419013 NR Description: subtilisin-like protein [Toxoplasma gondii]
  misc_feature (3)..(86): NCBI GI NO: 26346793 NR Description: unnamed protein product [Mus musculus]
PPPPETPTRAASPPRYQQPSTPPRSQQPSTPPQPPWQPFSPARRRAPSSASAGRRPPSPWPTASPGAASSRSTARRSSSSALRCSV

SEQ ID NO: 37208 - DNA, 738 bp, Zea mays subsp. mays
  misc_feature (1)..(738): Ceres Seq. ID no. 12636857
accggatcaccagcctacagctcgtcacatctctctctccgcccggccggcctctagactcactctagccatatggccacggtgcacggcagcaggctcatcttcctcttcgaggccacgctcttctcggcgctgctgctcgtcccggcacgccctgcttccgccacagacggcagcgcgtacccggccggcgactgcccctacccgtgcctgccgccgcccgccgtcaccgccaactgcccgccgcctccgccggctgcggcgtcgtactcgtacccgccaccgccgggggcttacattccctacttccagcctgcggcgggtggcggtggtggcggcggtagtggggggtacggcggctacccggcgccgccgccgcccaaccccatcctgccgtggtacccatggtactacaagacgccgccgtcgtcctcggccgccacgtcgggcagggggagtcgcgttcttcttgggtcggccgccatggtagctgctgctgccctgctgatcatggcttagccgcagcccgcagcagtcgttctttttgcatcttcgatcttgtcctctcccccaggttttctttctttttttcttttgttgatttactgctcaggatttatattcagaggtatatatataacgaggcagcattatatatattgcttgtactcctaatttatcagctacatgtctctagttccatgattaaaatgattaccactcaactttgagtagtgg

SEQ ID NO: 37209 - protein, 162 aa, Zea mays subsp. mays; identical to SEQ ID NO: 36587
  peptide (1)..(162): Ceres Seq. ID no. 12636858

SEQ ID NO: 37210 - protein, 148 aa, Zea mays subsp. mays; identical to SEQ ID NO: 36588
  peptide (1)..(148): Ceres Seq. ID no. 12636859
  misc_feature (43)..(118): Pfam Name: Pfam Description:  Extensin-like region
  misc_feature (17)..(146): NCBI GI NO: 34894212 NR Description: P0439B06.27
  misc_feature (1)..(123): NCBI GI NO: 18423010 NR Description: expressed protein; protein id: At5g49280
  misc_feature (17)..(139): NCBI GI NO: 18397707 NR Description: expressed protein; protein id: At3g06750
  misc_feature (42)..(145): NCBI GI NO: 18409730 NR Description: Expressed protein; protein id: At1g70985
  misc_feature (42)..(147): NCBI GI NO: 15220010 NR Description: unknown protein; protein id: At1g23050.1
  misc_feature (1)..(131): NCBI GI NO: 15234820 NR Description: extensin like protein; protein id: At4g16140.1
  misc_feature (58)..(143): NCBI GI NO: 34894480 NR Description: OJ1116_C07.3
  misc_feature (38)..(141): NCBI GI NO: 18422542 NR Description: expressed protein; protein id: At5g45350
  misc_feature (29)..(137): NCBI GI NO: 7510074 NR Description: hypothetical protein Y50E8A
  misc_feature (29)..(137): NCBI GI NO: 7510074 NR Description: hypothetical protein Y50E8A

SEQ ID NO: 37211 - protein, 108 aa, Zea mays subsp. mays; identical to SEQ ID NO: 36589
  peptide (1)..(108): Ceres Seq. ID no. 12636860

SEQ ID NO: 37212 - DNA, 1192 bp, Zea mays subsp. mays
  misc_feature (1)..(1192): Ceres Seq. ID no. 15178969
attccattccattccacacaaggctaggcacaagcgaaccaaacccatggcgtccgacggcagcggcgtggtgacggtgtacggcagcaacggcgcggagctgctggagccgtccaagcagcccaagtcggcgactttctccgtcaaggtggggctggcgcagatgctccggggcggggtcatcatggacgtggtgaccccggagcaggcgcgcctcgcggaggaggccggcgcgtgcgccgtgatggcgctggagcgggtccccgccgacatccgcgcgcagggcggcgtggcgcgcatgtcggacccgggcctcatccgcgacatcaagcgcgccgtcaccatcccggtcatggccaaggcccgcatcgggcacttcgtggaggcccagatcctggaggccgtgggcgtcgactacgtggacgagagcgaggtgctgacccccgccgacgacgcgcaccacatcaacaagcacaacttccgcgtccccttcgtctgcggctgccgcgacctcggcgaggcgctccgcagggtgcgcgagggcgccgccatgatccgcaccaagggggaggccggcacgggcaacgtcgtcgaggccgtgcgccacgtgcgctccgtcatgggcgacgtccgcgcgctccgcagcatggacgacgacgaggtcttcgcctacgccaagcgcatcgccgcgccctacgacctcgtcatgcagaccaagcagctgggccgcctccccgtcgtgcagttcgccgcggggggtgtcgccacgcccgccgacgccgcgctcatgatgcagctcggatgcgacggcgtcttcgtcggctcgggcatcttcaagagcggcgaccccgcgcgccgcgcccgcgccatcgtccaggcagtcacccactacagcgaccccaccatcctggccgacgtcagcacggggctcggggaggccatggtcggcatcaacctcaacgaccccaaggtggaacgatacgccgccagatccgagtgaaccctttctttccgtagtcatctccatccatctgccttggattgcatttccgtcgtctcatgtctctcaatcagtaataatggaatgaatgaaatggtaagaaacaaagctatggtactatgcagaacctctttcattttgtgctactgtactaagttagcctagtcccccccaccctggattatcatgttg

SEQ ID NO: 37213 - protein, 332 aa, Zea mays subsp. mays
  peptide (1)..(332): Ceres Seq. ID no. 15178970
  misc_feature (45)..(251): Pfam Name: Pfam Description:  SOR/SNZ family
  misc_feature (16)..(332): NCBI GI NO: 34394152 NR Description: putative ethylene-inducible protein
  misc_feature (16)..(332): NCBI GI NO: 37530308 NR Description: putative pyridoxine/pyridoxal 5-phosphatebiosynthesis protein
  misc_feature (20)..(332): NCBI GI NO: 2501578 NR Description: ETHYLENE-INDUCIBLE PROTEIN HEVER
  misc_feature (19)..(332): NCBI GI NO: 15240972 NR Description: pyridoxine biosynthesis protein - like
  misc_feature (16)..(332): NCBI GI NO: 10719739 NR Description: putative pyridoxine biosynthetic enzyme
  misc_feature (19)..(332): NCBI GI NO: 21617922 NR Description: pyridoxine biosynthesis protein-like
  misc_feature (16)..(332): NCBI GI NO: 13310484 NR Description: Sor-like protein [Ginkgo biloba]
  misc_feature (20)..(332): NCBI GI NO: 15224470 NR Description: SOR1 from the fungus Cercospora nicotianae -related
  misc_feature (36)..(330): NCBI GI NO: 23017679 NR Description: hypothetical protein [Thermobifida fusca]
  misc_feature (193)..(296): NCBI GI NO: 37531502 NR Description: putative protein similar to ethylene-inducibleprotein Hever
FHSIPHKARHKRTKPMASDGSGVVTVYGSNGAELLEPSKQPKSATFSVKVGLAQMLRGGVIMDVVTPEQARLAEEAGACAVMALERVPADIRAQGGVARMSDPGLIRDIKRAVTIPVMAKARIGHFVEAQILEAVGVDYVDESEVLTPADDAHHINKHNFRVPFVCGCRDLGEALRRVREGAAMIRTKGEAGTGNVVEAVRHVRSVMGDVRALRSMDDDEVFAYAKRIAAPYDLVMQTKQLGRLPVVQFAAGGVATPADAALMMQLGCDGVFVGSGIFKSGDPARRARAIVQAVTHYSDPTILADVSTGLGEAMVGINLNDPKVERYAARSE

SEQ ID NO: 37214 - protein, 317 aa, Zea mays subsp. mays
  peptide (1)..(317): Ceres Seq. ID no. 15178971
  misc_feature (30)..(236): Pfam Name: Pfam Description:  SOR/SNZ family
  misc_feature (1)..(317): NCBI GI NO: 34394152 NR Description: putative ethylene-inducible protein
  misc_feature (1)..(317): NCBI GI NO: 37530308 NR Description: putative pyridoxine/pyridoxal 5-phosphatebiosynthesis protein
  misc_feature (5)..(317): NCBI GI NO: 2501578 NR Description: ETHYLENE-INDUCIBLE PROTEIN HEVER
  misc_feature (4)..(317): NCBI GI NO: 15240972 NR Description: pyridoxine biosynthesis protein - like
  misc_feature (1)..(317): NCBI GI NO: 10719739 NR Description: putative pyridoxine biosynthetic enzyme
  misc_feature (4)..(317): NCBI GI NO: 21617922 NR Description: pyridoxine biosynthesis protein-like
  misc_feature (1)..(317): NCBI GI NO: 13310484 NR Description: Sor-like protein [Ginkgo biloba]
  misc_feature (5)..(317): NCBI GI NO: 15224470 NR Description: SOR1 from the fungus Cercospora nicotianae -related
  misc_feature (21)..(315): NCBI GI NO: 23017679 NR Description: hypothetical protein [Thermobifida fusca]
  misc_feature (178)..(281): NCBI GI NO: 37531502 NR Description: putative protein similar to ethylene-inducibleprotein Hever
MASDGSGVVTVYGSNGAELLEPSKQPKSATFSVKVGLAQMLRGGVIMDVVTPEQARLAEEAGACAVMALERVPADIRAQGGVARMSDPGLIRDIKRAVTIPVMAKARIGHFVEAQILEAVGVDYVDESEVLTPADDAHHINKHNFRVPFVCGCRDLGEALRRVREGAAMIRTKGEAGTGNVVEAVRHVRSVMGDVRALRSMDDDEVFAYAKRIAAPYDLVMQTKQLGRLPVVQFAAGGVATPADAALMMQLGCDGVFVGSGIFKSGDPARRARAIVQAVTHYSDPTILADVSTGLGEAMVGINLNDPKVERYAARSE

SEQ ID NO: 37215 - protein, 278 aa, Zea mays subsp. mays
  peptide (1)..(278): Ceres Seq. ID no. 15178972
  misc_feature (1)..(197): Pfam Name: Pfam Description:  SOR/SNZ family
  misc_feature (1)..(278): NCBI GI NO: 34394152 NR Description: putative ethylene-inducible protein
  misc_feature (1)..(278): NCBI GI NO: 37530308 NR Description: putative pyridoxine/pyridoxal 5-phosphatebiosynthesis protein
  misc_feature (1)..(278): NCBI GI NO: 2501578 NR Description: ETHYLENE-INDUCIBLE PROTEIN HEVER
  misc_feature (1)..(278): NCBI GI NO: 15240972 NR Description: pyridoxine biosynthesis protein - like
  misc_feature (1)..(278): NCBI GI NO: 10719739 NR Description: putative pyridoxine biosynthetic enzyme
  misc_feature (1)..(278): NCBI GI NO: 21617922 NR Description: pyridoxine biosynthesis protein-like
  misc_feature (1)..(278): NCBI GI NO: 13310484 NR Description: Sor-like protein [Ginkgo biloba]
  misc_feature (1)..(278): NCBI GI NO: 15224470 NR Description: SOR1 from the fungus Cercospora nicotianae -related
  misc_feature (1)..(276): NCBI GI NO: 23017679 NR Description: hypothetical protein [Thermobifida fusca]
  misc_feature (139)..(242): NCBI GI NO: 37531502 NR Description: putative protein similar to ethylene-inducibleprotein Hever
MLRGGVIMDVVTPEQARLAEEAGACAVMALERVPADIRAQGGVARMSDPGLIRDIKRAVTIPVMAKARIGHFVEAQILEAVGVDYVDESEVLTPADDAHHINKHNFRVPFVCGCRDLGEALRRVREGAAMIRTKGEAGTGNVVEAVRHVRSVMGDVRALRSMDDDEVFAYAKRIAAPYDLVMQTKQLGRLPVVQFAAGGVATPADAALMMQLGCDGVFVGSGIFKSGDPARRARAIVQAVTHYSDPTILADVSTGLGEAMVGINLNDPKVERYAARSE

SEQ ID NO: 37216 - DNA, 432 bp, Zea mays subsp. mays
  misc_feature (1)..(432): Ceres Seq. ID no. 7114355
  misc_feature (373)..(373): n is a, c, t, g, unknown, or other
  misc_feature (367)..(367): n is a, c, t, g, unknown, or other
  misc_feature (411)..(411): n is a, c, t, g, unknown, or other
  misc_feature (284)..(284): n is a, c, t, g, unknown, or other
accggctctgcacccaaagtccgaacccaaatcgtgtgttcaccgttcccgacgaacctgccgcatcacctcaccgatcccccggcgcccgctggccctgtcccgactcccgagacatgcaacccgtttgccgctcgtgcttggcccccgcgcggccacagccggaggtaccccgcgcgcaaacacgccgcgcggaggcgggacgacggagcccgtcgagccgcgcaaggacgggccggcgtcggcggtcgatcaggcggaggaggccgggctggcgcccgaanagctggaggtgctggaggaggcggccatcatgggggaggacgaggggcgccggcccaccgactacgaacgccgcgcgcacatnttcgangagagctcgcgggtcttccgtgatctcaagcagcgaancgacggcgacggtggcggcgg

SEQ ID NO: 37217 - protein, 143 aa, Zea mays subsp. mays
  peptide (1)..(143): Ceres Seq. ID no. 7114356
  misc_feature (1)..(138): NCBI GI NO: 10176734 NR Description: gene_id:K18I23.2~unknown protein
  misc_feature (18)..(138): NCBI GI NO: 18414826 NR Description: expressed protein; protein id: At5g05220
  misc_feature (95)..(95): Xaa is any aa, unknown or other
  misc_feature (122)..(122): Xaa is any aa, unknown or other
  misc_feature (124)..(124): Xaa is any aa, unknown or other
  misc_feature (137)..(137): Xaa is any aa, unknown or other
PALHPKSEPKSCVHRSRRTCRITSPIPRRPLALSRLPRHATRLPLVLGPRAATAGGTPRANTPRGGGTTEPVEPRKDGPASAVDQAEEAGLAPEXLEVLEEAAIMGEDEGRRPTDYERRAHXFXESSRVFRDLKQRXDGDGGG

SEQ ID NO: 37218 - protein, 143 aa, Zea mays subsp. mays
  peptide (1)..(143): Ceres Seq. ID no. 7114357
  misc_feature (94)..(94): Xaa is any aa, unknown or other
  misc_feature (122)..(122): Xaa is any aa, unknown or other
  misc_feature (124)..(124): Xaa is any aa, unknown or other
  misc_feature (137)..(137): Xaa is any aa, unknown or other
RLCTQSPNPNRVFTVPDEPAASPHRSPGARWPCPDSRDMQPVCRSCLAPARPQPEVPRAQTRRAEAGRRSPSSRARTGRRRRSIRRRRPGWRPXSWRCWRRRPSWGRTRGAGPPTTNAARTXSXRARGSSVISSSEXTATVAA

SEQ ID NO: 37219 - protein, 131 aa, Zea mays subsp. mays
  peptide (1)..(131): Ceres Seq. ID no. 7114358
  misc_feature (49)..(113): Pfam Name: Pfam Description:  Bindin
  misc_feature (77)..(131): NCBI GI NO: 27503247 NR Description: Similar to splicing factor, arginine/serine-rich 1
  misc_feature (27)..(110): NCBI GI NO: 2388805 NR Description: attachment region binding protein [Gallus gallus]
  misc_feature (95)..(95): Xaa is any aa, unknown or other
  misc_feature (123)..(123): Xaa is any aa, unknown or other
  misc_feature (125)..(125): Xaa is any aa, unknown or other
TGSAPKVRTQIVCSPFPTNLPHHLTDPPAPAGPVPTPETCNPFAARAWPPRGHSRRYPARKHAARRRDDGARRAAQGRAGVGGRSGGGGRAGARXAGGAGGGGHHGGGRGAPAHRLRTPRAHXRXELAGLP

SEQ ID NO: 37220 - DNA, 913 bp, Zea mays subsp. mays
  misc_feature (1)..(913): Ceres Seq. ID no. 13624158
  misc_feature (245)..(245): n is a, c, t, g, unknown, or other
agggtttcgtcgcttccagccgccgccgcgtccgcctcgccaagcgcagcagccgccgcagcacatctctctctcgatctcagccatggcggaggtggagcagcaacaggacacgccgaagctgttcaaccgctggaccttcgatgatgtccaggtgaacgacatctcgctgaacgactacctcgctgtgaacgcgacgaagcacgcgatgtacctgccgcacaccgcggggcgttactccaaanaagcggttccgcaaggcgcagtgcccgatcgtcgagcgcctcacaaactccctcatgatgcacgggcgcaacaacggcaagaaggtcatggctgtccgcatcatcaagcataccctggagatcattcacctgctcaccgatgccaaccccatccaggtcgtcgtcgacgcgatcatcaacagtggaccccgtgaggatgccacccgtattggttccgctggtgttgtgaggaggcaggccgtggatatctcacccctgaggagggtgaaccaggccatctacctcctcaccactggtgccagggagagtgctttccggaacatcaaaaccattgccgagtgccttgcagatgagctgatcaacgctgccaagggctcatccaacagttacgccatcaagaagaaggacgagattgagcgtgttgccaaggccaaccgttgaacggagcttgtatcctggtgcactctgcgctggaaacttttatgttactggcagtcgtatcggttcctgttttaccaatgtttagagttttttgagacctatatgcggttttggttttcagtgcacaattaaaattactgagtaatgtagttgattgggaacagaaagtgcctggtttaccgaactccatttctcttgtcatttttctttattctgtagtctgtatt

SEQ ID NO: 37221 - protein, 145 aa, Zea mays subsp. mays
  peptide (1)..(145): Ceres Seq. ID no. 13624159
  misc_feature (29)..(80): NCBI GI NO: 34893994 NR Description: putative 40S ribosomal protein S5
  misc_feature (30)..(80): NCBI GI NO: 15228111 NR Description: 40S ribosomal protein S5 (RPS5A)
  misc_feature (30)..(80): NCBI GI NO: 15229897 NR Description: 40S ribosomal protein S5 (RPS5B)
  misc_feature (40)..(80): NCBI GI NO: 6831665 NR Description: 40S RIBOSOMAL PROTEIN S5
  misc_feature (30)..(80): NCBI GI NO: 21617886 NR Description: 40S ribosomal protein S5 [Arabidopsis thaliana]
  misc_feature (22)..(79): NCBI GI NO: 40748265 NR Description: 40S ribosomal protein S5 [Capsicum annuum]
  misc_feature (40)..(90): NCBI GI NO: 32400987 NR Description: 40S ribosome protein S5 [Griffithsia japonica]
  misc_feature (37)..(80): NCBI GI NO: 3717978 NR Description: 5S ribosomal protein [Mus musculus]
  misc_feature (37)..(80): NCBI GI NO: 13904870 NR Description: ribosomal protein S5; 40S ribosomal protein S5
  misc_feature (37)..(80): NCBI GI NO: 34854534 NR Description: similar to ribosomal protein S5
  misc_feature (82)..(82): Xaa is any aa, unknown or other
GFRRFQPPPRPPRQAQQPPQHISLSISAMAEVEQQQDTPKLFNRWTFDDVQVNDISLNDYLAVNATKHAMYLPHTAGRYSKXAVPQGAVPDRRAPHKLPHDARAQQRQEGHGCPHHQAYPGDHSPAHRCQPHPGRRRRDHQQWTP

SEQ ID NO: 37222 - protein, 128 aa, Zea mays subsp. mays
  peptide (1)..(128): Ceres Seq. ID no. 13624160
  misc_feature (1)..(128): Pfam Name: Pfam Description:  Ribosomal protein S7p/S5e
  misc_feature (1)..(128): NCBI GI NO: 34893994 NR Description: putative 40S ribosomal protein S5
  misc_feature (1)..(128): NCBI GI NO: 15228111 NR Description: 40S ribosomal protein S5 (RPS5A)
  misc_feature (1)..(128): NCBI GI NO: 6831665 NR Description: 40S RIBOSOMAL PROTEIN S5
  misc_feature (1)..(128): NCBI GI NO: 15229897 NR Description: 40S ribosomal protein S5 (RPS5B)
  misc_feature (1)..(128): NCBI GI NO: 21617886 NR Description: 40S ribosomal protein S5 [Arabidopsis thaliana]
  misc_feature (1)..(128): NCBI GI NO: 40748265 NR Description: 40S ribosomal protein S5 [Capsicum annuum]
  misc_feature (1)..(128): NCBI GI NO: 32400987 NR Description: 40S ribosome protein S5 [Griffithsia japonica]
  misc_feature (1)..(128): NCBI GI NO: 3717978 NR Description: 5S ribosomal protein [Mus musculus]
  misc_feature (1)..(128): NCBI GI NO: 13904870 NR Description: ribosomal protein S5; 40S ribosomal protein S5
  misc_feature (1)..(128): NCBI GI NO: 34854534 NR Description: similar to ribosomal protein S5
MMHGRNNGKKVMAVRIIKHTLEIIHLLTDANPIQVVVDAIINSGPREDATRIGSAGVVRRQAVDISPLRRVNQAIYLLTTGARESAFRNIKTIAECLADELINAAKGSSNSYAIKKKDEIERVAKANR

SEQ ID NO: 37223 - protein, 127 aa, Zea mays subsp. mays
  peptide (1)..(127): Ceres Seq. ID no. 13624161
  misc_feature (1)..(127): Pfam Name: Pfam Description:  Ribosomal protein S7p/S5e
  misc_feature (1)..(127): NCBI GI NO: 34893994 NR Description: putative 40S ribosomal protein S5
  misc_feature (1)..(127): NCBI GI NO: 15228111 NR Description: 40S ribosomal protein S5 (RPS5A)
  misc_feature (1)..(127): NCBI GI NO: 6831665 NR Description: 40S RIBOSOMAL PROTEIN S5
  misc_feature (1)..(127): NCBI GI NO: 15229897 NR Description: 40S ribosomal protein S5 (RPS5B)
  misc_feature (1)..(127): NCBI GI NO: 21617886 NR Description: 40S ribosomal protein S5 [Arabidopsis thaliana]
  misc_feature (1)..(127): NCBI GI NO: 40748265 NR Description: 40S ribosomal protein S5 [Capsicum annuum]
  misc_feature (1)..(127): NCBI GI NO: 32400987 NR Description: 40S ribosome protein S5 [Griffithsia japonica]
  misc_feature (1)..(127): NCBI GI NO: 3717978 NR Description: 5S ribosomal protein [Mus musculus]
  misc_feature (1)..(127): NCBI GI NO: 13904870 NR Description: ribosomal protein S5; 40S ribosomal protein S5
  misc_feature (1)..(127): NCBI GI NO: 34854534 NR Description: similar to ribosomal protein S5
MHGRNNGKKVMAVRIIKHTLEIIHLLTDANPIQVVVDAIINSGPREDATRIGSAGVVRRQAVDISPLRRVNQAIYLLTTGARESAFRNIKTIAECLADELINAAKGSSNSYAIKKKDEIERVAKANR

SEQ ID NO: 37224 - protein, 117 aa, Zea mays subsp. mays
  peptide (1)..(117): Ceres Seq. ID no. 13624162
  misc_feature (1)..(52): NCBI GI NO: 34893994 NR Description: putative 40S ribosomal protein S5
  misc_feature (2)..(52): NCBI GI NO: 15228111 NR Description: 40S ribosomal protein S5 (RPS5A)
  misc_feature (2)..(52): NCBI GI NO: 15229897 NR Description: 40S ribosomal protein S5 (RPS5B)
  misc_feature (12)..(52): NCBI GI NO: 6831665 NR Description: 40S RIBOSOMAL PROTEIN S5
  misc_feature (2)..(52): NCBI GI NO: 21617886 NR Description: 40S ribosomal protein S5 [Arabidopsis thaliana]
  misc_feature (1)..(51): NCBI GI NO: 40748265 NR Description: 40S ribosomal protein S5 [Capsicum annuum]
  misc_feature (12)..(62): NCBI GI NO: 32400987 NR Description: 40S ribosome protein S5 [Griffithsia japonica]
  misc_feature (9)..(52): NCBI GI NO: 3717978 NR Description: 5S ribosomal protein [Mus musculus]
  misc_feature (9)..(52): NCBI GI NO: 13904870 NR Description: ribosomal protein S5; 40S ribosomal protein S5
  misc_feature (9)..(52): NCBI GI NO: 34854534 NR Description: similar to ribosomal protein S5
  misc_feature (54)..(54): Xaa is any aa, unknown or other
MAEVEQQQDTPKLFNRWTFDDVQVNDISLNDYLAVNATKHAMYLPHTAGRYSKXAVPQGAVPDRRAPHKLPHDARAQQRQEGHGCPHHQAYPGDHSPAHRCQPHPGRRRRDHQQWTP

SEQ ID NO: 37225 - DNA, 937 bp, Zea mays subsp. mays
  misc_feature (1)..(937): Ceres Seq. ID no. 13624118
cactactctctctctctctgcctgcaaagctgcttgatccatcatcgatcacatcactccaccagccgcagcgcacgaacgtacgactcatggcagatcgcgaccgcagcggcatctacggcggcggcgcctacgggcagcagcaggggggcggccgcccgatgggtgagcaggtgaagggcatgatccacgacaaggggccgacggcgtcccaggcgctgacggtggcgacgctgttccctctgggcgggctgctcctggtgctgtcgggcctggcgctggcggcctccacggtggggctggccctggccacgcccgtgttcctgctcttcagccccgtgctcgtccccgccgcgctgctcatcggcacggccgtcgcggggttcctcacgtcgggcgcgctggggctcggcggcctgtcctcgctcacgtgcctcgccaacacggcgcggcaggcgttccagcgcacccccggactacgtcgaggaggcgcgccgcaggatggcggaggccgcggcgcacgcgggccacaagaccgcgcaggccgggcacggcatccagagcaaggcgcaggaggccggtgctggcactggcgccggcggcggcaggacttcctcgtaaataagcaaatcatccatggatgcgtgcgtgtcaatgtcagcagggtcgtcgtggaatgctcttctctgtacgtgggtaaccgtcttttggtcgtcttccccgagtgcgtgataaatatcctggtgttcgtcgtgtgtggtgctgccctaggctggggcctggggtcggctgtgtaccggtatctgttcatcgccgctccgtcgcgttcggagatgtgaataagtgatgtgaaggttaagtttcagctttgctattgctattgtggcttgtgcatcagcggtttgctcgttgactgttatggaaataagcattggtg

SEQ ID NO: 37226 - protein, 278 aa, Zea mays subsp. mays
  peptide (1)..(278): Ceres Seq. ID no. 13624119
  misc_feature (68)..(157): Pfam Name: Pfam Description:  Oleosin
  misc_feature (30)..(193): NCBI GI NO: 1076818 NR Description: oleosin 17 - maize
  misc_feature (30)..(192): NCBI GI NO: 129081 NR Description: Oleosin Zm-II
  misc_feature (30)..(191): NCBI GI NO: 28273373 NR Description: oleosin [Oryza sativa (japonica cultivar-group)]
  misc_feature (30)..(191): NCBI GI NO: 3334279 NR Description: OLEOSIN 18 KD (OSE721)
  misc_feature (30)..(191): NCBI GI NO: 1362166 NR Description: oleosin 1 - barley
  misc_feature (47)..(157): NCBI GI NO: 82051 NR Description: lipid body-associated membrane protein - carrot
  misc_feature (30)..(157): NCBI GI NO: 9963897 NR Description: oleosin [Perilla frutescens]
  misc_feature (32)..(157): NCBI GI NO: 10880961 NR Description: 19 kDa oleosin [Perilla frutescens]
  misc_feature (20)..(157): NCBI GI NO: 15242686 NR Description: oleosin [Arabidopsis thaliana]
  misc_feature (30)..(152): NCBI GI NO: 21311553 NR Description: 16.9 kDa oleosin [Theobroma cacao]
LLSLSLPAKLLDPSSITSLHQPQRTNVRLMADRDRSGIYGGGAYGQQQGGGRPMGEQVKGMIHDKGPTASQALTVATLFPLGGLLLVLSGLALAASTVGLALATPVFLLFSPVLVPAALLIGTAVAGFLTSGALGLGGLSSLTCLANTARQAFQRTPGLRRGGAPQDGGGRGARGPQDRAGRARHPEQGAGGRCWHWRRRRQDFLVNKQIIHGCVRVNVSRVVVECSSLYVGNRLLVVFPECVINILVFVVCGAALGWGLGSAVYRYLFIAAPSRSEM

SEQ ID NO: 37227 - protein, 249 aa, Zea mays subsp. mays
  peptide (1)..(249): Ceres Seq. ID no. 13624120
  misc_feature (39)..(128): Pfam Name: Pfam Description:  Oleosin
  misc_feature (1)..(164): NCBI GI NO: 1076818 NR Description: oleosin 17 - maize
  misc_feature (1)..(163): NCBI GI NO: 129081 NR Description: Oleosin Zm-II
  misc_feature (1)..(162): NCBI GI NO: 28273373 NR Description: oleosin [Oryza sativa (japonica cultivar-group)]
  misc_feature (1)..(162): NCBI GI NO: 3334279 NR Description: OLEOSIN 18 KD (OSE721)
  misc_feature (1)..(162): NCBI GI NO: 1362166 NR Description: oleosin 1 - barley
  misc_feature (18)..(128): NCBI GI NO: 82051 NR Description: lipid body-associated membrane protein - carrot
  misc_feature (1)..(128): NCBI GI NO: 9963897 NR Description: oleosin [Perilla frutescens]
  misc_feature (3)..(128): NCBI GI NO: 10880961 NR Description: 19 kDa oleosin [Perilla frutescens]
  misc_feature (1)..(128): NCBI GI NO: 15242686 NR Description: oleosin [Arabidopsis thaliana]
  misc_feature (1)..(123): NCBI GI NO: 21311553 NR Description: 16.9 kDa oleosin [Theobroma cacao]
MADRDRSGIYGGGAYGQQQGGGRPMGEQVKGMIHDKGPTASQALTVATLFPLGGLLLVLSGLALAASTVGLALATPVFLLFSPVLVPAALLIGTAVAGFLTSGALGLGGLSSLTCLANTARQAFQRTPGLRRGGAPQDGGGRGARGPQDRAGRARHPEQGAGGRCWHWRRRRQDFLVNKQIIHGCVRVNVSRVVVECSSLYVGNRLLVVFPECVINILVFVVCGAALGWGLGSAVYRYLFIAAPSRSEM

SEQ ID NO: 37228 - protein, 225 aa, Zea mays subsp. mays
  peptide (1)..(225): Ceres Seq. ID no. 13624121
  misc_feature (15)..(104): Pfam Name: Pfam Description:  Oleosin
  misc_feature (1)..(140): NCBI GI NO: 1076818 NR Description: oleosin 17 - maize
  misc_feature (1)..(139): NCBI GI NO: 129081 NR Description: Oleosin Zm-II
  misc_feature (1)..(138): NCBI GI NO: 28273373 NR Description: oleosin [Oryza sativa (japonica cultivar-group)]
  misc_feature (1)..(138): NCBI GI NO: 3334279 NR Description: OLEOSIN 18 KD (OSE721)
  misc_feature (1)..(138): NCBI GI NO: 1362166 NR Description: oleosin 1 - barley
  misc_feature (1)..(104): NCBI GI NO: 82051 NR Description: lipid body-associated membrane protein - carrot
  misc_feature (1)..(104): NCBI GI NO: 9963897 NR Description: oleosin [Perilla frutescens]
  misc_feature (1)..(104): NCBI GI NO: 10880961 NR Description: 19 kDa oleosin [Perilla frutescens]
  misc_feature (1)..(104): NCBI GI NO: 15242686 NR Description: oleosin [Arabidopsis thaliana]
  misc_feature (1)..(99): NCBI GI NO: 21311553 NR Description: 16.9 kDa oleosin [Theobroma cacao]
MGEQVKGMIHDKGPTASQALTVATLFPLGGLLLVLSGLALAASTVGLALATPVFLLFSPVLVPAALLIGTAVAGFLTSGALGLGGLSSLTCLANTARQAFQRTPGLRRGGAPQDGGGRGARGPQDRAGRARHPEQGAGGRCWHWRRRRQDFLVNKQIIHGCVRVNVSRVVVECSSLYVGNRLLVVFPECVINILVFVVCGAALGWGLGSAVYRYLFIAAPSRSEM

SEQ ID NO: 37229 - DNA, 609 bp, Zea mays subsp. mays
  misc_feature (1)..(609): Ceres Seq. ID no. 12594286
  misc_feature (474)..(474): n is a, c, t, g, unknown, or other
tgaatatcgatggcaatgtttgtactgtcatggtgactacattagttcttgagggctggcaacgtaagttggatccagattataatgttatgaagactctgcaaactttactttttaaggaagactgggcgaagtctcttcaatacactatccaagggctcatggcgccttagggtcgtccgcaatcctttctaaagttttgatctggtttgtgttcgaccggaggatcctcttctctcaccatcacgattctggcttcttttctacttaatttcacgtttcgtttctctgtacctgtcctggcgttgtgctgctaaagcagccttgatgataaagtaataactgcagtaaaaattttcagaagctaccagagtactatgctgctcagctctgggctgtcttcttatatgttcttgaagggccaaagaattaggtccttttcccccctcctaccaacacttttgacaatagctnttagatgatgtagcaaaaggcgttctgttctgatgatctttttgtaactggagaggttgtatccgtggactggagagttgcttatgtacagacagagatactgttaatctcgaaggaatccacttgtcaactgac

SEQ ID NO: 37230 - protein, 56 aa, Zea mays subsp. mays
  peptide (1)..(56): Ceres Seq. ID no. 12594287
  misc_feature (1)..(56): NCBI GI NO: 19387282 NR Description: putative 62.8 kDa protein
  misc_feature (1)..(56): NCBI GI NO: 32488318 NR Description: OSJNBa0015K02.12
  misc_feature (1)..(56): NCBI GI NO: 30682208 NR Description: hypethetical 62
  misc_feature (1)..(56): NCBI GI NO: 25404331 NR Description: hypothetical protein T25B24.1
  misc_feature (1)..(56): NCBI GI NO: 30696591 NR Description: expressed protein [Arabidopsis thaliana]
  misc_feature (1)..(41): NCBI GI NO: 34394005 NR Description: putative ubiquinone biosynthesis protein AarF
NIDGNVCTVMVTTLVLEGWQRKLDPDYNVMKTLQTLLFKEDWAKSLQYTIQGLMAP

SEQ ID NO: 37231 - protein, 47 aa, Zea mays subsp. mays
  peptide (1)..(47): Ceres Seq. ID no. 12594288
  misc_feature (1)..(47): NCBI GI NO: 19387282 NR Description: putative 62.8 kDa protein
  misc_feature (1)..(47): NCBI GI NO: 32488318 NR Description: OSJNBa0015K02.12
  misc_feature (1)..(47): NCBI GI NO: 30682208 NR Description: hypethetical 62
  misc_feature (1)..(47): NCBI GI NO: 25404331 NR Description: hypothetical protein T25B24.1
  misc_feature (1)..(47): NCBI GI NO: 30696591 NR Description: expressed protein [Arabidopsis thaliana]
  misc_feature (1)..(32): NCBI GI NO: 34394005 NR Description: putative ubiquinone biosynthesis protein AarF
MVTTLVLEGWQRKLDPDYNVMKTLQTLLFKEDWAKSLQYTIQGLMAP

SEQ ID NO: 37232 - protein, 34 aa, Zea mays subsp. mays
  peptide (1)..(34): Ceres Seq. ID no. 12594289
  misc_feature (33)..(33): Xaa is any aa, unknown or other
MLLSSGLSSYMFLKGQRIRSFSPLLPTLLTIAXR

SEQ ID NO: 37233 - DNA, 828 bp, Zea mays subsp. mays; identical to SEQ ID NO: 36570
  misc_feature (1)..(828): Ceres Seq. ID no. 12595473

SEQ ID NO: 37234 - protein, 230 aa, Zea mays subsp. mays; identical to SEQ ID NO: 36571
  peptide (1)..(230): Ceres Seq. ID no. 12595474
  misc_feature (106)..(208): Pfam Name: Pfam Description:  Protease inhibitor/seed storage/LTP family
  misc_feature (53)..(230): NCBI GI NO: 16305115 NR Description: 15kD beta zein [Zea mays]
  misc_feature (53)..(230): NCBI GI NO: 419803 NR Description: zein protein - maize
  misc_feature (53)..(230): NCBI GI NO: 168664 NR Description: zein protein precursor
  misc_feature (53)..(230): NCBI GI NO: 141616 NR Description: ZEIN-BETA PRECURSOR (16 KD) (ZEIN 2) (CLONE 15A3)
  misc_feature (53)..(230): NCBI GI NO: 100552 NR Description: beta-coixin, 17K, precursor - Job's tears

SEQ ID NO: 37235 - protein, 222 aa, Zea mays subsp. mays; identical to SEQ ID NO: 36572
  peptide (1)..(222): Ceres Seq. ID no. 12595475
  misc_feature (98)..(200): Pfam Name: Pfam Description:  Protease inhibitor/seed storage/LTP family
  misc_feature (45)..(222): NCBI GI NO: 16305115 NR Description: 15kD beta zein [Zea mays]
  misc_feature (45)..(222): NCBI GI NO: 419803 NR Description: zein protein - maize
  misc_feature (45)..(222): NCBI GI NO: 168664 NR Description: zein protein precursor
  misc_feature (45)..(222): NCBI GI NO: 141616 NR Description: ZEIN-BETA PRECURSOR (16 KD) (ZEIN 2) (CLONE 15A3)
  misc_feature (45)..(222): NCBI GI NO: 100552 NR Description: beta-coixin, 17K, precursor - Job's tears

SEQ ID NO: 37236 - protein, 178 aa, Zea mays subsp. mays; identical to SEQ ID NO: 36573
  peptide (1)..(178): Ceres Seq. ID no. 12595476
  misc_feature (54)..(156): Pfam Name: Pfam Description:  Protease inhibitor/seed storage/LTP family
  misc_feature (1)..(178): NCBI GI NO: 16305115 NR Description: 15kD beta zein [Zea mays]
  misc_feature (1)..(178): NCBI GI NO: 419803 NR Description: zein protein - maize
  misc_feature (1)..(178): NCBI GI NO: 168664 NR Description: zein protein precursor
  misc_feature (1)..(178): NCBI GI NO: 141616 NR Description: ZEIN-BETA PRECURSOR (16 KD) (ZEIN 2) (CLONE 15A3)
  misc_feature (1)..(178): NCBI GI NO: 100552 NR Description: beta-coixin, 17K, precursor - Job's tears

SEQ ID NO: 37237 - DNA, 937 bp, Zea mays subsp. mays; identical to SEQ ID NO: 37225
  misc_feature (1)..(937): Ceres Seq. ID no. 13624118

SEQ ID NO: 37238 - protein, 278 aa, Zea mays subsp. mays; identical to SEQ ID NO: 37226
  peptide (1)..(278): Ceres Seq. ID no. 13624119
  misc_feature (68)..(157): Pfam Name: Pfam Description:  Oleosin
  misc_feature (30)..(193): NCBI GI NO: 1076818 NR Description: oleosin 17 - maize
  misc_feature (30)..(192): NCBI GI NO: 129081 NR Description: Oleosin Zm-II
  misc_feature (30)..(191): NCBI GI NO: 28273373 NR Description: oleosin [Oryza sativa (japonica cultivar-group)]
  misc_feature (30)..(191): NCBI GI NO: 3334279 NR Description: OLEOSIN 18 KD (OSE721)
  misc_feature (30)..(191): NCBI GI NO: 1362166 NR Description: oleosin 1 - barley
  misc_feature (47)..(157): NCBI GI NO: 82051 NR Description: lipid body-associated membrane protein - carrot
  misc_feature (30)..(157): NCBI GI NO: 9963897 NR Description: oleosin [Perilla frutescens]
  misc_feature (32)..(157): NCBI GI NO: 10880961 NR Description: 19 kDa oleosin [Perilla frutescens]
  misc_feature (20)..(157): NCBI GI NO: 15242686 NR Description: oleosin [Arabidopsis thaliana]
  misc_feature (30)..(152): NCBI GI NO: 21311553 NR Description: 16.9 kDa oleosin [Theobroma cacao]

SEQ ID NO: 37239 - protein, 249 aa, Zea mays subsp. mays; identical to SEQ ID NO: 37227
  peptide (1)..(249): Ceres Seq. ID no. 13624120
  misc_feature (39)..(128): Pfam Name: Pfam Description:  Oleosin
  misc_feature (1)..(164): NCBI GI NO: 1076818 NR Description: oleosin 17 - maize
  misc_feature (1)..(163): NCBI GI NO: 129081 NR Description: Oleosin Zm-II
  misc_feature (1)..(162): NCBI GI NO: 28273373 NR Description: oleosin [Oryza sativa (japonica cultivar-group)]
  misc_feature (1)..(162): NCBI GI NO: 3334279 NR Description: OLEOSIN 18 KD (OSE721)
  misc_feature (1)..(162): NCBI GI NO: 1362166 NR Description: oleosin 1 - barley
  misc_feature (18)..(128): NCBI GI NO: 82051 NR Description: lipid body-associated membrane protein - carrot
  misc_feature (1)..(128): NCBI GI NO: 9963897 NR Description: oleosin [Perilla frutescens]
  misc_feature (3)..(128): NCBI GI NO: 10880961 NR Description: 19 kDa oleosin [Perilla frutescens]
  misc_feature (1)..(128): NCBI GI NO: 15242686 NR Description: oleosin [Arabidopsis thaliana]
  misc_feature (1)..(123): NCBI GI NO: 21311553 NR Description: 16.9 kDa oleosin [Theobroma cacao]

SEQ ID NO: 37240 - protein, 225 aa, Zea mays subsp. mays; identical to SEQ ID NO: 37228
  peptide (1)..(225): Ceres Seq. ID no. 13624121
  misc_feature (15)..(104): Pfam Name: Pfam Description:  Oleosin
  misc_feature (1)..(140): NCBI GI NO: 1076818 NR Description: oleosin 17 - maize
  misc_feature (1)..(139): NCBI GI NO: 129081 NR Description: Oleosin Zm-II
  misc_feature (1)..(138): NCBI GI NO: 28273373 NR Description: oleosin [Oryza sativa (japonica cultivar-group)]
  misc_feature (1)..(138): NCBI GI NO: 3334279 NR Description: OLEOSIN 18 KD (OSE721)
  misc_feature (1)..(138): NCBI GI NO: 1362166 NR Description: oleosin 1 - barley
  misc_feature (1)..(104): NCBI GI NO: 82051 NR Description: lipid body-associated membrane protein - carrot
  misc_feature (1)..(104): NCBI GI NO: 9963897 NR Description: oleosin [Perilla frutescens]
  misc_feature (1)..(104): NCBI GI NO: 10880961 NR Description: 19 kDa oleosin [Perilla frutescens]
  misc_feature (1)..(104): NCBI GI NO: 15242686 NR Description: oleosin [Arabidopsis thaliana]
  misc_feature (1)..(99): NCBI GI NO: 21311553 NR Description: 16.9 kDa oleosin [Theobroma cacao]

SEQ ID NO: 37241 - DNA, 1071 bp, Zea mays subsp. mays; identical to SEQ ID NO: 25397
  misc_feature (1)..(1071): Ceres Seq. ID no. 13624136

SEQ ID NO: 37242 - protein, 227 aa, Zea mays subsp. mays; identical to SEQ ID NO: 25398
  peptide (1)..(227): Ceres Seq. ID no. 13624137
  misc_feature (130)..(220): Pfam Name: PC4 Pfam Description: Transcriptional Coactivator p15
  misc_feature (45)..(227): NCBI GI NO: 34910378 NR Description: P0684B02.23
  misc_feature (95)..(224): NCBI GI NO: 13699910 NR Description: putative transcriptional coactivator
  misc_feature (66)..(224): NCBI GI NO: 15236980 NR Description: transcriptional co-activator (KELP) -related
  misc_feature (45)..(224): NCBI GI NO: 16610191 NR Description: PBF68 protein [Nicotiana tabacum]
  misc_feature (45)..(138): NCBI GI NO: 13699910 NR Description: putative transcriptional coactivator
  misc_feature (124)..(223): NCBI GI NO: 15242365 NR Description: transcriptional co-activator (KIWI) -related
  misc_feature (45)..(137): NCBI GI NO: 15236980 NR Description: transcriptional co-activator (KELP) -related
  misc_feature (150)..(222): NCBI GI NO: 40739125 NR Description: hypothetical protein AN5806.2
  misc_feature (126)..(225): NCBI GI NO: 15242363 NR Description: transcriptional co-activator-related protein
  misc_feature (100)..(217): NCBI GI NO: 17542398 NR Description: Transcriptional Coactivator p15 (PC4) (14.4 kD)

SEQ ID NO: 37243 - protein, 183 aa, Zea mays subsp. mays; identical to SEQ ID NO: 25399
  peptide (1)..(183): Ceres Seq. ID no. 13624138
  misc_feature (86)..(176): Pfam Name: PC4 Pfam Description: Transcriptional Coactivator p15
  misc_feature (1)..(183): NCBI GI NO: 34910378 NR Description: P0684B02.23
  misc_feature (51)..(180): NCBI GI NO: 13699910 NR Description: putative transcriptional coactivator
  misc_feature (22)..(180): NCBI GI NO: 15236980 NR Description: transcriptional co-activator (KELP) -related
  misc_feature (1)..(180): NCBI GI NO: 16610191 NR Description: PBF68 protein [Nicotiana tabacum]
  misc_feature (1)..(94): NCBI GI NO: 13699910 NR Description: putative transcriptional coactivator
  misc_feature (80)..(179): NCBI GI NO: 15242365 NR Description: transcriptional co-activator (KIWI) -related
  misc_feature (1)..(93): NCBI GI NO: 15236980 NR Description: transcriptional co-activator (KELP) -related
  misc_feature (106)..(178): NCBI GI NO: 40739125 NR Description: hypothetical protein AN5806.2
  misc_feature (82)..(181): NCBI GI NO: 15242363 NR Description: transcriptional co-activator-related protein
  misc_feature (56)..(173): NCBI GI NO: 17542398 NR Description: Transcriptional Coactivator p15 (PC4) (14.4 kD)

SEQ ID NO: 37244 - protein, 162 aa, Zea mays subsp. mays; identical to SEQ ID NO: 25400
  peptide (1)..(162): Ceres Seq. ID no. 13624139
  misc_feature (65)..(155): Pfam Name: PC4 Pfam Description: Transcriptional Coactivator p15
  misc_feature (1)..(162): NCBI GI NO: 34910378 NR Description: P0684B02.23
  misc_feature (30)..(159): NCBI GI NO: 13699910 NR Description: putative transcriptional coactivator
  misc_feature (1)..(159): NCBI GI NO: 15236980 NR Description: transcriptional co-activator (KELP) -related
  misc_feature (1)..(159): NCBI GI NO: 16610191 NR Description: PBF68 protein [Nicotiana tabacum]
  misc_feature (1)..(73): NCBI GI NO: 13699910 NR Description: putative transcriptional coactivator
  misc_feature (59)..(158): NCBI GI NO: 15242365 NR Description: transcriptional co-activator (KIWI) -related
  misc_feature (1)..(72): NCBI GI NO: 15236980 NR Description: transcriptional co-activator (KELP) -related
  misc_feature (85)..(157): NCBI GI NO: 40739125 NR Description: hypothetical protein AN5806.2
  misc_feature (61)..(160): NCBI GI NO: 15242363 NR Description: transcriptional co-activator-related protein
  misc_feature (35)..(152): NCBI GI NO: 17542398 NR Description: Transcriptional Coactivator p15 (PC4) (14.4 kD)

SEQ ID NO: 37245 - DNA, 1263 bp, Zea mays subsp. mays
  misc_feature (1)..(1263): Ceres Seq. ID no. 14302660
atttgagaaggagagggaaaatgatgacctcgtggcttctgggccgccggggcccctccggcttctcctggagttccaccgccgaccaagtcacgcagggcatctccgccgccggcctcaccgccatcgtcactggggcgtccagcggcatcggcgcggagacggcgcgaacgctggcgctgcgcggggcccacgtcatcatggccgtcaggagccttcccgctgcccaggccgtcaaggacgccgtcctcgcccaggcgccgggggccaagctcgacgtcatggagctcgacctctcgtccatggcctctgtccgcgctttcgcgtcccaattcatcgacaggggtctccccctcaacatccttatcaacaatgcaggagtaatggcaataccttttgcgctttcaaaggatggaattgagatgcagtttgcaactaatcatgttgggcatttcctgctcacacaccttctattggataccatgaagaggacctctcatgaatcaaatttggaaggaagaattgtcaacgtgtcatcagaggggcacagacttgcatatcgggaaggaatccgttttgacaagatcaacgatgaatcagtgtatagtagcattggtgcatatgggcaatcaaagcttgcaaacatattgcatgctaatgaacttgccaggcgatttgaggaagataatgtcaacataactgcaaattctcttcatcctggttccattatcacgaaccttcttcgctaccacagtatcctagatgttctccatcggacgctgggtaaattggtgttgaaaaatgctgagcagggtgcggcaactacatgctatttggcactccacccgcatgtgaagggcgtgtccgggaagtacttctgcgactgtaacctgtacgagccaagcgcgaacgccaaggacatggagttggccaagaggctctgggacttcggcgtcgagctcatcacctagctcatgcttcttgttgttagcgacttgttttcagacatggatgtaatgtaaatcccttgacagatggtaaattctgtaggccctcgaggagctcctgtgtggtaaactcattcacctcaatctatctacgtgtattaaggtggattagggtgtaaattaaattaatttacactccaatcgccctcgaggagctccggtgtggataatgctttggttggatattttagtattcacctgaatttacgtgtattaagatgaattagggtgtaaattaaattaattacactccaag

SEQ ID NO: 37246 - protein, 322 aa, Zea mays subsp. mays
  peptide (1)..(322): Ceres Seq. ID no. 14302661
  misc_feature (11)..(320): NCBI GI NO: 15233359 NR Description: short-chain dehydrogenase/reductase family protein
  misc_feature (11)..(320): NCBI GI NO: 23297050 NR Description: unknown protein [Arabidopsis thaliana]
  misc_feature (11)..(320): NCBI GI NO: 30686197 NR Description: short-chain dehydrogenase/reductase family protein
  misc_feature (11)..(320): NCBI GI NO: 18416145 NR Description: short-chain dehydrogenase/reductase family protein
  misc_feature (10)..(321): NCBI GI NO: 18413950 NR Description: short-chain dehydrogenase/reductase family protein
  misc_feature (10)..(321): NCBI GI NO: 20260302 NR Description: putative protein [Arabidopsis thaliana]
  misc_feature (10)..(321): NCBI GI NO: 21554820 NR Description: putativepod-specific dehydrogenase SAC25
  misc_feature (15)..(322): NCBI GI NO: 37536622 NR Description: putative WW-domain oxidoreductase
  misc_feature (10)..(321): NCBI GI NO: 34895876 NR Description: P0009G03.18
  misc_feature (12)..(321): NCBI GI NO: 15224306 NR Description: short-chain dehydrogenase/reductase family protein
LRRRGKMMTSWLLGRRGPSGFSWSSTADQVTQGISAAGLTAIVTGASSGIGAETARTLALRGAHVIMAVRSLPAAQAVKDAVLAQAPGAKLDVMELDLSSMASVRAFASQFIDRGLPLNILINNAGVMAIPFALSKDGIEMQFATNHVGHFLLTHLLLDTMKRTSHESNLEGRIVNVSSEGHRLAYREGIRFDKINDESVYSSIGAYGQSKLANILHANELARRFEEDNVNITANSLHPGSIITNLLRYHSILDVLHRTLGKLVLKNAEQGAATTCYLALHPHVKGVSGKYFCDCNLYEPSANAKDMELAKRLWDFGVELIT

SEQ ID NO: 37247 - protein, 316 aa, Zea mays subsp. mays; identical to SEQ ID NO: 25818
  peptide (1)..(316): Ceres Seq. ID no. 14302662
  misc_feature (5)..(314): NCBI GI NO: 15233359 NR Description: short-chain dehydrogenase/reductase family protein
  misc_feature (5)..(314): NCBI GI NO: 23297050 NR Description: unknown protein [Arabidopsis thaliana]
  misc_feature (5)..(314): NCBI GI NO: 30686197 NR Description: short-chain dehydrogenase/reductase family protein
  misc_feature (5)..(314): NCBI GI NO: 18416145 NR Description: short-chain dehydrogenase/reductase family protein
  misc_feature (4)..(315): NCBI GI NO: 18413950 NR Description: short-chain dehydrogenase/reductase family protein
  misc_feature (4)..(315): NCBI GI NO: 20260302 NR Description: putative protein [Arabidopsis thaliana]
  misc_feature (4)..(315): NCBI GI NO: 21554820 NR Description: putativepod-specific dehydrogenase SAC25
  misc_feature (9)..(316): NCBI GI NO: 37536622 NR Description: putative WW-domain oxidoreductase
  misc_feature (4)..(315): NCBI GI NO: 34895876 NR Description: P0009G03.18
  misc_feature (6)..(315): NCBI GI NO: 15224306 NR Description: short-chain dehydrogenase/reductase family protein

SEQ ID NO: 37248 - protein, 315 aa, Zea mays subsp. mays; identical to SEQ ID NO: 25819
  peptide (1)..(315): Ceres Seq. ID no. 14302663
  misc_feature (4)..(313): NCBI GI NO: 15233359 NR Description: short-chain dehydrogenase/reductase family protein
  misc_feature (4)..(313): NCBI GI NO: 23297050 NR Description: unknown protein [Arabidopsis thaliana]
  misc_feature (4)..(313): NCBI GI NO: 30686197 NR Description: short-chain dehydrogenase/reductase family protein
  misc_feature (4)..(313): NCBI GI NO: 18416145 NR Description: short-chain dehydrogenase/reductase family protein
  misc_feature (3)..(314): NCBI GI NO: 18413950 NR Description: short-chain dehydrogenase/reductase family protein
  misc_feature (3)..(314): NCBI GI NO: 20260302 NR Description: putative protein [Arabidopsis thaliana]
  misc_feature (3)..(314): NCBI GI NO: 21554820 NR Description: putativepod-specific dehydrogenase SAC25
  misc_feature (8)..(315): NCBI GI NO: 37536622 NR Description: putative WW-domain oxidoreductase
  misc_feature (3)..(314): NCBI GI NO: 34895876 NR Description: P0009G03.18
  misc_feature (5)..(314): NCBI GI NO: 15224306 NR Description: short-chain dehydrogenase/reductase family protein

SEQ ID NO: 37249 - DNA, 451 bp, Zea mays subsp. mays
  misc_feature (1)..(451): Ceres Seq. ID no. 7119950
  misc_feature (157)..(157): n is a, c, t, g, unknown, or other
  misc_feature (355)..(355): n is a, c, t, g, unknown, or other
gtctgatttctctgacgggtgggtttggtttggatctgggcggaccaggcgctccacgcgatggcgcagaaggagaccaatggcagcaacggcgagcacatctccacccgcccgccgccgaccccgtcgcccctccgcttctccaagttcttccagnttaacctgcggatcctgggtcattgggtgggggcgggcttcatcggctcgcaccttcgtggacaggctcatggagaacagaaagcacgaggtcattgttgctgataactttttcaccggttcaaaagaaacctgaagaaagtggatcggacacccaagatttgagctcatcccgccatgatgtcactgagccactttntttgggggaggttgaccagatctatcaccttgcttgccctgcttcaccaatcttctacaagcacaatcctgttaagaccatcaagacaaatgttat

SEQ ID NO: 37250 - protein, 96 aa, Zea mays subsp. mays
  peptide (1)..(96): Ceres Seq. ID no. 7119951
  misc_feature (31)..(96): NCBI GI NO: 18447934 NR Description: UDP-glucuronic acid decarboxylase
  misc_feature (39)..(96): NCBI GI NO: 11121508 NR Description: d-TDP-glucose dehydratase [Phragmites australis]
  misc_feature (31)..(96): NCBI GI NO: 15231432 NR Description: dTDP-glucose 4-6-dehydratases-like protein
  misc_feature (27)..(96): NCBI GI NO: 15237853 NR Description: dTDP-glucose 4-6-dehydratase - like protein
  misc_feature (27)..(96): NCBI GI NO: 15226950 NR Description: putative nucleotide-sugar dehydratase
  misc_feature (27)..(96): NCBI GI NO: 11270075 NR Description: dTDPglucose 4,6-dehydratase (EC 4.2.1.46)
  misc_feature (27)..(96): NCBI GI NO: 13591616 NR Description: UDP-D-glucuronate carboxy-lyase [Pisum sativum]
  misc_feature (27)..(96): NCBI GI NO: 14030703 NR Description: AT5g59290/mnc17_180 [Arabidopsis thaliana]
  misc_feature (72)..(96): NCBI GI NO: 22298207 NR Description: dTDP-glucose 4,6-dehydratase
  misc_feature (72)..(96): NCBI GI NO: 23123874 NR Description: hypothetical protein [Nostoc punctiforme]
  misc_feature (52)..(52): Xaa is any aa, unknown or other
SDFSDGWVWFGSGRTRRSTRWRRRRPMAATASTSPPARRRPRRPSASPSSSXLTCGSWVIGWGRASSARTFVDRLMENRKHEVIVADNFFTGSKET

SEQ ID NO: 37251 - protein, 70 aa, Zea mays subsp. mays
  peptide (1)..(70): Ceres Seq. ID no. 7119952
  misc_feature (5)..(70): NCBI GI NO: 18447934 NR Description: UDP-glucuronic acid decarboxylase
  misc_feature (13)..(70): NCBI GI NO: 11121508 NR Description: d-TDP-glucose dehydratase [Phragmites australis]
  misc_feature (5)..(70): NCBI GI NO: 15231432 NR Description: dTDP-glucose 4-6-dehydratases-like protein
  misc_feature (1)..(70): NCBI GI NO: 15237853 NR Description: dTDP-glucose 4-6-dehydratase - like protein
  misc_feature (1)..(70): NCBI GI NO: 15226950 NR Description: putative nucleotide-sugar dehydratase
  misc_feature (1)..(70): NCBI GI NO: 11270075 NR Description: dTDPglucose 4,6-dehydratase (EC 4.2.1.46)
  misc_feature (1)..(70): NCBI GI NO: 13591616 NR Description: UDP-D-glucuronate carboxy-lyase [Pisum sativum]
  misc_feature (1)..(70): NCBI GI NO: 14030703 NR Description: AT5g59290/mnc17_180 [Arabidopsis thaliana]
  misc_feature (46)..(70): NCBI GI NO: 22298207 NR Description: dTDP-glucose 4,6-dehydratase
  misc_feature (46)..(70): NCBI GI NO: 23123874 NR Description: hypothetical protein [Nostoc punctiforme]
  misc_feature (26)..(26): Xaa is any aa, unknown or other
MAATASTSPPARRRPRRPSASPSSSXLTCGSWVIGWGRASSARTFVDRLMENRKHEVIVADNFFTGSKET

SEQ ID NO: 37252 - protein, 66 aa, Zea mays subsp. mays
  peptide (1)..(66): Ceres Seq. ID no. 7119953
  misc_feature (1)..(66): NCBI GI NO: 11121508 NR Description: d-TDP-glucose dehydratase [Phragmites australis]
  misc_feature (1)..(66): NCBI GI NO: 18447934 NR Description: UDP-glucuronic acid decarboxylase
  misc_feature (7)..(66): NCBI GI NO: 11270075 NR Description: dTDPglucose 4,6-dehydratase (EC 4.2.1.46)
  misc_feature (7)..(66): NCBI GI NO: 13591616 NR Description: UDP-D-glucuronate carboxy-lyase [Pisum sativum]
  misc_feature (6)..(66): NCBI GI NO: 15226950 NR Description: putative nucleotide-sugar dehydratase
  misc_feature (9)..(66): NCBI GI NO: 15231432 NR Description: dTDP-glucose 4-6-dehydratases-like protein
  misc_feature (33)..(33): Xaa is any aa, unknown or other
MAQKETNGSNGEHISTRPPPTPSPLRFSKFFQXNLRILGHWVGAGFIGSHLRGQAHGEQKARGHCC

SEQ ID NO: 37253 - DNA, 456 bp, Zea mays subsp. mays
  misc_feature (1)..(456): Ceres Seq. ID no. 12595566
aaaaaaactccactcgccctcccacacagaaaaccctagccgccgccaccgaagcggcctcccaggtaagcaggatcgtccagcccgccgccgccatgaagcgcaatccccgcgtcacgagctcccgccggaagtgccgcaaggcgcactttacggccccgtcctccgtccgccgcgttctcatgtccgcggggctgtcgacggagctccgccacaagtacaacgtgcgctccatcccgatccgcaaggacgacgaggtgcaggtcgtgcgcggcacctacaagggccgtgaggggaaggtggtgcaggtgtaccgccgccgctgggtcatccacgtcgagcggatcacccgcgagaaggtgaacggctccaccgtgaacgtgggcatccacccctccaaggtgatcgtcaccaagctgaagctcgacaaggaccgtaaggcgctcctcgacccgc

SEQ ID NO: 37254 - protein, 151 aa, Zea mays subsp. mays
  peptide (1)..(151): Ceres Seq. ID no. 12595567
  misc_feature (80)..(113): Pfam Name: Pfam Description:  KOW motif
  misc_feature (32)..(150): NCBI GI NO: 3747050 NR Description: ribosomal protein L26 [Zea mays]
  misc_feature (32)..(150): NCBI GI NO: 34895672 NR Description: putative ribosomal protein L26
  misc_feature (32)..(150): NCBI GI NO: 15229631 NR Description: 60S RIBOSOMAL PROTEIN - like; protein id:At3g49910
  misc_feature (32)..(150): NCBI GI NO: 15240766 NR Description: 60S ribosomal protein L26; protein id: At5g67510
  misc_feature (32)..(150): NCBI GI NO: 3914740 NR Description: 60S ribosomal protein L26
  misc_feature (32)..(150): NCBI GI NO: 33585605 NR Description: Unknown (protein for MGC:66190) [Danio rerio]
  misc_feature (32)..(150): NCBI GI NO: 7705813 NR Description: ribosomal protein L26-like 1
  misc_feature (32)..(150): NCBI GI NO: 15293919 NR Description: ribosomal protein L26 [Ictalurus punctatus]
  misc_feature (32)..(150): NCBI GI NO: 292435 NR Description: ribosomal protein L26
  misc_feature (32)..(150): NCBI GI NO: 28189641 NR Description: similar to ribosomal protein L26 [Bos taurus]
KNSTRPPTQKTLAAATEAASQVSRIVQPAAAMKRNPRVTSSRRKCRKAHFTAPSSVRRVLMSAGLSTELRHKYNVRSIPIRKDDEVQVVRGTYKGREGKVVQVYRRRWVIHVERITREKVNGSTVNVGIHPSKVIVTKLKLDKDRKALLDP

SEQ ID NO: 37255 - protein, 120 aa, Zea mays subsp. mays
  peptide (1)..(120): Ceres Seq. ID no. 12595568
  misc_feature (49)..(82): Pfam Name: Pfam Description:  KOW motif
  misc_feature (1)..(119): NCBI GI NO: 3747050 NR Description: ribosomal protein L26 [Zea mays]
  misc_feature (1)..(119): NCBI GI NO: 34895672 NR Description: putative ribosomal protein L26
  misc_feature (1)..(119): NCBI GI NO: 15229631 NR Description: 60S RIBOSOMAL PROTEIN - like; protein id:At3g49910
  misc_feature (1)..(119): NCBI GI NO: 15240766 NR Description: 60S ribosomal protein L26; protein id: At5g67510
  misc_feature (1)..(119): NCBI GI NO: 3914740 NR Description: 60S ribosomal protein L26
  misc_feature (1)..(119): NCBI GI NO: 33585605 NR Description: Unknown (protein for MGC:66190) [Danio rerio]
  misc_feature (1)..(119): NCBI GI NO: 7705813 NR Description: ribosomal protein L26-like 1
  misc_feature (1)..(119): NCBI GI NO: 15293919 NR Description: ribosomal protein L26 [Ictalurus punctatus]
  misc_feature (1)..(119): NCBI GI NO: 292435 NR Description: ribosomal protein L26
  misc_feature (1)..(119): NCBI GI NO: 28189641 NR Description: similar to ribosomal protein L26 [Bos taurus]
MKRNPRVTSSRRKCRKAHFTAPSSVRRVLMSAGLSTELRHKYNVRSIPIRKDDEVQVVRGTYKGREGKVVQVYRRRWVIHVERITREKVNGSTVNVGIHPSKVIVTKLKLDKDRKALLDP

SEQ ID NO: 37256 - protein, 96 aa, Zea mays subsp. mays
  peptide (1)..(96): Ceres Seq. ID no. 12595569
KKLHSPSHTENPSRRHRSGLPGKQDRPARRRHEAQSPRHELPPEVPQGALYGPVLRPPRSHVRGAVDGAPPQVQRALHPDPQGRRGAGRARHLQGP

SEQ ID NO: 37257 - DNA, 1015 bp, Zea mays subsp. mays; identical to SEQ ID NO: 25467
  misc_feature (1)..(1015): Ceres Seq. ID no. 12595679

SEQ ID NO: 37258 - protein, 143 aa, Zea mays subsp. mays; identical to SEQ ID NO: 25468
  peptide (1)..(143): Ceres Seq. ID no. 12595680
  misc_feature (76)..(100): Pfam Name: Pfam Description:  A20-like zinc finger
  misc_feature (63)..(143): NCBI GI NO: 35187687 NR Description: zinc-finger protein
  misc_feature (63)..(143): NCBI GI NO: 11361253 NR Description: hypothetical protein p85RF
  misc_feature (63)..(143): NCBI GI NO: 18403408 NR Description: expressed protein; protein id: At1g51200
  misc_feature (63)..(143): NCBI GI NO: 25082726 NR Description: expressed protein [Arabidopsis thaliana]
  misc_feature (62)..(143): NCBI GI NO: 15231686 NR Description: zinc finger - like protein; protein id:At3g52800
  misc_feature (62)..(143): NCBI GI NO: 14596167 NR Description: zinc finger-like protein [Arabidopsis thaliana]
  misc_feature (64)..(136): NCBI GI NO: 28269431 NR Description: putative zinc finger protein
  misc_feature (67)..(103): NCBI GI NO: 30908921 NR Description: putative zinc finger transcription factor ZFP33
  misc_feature (62)..(143): NCBI GI NO: 18404102 NR Description: expressed protein; protein id: At2g36320
  misc_feature (71)..(143): NCBI GI NO: 29791559 NR Description: Unknown (protein for MGC:56057) [Danio rerio]

SEQ ID NO: 37259 - protein, 91 aa, Zea mays subsp. mays; identical to SEQ ID NO: 25469
  peptide (1)..(91): Ceres Seq. ID no. 12595681

SEQ ID NO: 37260 - protein, 82 aa, Zea mays subsp. mays; identical to SEQ ID NO: 25470
  peptide (1)..(82): Ceres Seq. ID no. 12595682
  misc_feature (23)..(63): Pfam Name: Pfam Description:  AN1-like Zinc finger
  misc_feature (1)..(82): NCBI GI NO: 35187687 NR Description: zinc-finger protein
  misc_feature (1)..(82): NCBI GI NO: 11361253 NR Description: hypothetical protein p85RF
  misc_feature (1)..(82): NCBI GI NO: 18403408 NR Description: expressed protein; protein id: At1g51200
  misc_feature (1)..(82): NCBI GI NO: 25082726 NR Description: expressed protein [Arabidopsis thaliana]
  misc_feature (1)..(82): NCBI GI NO: 15231686 NR Description: zinc finger - like protein; protein id:At3g52800
  misc_feature (1)..(82): NCBI GI NO: 14596167 NR Description: zinc finger-like protein [Arabidopsis thaliana]
  misc_feature (6)..(82): NCBI GI NO: 28269431 NR Description: putative zinc finger protein
  misc_feature (3)..(82): NCBI GI NO: 30908921 NR Description: putative zinc finger transcription factor ZFP33
  misc_feature (1)..(82): NCBI GI NO: 18404102 NR Description: expressed protein; protein id: At2g36320
  misc_feature (3)..(82): NCBI GI NO: 29791559 NR Description: Unknown (protein for MGC:56057) [Danio rerio]

SEQ ID NO: 37261 - protein, 81 aa, Zea mays subsp. mays; identical to SEQ ID NO: 25471
  peptide (1)..(81): Ceres Seq. ID no. 12595683
  misc_feature (14)..(38): Pfam Name: Pfam Description:  A20-like zinc finger
  misc_feature (1)..(81): NCBI GI NO: 35187687 NR Description: zinc-finger protein
  misc_feature (1)..(81): NCBI GI NO: 11361253 NR Description: hypothetical protein p85RF
  misc_feature (1)..(81): NCBI GI NO: 18403408 NR Description: expressed protein; protein id: At1g51200
  misc_feature (1)..(81): NCBI GI NO: 25082726 NR Description: expressed protein [Arabidopsis thaliana]
  misc_feature (1)..(81): NCBI GI NO: 15231686 NR Description: zinc finger - like protein; protein id:At3g52800
  misc_feature (1)..(81): NCBI GI NO: 14596167 NR Description: zinc finger-like protein [Arabidopsis thaliana]
  misc_feature (2)..(74): NCBI GI NO: 28269431 NR Description: putative zinc finger protein
  misc_feature (5)..(41): NCBI GI NO: 30908921 NR Description: putative zinc finger transcription factor ZFP33
  misc_feature (1)..(81): NCBI GI NO: 18404102 NR Description: expressed protein; protein id: At2g36320
  misc_feature (9)..(81): NCBI GI NO: 29791559 NR Description: Unknown (protein for MGC:56057) [Danio rerio]

SEQ ID NO: 37262 - DNA, 461 bp, Zea mays subsp. mays
  misc_feature (1)..(461): Ceres Seq. ID no. 11029785
  misc_feature (426)..(426): n is a, c, t, g, unknown, or other
ccaaaggaaggtgacagtattgttcaggatgctcctgcagatattccttcccttctagaattgaagcgcgtctactacgaactgatgattcgttattactctcacaacaatgattacttggaaatctgccgttgttacaaggctatttatgatattccagcaataaaagaggatccaacaaagtggataccgattcttaggaagatctgttggtacttggtgctagcacctcatgatcctatgcaatcaagccttctcaatgctacactagaggataaaaacctttcagaaatcccaaatttcaggttattactggaagcagctggccacccatggaggtgatacagtgggacaagtcctgtgggaattcttcaaggaggaatatgagaaaggagaaggatcttcttggggggagcttttgggtgncaaagcttcagaagatttgaggctgaggattatcc

SEQ ID NO: 37263 - protein, 113 aa, Zea mays subsp. mays
  peptide (1)..(113): Ceres Seq. ID no. 11029786
  misc_feature (1)..(106): NCBI GI NO: 17298157 NR Description: 26S proteasome regulatory particle non-ATPase subunit5
  misc_feature (1)..(106): NCBI GI NO: 27573351 NR Description: putative proteasome regulatory non-ATPase subunit
  misc_feature (1)..(106): NCBI GI NO: 15242545 NR Description: 26S proteasome regulatory subunit
  misc_feature (1)..(106): NCBI GI NO: 10177207 NR Description: proteasome regulatory subunit-like
  misc_feature (1)..(106): NCBI GI NO: 30698065 NR Description: 26S proteasome regulatory subunit (RPN5), putative
  misc_feature (20)..(106): NCBI GI NO: 27503944 NR Description: Similar to proteasome
  misc_feature (20)..(106): NCBI GI NO: 34874104 NR Description: similar to proteasome 26S non-ATPase subunit 12
  misc_feature (21)..(106): NCBI GI NO: 12857304 NR Description: unnamed protein product [Mus musculus]
  misc_feature (21)..(106): NCBI GI NO: 13385384 NR Description: proteasome 26S non-ATPase subunit 12
  misc_feature (20)..(106): NCBI GI NO: 28872765 NR Description: proteasome 26S non-ATPase subunit 12 isoform 2
PKEGDSIVQDAPADIPSLLELKRVYYELMIRYYSHNNDYLEICRCYKAIYDIPAIKEDPTKWIPILRKICWYLVLAPHDPMQSSLLNATLEDKNLSEIPNFRLLLEAAGHPWR

SEQ ID NO: 37264 - protein, 85 aa, Zea mays subsp. mays
  peptide (1)..(85): Ceres Seq. ID no. 11029787
  misc_feature (1)..(78): NCBI GI NO: 17298157 NR Description: 26S proteasome regulatory particle non-ATPase subunit5
  misc_feature (1)..(78): NCBI GI NO: 27573351 NR Description: putative proteasome regulatory non-ATPase subunit
  misc_feature (1)..(78): NCBI GI NO: 15242545 NR Description: 26S proteasome regulatory subunit
  misc_feature (1)..(78): NCBI GI NO: 10177207 NR Description: proteasome regulatory subunit-like
  misc_feature (1)..(78): NCBI GI NO: 30698065 NR Description: 26S proteasome regulatory subunit (RPN5), putative
  misc_feature (1)..(78): NCBI GI NO: 27503944 NR Description: Similar to proteasome
  misc_feature (1)..(78): NCBI GI NO: 34874104 NR Description: similar to proteasome 26S non-ATPase subunit 12
  misc_feature (1)..(78): NCBI GI NO: 12857304 NR Description: unnamed protein product [Mus musculus]
  misc_feature (1)..(78): NCBI GI NO: 13385384 NR Description: proteasome 26S non-ATPase subunit 12
  misc_feature (1)..(78): NCBI GI NO: 28872765 NR Description: proteasome 26S non-ATPase subunit 12 isoform 2
MIRYYSHNNDYLEICRCYKAIYDIPAIKEDPTKWIPILRKICWYLVLAPHDPMQSSLLNATLEDKNLSEIPNFRLLLEAAGHPWR

SEQ ID NO: 37265 - DNA, 934 bp, Zea mays subsp. mays
  misc_feature (1)..(934): Ceres Seq. ID no. 13589261
ctactctctctctctctgcctgcaaagctgcttgatccatcatcgatcacatcactccaccagccgcagcgcacgaacgtacgactcatggcagatcgcgaccgcagcggcatctacggcggcggcgcctacgggcagcagcaggggggcggccgcccgatgggtgagcaggtgaagggcatgatccacgacaaggggccgacggcgtcccaggcgctgacggtggcgacgctgttccctctgggcgggctgctcctggtgctgtcaggcctggcgctggcggcctccacggtggggctggccctggccacgcccgtgttcctgctcttcagccccgtgctcgtccccgccgcgctgctcatcggcacggccgtcgcggggttcctcacgtcgggcgcgctggggctcggcggcctgtcctcgctcacgtgcctcgccaacacggcgcggcaggcgttccagcgcaccccggactacgtcgaggaggcgcgccgcaggatggcggaggccgcggcgcacgcgggccacaagaccgcgcaggccgggcacggcatccagagcaaggcgcaggaggccggtgctggcactggcgccggcggcggcaggacttcctcgtaaataagcaaatcatccatggatgcgtgcgtgtcaatgtcagcagggtcgtcgtggaatgctcttctctgtacgtgggtaaccgtcttttggtcgtcttccccgagtgcgtgataaatatcctggtgttcgtcgtgtgtggtgctgccctaggctggggcctggggtcggctgtgtaccggtatctgttcatcgccgctccgtcgcgttcggagatgtgaataagtgatgtgaaggttaagtttcagctttgctattgctattgtggcttgtgcatcagcggtttgctcgttgactgttatggaaataagcattggtg

SEQ ID NO: 37266 - protein, 205 aa, Zea mays subsp. mays
  peptide (1)..(205): Ceres Seq. ID no. 13589262
  misc_feature (68)..(185): Pfam Name: Pfam Description:  Oleosin
  misc_feature (30)..(205): NCBI GI NO: 1076818 NR Description: oleosin 17 - maize
  misc_feature (30)..(205): NCBI GI NO: 129081 NR Description: Oleosin Zm-II
  misc_feature (30)..(205): NCBI GI NO: 28273373 NR Description: oleosin [Oryza sativa (japonica cultivar-group)]
  misc_feature (30)..(205): NCBI GI NO: 3334279 NR Description: OLEOSIN 18 KD (OSE721)
  misc_feature (30)..(205): NCBI GI NO: 1362166 NR Description: oleosin 1 - barley
  misc_feature (47)..(205): NCBI GI NO: 82051 NR Description: lipid body-associated membrane protein - carrot
  misc_feature (30)..(203): NCBI GI NO: 9963897 NR Description: oleosin [Perilla frutescens]
  misc_feature (32)..(203): NCBI GI NO: 10880961 NR Description: 19 kDa oleosin [Perilla frutescens]
  misc_feature (30)..(203): NCBI GI NO: 22651523 NR Description: oleosin [Olea europaea subsp. europaea]
  misc_feature (30)..(196): NCBI GI NO: 10834827 NR Description: oleosin [Sesamum indicum]
LLSLSLPAKLLDPSSITSLHQPQRTNVRLMADRDRSGIYGGGAYGQQQGGGRPMGEQVKGMIHDKGPTASQALTVATLFPLGGLLLVLSGLALAASTVGLALATPVFLLFSPVLVPAALLIGTAVAGFLTSGALGLGGLSSLTCLANTARQAFQRTPDYVEEARRRMAEAAAHAGHKTAQAGHGIQSKAQEAGAGTGAGGGRTSS

SEQ ID NO: 37267 - protein, 176 aa, Zea mays subsp. mays
  peptide (1)..(176): Ceres Seq. ID no. 13589263
  misc_feature (39)..(156): Pfam Name: Pfam Description:  Oleosin
  misc_feature (1)..(176): NCBI GI NO: 1076818 NR Description: oleosin 17 - maize
  misc_feature (1)..(176): NCBI GI NO: 129081 NR Description: Oleosin Zm-II
  misc_feature (1)..(176): NCBI GI NO: 28273373 NR Description: oleosin [Oryza sativa (japonica cultivar-group)]
  misc_feature (1)..(176): NCBI GI NO: 3334279 NR Description: OLEOSIN 18 KD (OSE721)
  misc_feature (1)..(176): NCBI GI NO: 1362166 NR Description: oleosin 1 - barley
  misc_feature (18)..(176): NCBI GI NO: 82051 NR Description: lipid body-associated membrane protein - carrot
  misc_feature (1)..(174): NCBI GI NO: 9963897 NR Description: oleosin [Perilla frutescens]
  misc_feature (3)..(174): NCBI GI NO: 10880961 NR Description: 19 kDa oleosin [Perilla frutescens]
  misc_feature (1)..(174): NCBI GI NO: 22651523 NR Description: oleosin [Olea europaea subsp. europaea]
  misc_feature (1)..(167): NCBI GI NO: 10834827 NR Description: oleosin [Sesamum indicum]
MADRDRSGIYGGGAYGQQQGGGRPMGEQVKGMIHDKGPTASQALTVATLFPLGGLLLVLSGLALAASTVGLALATPVFLLFSPVLVPAALLIGTAVAGFLTSGALGLGGLSSLTCLANTARQAFQRTPDYVEEARRRMAEAAAHAGHKTAQAGHGIQSKAQEAGAGTGAGGGRTSS

SEQ ID NO: 37268 - protein, 152 aa, Zea mays subsp. mays; identical to SEQ ID NO: 19932
  peptide (1)..(152): Ceres Seq. ID no. 13589264
  misc_feature (15)..(132): Pfam Name: Pfam Description:  Oleosin
  misc_feature (1)..(152): NCBI GI NO: 1076818 NR Description: oleosin 17 - maize
  misc_feature (1)..(152): NCBI GI NO: 129081 NR Description: Oleosin Zm-II
  misc_feature (1)..(152): NCBI GI NO: 28273373 NR Description: oleosin [Oryza sativa (japonica cultivar-group)]
  misc_feature (1)..(152): NCBI GI NO: 3334279 NR Description: OLEOSIN 18 KD (OSE721)
  misc_feature (1)..(152): NCBI GI NO: 1362166 NR Description: oleosin 1 - barley
  misc_feature (1)..(152): NCBI GI NO: 82051 NR Description: lipid body-associated membrane protein - carrot
  misc_feature (1)..(150): NCBI GI NO: 9963897 NR Description: oleosin [Perilla frutescens]
  misc_feature (1)..(150): NCBI GI NO: 10880961 NR Description: 19 kDa oleosin [Perilla frutescens]
  misc_feature (1)..(150): NCBI GI NO: 22651523 NR Description: oleosin [Olea europaea subsp. europaea]
  misc_feature (1)..(143): NCBI GI NO: 10834827 NR Description: oleosin [Sesamum indicum]

SEQ ID NO: 37269 - DNA, 1007 bp, Zea mays subsp. mays
  misc_feature (1)..(1007): Ceres Seq. ID no. 14302668
tctagtctagtacacgaatcacgaacgcgtccacctgcgcgcatcgccacgcaggttctctccaccaaaccttaacctccccttccagaaaccctccaagaggcagctcaaaggaatagtgagccgccccgccgctcctcagccatcctctccatctcggtgtcacacactccgcatacgcacctacgagagtcgagtgacagcgagcgagcgagcgagcgaagccatggctctccgcaccctggcatcgaagaacgccctatccttcgcgctcggcggcgcggcccggccgtcggcggcgtccgcgaggggggtgacgacggtcgcgctccccgacctctcctacgacttcggcgcgctggagccggccatctcgggggagatcatgcgcctgcaccaccagaagcaccacgccacctacgtcgccaactacaacaaggcgctggagcagctcgacgctgccgtcgccaagggcgacgcctccgctgtcgtccagctccagggcgccatcaagttcaacggcggcggtcatgtgaaccattcaatcttttggaagaacctcaagcctattagcgaaggtggtggggagccgccacatgggaaacttggctgggccatcgatgaggattttggttcatttgaggcacttgtaaagaggatgaatgcagaaggcgctgctttacaaggatctggatgggtgtggttagctttggataaagaggcaaaaaagctttcagttgaaactacagctaatcaggatcctctggtgactaaaggtgcaagcttggttccgctgttggggattgatgtctgggagcatgcgtactacctgcagtacaagaatgttaggccggattacctgaacaacatctggaaggtgatgaactggaaatatgctggagaggtgtacgaaaatgttcttgcttgaattgtcttaatggacaatactcatctgcgcgggtttgttttcggctgtttgaccatgtgaaataaagatggacttgtgt

SEQ ID NO: 37270 - protein, 233 aa, Zea mays subsp. mays
  peptide (1)..(233): Ceres Seq. ID no. 14302669
  misc_feature (1)..(233): NCBI GI NO: 1174391 NR Description: Superoxide dismutase
  misc_feature (1)..(233): NCBI GI NO: 1174389 NR Description: Superoxide dismutase
  misc_feature (1)..(233): NCBI GI NO: 1174390 NR Description: Superoxide dismutase
  misc_feature (1)..(233): NCBI GI NO: 134668 NR Description: Superoxide dismutase
  misc_feature (1)..(233): NCBI GI NO: 82728 NR Description: superoxide dismutase (EC 1
  misc_feature (1)..(233): NCBI GI NO: 7433345 NR Description: probable superoxide dismutase (EC 1
  misc_feature (1)..(233): NCBI GI NO: 7433348 NR Description: probable superoxide dismutase (EC 1
  misc_feature (1)..(233): NCBI GI NO: 7433347 NR Description: probable superoxide dismutase (EC 1
  misc_feature (1)..(233): NCBI GI NO: 17433511 NR Description: Superoxide dismutase [Mn], mitochondrial precursor
  misc_feature (1)..(233): NCBI GI NO: 7433342 NR Description: superoxide dismutase (EC 1
MALRTLASKNALSFALGGAARPSAASARGVTTVALPDLSYDFGALEPAISGEIMRLHHQKHHATYVANYNKALEQLDAAVAKGDASAVVQLQGAIKFNGGGHVNHSIFWKNLKPISEGGGEPPHGKLGWAIDEDFGSFEALVKRMNAEGAALQGSGWVWLALDKEAKKLSVETTANQDPLVTKGASLVPLLGIDVWEHAYYLQYKNVRPDYLNNIWKVMNWKYAGEVYENVLA

SEQ ID NO: 37271 - protein, 180 aa, Zea mays subsp. mays
  peptide (1)..(180): Ceres Seq. ID no. 14302670
  misc_feature (1)..(180): NCBI GI NO: 1174391 NR Description: Superoxide dismutase
  misc_feature (1)..(180): NCBI GI NO: 1174389 NR Description: Superoxide dismutase
  misc_feature (1)..(180): NCBI GI NO: 1174390 NR Description: Superoxide dismutase
  misc_feature (1)..(180): NCBI GI NO: 134668 NR Description: Superoxide dismutase
  misc_feature (1)..(180): NCBI GI NO: 82728 NR Description: superoxide dismutase (EC 1
  misc_feature (1)..(180): NCBI GI NO: 7433345 NR Description: probable superoxide dismutase (EC 1
  misc_feature (1)..(180): NCBI GI NO: 7433348 NR Description: probable superoxide dismutase (EC 1
  misc_feature (1)..(180): NCBI GI NO: 7433347 NR Description: probable superoxide dismutase (EC 1
  misc_feature (1)..(180): NCBI GI NO: 17433511 NR Description: Superoxide dismutase [Mn], mitochondrial precursor
  misc_feature (1)..(180): NCBI GI NO: 7433342 NR Description: superoxide dismutase (EC 1
MRLHHQKHHATYVANYNKALEQLDAAVAKGDASAVVQLQGAIKFNGGGHVNHSIFWKNLKPISEGGGEPPHGKLGWAIDEDFGSFEALVKRMNAEGAALQGSGWVWLALDKEAKKLSVETTANQDPLVTKGASLVPLLGIDVWEHAYYLQYKNVRPDYLNNIWKVMNWKYAGEVYENVLA

SEQ ID NO: 37272 - DNA, 1015 bp, Zea mays subsp. mays; identical to SEQ ID NO: 25467
  misc_feature (1)..(1015): Ceres Seq. ID no. 12595679

SEQ ID NO: 37273 - protein, 143 aa, Zea mays subsp. mays; identical to SEQ ID NO: 25468
  peptide (1)..(143): Ceres Seq. ID no. 12595680
  misc_feature (76)..(100): Pfam Name: Pfam Description:  A20-like zinc finger
  misc_feature (63)..(143): NCBI GI NO: 35187687 NR Description: zinc-finger protein
  misc_feature (63)..(143): NCBI GI NO: 11361253 NR Description: hypothetical protein p85RF
  misc_feature (63)..(143): NCBI GI NO: 18403408 NR Description: expressed protein; protein id: At1g51200
  misc_feature (63)..(143): NCBI GI NO: 25082726 NR Description: expressed protein [Arabidopsis thaliana]
  misc_feature (62)..(143): NCBI GI NO: 15231686 NR Description: zinc finger - like protein; protein id:At3g52800
  misc_feature (62)..(143): NCBI GI NO: 14596167 NR Description: zinc finger-like protein [Arabidopsis thaliana]
  misc_feature (64)..(136): NCBI GI NO: 28269431 NR Description: putative zinc finger protein
  misc_feature (67)..(103): NCBI GI NO: 30908921 NR Description: putative zinc finger transcription factor ZFP33
  misc_feature (62)..(143): NCBI GI NO: 18404102 NR Description: expressed protein; protein id: At2g36320
  misc_feature (71)..(143): NCBI GI NO: 29791559 NR Description: Unknown (protein for MGC:56057) [Danio rerio]

SEQ ID NO: 37274 - protein, 91 aa, Zea mays subsp. mays; identical to SEQ ID NO: 25469
  peptide (1)..(91): Ceres Seq. ID no. 12595681

SEQ ID NO: 37275 - protein, 82 aa, Zea mays subsp. mays; identical to SEQ ID NO: 25470
  peptide (1)..(82): Ceres Seq. ID no. 12595682
  misc_feature (23)..(63): Pfam Name: Pfam Description:  AN1-like Zinc finger
  misc_feature (1)..(82): NCBI GI NO: 35187687 NR Description: zinc-finger protein
  misc_feature (1)..(82): NCBI GI NO: 11361253 NR Description: hypothetical protein p85RF
  misc_feature (1)..(82): NCBI GI NO: 18403408 NR Description: expressed protein; protein id: At1g51200
  misc_feature (1)..(82): NCBI GI NO: 25082726 NR Description: expressed protein [Arabidopsis thaliana]
  misc_feature (1)..(82): NCBI GI NO: 15231686 NR Description: zinc finger - like protein; protein id:At3g52800
  misc_feature (1)..(82): NCBI GI NO: 14596167 NR Description: zinc finger-like protein [Arabidopsis thaliana]
  misc_feature (6)..(82): NCBI GI NO: 28269431 NR Description: putative zinc finger protein
  misc_feature (3)..(82): NCBI GI NO: 30908921 NR Description: putative zinc finger transcription factor ZFP33
  misc_feature (1)..(82): NCBI GI NO: 18404102 NR Description: expressed protein; protein id: At2g36320
  misc_feature (3)..(82): NCBI GI NO: 29791559 NR Description: Unknown (protein for MGC:56057) [Danio rerio]

SEQ ID NO: 37276 - protein, 81 aa, Zea mays subsp. mays; identical to SEQ ID NO: 25471
  peptide (1)..(81): Ceres Seq. ID no. 12595683
  misc_feature (14)..(38): Pfam Name: Pfam Description:  A20-like zinc finger
  misc_feature (1)..(81): NCBI GI NO: 35187687 NR Description: zinc-finger protein
  misc_feature (1)..(81): NCBI GI NO: 11361253 NR Description: hypothetical protein p85RF
  misc_feature (1)..(81): NCBI GI NO: 18403408 NR Description: expressed protein; protein id: At1g51200
  misc_feature (1)..(81): NCBI GI NO: 25082726 NR Description: expressed protein [Arabidopsis thaliana]
  misc_feature (1)..(81): NCBI GI NO: 15231686 NR Description: zinc finger - like protein; protein id:At3g52800
  misc_feature (1)..(81): NCBI GI NO: 14596167 NR Description: zinc finger-like protein [Arabidopsis thaliana]
  misc_feature (2)..(74): NCBI GI NO: 28269431 NR Description: putative zinc finger protein
  misc_feature (5)..(41): NCBI GI NO: 30908921 NR Description: putative zinc finger transcription factor ZFP33
  misc_feature (1)..(81): NCBI GI NO: 18404102 NR Description: expressed protein; protein id: At2g36320
  misc_feature (9)..(81): NCBI GI NO: 29791559 NR Description: Unknown (protein for MGC:56057) [Danio rerio]

SEQ ID NO: 37277 - DNA, 453 bp, Zea mays subsp. mays
  misc_feature (1)..(453): Ceres Seq. ID no. 7115007
  misc_feature (418)..(418): n is a, c, t, g, unknown, or other
aacaacgagttaacgaaagccttttatccaagctcaggaaagctcacagtttcgttggatccaatcttagttttatccaagctcagcaatggcttctcgtcagcagcatcctactagctaccacgccggcgagacaaaggcccgtgccgaggagaagacgggtcaagtgatgggggcggcgcaggagaaagggagggaggccaagcacaaggcgtccgacgccgccgaccgcgccatggggatgggccacgacgccagggaggcgaccagggagaaggcgcgcgccgccgcggaccgaaccatggggatgggccacgacgccggggagacggccaaggacagggcgtaccgcgcccacgacggcgcgcagcagaccgggagctacgtcgcgcagacggccgaggccgccaggcagaangcggccggcgccgcgctgtacgccaaggacacccg

SEQ ID NO: 37278 - protein, 121 aa, Zea mays subsp. mays
  peptide (1)..(121): Ceres Seq. ID no. 7115008
  misc_feature (29)..(98): Pfam Name: Pfam Description:  Late embryogenesis abundant protein
  misc_feature (1)..(120): NCBI GI NO: 1076757 NR Description: WSI18 protein - rice
  misc_feature (1)..(120): NCBI GI NO: 34910364 NR Description: WSI18 protein
  misc_feature (1)..(119): NCBI GI NO: 4105441 NR Description: group 3 LEA protein [Oryza sativa]
  misc_feature (1)..(119): NCBI GI NO: 7489493 NR Description: LEA protein - rice
  misc_feature (1)..(119): NCBI GI NO: 7489569 NR Description: protein LEA type 1 - rice
  misc_feature (17)..(120): NCBI GI NO: 34910364 NR Description: WSI18 protein
  misc_feature (17)..(120): NCBI GI NO: 1076757 NR Description: WSI18 protein - rice
  misc_feature (1)..(111): NCBI GI NO: 7387829 NR Description: Late embryogenesis abundant protein, group 3 (LEA)
  misc_feature (1)..(119): NCBI GI NO: 126081 NR Description: ABA-inducible protein PHV A1
  misc_feature (1)..(120): NCBI GI NO: 20126724 NR Description: late embryogenesis-abundant protein
  misc_feature (110)..(110): Xaa is any aa, unknown or other
MASRQQHPTSYHAGETKARAEEKTGQVMGAAQEKGREAKHKASDAADRAMGMGHDAREATREKARAAADRTMGMGHDAGETAKDRAYRAHDGAQQTGSYVAQTAEAARQXAAGAALYAKDT

SEQ ID NO: 37279 - protein, 94 aa, Zea mays subsp. mays
  peptide (1)..(94): Ceres Seq. ID no. 7115009
  misc_feature (2)..(71): Pfam Name: Pfam Description:  Late embryogenesis abundant protein
  misc_feature (1)..(93): NCBI GI NO: 1076757 NR Description: WSI18 protein - rice
  misc_feature (1)..(93): NCBI GI NO: 34910364 NR Description: WSI18 protein
  misc_feature (1)..(92): NCBI GI NO: 4105441 NR Description: group 3 LEA protein [Oryza sativa]
  misc_feature (1)..(92): NCBI GI NO: 7489493 NR Description: LEA protein - rice
  misc_feature (1)..(92): NCBI GI NO: 7489569 NR Description: protein LEA type 1 - rice
  misc_feature (1)..(93): NCBI GI NO: 34910364 NR Description: WSI18 protein
  misc_feature (1)..(93): NCBI GI NO: 1076757 NR Description: WSI18 protein - rice
  misc_feature (1)..(84): NCBI GI NO: 7387829 NR Description: Late embryogenesis abundant protein, group 3 (LEA)
  misc_feature (1)..(92): NCBI GI NO: 126081 NR Description: ABA-inducible protein PHV A1
  misc_feature (1)..(93): NCBI GI NO: 20126724 NR Description: late embryogenesis-abundant protein
  misc_feature (83)..(83): Xaa is any aa, unknown or other
MGAAQEKGREAKHKASDAADRAMGMGHDAREATREKARAAADRTMGMGHDAGETAKDRAYRAHDGAQQTGSYVAQTAEAARQXAAGAALYAKDT

SEQ ID NO: 37280 - protein, 72 aa, Zea mays subsp. mays
  peptide (1)..(72): Ceres Seq. ID no. 7115010
  misc_feature (1)..(71): NCBI GI NO: 1076757 NR Description: WSI18 protein - rice
  misc_feature (1)..(71): NCBI GI NO: 34910364 NR Description: WSI18 protein
  misc_feature (1)..(70): NCBI GI NO: 4105441 NR Description: group 3 LEA protein [Oryza sativa]
  misc_feature (1)..(70): NCBI GI NO: 7489493 NR Description: LEA protein - rice
  misc_feature (1)..(70): NCBI GI NO: 7489569 NR Description: protein LEA type 1 - rice
  misc_feature (1)..(71): NCBI GI NO: 34910364 NR Description: WSI18 protein
  misc_feature (1)..(71): NCBI GI NO: 1076757 NR Description: WSI18 protein - rice
  misc_feature (1)..(62): NCBI GI NO: 7387829 NR Description: Late embryogenesis abundant protein, group 3 (LEA)
  misc_feature (1)..(70): NCBI GI NO: 126081 NR Description: ABA-inducible protein PHV A1
  misc_feature (1)..(71): NCBI GI NO: 20126724 NR Description: late embryogenesis-abundant protein
  misc_feature (61)..(61): Xaa is any aa, unknown or other
MGMGHDAREATREKARAAADRTMGMGHDAGETAKDRAYRAHDGAQQTGSYVAQTAEAARQXAAGAALYAKDT

SEQ ID NO: 37281 - DNA, 1834 bp, Zea mays subsp. mays
  misc_feature (1)..(1834): Ceres Seq. ID no. 13580193
gcgcctcccaaagctctcttgttcgttgctcatccccccccccccccccccgtgctggttaatcatccgttcgatttcgatcacatacatataatctccctcagctatcgcggccgcgcgcctgatcgacgtacgaccggtctggtacgtacgtgtgctcgcccgccatggctcgcggcgacggcgagctggagctgtccgtgggggtccgcggcaccggcggcgcggcggcggcggcggcggcggaccacgtggcgccgatcagcctcggcaggctcatcctcgccggcatggtcgccggcggcgtgcagtacggctgggcgctgcagctctccctcctcacgccctacgtgcagactctggggctctcacatgccctcacttcattcatgtggctatgcggtcctattgctggcttagtggtccaaccgctggttggcttgtacagtgataggtgcacagcaagatggggaagacgcaggccatttatcctgataggatgcatgctcatctgccttgccgtcattgttgttggcttctcgtccgacatcggagctgctctaggggacacgaaggaacactgcagcctctaccacggccctcgttggcatgctgcgatcgtctacgttctggggttttggctccttgacttctccaacaatactgtgcaaggtccagcgcgtgctatgatggctgatctgtgcggtcatcatgggcctagtgcagccaactcaatcttctgttcttggatggcgctgggaaacatcctaggctattcctctggttccacaaacaactggcacaagtggtttccgttccttttaacaaacgcgtgctgtgaagcctgcgcaaacctgaaaggcgcgtttctggtggctgtggtgttcctagtcatgtgcttgactgtaaccctgttcttcgccaacgaagtgccctacagaggaaaccagaacctccccacaaaggcaaacggcgaggtcgagactgaaccttccggcccactcgctgtgctcaagggcttcaagaacttgcccacggggatgccgtccgtgctcctcgtaactggactcacctggctctcttggttcccgttcatcctctacgacaccgactggatgggccgtgagatctaccacggcgaccccaagggtagcaacgctcagatctcggcgttcgacgaaggcgtcagagttggctcgttcgggctgctgctcaactcgatcgttctaggattcagctcgttcctgatcgagcccatgtgccggaaggtcgggccgagggtggtgtgggtgacgagcaacttcatggtctgcgtcgccatggcggccaccgcgctgatcagcttctggtcgctcaaggactaccacggatacgtgcaggacgccatcaccgccagcacgagcatcaaggccgtctgcctcgtcctcttcgcgttcctgggtgtccctctcgccatcctgtacagcgtcccgttcgcggtgacggcgcagctggcggccacgaaaggcggcgggcaggggctgtgcaccggcgtgctcaacatctccatcgtcatccctcaggtgatcatcgcgctgggcgcgggcccgtgggacgcgctgttcggcaagggcaacatcccggcgttcggcgtggcgtcggggttcgccctcatcggcggcgtcgtgggcgtgttcctgctgcccaagatctccaagcgccagttccgcgccgtcagcgcgggcggccactgatcgcggccgccgcgccggagcacggcacggcggcacagcccagccgtgctagagctgtatgttttgaaagttgaaacagaataagaagcgggcgaaacgag

SEQ ID NO: 37282 - protein, 521 aa, Zea mays subsp. mays
  peptide (1)..(521): Ceres Seq. ID no. 13580194
  misc_feature (37)..(520): Pfam Name: and other Pfam Description: Sugar
  misc_feature (1)..(521): NCBI GI NO: 5771354 NR Description: Sucrose Transporter [Zea mays]
  misc_feature (4)..(520): NCBI GI NO: 9624451 NR Description: sucrose transporter
  misc_feature (4)..(520): NCBI GI NO: 7489560 NR Description: probable sucrose transport protein - rice
  misc_feature (1)..(521): NCBI GI NO: 7024415 NR Description: sucrose transporter 1
  misc_feature (1)..(521): NCBI GI NO: 19548165 NR Description: sucrose transporter SUT1D [Triticum aestivum]
  misc_feature (1)..(521): NCBI GI NO: 20152871 NR Description: sucrose transporter SUT1A [Triticum aestivum]
  misc_feature (1)..(521): NCBI GI NO: 20152873 NR Description: sucrose transporter SUT1B [Triticum aestivum]
  misc_feature (32)..(521): NCBI GI NO: 15718401 NR Description: sucrose transporter
  misc_feature (32)..(521): NCBI GI NO: 16152148 NR Description: sucrose transporter
  misc_feature (253)..(521): NCBI GI NO: 29467454 NR Description: sucrose transporter
MARGDGELELSVGVRGTGGAAAAAAADHVAPISLGRLILAGMVAGGVQYGWALQLSLLTPYVQTLGLSHALTSFMWLCGPIAGLVVQPLVGLYSDRCTARWGRRRPFILIGCMLICLAVIVVGFSSDIGAALGDTKEHCSLYHGPRWHAAIVYVLGFWLLDFSNNTVQGPARAMMADLCGHHGPSAANSIFCSWMALGNILGYSSGSTNNWHKWFPFLLTNACCEACANLKGAFLVAVVFLVMCLTVTLFFANEVPYRGNQNLPTKANGEVETEPSGPLAVLKGFKNLPTGMPSVLLVTGLTWLSWFPFILYDTDWMGREIYHGDPKGSNAQISAFDEGVRVGSFGLLLNSIVLGFSSFLIEPMCRKVGPRVVWVTSNFMVCVAMAATALISFWSLKDYHGYVQDAITASTSIKAVCLVLFAFLGVPLAILYSVPFAVTAQLAATKGGGQGLCTGVLNISIVIPQVIIALGAGPWDALFGKGNIPAFGVASGFALIGGVVGVFLLPKISKRQFRAVSAGGH

SEQ ID NO: 37283 - protein, 480 aa, Zea mays subsp. mays
  peptide (1)..(480): Ceres Seq. ID no. 13580195
  misc_feature (1)..(479): Pfam Name: and other Pfam Description: Sugar
  misc_feature (1)..(480): NCBI GI NO: 5771354 NR Description: Sucrose Transporter [Zea mays]
  misc_feature (1)..(479): NCBI GI NO: 9624451 NR Description: sucrose transporter
  misc_feature (1)..(479): NCBI GI NO: 7489560 NR Description: probable sucrose transport protein - rice
  misc_feature (1)..(480): NCBI GI NO: 7024415 NR Description: sucrose transporter 1
  misc_feature (1)..(480): NCBI GI NO: 19548165 NR Description: sucrose transporter SUT1D [Triticum aestivum]
  misc_feature (1)..(480): NCBI GI NO: 20152871 NR Description: sucrose transporter SUT1A [Triticum aestivum]
  misc_feature (1)..(480): NCBI GI NO: 20152873 NR Description: sucrose transporter SUT1B [Triticum aestivum]
  misc_feature (1)..(480): NCBI GI NO: 15718401 NR Description: sucrose transporter
  misc_feature (1)..(480): NCBI GI NO: 16152148 NR Description: sucrose transporter
  misc_feature (212)..(480): NCBI GI NO: 29467454 NR Description: sucrose transporter
MVAGGVQYGWALQLSLLTPYVQTLGLSHALTSFMWLCGPIAGLVVQPLVGLYSDRCTARWGRRRPFILIGCMLICLAVIVVGFSSDIGAALGDTKEHCSLYHGPRWHAAIVYVLGFWLLDFSNNTVQGPARAMMADLCGHHGPSAANSIFCSWMALGNILGYSSGSTNNWHKWFPFLLTNACCEACANLKGAFLVAVVFLVMCLTVTLFFANEVPYRGNQNLPTKANGEVETEPSGPLAVLKGFKNLPTGMPSVLLVTGLTWLSWFPFILYDTDWMGREIYHGDPKGSNAQISAFDEGVRVGSFGLLLNSIVLGFSSFLIEPMCRKVGPRVVWVTSNFMVCVAMAATALISFWSLKDYHGYVQDAITASTSIKAVCLVLFAFLGVPLAILYSVPFAVTAQLAATKGGGQGLCTGVLNISIVIPQVIIALGAGPWDALFGKGNIPAFGVASGFALIGGVVGVFLLPKISKRQFRAVSAGGH

SEQ ID NO: 37284 - protein, 447 aa, Zea mays subsp. mays
  peptide (1)..(447): Ceres Seq. ID no. 13580196
  misc_feature (1)..(446): Pfam Name: and other Pfam Description: Sugar
  misc_feature (1)..(447): NCBI GI NO: 5771354 NR Description: Sucrose Transporter [Zea mays]
  misc_feature (1)..(446): NCBI GI NO: 9624451 NR Description: sucrose transporter
  misc_feature (1)..(446): NCBI GI NO: 7489560 NR Description: probable sucrose transport protein - rice
  misc_feature (1)..(447): NCBI GI NO: 7024415 NR Description: sucrose transporter 1
  misc_feature (1)..(447): NCBI GI NO: 19548165 NR Description: sucrose transporter SUT1D [Triticum aestivum]
  misc_feature (1)..(447): NCBI GI NO: 20152871 NR Description: sucrose transporter SUT1A [Triticum aestivum]
  misc_feature (1)..(447): NCBI GI NO: 20152873 NR Description: sucrose transporter SUT1B [Triticum aestivum]
  misc_feature (1)..(447): NCBI GI NO: 15718401 NR Description: sucrose transporter
  misc_feature (1)..(447): NCBI GI NO: 16152148 NR Description: sucrose transporter
  misc_feature (179)..(447): NCBI GI NO: 29467454 NR Description: sucrose transporter
MWLCGPIAGLVVQPLVGLYSDRCTARWGRRRPFILIGCMLICLAVIVVGFSSDIGAALGDTKEHCSLYHGPRWHAAIVYVLGFWLLDFSNNTVQGPARAMMADLCGHHGPSAANSIFCSWMALGNILGYSSGSTNNWHKWFPFLLTNACCEACANLKGAFLVAVVFLVMCLTVTLFFANEVPYRGNQNLPTKANGEVETEPSGPLAVLKGFKNLPTGMPSVLLVTGLTWLSWFPFILYDTDWMGREIYHGDPKGSNAQISAFDEGVRVGSFGLLLNSIVLGFSSFLIEPMCRKVGPRVVWVTSNFMVCVAMAATALISFWSLKDYHGYVQDAITASTSIKAVCLVLFAFLGVPLAILYSVPFAVTAQLAATKGGGQGLCTGVLNISIVIPQVIIALGAGPWDALFGKGNIPAFGVASGFALIGGVVGVFLLPKISKRQFRAVSAGGH

SEQ ID NO: 37285 - DNA, 828 bp, Zea mays subsp. mays; identical to SEQ ID NO: 36570
  misc_feature (1)..(828): Ceres Seq. ID no. 12595473

SEQ ID NO: 37286 - protein, 230 aa, Zea mays subsp. mays; identical to SEQ ID NO: 36571
  peptide (1)..(230): Ceres Seq. ID no. 12595474
  misc_feature (106)..(208): Pfam Name: Pfam Description:  Protease inhibitor/seed storage/LTP family
  misc_feature (53)..(230): NCBI GI NO: 16305115 NR Description: 15kD beta zein [Zea mays]
  misc_feature (53)..(230): NCBI GI NO: 419803 NR Description: zein protein - maize
  misc_feature (53)..(230): NCBI GI NO: 168664 NR Description: zein protein precursor
  misc_feature (53)..(230): NCBI GI NO: 141616 NR Description: ZEIN-BETA PRECURSOR (16 KD) (ZEIN 2) (CLONE 15A3)
  misc_feature (53)..(230): NCBI GI NO: 100552 NR Description: beta-coixin, 17K, precursor - Job's tears

SEQ ID NO: 37287 - protein, 222 aa, Zea mays subsp. mays; identical to SEQ ID NO: 36572
  peptide (1)..(222): Ceres Seq. ID no. 12595475
  misc_feature (98)..(200): Pfam Name: Pfam Description:  Protease inhibitor/seed storage/LTP family
  misc_feature (45)..(222): NCBI GI NO: 16305115 NR Description: 15kD beta zein [Zea mays]
  misc_feature (45)..(222): NCBI GI NO: 419803 NR Description: zein protein - maize
  misc_feature (45)..(222): NCBI GI NO: 168664 NR Description: zein protein precursor
  misc_feature (45)..(222): NCBI GI NO: 141616 NR Description: ZEIN-BETA PRECURSOR (16 KD) (ZEIN 2) (CLONE 15A3)
  misc_feature (45)..(222): NCBI GI NO: 100552 NR Description: beta-coixin, 17K, precursor - Job's tears

SEQ ID NO: 37288 - protein, 178 aa, Zea mays subsp. mays; identical to SEQ ID NO: 36573
  peptide (1)..(178): Ceres Seq. ID no. 12595476
  misc_feature (54)..(156): Pfam Name: Pfam Description:  Protease inhibitor/seed storage/LTP family
  misc_feature (1)..(178): NCBI GI NO: 16305115 NR Description: 15kD beta zein [Zea mays]
  misc_feature (1)..(178): NCBI GI NO: 419803 NR Description: zein protein - maize
  misc_feature (1)..(178): NCBI GI NO: 168664 NR Description: zein protein precursor
  misc_feature (1)..(178): NCBI GI NO: 141616 NR Description: ZEIN-BETA PRECURSOR (16 KD) (ZEIN 2) (CLONE 15A3)
  misc_feature (1)..(178): NCBI GI NO: 100552 NR Description: beta-coixin, 17K, precursor - Job's tears

SEQ ID NO: 37289 - DNA, 610 bp, Zea mays subsp. mays; identical to SEQ ID NO: 27938
  misc_feature (1)..(610): Ceres Seq. ID no. 12594280

SEQ ID NO: 37290 - protein, 115 aa, Zea mays subsp. mays; identical to SEQ ID NO: 27939
  peptide (1)..(115): Ceres Seq. ID no. 12594281
  misc_feature (10)..(106): Pfam Name: DUF423 Pfam Description: Protein of unknown function
  misc_feature (2)..(115): NCBI GI NO: 40538985 NR Description: expressed protein
  misc_feature (1)..(106): NCBI GI NO: 7963702 NR Description: unknown [Agropyron cristatum]
  misc_feature (1)..(106): NCBI GI NO: 7963659 NR Description: unknown [Leymus cinereus]
  misc_feature (1)..(115): NCBI GI NO: 18395895 NR Description: expressed protein; protein id: At2g04900
  misc_feature (6)..(115): NCBI GI NO: 17065460 NR Description: Unknown protein [Arabidopsis thaliana]
  misc_feature (8)..(100): NCBI GI NO: 7963699 NR Description: unknown [Leymus triticoides]
  misc_feature (8)..(100): NCBI GI NO: 7963694 NR Description: unknown [Psathyrostachys juncea]
  misc_feature (8)..(96): NCBI GI NO: 7963697 NR Description: unknown [Haynaldia villosa]
  misc_feature (19)..(115): NCBI GI NO: 25411133 NR Description: hypothetical protein At2g04900
  misc_feature (14)..(93): NCBI GI NO: 7963689 NR Description: unknown [Hordeum vulgare]

SEQ ID NO: 37291 - protein, 108 aa, Zea mays subsp. mays; identical to SEQ ID NO: 27940
  peptide (1)..(108): Ceres Seq. ID no. 12594282
  misc_feature (3)..(99): Pfam Name: DUF423 Pfam Description: Protein of unknown function
  misc_feature (1)..(108): NCBI GI NO: 40538985 NR Description: expressed protein
  misc_feature (1)..(99): NCBI GI NO: 7963702 NR Description: unknown [Agropyron cristatum]
  misc_feature (1)..(99): NCBI GI NO: 7963659 NR Description: unknown [Leymus cinereus]
  misc_feature (1)..(108): NCBI GI NO: 18395895 NR Description: expressed protein; protein id: At2g04900
  misc_feature (1)..(108): NCBI GI NO: 17065460 NR Description: Unknown protein [Arabidopsis thaliana]
  misc_feature (1)..(93): NCBI GI NO: 7963699 NR Description: unknown [Leymus triticoides]
  misc_feature (1)..(93): NCBI GI NO: 7963694 NR Description: unknown [Psathyrostachys juncea]
  misc_feature (1)..(89): NCBI GI NO: 7963697 NR Description: unknown [Haynaldia villosa]
  misc_feature (12)..(108): NCBI GI NO: 25411133 NR Description: hypothetical protein At2g04900
  misc_feature (7)..(86): NCBI GI NO: 7963689 NR Description: unknown [Hordeum vulgare]

SEQ ID NO: 37292 - protein, 85 aa, Zea mays subsp. mays; identical to SEQ ID NO: 27941
  peptide (1)..(85): Ceres Seq. ID no. 12594283
  misc_feature (1)..(76): Pfam Name: DUF423 Pfam Description: Protein of unknown function
  misc_feature (1)..(85): NCBI GI NO: 40538985 NR Description: expressed protein
  misc_feature (1)..(76): NCBI GI NO: 7963702 NR Description: unknown [Agropyron cristatum]
  misc_feature (1)..(76): NCBI GI NO: 7963659 NR Description: unknown [Leymus cinereus]
  misc_feature (1)..(85): NCBI GI NO: 18395895 NR Description: expressed protein; protein id: At2g04900
  misc_feature (1)..(85): NCBI GI NO: 17065460 NR Description: Unknown protein [Arabidopsis thaliana]
  misc_feature (1)..(70): NCBI GI NO: 7963699 NR Description: unknown [Leymus triticoides]
  misc_feature (1)..(70): NCBI GI NO: 7963694 NR Description: unknown [Psathyrostachys juncea]
  misc_feature (1)..(66): NCBI GI NO: 7963697 NR Description: unknown [Haynaldia villosa]
  misc_feature (1)..(85): NCBI GI NO: 25411133 NR Description: hypothetical protein At2g04900
  misc_feature (1)..(63): NCBI GI NO: 7963689 NR Description: unknown [Hordeum vulgare]

SEQ ID NO: 37293 - DNA, 1232 bp, Zea mays subsp. mays; identical to SEQ ID NO: 23885
  misc_feature (1)..(1232): Ceres Seq. ID no. 13635672
  misc_feature (258)..(258): n is a, c, t, g, unknown, or other

SEQ ID NO: 37294 - protein, 247 aa, Zea mays subsp. mays; identical to SEQ ID NO: 23886
  peptide (1)..(247): Ceres Seq. ID no. 15220349
  misc_feature (55)..(86): NCBI GI NO: 34898416 NR Description: ESTs AU058081
  misc_feature (55)..(86): NCBI GI NO: 34898458 NR Description: ESTs AU058081
  misc_feature (55)..(86): NCBI GI NO: 1709761 NR Description: Proteasome subunit alpha type 4
  misc_feature (55)..(86): NCBI GI NO: 15233268 NR Description: 20S proteasome alpha subunit C (PAC1)
  misc_feature (55)..(86): NCBI GI NO: 2511584 NR Description: multicatalytic endopeptidase
  misc_feature (55)..(86): NCBI GI NO: 12229904 NR Description: Proteasome subunit alpha type 4
  misc_feature (63)..(88): NCBI GI NO: 6984140 NR Description: proteasome 27 kDa subunit [Euphorbia esula]
  misc_feature (55)..(86): NCBI GI NO: 23394356 NR Description: proteasome subunit [Phytophthora infestans]
  misc_feature (55)..(88): NCBI GI NO: 32410633 NR Description: hypothetical protein [Neurospora crassa]
  misc_feature (55)..(88): NCBI GI NO: 40744887 NR Description: conserved hypothetical protein
  misc_feature (86)..(86): Xaa is any aa, unknown or other

SEQ ID NO: 37295 - protein, 246 aa, Zea mays subsp. mays; identical to SEQ ID NO: 23887
  peptide (1)..(246): Ceres Seq. ID no. 15220350
  misc_feature (29)..(211): Pfam Name: Pfam Description:  Proteasome A-type and B-type
  misc_feature (29)..(246): NCBI GI NO: 34898416 NR Description: ESTs AU058081
  misc_feature (29)..(246): NCBI GI NO: 34898458 NR Description: ESTs AU058081
  misc_feature (29)..(245): NCBI GI NO: 1709761 NR Description: Proteasome subunit alpha type 4
  misc_feature (29)..(245): NCBI GI NO: 15233268 NR Description: 20S proteasome alpha subunit C (PAC1)
  misc_feature (29)..(245): NCBI GI NO: 2511584 NR Description: multicatalytic endopeptidase
  misc_feature (29)..(245): NCBI GI NO: 12229904 NR Description: Proteasome subunit alpha type 4
  misc_feature (29)..(246): NCBI GI NO: 6984140 NR Description: proteasome 27 kDa subunit [Euphorbia esula]
  misc_feature (55)..(246): NCBI GI NO: 14039743 NR Description: 20S proteasome subunit alpha 3 [Lolium perenne]
  misc_feature (29)..(237): NCBI GI NO: 23394356 NR Description: proteasome subunit [Phytophthora infestans]
  misc_feature (29)..(241): NCBI GI NO: 32410633 NR Description: hypothetical protein [Neurospora crassa]
  misc_feature (28)..(28): Xaa is any aa, unknown or other

SEQ ID NO: 37296 - protein, 193 aa, Zea mays subsp. mays; identical to SEQ ID NO: 23888
  peptide (1)..(193): Ceres Seq. ID no. 15220351
  misc_feature (1)..(32): NCBI GI NO: 34898416 NR Description: ESTs AU058081
  misc_feature (1)..(32): NCBI GI NO: 34898458 NR Description: ESTs AU058081
  misc_feature (1)..(32): NCBI GI NO: 1709761 NR Description: Proteasome subunit alpha type 4
  misc_feature (1)..(32): NCBI GI NO: 15233268 NR Description: 20S proteasome alpha subunit C (PAC1)
  misc_feature (1)..(32): NCBI GI NO: 2511584 NR Description: multicatalytic endopeptidase
  misc_feature (1)..(32): NCBI GI NO: 12229904 NR Description: Proteasome subunit alpha type 4
  misc_feature (9)..(34): NCBI GI NO: 6984140 NR Description: proteasome 27 kDa subunit [Euphorbia esula]
  misc_feature (1)..(32): NCBI GI NO: 23394356 NR Description: proteasome subunit [Phytophthora infestans]
  misc_feature (1)..(34): NCBI GI NO: 32410633 NR Description: hypothetical protein [Neurospora crassa]
  misc_feature (1)..(34): NCBI GI NO: 40744887 NR Description: conserved hypothetical protein
  misc_feature (32)..(32): Xaa is any aa, unknown or other

SEQ ID NO: 37297 - DNA, 882 bp, Zea mays subsp. mays; identical to SEQ ID NO: 32250
  misc_feature (1)..(882): Ceres Seq. ID no. 12595582

SEQ ID NO: 37298 - protein, 156 aa, Zea mays subsp. mays; identical to SEQ ID NO: 32251
  peptide (1)..(156): Ceres Seq. ID no. 12595583
  misc_feature (36)..(146): Pfam Name: Pfam Description:  Oleosin
  misc_feature (1)..(156): NCBI GI NO: 3334474 NR Description: OLEOSIN ZM-I
  misc_feature (11)..(156): NCBI GI NO: 82705 NR Description: lipid body-associated major protein L3 - maize
  misc_feature (1)..(156): NCBI GI NO: 3334280 NR Description: OLEOSIN 16 KD (OSE701)
  misc_feature (1)..(156): NCBI GI NO: 38346165 NR Description: OSJNBa0079A21.12
  misc_feature (2)..(156): NCBI GI NO: 1362168 NR Description: oleosin 2 - barley
  misc_feature (1)..(156): NCBI GI NO: 3334281 NR Description: Oleosin 16 kDa
  misc_feature (1)..(156): NCBI GI NO: 7442012 NR Description: oleosin isoform R16 - rice
  misc_feature (1)..(132): NCBI GI NO: 4096177 NR Description: early embryogenesis protein [Oryza sativa]
  misc_feature (26)..(156): NCBI GI NO: 8515912 NR Description: oleosin [Elaeis guineensis]
  misc_feature (24)..(147): NCBI GI NO: 2119749 NR Description: oleosin - almond

SEQ ID NO: 37299 - protein, 133 aa, Zea mays subsp. mays; identical to SEQ ID NO: 32252
  peptide (1)..(133): Ceres Seq. ID no. 12595584
  misc_feature (13)..(123): Pfam Name: Pfam Description:  Oleosin
  misc_feature (1)..(133): NCBI GI NO: 3334474 NR Description: OLEOSIN ZM-I
  misc_feature (1)..(133): NCBI GI NO: 82705 NR Description: lipid body-associated major protein L3 - maize
  misc_feature (1)..(133): NCBI GI NO: 3334280 NR Description: OLEOSIN 16 KD (OSE701)
  misc_feature (1)..(133): NCBI GI NO: 38346165 NR Description: OSJNBa0079A21.12
  misc_feature (1)..(133): NCBI GI NO: 1362168 NR Description: oleosin 2 - barley
  misc_feature (1)..(133): NCBI GI NO: 3334281 NR Description: Oleosin 16 kDa
  misc_feature (1)..(133): NCBI GI NO: 7442012 NR Description: oleosin isoform R16 - rice
  misc_feature (1)..(109): NCBI GI NO: 4096177 NR Description: early embryogenesis protein [Oryza sativa]
  misc_feature (3)..(133): NCBI GI NO: 8515912 NR Description: oleosin [Elaeis guineensis]
  misc_feature (1)..(124): NCBI GI NO: 2119749 NR Description: oleosin - almond

SEQ ID NO: 37300 - protein, 120 aa, Zea mays subsp. mays; identical to SEQ ID NO: 32253
  peptide (1)..(120): Ceres Seq. ID no. 12595585
  misc_feature (1)..(110): Pfam Name: Pfam Description:  Oleosin
  misc_feature (1)..(120): NCBI GI NO: 3334474 NR Description: OLEOSIN ZM-I
  misc_feature (1)..(120): NCBI GI NO: 82705 NR Description: lipid body-associated major protein L3 - maize
  misc_feature (1)..(120): NCBI GI NO: 3334280 NR Description: OLEOSIN 16 KD (OSE701)
  misc_feature (1)..(120): NCBI GI NO: 38346165 NR Description: OSJNBa0079A21.12
  misc_feature (1)..(120): NCBI GI NO: 1362168 NR Description: oleosin 2 - barley
  misc_feature (1)..(120): NCBI GI NO: 3334281 NR Description: Oleosin 16 kDa
  misc_feature (1)..(120): NCBI GI NO: 7442012 NR Description: oleosin isoform R16 - rice
  misc_feature (1)..(96): NCBI GI NO: 4096177 NR Description: early embryogenesis protein [Oryza sativa]
  misc_feature (1)..(120): NCBI GI NO: 8515912 NR Description: oleosin [Elaeis guineensis]
  misc_feature (1)..(111): NCBI GI NO: 2119749 NR Description: oleosin - almond

SEQ ID NO: 37301 - DNA, 785 bp, Zea mays subsp. mays
  misc_feature (1)..(785): Ceres Seq. ID no. 12577837
ataaggcgcccgcggtgcccatcaattcgtgtcaccgcgtcccgagagcgcaaatcattccgcgcgacgcaaaaaccctagcctagccaccgatccctctcatggcaaccaccaccacccaggcgagcctcctcctccagaagcagctaagagatctcgcgaagcaccccgtggatgggttctctgctgggctggtcgacgacagcaatgtcttcgagtggcaggtcaccatcatcggaccgcctgacaccctatatgatggagggtacttcaatgcaataatgagcttcccacaaaattacccaaacagcccgccatcagtcagatttacctctgaaatgtggcatccaaatgtctatcctgatgggcgggtttgtatctctattcttcatccacctggtgaagatccaaacggttatgagctcgcaagtgagcgatggacacctgtgcacacagtagaaagcatagttctgagcattatatcaatgctctctagtccaaatgatgagtctccagcaaacattgaggcagctaaggaatggagggaacagagggaggatttcaagaaaaaggttaggcgcatcgtgcggaaatcacaggaaatgttctgaaggaaatgggagtgctggtgaagttaaccatgccatgtcaggctgcaggattttgctgccaacctcaaaagtgctcatctgacaccagcgtcttgtgtattttccatttatcgtctgttcattggtgacaattgcctccagaaatgcattgggacgtggtcggcttgaaggttc

SEQ ID NO: 37302 - protein, 169 aa, Zea mays subsp. mays
  peptide (1)..(169): Ceres Seq. ID no. 12577838
  misc_feature (1)..(169): NCBI GI NO: 7437988 NR Description: ubiquitin-conjugating enzyme - maize
  misc_feature (1)..(168): NCBI GI NO: 34908132 NR Description: putative Ubiquitin carrier protein UBC7
  misc_feature (1)..(168): NCBI GI NO: 7437989 NR Description: ubiquitin-conjugating enzyme E2 - maize
  misc_feature (2)..(169): NCBI GI NO: 19347846 NR Description: putative E2, ubiquitin-conjugating enzyme UBC7
  misc_feature (2)..(169): NCBI GI NO: 28973769 NR Description: putative E2, ubiquitin-conjugating enzyme UBC7
  misc_feature (6)..(169): NCBI GI NO: 31088843 NR Description: Ubiquitin-conjugating enzyme E2 7
  misc_feature (23)..(168): NCBI GI NO: 136647 NR Description: Ubiquitin-conjugating enzyme E2-20 kDa
  misc_feature (6)..(169): NCBI GI NO: 18408206 NR Description: E2, ubiquitin-conjugating enzyme 13
  misc_feature (7)..(168): NCBI GI NO: 18410268 NR Description: E2, ubiquitin-conjugating enzyme 14
  misc_feature (33)..(169): NCBI GI NO: 18424219 NR Description: E2, ubiquitin-conjugating enzyme 7
MATTTTQASLLLQKQLRDLAKHPVDGFSAGLVDDSNVFEWQVTIIGPPDTLYDGGYFNAIMSFPQNYPNSPPSVRFTSEMWHPNVYPDGRVCISILHPPGEDPNGYELASERWTPVHTVESIVLSIISMLSSPNDESPANIEAAKEWREQREDFKKKVRRIVRKSQEMF

SEQ ID NO: 37303 - protein, 109 aa, Zea mays subsp. mays
  peptide (1)..(109): Ceres Seq. ID no. 12577839
  misc_feature (1)..(109): NCBI GI NO: 7437988 NR Description: ubiquitin-conjugating enzyme - maize
  misc_feature (1)..(108): NCBI GI NO: 34908132 NR Description: putative Ubiquitin carrier protein UBC7
  misc_feature (1)..(108): NCBI GI NO: 7437989 NR Description: ubiquitin-conjugating enzyme E2 - maize
  misc_feature (1)..(109): NCBI GI NO: 19347846 NR Description: putative E2, ubiquitin-conjugating enzyme UBC7
  misc_feature (1)..(109): NCBI GI NO: 28973769 NR Description: putative E2, ubiquitin-conjugating enzyme UBC7
  misc_feature (1)..(109): NCBI GI NO: 31088843 NR Description: Ubiquitin-conjugating enzyme E2 7
  misc_feature (1)..(108): NCBI GI NO: 136647 NR Description: Ubiquitin-conjugating enzyme E2-20 kDa
  misc_feature (1)..(109): NCBI GI NO: 18408206 NR Description: E2, ubiquitin-conjugating enzyme 13
  misc_feature (1)..(108): NCBI GI NO: 18410268 NR Description: E2, ubiquitin-conjugating enzyme 14
  misc_feature (1)..(109): NCBI GI NO: 18424219 NR Description: E2, ubiquitin-conjugating enzyme 7
MSFPQNYPNSPPSVRFTSEMWHPNVYPDGRVCISILHPPGEDPNGYELASERWTPVHTVESIVLSIISMLSSPNDESPANIEAAKEWREQREDFKKKVRRIVRKSQEMF

SEQ ID NO: 37304 - protein, 90 aa, Zea mays subsp. mays
  peptide (1)..(90): Ceres Seq. ID no. 12577840
  misc_feature (1)..(90): NCBI GI NO: 7437988 NR Description: ubiquitin-conjugating enzyme - maize
  misc_feature (1)..(89): NCBI GI NO: 34908132 NR Description: putative Ubiquitin carrier protein UBC7
  misc_feature (1)..(89): NCBI GI NO: 7437989 NR Description: ubiquitin-conjugating enzyme E2 - maize
  misc_feature (1)..(90): NCBI GI NO: 19347846 NR Description: putative E2, ubiquitin-conjugating enzyme UBC7
  misc_feature (1)..(90): NCBI GI NO: 28973769 NR Description: putative E2, ubiquitin-conjugating enzyme UBC7
  misc_feature (1)..(90): NCBI GI NO: 31088843 NR Description: Ubiquitin-conjugating enzyme E2 7
  misc_feature (1)..(89): NCBI GI NO: 136647 NR Description: Ubiquitin-conjugating enzyme E2-20 kDa
  misc_feature (1)..(90): NCBI GI NO: 18408206 NR Description: E2, ubiquitin-conjugating enzyme 13
  misc_feature (1)..(89): NCBI GI NO: 18410268 NR Description: E2, ubiquitin-conjugating enzyme 14
  misc_feature (1)..(90): NCBI GI NO: 18424219 NR Description: E2, ubiquitin-conjugating enzyme 7
MWHPNVYPDGRVCISILHPPGEDPNGYELASERWTPVHTVESIVLSIISMLSSPNDESPANIEAAKEWREQREDFKKKVRRIVRKSQEMF

SEQ ID NO: 37305 - DNA, 1041 bp, Zea mays subsp. mays
  misc_feature (1)..(1041): Ceres Seq. ID no. 13579624
ccgcaaggatccaccacaacagcgaaggagaaagcagaccaacctagccacccagggagaaagaggccaaaagggaggggagagtgtcgtcatggcttccattgtcgcttccaggagggccgttcctctagttcgcgctctggagaagctcatcgcagcgtcctccgctcccgggactggctccgccctcaggccggtggcagtcgccggcggcctccgcggctacaacaccggcgctccgctccgacgctacgagggggccgagtcggaagacgatagcgtccgcgagtacgatgggcggcacggcggccgggactacgctgtgcccagcctgttctcagatattttccgtgatccgcttagtgcgccgcacagcattggccgcctgctgaaccttgtggacgacttggcggtggcggcgccaggtcgtgcggtgcgccgtggctggaacgcgaaggaggacgaggaggcgctgcacctgagggtggacatgccaggcctggggaaggagcacgtcaaggtgtgggcggagcagaacagcctggtgatcaagggcgagggcgagaaggaggatagcgaggacgaggccgccccgcctccgagatacagcggtcgcatcgagctcgcgccagaggtttacaggatggacaagatcaaggcggagatgaagaacggcgtgctcaaggtggtcgtgccgaaggtgaaggagcagcagcgcaaggacgtgttccaagtcaacgtcgagtagatgtttccaaatagaagcaagtgccggtacgggatggaggattggaggggcactgccaaactaggattcctctctctcaatctgatctggattctggaatcagatttctcttctttcatttttctcgtctatcttctatcagtatgaaataagcaacgtcgcttcagttttcgtgtcaaggccggtggagtcgcctatgtttattttattttctttgtatttcctacctggacacacgttctctatgccgtgtttggtttccgcagatttttaaaatatgcatgttcaaaccc

SEQ ID NO: 37306 - protein, 248 aa, Zea mays subsp. mays
  peptide (1)..(248): Ceres Seq. ID no. 13579625
  misc_feature (31)..(248): NCBI GI NO: 7441311 NR Description: heat shock protein hsp22 precursor
  misc_feature (31)..(248): NCBI GI NO: 4138869 NR Description: small heat shock protein Hsp23.5
  misc_feature (46)..(248): NCBI GI NO: 123564 NR Description: Small heat shock protein, chloroplast precursor
  misc_feature (63)..(248): NCBI GI NO: 7441310 NR Description: heat shock protein MTSHP precursor
  misc_feature (46)..(248): NCBI GI NO: 21554988 NR Description: mitochondrial heat shock 22 kd protein-like
  misc_feature (46)..(248): NCBI GI NO: 15242086 NR Description: heat shock protein, putative
  misc_feature (54)..(248): NCBI GI NO: 4138871 NR Description: small heat shock protein Hsp23.6
  misc_feature (46)..(248): NCBI GI NO: 1170368 NR Description: Heat shock 22 kDa protein, mitochondrial precursor
  misc_feature (46)..(248): NCBI GI NO: 7159338 NR Description: LMW heat shock protein [Euphorbia esula]
  misc_feature (46)..(247): NCBI GI NO: 15234969 NR Description: mitochondrion-localized small heat shock protein
RKDPPQQRRRKQTNLATQGERGQKGGESVVMASIVASRRAVPLVRALEKLIAASSAPGTGSALRPVAVAGGLRGYNTGAPLRRYEGAESEDDSVREYDGRHGGRDYAVPSLFSDIFRDPLSAPHSIGRLLNLVDDLAVAAPGRAVRRGWNAKEDEEALHLRVDMPGLGKEHVKVWAEQNSLVIKGEGEKEDSEDEAAPPPRYSGRIELAPEVYRMDKIKAEMKNGVLKVVVPKVKEQQRKDVFQVNVE

SEQ ID NO: 37307 - protein, 218 aa, Zea mays subsp. mays
  peptide (1)..(218): Ceres Seq. ID no. 13579626
  misc_feature (1)..(218): NCBI GI NO: 7441311 NR Description: heat shock protein hsp22 precursor
  misc_feature (1)..(218): NCBI GI NO: 4138869 NR Description: small heat shock protein Hsp23.5
  misc_feature (16)..(218): NCBI GI NO: 123564 NR Description: Small heat shock protein, chloroplast precursor
  misc_feature (33)..(218): NCBI GI NO: 7441310 NR Description: heat shock protein MTSHP precursor
  misc_feature (16)..(218): NCBI GI NO: 21554988 NR Description: mitochondrial heat shock 22 kd protein-like
  misc_feature (16)..(218): NCBI GI NO: 15242086 NR Description: heat shock protein, putative
  misc_feature (24)..(218): NCBI GI NO: 4138871 NR Description: small heat shock protein Hsp23.6
  misc_feature (16)..(218): NCBI GI NO: 1170368 NR Description: Heat shock 22 kDa protein, mitochondrial precursor
  misc_feature (16)..(218): NCBI GI NO: 7159338 NR Description: LMW heat shock protein [Euphorbia esula]
  misc_feature (16)..(217): NCBI GI NO: 15234969 NR Description: mitochondrion-localized small heat shock protein
MASIVASRRAVPLVRALEKLIAASSAPGTGSALRPVAVAGGLRGYNTGAPLRRYEGAESEDDSVREYDGRHGGRDYAVPSLFSDIFRDPLSAPHSIGRLLNLVDDLAVAAPGRAVRRGWNAKEDEEALHLRVDMPGLGKEHVKVWAEQNSLVIKGEGEKEDSEDEAAPPPRYSGRIELAPEVYRMDKIKAEMKNGVLKVVVPKVKEQQRKDVFQVNVE

SEQ ID NO: 37308 - DNA, 453 bp, Zea mays subsp. mays
  misc_feature (1)..(453): Ceres Seq. ID no. 7117146
  misc_feature (267)..(267): n is a, c, t, g, unknown, or other
  misc_feature (264)..(264): n is a, c, t, g, unknown, or other
  misc_feature (16)..(16): n is a, c, t, g, unknown, or other
  misc_feature (25)..(25): n is a, c, t, g, unknown, or other
  misc_feature (278)..(278): n is a, c, t, g, unknown, or other
  misc_feature (284)..(284): n is a, c, t, g, unknown, or other
catagaaatctgccantttttgccncgggttggtggtgttgaattggaactgattgccattgctacaggagggcggattgttccgagattccaagagttgagtcctgaaaagcttggaaaggctggattagtcagagagaaatcattcggaacaacaaaggaccggatgctttacattgagaagtgtgccaattctagagctgtaaccattttcatccgtgggggaaacaaaatgatgattgaggagaccaagcgcagtcttcntgntgttctttgcncaccanggaatctgatccggaataactcgattgtgtacggtggcggctcagccgagatatcttgctcaattgctgttgaaactgctgcagatcggcacccgggagttgagcagtatgctatcaggtcattcgctgatgcattagatgctgttccactagcgttggccgaaaacag

SEQ ID NO: 37309 - protein, 150 aa, Zea mays subsp. mays
  peptide (1)..(150): Ceres Seq. ID no. 7117147
  misc_feature (10)..(149): Pfam Name: Pfam Description:  TCP-1/cpn60 chaperonin family
  misc_feature (10)..(149): NCBI GI NO: 730919 NR Description: T-COMPLEX PROTEIN 1, EPSILON SUBUNIT
  misc_feature (10)..(149): NCBI GI NO: 1729864 NR Description: T-COMPLEX PROTEIN 1, EPSILON SUBUNIT
  misc_feature (10)..(149): NCBI GI NO: 1587206 NR Description: T complex protein
  misc_feature (10)..(149): NCBI GI NO: 4206124 NR Description: T-complex protein 1 epsilon subunit
  misc_feature (10)..(149): NCBI GI NO: 15221770 NR Description: T-complex chaperonin protein , epsilon subunit
  misc_feature (10)..(149): NCBI GI NO: 27924333 NR Description: Similar to chaperonin containing TCP1, subunit 5
  misc_feature (10)..(149): NCBI GI NO: 39850245 NR Description: Unknown (protein for MGC:76252)
  misc_feature (10)..(149): NCBI GI NO: 32405372 NR Description: hypothetical protein [Neurospora crassa]
  misc_feature (10)..(149): NCBI GI NO: 40745913 NR Description: conserved hypothetical protein
  misc_feature (10)..(149): NCBI GI NO: 6683670 NR Description: CCT
  misc_feature (5)..(5): Xaa is any aa, unknown or other
  misc_feature (8)..(8): Xaa is any aa, unknown or other
  misc_feature (88)..(88): Xaa is any aa, unknown or other
  misc_feature (89)..(89): Xaa is any aa, unknown or other
  misc_feature (93)..(93): Xaa is any aa, unknown or other
  misc_feature (95)..(95): Xaa is any aa, unknown or other
IEICXFLXRVGGVELELIAIATGGRIVPRFQELSPEKLGKAGLVREKSFGTTKDRMLYIEKCANSRAVTIFIRGGNKMMIEETKRSLXXVLCXPXNLIRNNSIVYGGGSAEISCSIAVETAADRHPGVEQYAIRSFADALDAVPLALAEN

SEQ ID NO: 37310 - protein, 95 aa, Zea mays subsp. mays
  peptide (1)..(95): Ceres Seq. ID no. 7117148
  misc_feature (1)..(94): Pfam Name: Pfam Description:  TCP-1/cpn60 chaperonin family
  misc_feature (1)..(94): NCBI GI NO: 730919 NR Description: T-COMPLEX PROTEIN 1, EPSILON SUBUNIT
  misc_feature (1)..(94): NCBI GI NO: 1729864 NR Description: T-COMPLEX PROTEIN 1, EPSILON SUBUNIT
  misc_feature (1)..(94): NCBI GI NO: 1587206 NR Description: T complex protein
  misc_feature (1)..(94): NCBI GI NO: 4206124 NR Description: T-complex protein 1 epsilon subunit
  misc_feature (1)..(94): NCBI GI NO: 15221770 NR Description: T-complex chaperonin protein , epsilon subunit
  misc_feature (1)..(94): NCBI GI NO: 27924333 NR Description: Similar to chaperonin containing TCP1, subunit 5
  misc_feature (1)..(94): NCBI GI NO: 39850245 NR Description: Unknown (protein for MGC:76252)
  misc_feature (1)..(94): NCBI GI NO: 32405372 NR Description: hypothetical protein [Neurospora crassa]
  misc_feature (1)..(94): NCBI GI NO: 40745913 NR Description: conserved hypothetical protein
  misc_feature (1)..(94): NCBI GI NO: 6683670 NR Description: CCT
  misc_feature (33)..(33): Xaa is any aa, unknown or other
  misc_feature (34)..(34): Xaa is any aa, unknown or other
  misc_feature (38)..(38): Xaa is any aa, unknown or other
  misc_feature (40)..(40): Xaa is any aa, unknown or other
MLYIEKCANSRAVTIFIRGGNKMMIEETKRSLXXVLCXPXNLIRNNSIVYGGGSAEISCSIAVETAADRHPGVEQYAIRSFADALDAVPLALAEN

SEQ ID NO: 37311 - DNA, 1132 bp, Zea mays subsp. mays
  misc_feature (1)..(1132): Ceres Seq. ID no. 13579672
accaccgcatcccacaccgggcacaccccccgagctcagcttagctccactccagctccaatcacagtcgtgaccagagcgcgagagctagctagagggccgtgaaaatgccgatcaataggatcgccctggggagccaccaggaggtgtaccacccgggcgccctcaaggcggcgttcgctgagttcatctccaccctcatcttcgtcttcgccggccagggctccggcatggccttcagcaagctgaccggcggcggcccgacgaccccggcgggcctgatcgcggcggcggtggcgcacgcgttcgcgctgttcgtggcggtgtcggtgggcgcgaacatctcgggcgggcacgtgaacccggccgtgaccttcggcgccttcgtgggcggcaacatcaccctgttccgggggctcctgtactgggtggcgcagctgctggggtccaccgtggcgtgcttcctgctccgcttctcgacgggcgggcaggccacgggcaccttcgggctgacgggcgtgtcggtgtgggaggcgctggtgctggagatcgtgatgaccttcgggctggtgtacacggtgtacgccacggcggtggacccgaagaagggcagcctgggcaccatcgcccccatcgccatcggcttcatcgtgggggccaacatcctggtgggcggcgccttcgacggcgcgtccatgaaccccgccgtgtccttcggccccgccctcgtcagctgggagtggggctaccagtgggtgtactgggtcggccccctcatcggcggcggcctcgccggcgtcatctacgagctgctcttcatctcccacacccacgagcagctcccctccaccgactactaaaagccgaagccgaccgacccaggggtgcgcagcgcagcgcagctagcatccagctctctctccccggcccgctcgccgccgtttagtttctctcgtgcacgtgcatgcatcgtagactgtctcaggccgccgctgcgccggcgccgctcgcatcgtttgcttttccttggaccagcagtcgtcgccgtcaggttgagctgcttgtaaccgttaattccggacccgtttgcttctgtaagatttgtgcatttgcctgtgagtattcaccggcc

SEQ ID NO: 37312 - protein, 250 aa, Zea mays subsp. mays; identical to SEQ ID NO: 36710
  peptide (1)..(250): Ceres Seq. ID no. 13579673
  misc_feature (13)..(233): Pfam Name: Pfam Description:  Major intrinsic protein
  misc_feature (1)..(250): NCBI GI NO: 3004950 NR Description: tonoplast intrinsic protein; ZmTIP1 [Zea mays]
  misc_feature (1)..(250): NCBI GI NO: 1729971 NR Description: TONOPLAST INTRINSIC PROTEIN, GAMMA
  misc_feature (1)..(250): NCBI GI NO: 629784 NR Description: tonoplast intrinsic protein gamma - barley
  misc_feature (1)..(250): NCBI GI NO: 4099406 NR Description: gamma-type tonoplast intrinsic protein
  misc_feature (1)..(250): NCBI GI NO: 6478150 NR Description: putative gamma tonoplast intrinsic protein (TIP)
  misc_feature (1)..(250): NCBI GI NO: 12006843 NR Description: putative gamma TIP [Nicotiana glauca]
  misc_feature (1)..(250): NCBI GI NO: 4138262 NR Description: aquaporin 1 [Nicotiana tabacum]
  misc_feature (1)..(250): NCBI GI NO: 17940748 NR Description: aquaporin-like protein [Petunia x hybrida]
  misc_feature (1)..(250): NCBI GI NO: 8699604 NR Description: putative aquaporin TIP3
  misc_feature (1)..(250): NCBI GI NO: 9988412 NR Description: gamma tonoplast intrinsic protein [Pyrus communis]

SEQ ID NO: 37313 - protein, 209 aa, Zea mays subsp. mays; identical to SEQ ID NO: 36711
  peptide (1)..(209): Ceres Seq. ID no. 13579674
  misc_feature (1)..(192): Pfam Name: Pfam Description:  Major intrinsic protein
  misc_feature (1)..(209): NCBI GI NO: 3004950 NR Description: tonoplast intrinsic protein; ZmTIP1 [Zea mays]
  misc_feature (1)..(209): NCBI GI NO: 1729971 NR Description: TONOPLAST INTRINSIC PROTEIN, GAMMA
  misc_feature (1)..(209): NCBI GI NO: 629784 NR Description: tonoplast intrinsic protein gamma - barley
  misc_feature (1)..(209): NCBI GI NO: 4099406 NR Description: gamma-type tonoplast intrinsic protein
  misc_feature (1)..(209): NCBI GI NO: 6478150 NR Description: putative gamma tonoplast intrinsic protein (TIP)
  misc_feature (1)..(209): NCBI GI NO: 12006843 NR Description: putative gamma TIP [Nicotiana glauca]
  misc_feature (1)..(209): NCBI GI NO: 4138262 NR Description: aquaporin 1 [Nicotiana tabacum]
  misc_feature (1)..(209): NCBI GI NO: 17940748 NR Description: aquaporin-like protein [Petunia x hybrida]
  misc_feature (1)..(209): NCBI GI NO: 8699604 NR Description: putative aquaporin TIP3
  misc_feature (1)..(209): NCBI GI NO: 9988412 NR Description: gamma tonoplast intrinsic protein [Pyrus communis]

SEQ ID NO: 37314 - DNA, 420 bp, Zea mays subsp. mays
  misc_feature (1)..(420): Ceres Seq. ID no. 11412440
gggcctctcgcctgccagaccgcgataacggtgttcgacaagatcacgagacccggtttcctggccgaggtgtccaggaaaggggagagcttcaagcagctgctccgcgccaagctgagcgggaacccgcacgtgagggaggtccgcggggtcggccttctcgtcggcgtcgagctggacgtgccggctggtcctctggtcgacgcgtgcttggacgccggcgtcatcgtgctgactgccggtaagggcaatgtggtgaggctggtgccgccgctcatcgtctcggagaaggagctggagcatgccgctgatgtcataagggactgtctaccggcgctcgatgtccggatatgaaacctgattccaaattttggaatcgaataatttcatgtcgggccaataatgttgttgtgttcattg

SEQ ID NO: 37315 - protein, 117 aa, Zea mays subsp. mays
  peptide (1)..(117): Ceres Seq. ID no. 11412441
  misc_feature (1)..(114): Pfam Name: Pfam Description:  Aminotransferase class-III
  misc_feature (1)..(114): NCBI GI NO: 2811029 NR Description: Acetylornithine aminotransferase
  misc_feature (2)..(114): NCBI GI NO: 15220176 NR Description: putative acetylornithine transaminase
  misc_feature (1)..(87): NCBI GI NO: 34394063 NR Description: putative acetylornithine aminotransferase
  misc_feature (2)..(114): NCBI GI NO: 21554043 NR Description: putative acetylornithine transaminase
  misc_feature (2)..(110): NCBI GI NO: 20808850 NR Description: PLP-dependent aminotransferases
  misc_feature (2)..(115): NCBI GI NO: 15615460 NR Description: N-acetylornithine aminotransferase
  misc_feature (1)..(113): NCBI GI NO: 33600973 NR Description: putative acetylornithine aminotransferase
  misc_feature (1)..(113): NCBI GI NO: 33597129 NR Description: putative acetylornithine aminotransferase
  misc_feature (1)..(113): NCBI GI NO: 33594410 NR Description: putative acetylornithine aminotransferase
  misc_feature (3)..(110): NCBI GI NO: 16803628 NR Description: highly similar to N-acetylornithineaminotransferase
GPLACQTAITVFDKITRPGFLAEVSRKGESFKQLLRAKLSGNPHVREVRGVGLLVGVELDVPAGPLVDACLDAGVIVLTAGKGNVVRLVPPLIVSEKELEHAADVIRDCLPALDVRI

SEQ ID NO: 37316 - protein, 80 aa, Zea mays subsp. mays
  peptide (1)..(80): Ceres Seq. ID no. 11412442
ASRLPDRDNGVRQDHETRFPGRGVQERGELQAAAPRQAEREPAREGGPRGRPSRRRRAGRAGWSSGRRVLGRRRHRADCR

SEQ ID NO: 37317 - DNA, 482 bp, Zea mays subsp. mays
  misc_feature (1)..(482): Ceres Seq. ID no. 11412782
ggcgagatggtcggctcgaggaacgtgagggacaggcagccgctgatgggcgccgaggacttcgcgttctacgccgaggcggtcccttccacctactactacttcgtgggcatgtacaacgagacgcgcgggccgcaggcgccccaccactccccctacttcaccgtcaacgaagacgccctcccctacggcgcggccgggcaggcggcgctggcagctcgctacctactcgagcgtcagcagcctgctgccgccaccgctgataaggcagaaacccatgatgagctgtagattagtacatgatgtttgcgtccctgtccctgtgttgatggaattagattgagcaataatttcctcgccaagttattcagcggctgtacatatcctggtatctccatggcccatgctttggtaatgatcggttgggatcaggcattatttggtccagacgttcagtcagagctatttgcaattcgtttgat

SEQ ID NO: 37318 - protein, 96 aa, Zea mays subsp. mays
  peptide (1)..(96): Ceres Seq. ID no. 11412783
  misc_feature (2)..(77): Pfam Name: Pfam Description:  Peptidase family M20/M25/M40
  misc_feature (2)..(96): NCBI GI NO: 34914096 NR Description: putative IAA-Ala hydrolase
  misc_feature (2)..(96): NCBI GI NO: 27948556 NR Description: IAA-amino acid hydrolase
  misc_feature (1)..(96): NCBI GI NO: 15218027 NR Description: IAA-Ala hydrolase (IAR3); protein id: At1g51760
  misc_feature (1)..(96): NCBI GI NO: 2181184 NR Description: JR3 protein [Arabidopsis thaliana]
  misc_feature (2)..(78): NCBI GI NO: 15218029 NR Description: auxin conjugate hydrolase
  misc_feature (13)..(96): NCBI GI NO: 34910396 NR Description: putative IAA-Ala hydrolase
  misc_feature (2)..(96): NCBI GI NO: 902791 NR Description: ILL2
  misc_feature (2)..(96): NCBI GI NO: 15241894 NR Description: IAA-amino acid hydrolase (gb|AAC04866
  misc_feature (2)..(96): NCBI GI NO: 18175667 NR Description: IAA-amino acid hydrolase [Arabidopsis thaliana]
  misc_feature (2)..(96): NCBI GI NO: 15241892 NR Description: IAA-amino acid hydrolase homolog 1 precursor
GEMVGSRNVRDRQPLMGAEDFAFYAEAVPSTYYYFVGMYNETRGPQAPHHSPYFTVNEDALPYGAAGQAALAARYLLERQQPAAATADKAETHDEL

SEQ ID NO: 37319 - protein, 94 aa, Zea mays subsp. mays
  peptide (1)..(94): Ceres Seq. ID no. 11412784
  misc_feature (1)..(75): Pfam Name: Pfam Description:  Peptidase family M20/M25/M40
  misc_feature (1)..(94): NCBI GI NO: 34914096 NR Description: putative IAA-Ala hydrolase
  misc_feature (1)..(94): NCBI GI NO: 27948556 NR Description: IAA-amino acid hydrolase
  misc_feature (1)..(94): NCBI GI NO: 15218027 NR Description: IAA-Ala hydrolase (IAR3); protein id: At1g51760
  misc_feature (1)..(94): NCBI GI NO: 2181184 NR Description: JR3 protein [Arabidopsis thaliana]
  misc_feature (1)..(76): NCBI GI NO: 15218029 NR Description: auxin conjugate hydrolase
  misc_feature (11)..(94): NCBI GI NO: 34910396 NR Description: putative IAA-Ala hydrolase
  misc_feature (1)..(94): NCBI GI NO: 902791 NR Description: ILL2
  misc_feature (1)..(94): NCBI GI NO: 18175667 NR Description: IAA-amino acid hydrolase [Arabidopsis thaliana]
  misc_feature (1)..(94): NCBI GI NO: 15241894 NR Description: IAA-amino acid hydrolase (gb|AAC04866
  misc_feature (1)..(94): NCBI GI NO: 15241892 NR Description: IAA-amino acid hydrolase homolog 1 precursor
MVGSRNVRDRQPLMGAEDFAFYAEAVPSTYYYFVGMYNETRGPQAPHHSPYFTVNEDALPYGAAGQAALAARYLLERQQPAAATADKAETHDEL

SEQ ID NO: 37320 - protein, 86 aa, Zea mays subsp. mays
  peptide (1)..(86): Ceres Seq. ID no. 11412785
RDGRLEEREGQAAADGRRGLRVLRRGGPFHLLLLRGHVQRDARAAGAPPLPLLHRQRRRPPLRRGRAGGAGSSLPTRASAACCRHR

SEQ ID NO: 37321 - DNA, 695 bp, Zea mays subsp. mays
  misc_feature (1)..(695): Ceres Seq. ID no. 11412660
  misc_feature (613)..(613): n is a, c, t, g, unknown, or other
  misc_feature (616)..(616): n is a, c, t, g, unknown, or other
  misc_feature (615)..(615): n is a, c, t, g, unknown, or other
  misc_feature (614)..(614): n is a, c, t, g, unknown, or other
atcctctacaagcccggcgaacatccggatcacgtaatcgtgatcaagtacatcccctacgtgggtgacagcaagagggctatggacgagtatacctctgagatcttcatgggtggcaagaacaccatcgcgctgcacaacacctgcgaggactcgcttctcgccgcgcccatcatccttgacttggtgctcctagctgagctcagcactcggattcagctcaaggccgaagggcaggataagttccactccttccaccctgtcgccactattctgagctacctcagcaaggctcctcttgtacctcctggcacaccagtggtgaatgctctagccaagcagagggccatgctggaaaacatcttgcgggcctgcattggccttgcccctgagaacaacatgatgcttgagcacaagtgaagagtttcacgtcccttaattaactaccacaagataggatgaatggaaaaaggagggatcaagcgaaggtgtgggaataatcagtgactcctctgagcccaacgaagaaatgtcaggaggctacaggaaggagaagtgtaaggagagaagaccaagcatggatatatcctcttttcgaaggcaatctatctannnnttttttgtagatttgactcgttttttgtactcgtgggacgagattgtgtactggctatatatccactgtatgcagcatg

SEQ ID NO: 37322 - protein, 139 aa, Zea mays subsp. mays
  peptide (1)..(139): Ceres Seq. ID no. 11412661
  misc_feature (1)..(124): Pfam Name: Pfam Description:  Myo-inositol-1-phosphate synthase
  misc_feature (1)..(139): NCBI GI NO: 37533568 NR Description: putative Myo-inositol-1-phosphate synthase
  misc_feature (1)..(139): NCBI GI NO: 11762100 NR Description: myo-inositol 1-phosphate synthase [Zea mays]
  misc_feature (1)..(139): NCBI GI NO: 14548094 NR Description: Inositol-3-phosphate synthase
  misc_feature (1)..(139): NCBI GI NO: 18181983 NR Description: myo-inositol-1-phosphate synthase [Avena sativa]
  misc_feature (1)..(139): NCBI GI NO: 14548096 NR Description: Inositol-3-phosphate synthase
  misc_feature (1)..(139): NCBI GI NO: 14548099 NR Description: Inositol-3-phosphate synthase
  misc_feature (1)..(139): NCBI GI NO: 32492882 NR Description: myo-inositol-1-phosphate synthase INO1
  misc_feature (1)..(139): NCBI GI NO: 1170568 NR Description: Inositol-3-phosphate synthase
  misc_feature (1)..(139): NCBI GI NO: 14548095 NR Description: Inositol-3-phosphate synthase
  misc_feature (1)..(139): NCBI GI NO: 14548089 NR Description: Inositol-3-phosphate synthase
ILYKPGEHPDHVIVIKYIPYVGDSKRAMDEYTSEIFMGGKNTIALHNTCEDSLLAAPIILDLVLLAELSTRIQLKAEGQDKFHSFHPVATILSYLSKAPLVPPGTPVVNALAKQRAMLENILRACIGLAPENNMMLEHK

SEQ ID NO: 37323 - protein, 112 aa, Zea mays subsp. mays
  peptide (1)..(112): Ceres Seq. ID no. 11412662
  misc_feature (1)..(97): Pfam Name: Pfam Description:  Myo-inositol-1-phosphate synthase
  misc_feature (1)..(112): NCBI GI NO: 37533568 NR Description: putative Myo-inositol-1-phosphate synthase
  misc_feature (1)..(112): NCBI GI NO: 11762100 NR Description: myo-inositol 1-phosphate synthase [Zea mays]
  misc_feature (1)..(112): NCBI GI NO: 14548094 NR Description: Inositol-3-phosphate synthase
  misc_feature (1)..(112): NCBI GI NO: 18181983 NR Description: myo-inositol-1-phosphate synthase [Avena sativa]
  misc_feature (1)..(112): NCBI GI NO: 14548096 NR Description: Inositol-3-phosphate synthase
  misc_feature (1)..(112): NCBI GI NO: 14548099 NR Description: Inositol-3-phosphate synthase
  misc_feature (1)..(112): NCBI GI NO: 32492882 NR Description: myo-inositol-1-phosphate synthase INO1
  misc_feature (1)..(112): NCBI GI NO: 1170568 NR Description: Inositol-3-phosphate synthase
  misc_feature (1)..(112): NCBI GI NO: 14548095 NR Description: Inositol-3-phosphate synthase
  misc_feature (1)..(112): NCBI GI NO: 14548089 NR Description: Inositol-3-phosphate synthase
MDEYTSEIFMGGKNTIALHNTCEDSLLAAPIILDLVLLAELSTRIQLKAEGQDKFHSFHPVATILSYLSKAPLVPPGTPVVNALAKQRAMLENILRACIGLAPENNMMLEHK

SEQ ID NO: 37324 - protein, 103 aa, Zea mays subsp. mays
  peptide (1)..(103): Ceres Seq. ID no. 11412663
  misc_feature (1)..(88): Pfam Name: Pfam Description:  Myo-inositol-1-phosphate synthase
  misc_feature (1)..(103): NCBI GI NO: 37533568 NR Description: putative Myo-inositol-1-phosphate synthase
  misc_feature (1)..(103): NCBI GI NO: 11762100 NR Description: myo-inositol 1-phosphate synthase [Zea mays]
  misc_feature (1)..(103): NCBI GI NO: 14548094 NR Description: Inositol-3-phosphate synthase
  misc_feature (1)..(103): NCBI GI NO: 18181983 NR Description: myo-inositol-1-phosphate synthase [Avena sativa]
  misc_feature (1)..(103): NCBI GI NO: 14548096 NR Description: Inositol-3-phosphate synthase
  misc_feature (1)..(103): NCBI GI NO: 14548099 NR Description: Inositol-3-phosphate synthase
  misc_feature (1)..(103): NCBI GI NO: 32492882 NR Description: myo-inositol-1-phosphate synthase INO1
  misc_feature (1)..(103): NCBI GI NO: 1170568 NR Description: Inositol-3-phosphate synthase
  misc_feature (1)..(103): NCBI GI NO: 14548095 NR Description: Inositol-3-phosphate synthase
  misc_feature (1)..(103): NCBI GI NO: 14548089 NR Description: Inositol-3-phosphate synthase
MGGKNTIALHNTCEDSLLAAPIILDLVLLAELSTRIQLKAEGQDKFHSFHPVATILSYLSKAPLVPPGTPVVNALAKQRAMLENILRACIGLAPENNMMLEHK

SEQ ID NO: 37325 - DNA, 450 bp, Zea mays subsp. mays; identical to SEQ ID NO: 35756
  misc_feature (1)..(450): Ceres Seq. ID no. 13635772

SEQ ID NO: 37326 - protein, 150 aa, Zea mays subsp. mays; identical to SEQ ID NO: 35757
  peptide (1)..(150): Ceres Seq. ID no. 13635773

SEQ ID NO: 37327 - protein, 134 aa, Zea mays subsp. mays; identical to SEQ ID NO: 35758
  peptide (1)..(134): Ceres Seq. ID no. 13635774
  misc_feature (56)..(133): Pfam Name: Pfam Description:  Peroxidase
  misc_feature (22)..(133): NCBI GI NO: 34903770 NR Description: unnamed protein product
  misc_feature (20)..(133): NCBI GI NO: 5453379 NR Description: bacterial-induced peroxidase precursor
  misc_feature (17)..(133): NCBI GI NO: 2117619 NR Description: peroxidase (EC 1.11.1.7) 4 precursor - wheat
  misc_feature (20)..(133): NCBI GI NO: 34393249 NR Description: putative peroxidase precursor
  misc_feature (22)..(133): NCBI GI NO: 15237190 NR Description: peroxidase, putative [Arabidopsis thaliana]
  misc_feature (20)..(133): NCBI GI NO: 2429288 NR Description: peroxidase [Oryza sativa]
  misc_feature (20)..(133): NCBI GI NO: 34393250 NR Description: peroxidase
  misc_feature (40)..(130): NCBI GI NO: 4760704 NR Description: peroxidase 3 [Scutellaria baicalensis]
  misc_feature (27)..(133): NCBI GI NO: 7433049 NR Description: peroxidase (EC 1.11.1.7) - flax (fragment)
  misc_feature (31)..(133): NCBI GI NO: 34015359 NR Description: putative peroxidase

SEQ ID NO: 37328 - protein, 128 aa, Zea mays subsp. mays; identical to SEQ ID NO: 35759
  peptide (1)..(128): Ceres Seq. ID no. 13635775
  misc_feature (50)..(127): Pfam Name: Pfam Description:  Peroxidase
  misc_feature (16)..(127): NCBI GI NO: 34903770 NR Description: unnamed protein product
  misc_feature (14)..(127): NCBI GI NO: 5453379 NR Description: bacterial-induced peroxidase precursor
  misc_feature (11)..(127): NCBI GI NO: 2117619 NR Description: peroxidase (EC 1.11.1.7) 4 precursor - wheat
  misc_feature (14)..(127): NCBI GI NO: 34393249 NR Description: putative peroxidase precursor
  misc_feature (16)..(127): NCBI GI NO: 15237190 NR Description: peroxidase, putative [Arabidopsis thaliana]
  misc_feature (14)..(127): NCBI GI NO: 2429288 NR Description: peroxidase [Oryza sativa]
  misc_feature (14)..(127): NCBI GI NO: 34393250 NR Description: peroxidase
  misc_feature (34)..(124): NCBI GI NO: 4760704 NR Description: peroxidase 3 [Scutellaria baicalensis]
  misc_feature (21)..(127): NCBI GI NO: 7433049 NR Description: peroxidase (EC 1.11.1.7) - flax (fragment)
  misc_feature (25)..(127): NCBI GI NO: 34015359 NR Description: putative peroxidase

SEQ ID NO: 37329 - DNA, 1064 bp, Zea mays subsp. mays
  misc_feature (1)..(1064): Ceres Seq. ID no. 12405342
gaaaactacccacaccacaaagaaatcgaagaggggaacagagaggagagagaagggagatggcggaggcgacggcgtacgaggagcagcgccggaggcaggtggaggcgaacaagcgaaagctggaggagcttcagctccactacctctccgccgccgtcagagaggccgcagccgccgccaagccctcgccggtcaagaagcggaaggcgcgggtgccgcttgacgccgccgactccgtgatggagccactacggcggtccggccggctcgccaacctccccgataagtccgtgcaccgcgaggaggttccaactttttggagaaagattaggaggacgtatggatcagtgagaaaagatctggaaaaccgggtgtacgcgaccgacgaggcgaggggctacgccatctgtaaggcggaagaagtggagcaagagctggactccagcttccccgtcttcatcaaacccatgacccagtcccatgtcaccggaggcttctggctgggcctcccaaatcatttctgccggaagtacctgcccaagcgtgacgagacgatcaccctgctggatgaggatgacaacgagtcctacacgctatacctcgcattgaagcgaggcctcagcgctggatggagagggttcgctatccagcacaagctggttgatggagattgcttggtcttccagctgactgagagaacaaagttcaaggtaatcataattagagcaagttcttactatgaaagtgaggactgatgaaactaatagcttgtaatgcggtgattggagcacagtttatggaggtgggctgcattggacaagctcgcatctggaaattgctgggtgtcttgaaccttttgggtgacagaaagttatctcatgtacaaaatgtttacacagcccagttgctaccaattgctgatttgtgtacttcttgggctttaccacttgcacggttcagaaacctgcactatgtaaggggatgttgatggcaattgacctcattttgtaaatgatcctcgtttatcttggattcatttttagtgttcagtttggcagttg

SEQ ID NO: 37330 - protein, 251 aa, Zea mays subsp. mays
  peptide (1)..(251): Ceres Seq. ID no. 12405343
  misc_feature (153)..(244): Pfam Name: Pfam Description:  B3 DNA binding domain
  misc_feature (24)..(244): NCBI GI NO: 15217278 NR Description: Unknown protein [Oryza sativa]
  misc_feature (20)..(244): NCBI GI NO: 9294620 NR Description: gene_id:MVI11.9~unknown protein
  misc_feature (111)..(249): NCBI GI NO: 30694114 NR Description: expressed protein [Arabidopsis thaliana]
  misc_feature (133)..(239): NCBI GI NO: 34904376 NR Description: unnamed protein product
  misc_feature (23)..(244): NCBI GI NO: 15237157 NR Description: unknown protein; protein id: At5g58280.1
  misc_feature (111)..(168): NCBI GI NO: 10177273 NR Description: gene_id:MJB21.7~unknown protein
KLPTPQRNRRGEQRGERREMAEATAYEEQRRRQVEANKRKLEELQLHYLSAAVREAAAAAKPSPVKKRKARVPLDAADSVMEPLRRSGRLANLPDKSVHREEVPTFWRKIRRTYGSVRKDLENRVYATDEARGYAICKAEEVEQELDSSFPVFIKPMTQSHVTGGFWLGLPNHFCRKYLPKRDETITLLDEDDNESYTLYLALKRGLSAGWRGFAIQHKLVDGDCLVFQLTERTKFKVIIIRASSYYESED

SEQ ID NO: 37331 - protein, 232 aa, Zea mays subsp. mays
  peptide (1)..(232): Ceres Seq. ID no. 12405344
  misc_feature (134)..(225): Pfam Name: Pfam Description:  B3 DNA binding domain
  misc_feature (5)..(225): NCBI GI NO: 15217278 NR Description: Unknown protein [Oryza sativa]
  misc_feature (1)..(225): NCBI GI NO: 9294620 NR Description: gene_id:MVI11.9~unknown protein
  misc_feature (92)..(230): NCBI GI NO: 30694114 NR Description: expressed protein [Arabidopsis thaliana]
  misc_feature (114)..(220): NCBI GI NO: 34904376 NR Description: unnamed protein product
  misc_feature (4)..(225): NCBI GI NO: 15237157 NR Description: unknown protein; protein id: At5g58280.1
  misc_feature (92)..(149): NCBI GI NO: 10177273 NR Description: gene_id:MJB21.7~unknown protein
MAEATAYEEQRRRQVEANKRKLEELQLHYLSAAVREAAAAAKPSPVKKRKARVPLDAADSVMEPLRRSGRLANLPDKSVHREEVPTFWRKIRRTYGSVRKDLENRVYATDEARGYAICKAEEVEQELDSSFPVFIKPMTQSHVTGGFWLGLPNHFCRKYLPKRDETITLLDEDDNESYTLYLALKRGLSAGWRGFAIQHKLVDGDCLVFQLTERTKFKVIIIRASSYYESED

SEQ ID NO: 37332 - protein, 171 aa, Zea mays subsp. mays
  peptide (1)..(171): Ceres Seq. ID no. 12405345
  misc_feature (73)..(164): Pfam Name: Pfam Description:  B3 DNA binding domain
  misc_feature (1)..(164): NCBI GI NO: 15217278 NR Description: Unknown protein [Oryza sativa]
  misc_feature (1)..(164): NCBI GI NO: 9294620 NR Description: gene_id:MVI11.9~unknown protein
  misc_feature (31)..(169): NCBI GI NO: 30694114 NR Description: expressed protein [Arabidopsis thaliana]
  misc_feature (53)..(159): NCBI GI NO: 34904376 NR Description: unnamed protein product
  misc_feature (1)..(164): NCBI GI NO: 15237157 NR Description: unknown protein; protein id: At5g58280.1
  misc_feature (31)..(88): NCBI GI NO: 10177273 NR Description: gene_id:MJB21.7~unknown protein
MEPLRRSGRLANLPDKSVHREEVPTFWRKIRRTYGSVRKDLENRVYATDEARGYAICKAEEVEQELDSSFPVFIKPMTQSHVTGGFWLGLPNHFCRKYLPKRDETITLLDEDDNESYTLYLALKRGLSAGWRGFAIQHKLVDGDCLVFQLTERTKFKVIIIRASSYYESED

SEQ ID NO: 37333 - DNA, 1295 bp, Zea mays subsp. mays
  misc_feature (1)..(1295): Ceres Seq. ID no. 15179550
acaatattattggactattcctaacacaacggaggccataggatgggatggtcatctataaatacgtagcccggcgcagccttctttggagcagggagaagaacacagggcacacgcacggcacgcagatacatatagagagaggttagctatagcttgcacatctatttaactaactaactaactggctagctagctcgatcggcagagcaaagcgaaagcagcaagaagcaaagcaatggagaaccctgcgagtgtgctagttctaccagcgcagttcaccaaactcaccttccgaaacctgtacatccgccgggccgggccgggcagcagggagataaccgaggagggcaggtgcgacctggacaagagatacgtgagtgacttccccgtctacgacggccgcggccccgacgccagccttgtggcccgcgtgcaggggatcaccagcgaaatcgggaacgcgcaccaactgttcgtcgttgttttcgacaccgacaggctcaagggctccacgctcgtcaccaatggcgtgataacggccgggtctgacgagtgggcgatctacggcggaaccggggtgtttgccatggcgaggggcgtcataaggagaaggtatctcgccgacagggccggcgggaacactgatgagctcaacatggatgtcttctgccggccgtttggctcacagtcagagctgcaagataaggtgcaggggcagggctctagcgtcaccaagattggactatggggtggaccgggagggtcggcacaggacatcacggcggagcggccgccgcagcgtctgcacagcgtcaccgttcgtgctggcgtcgccgtcgactccatcgagttcacctatactgacagcgcttggcagaggcgcgccgctgggcgatggggtggactcgggggcaatgttcgaacgatcgaccttggcgacgccgaggatgtcagggaagtctcgggaacatacggcgcatttgaaggtgccactacgctgacctcgctcaggctcgtcaccagcagcagaacctggggcccctggggtgtcgagaacgggacgcgtttctccgtcacggcgcccatcggcagcagcatcgtgggattctatgcgcgggcgggaaccaggctcgtcgatgctatcggtgtttacttgcgtcagatttaattcgaataatagcaggggagctactgctagctacgtacctgctccatcctccattatcctttatttcaattcgctcatcatcgtcgtgtgtaaattaaataaataaagctcttgtgcccatatt

SEQ ID NO: 37334 - protein, 310 aa, Zea mays subsp. mays
  peptide (1)..(310): Ceres Seq. ID no. 15179551
  misc_feature (176)..(308): Pfam Name: Pfam Description:  Jacalin-like lectin domain
  misc_feature (5)..(310): NCBI GI NO: 9313027 NR Description: beta-glucosidase aggregating factor precursor
  misc_feature (13)..(310): NCBI GI NO: 7489383 NR Description: jacalin homolog - barley
  misc_feature (13)..(310): NCBI GI NO: 7489385 NR Description: jakalin homolog - barley
  misc_feature (13)..(296): NCBI GI NO: 7489384 NR Description: jacalin homolog - barley
  misc_feature (15)..(306): NCBI GI NO: 16151819 NR Description: VER2 [Triticum aestivum]
  misc_feature (48)..(307): NCBI GI NO: 7489661 NR Description: benzothiadiazole-induced protein
  misc_feature (48)..(308): NCBI GI NO: 21311647 NR Description: hessian fly response gene 1 protein
  misc_feature (164)..(308): NCBI GI NO: 34915016 NR Description: putative Mannose-Binding Rice Lectin
  misc_feature (164)..(307): NCBI GI NO: 134190 NR Description: Salt-stress induced protein (Salt protein)
  misc_feature (158)..(308): NCBI GI NO: 26006817 NR Description: Mannose/glucose-specific lectin
MENPASVLVLPAQFTKLTFRNLYIRRAGPGSREITEEGRCDLDKRYVSDFPVYDGRGPDASLVARVQGITSEIGNAHQLFVVVFDTDRLKGSTLVTNGVITAGSDEWAIYGGTGVFAMARGVIRRRYLADRAGGNTDELNMDVFCRPFGSQSELQDKVQGQGSSVTKIGLWGGPGGSAQDITAERPPQRLHSVTVRAGVAVDSIEFTYTDSAWQRRAAGRWGGLGGNVRTIDLGDAEDVREVSGTYGAFEGATTLTSLRLVTSSRTWGPWGVENGTRFSVTAPIGSSIVGFYARAGTRLVDAIGVYLRQI

SEQ ID NO: 37335 - protein, 193 aa, Zea mays subsp. mays
  peptide (1)..(193): Ceres Seq. ID no. 15179552
  misc_feature (59)..(191): Pfam Name: Pfam Description:  Jacalin-like lectin domain
  misc_feature (1)..(193): NCBI GI NO: 9313027 NR Description: beta-glucosidase aggregating factor precursor
  misc_feature (1)..(193): NCBI GI NO: 7489383 NR Description: jacalin homolog - barley
  misc_feature (1)..(193): NCBI GI NO: 7489385 NR Description: jakalin homolog - barley
  misc_feature (1)..(179): NCBI GI NO: 7489384 NR Description: jacalin homolog - barley
  misc_feature (1)..(189): NCBI GI NO: 16151819 NR Description: VER2 [Triticum aestivum]
  misc_feature (1)..(190): NCBI GI NO: 7489661 NR Description: benzothiadiazole-induced protein
  misc_feature (1)..(191): NCBI GI NO: 21311647 NR Description: hessian fly response gene 1 protein
  misc_feature (47)..(191): NCBI GI NO: 34915016 NR Description: putative Mannose-Binding Rice Lectin
  misc_feature (47)..(190): NCBI GI NO: 134190 NR Description: Salt-stress induced protein (Salt protein)
  misc_feature (41)..(191): NCBI GI NO: 26006817 NR Description: Mannose/glucose-specific lectin
MARGVIRRRYLADRAGGNTDELNMDVFCRPFGSQSELQDKVQGQGSSVTKIGLWGGPGGSAQDITAERPPQRLHSVTVRAGVAVDSIEFTYTDSAWQRRAAGRWGGLGGNVRTIDLGDAEDVREVSGTYGAFEGATTLTSLRLVTSSRTWGPWGVENGTRFSVTAPIGSSIVGFYARAGTRLVDAIGVYLRQI

SEQ ID NO: 37336 - protein, 170 aa, Zea mays subsp. mays
  peptide (1)..(170): Ceres Seq. ID no. 15179553
  misc_feature (36)..(168): Pfam Name: Pfam Description:  Jacalin-like lectin domain
  misc_feature (1)..(170): NCBI GI NO: 9313027 NR Description: beta-glucosidase aggregating factor precursor
  misc_feature (1)..(170): NCBI GI NO: 7489383 NR Description: jacalin homolog - barley
  misc_feature (1)..(170): NCBI GI NO: 7489385 NR Description: jakalin homolog - barley
  misc_feature (1)..(156): NCBI GI NO: 7489384 NR Description: jacalin homolog - barley
  misc_feature (1)..(166): NCBI GI NO: 16151819 NR Description: VER2 [Triticum aestivum]
  misc_feature (1)..(167): NCBI GI NO: 7489661 NR Description: benzothiadiazole-induced protein
  misc_feature (1)..(168): NCBI GI NO: 21311647 NR Description: hessian fly response gene 1 protein
  misc_feature (24)..(168): NCBI GI NO: 34915016 NR Description: putative Mannose-Binding Rice Lectin
  misc_feature (24)..(167): NCBI GI NO: 134190 NR Description: Salt-stress induced protein (Salt protein)
  misc_feature (18)..(168): NCBI GI NO: 26006817 NR Description: Mannose/glucose-specific lectin
MDVFCRPFGSQSELQDKVQGQGSSVTKIGLWGGPGGSAQDITAERPPQRLHSVTVRAGVAVDSIEFTYTDSAWQRRAAGRWGGLGGNVRTIDLGDAEDVREVSGTYGAFEGATTLTSLRLVTSSRTWGPWGVENGTRFSVTAPIGSSIVGFYARAGTRLVDAIGVYLRQI

SEQ ID NO: 37337 - DNA, 1442 bp, Zea mays subsp. mays
  misc_feature (1)..(1442): Ceres Seq. ID no. 12377630
gcacgagaccattacctagaacatcctaatcgaaaaagggaacccatcttcttcttccccgcgctgcctgctgcctgctcgagcttggagatggcgttggtgcggcgatgcctctgtggatccgaggaagactgcagagcgcttttgggcatggaaaatctccggctgttctcctacagagagatcagagcaggcacaaacaacttcgatcagagtaacaagcttggacgaggtggttttggaactgtctacaagggagttctaagagacggcactgaatttgccgcgaaggttctgtcctcggaatccgagcaggggatcaaggagttcctagctgagatcgagagcatatcccaggtgaagcacgcgaacctcgtcaggcttctgggctgctgcgtacagaggaaaaaaaggatactggtgtacgagtaccttgcgaacaacagcctcgatcatgcgctcaaaggagcagcagcagatctaccctggagcacgaggtcgggcatctgcttgggcaccgccaaggggctgagctacctgcacgaggagcacgagccgaacatcgtgcacagggacatcaaagccagcaatgttcttctcgaccgagactacctgccaaagatcggagatttcgggctcgcgaagctgttcccggacaacatcacccacatcagcaccgcagtggtcggaacgagtggatacttggcgcctgaatacttcgtgcatgggcagctgaccaagaaagccgacgtctacagcttcggggtgcttgtcctggagatcatcagcgggaggagggtctcgcaaacgatccaggtcggacatgttcccggtgcgagaggcatggatgatgtaccagcaaggcaggctgctagagatcgtggacgcgagcatggggagctacccggagaaggaggtgctccggtacatcaaggtggggctggcctgcacgcaggccacgcccagcagccgccccacgatgcgccaggtgcttgccttgctgtcggaacggagatgctcccgccgagtttcgccgagcaccgcggccaccacacggcccctgccctggggggtttgcccgccggtccgctaatccatgcgtcgccgagggcgaggtggccggcggcggcgccgtcagcagcaacgtcgccgaagcaggtcctgagcctgaacgcgcaaccggcaatccggcatgtaactgaaactgatatagtcacgtgtgaggcggcgttcgttctgtcacgtaatcacttgcgttagaatttgattttctagtcttgttcgtgctcgcagtttggaccgggaaaaaagggtaggaggggctaggcaggtccataaacgagcatattgtttttaatctcaatccatatgagttagagaggattgagaatctgttcattttaatctcaattcatgtggattgaaagaaattgagtagattt

SEQ ID NO: 37338 - protein, 419 aa, Zea mays subsp. mays
  peptide (1)..(419): Ceres Seq. ID no. 12377631
  misc_feature (52)..(271): NCBI GI NO: 38344039 NR Description: OSJNBb0017I01.6
  misc_feature (53)..(270): NCBI GI NO: 34901978 NR Description: putative receptor ser/thr protein
  misc_feature (53)..(264): NCBI GI NO: 5923666 NR Description: putative receptor ser/thr protein kinase
  misc_feature (53)..(264): NCBI GI NO: 18398327 NR Description: putative receptor ser/thr protein kinase
  misc_feature (53)..(264): NCBI GI NO: 6403501 NR Description: putative protein kinase [Arabidopsis thaliana]
  misc_feature (48)..(270): NCBI GI NO: 18394385 NR Description: receptor-like serine/threonine kinase, putative
  misc_feature (48)..(270): NCBI GI NO: 25287648 NR Description: hypothetical protein F19K19.4
  misc_feature (57)..(265): NCBI GI NO: 6056375 NR Description: Similar to serine/threonine kinases
  misc_feature (57)..(265): NCBI GI NO: 18405703 NR Description: receptor protein kinase, putative
  misc_feature (57)..(274): NCBI GI NO: 25404093 NR Description: hypothetical protein T6H22.9
ARDHYLEHPNRKREPIFFFPALPAACSSLEMALVRRCLCGSEEDCRALLGMENLRLFSYREIRAGTNNFDQSNKLGRGGFGTVYKGVLRDGTEFAAKVLSSESEQGIKEFLAEIESISQVKHANLVRLLGCCVQRKKRILVYEYLANNSLDHALKGAAADLPWSTRSGICLGTAKGLSYLHEEHEPNIVHRDIKASNVLLDRDYLPKIGDFGLAKLFPDNITHISTAVVGTSGYLAPEYFVHGQLTKKADVYSFGVLVLEIISGRRVSQTIQVGHVPGARGMDDVPARQAARDRGREHGELPGEGGAPVHQGGAGLHAGHAQQPPHDAPGACLAVGTEMLPPSFAEHRGHHTAPALGGLPAGPLIHASPRARWPAAAPSAATSPKQVLSLNAQPAIRHVTETDIVTCEAAFVLSRNHLR

SEQ ID NO: 37339 - protein, 389 aa, Zea mays subsp. mays
  peptide (1)..(389): Ceres Seq. ID no. 12377632
  misc_feature (22)..(241): NCBI GI NO: 38344039 NR Description: OSJNBb0017I01.6
  misc_feature (23)..(240): NCBI GI NO: 34901978 NR Description: putative receptor ser/thr protein
  misc_feature (23)..(234): NCBI GI NO: 5923666 NR Description: putative receptor ser/thr protein kinase
  misc_feature (23)..(234): NCBI GI NO: 18398327 NR Description: putative receptor ser/thr protein kinase
  misc_feature (23)..(234): NCBI GI NO: 6403501 NR Description: putative protein kinase [Arabidopsis thaliana]
  misc_feature (18)..(240): NCBI GI NO: 18394385 NR Description: receptor-like serine/threonine kinase, putative
  misc_feature (18)..(240): NCBI GI NO: 25287648 NR Description: hypothetical protein F19K19.4
  misc_feature (27)..(235): NCBI GI NO: 6056375 NR Description: Similar to serine/threonine kinases
  misc_feature (27)..(235): NCBI GI NO: 18405703 NR Description: receptor protein kinase, putative
  misc_feature (27)..(244): NCBI GI NO: 25404093 NR Description: hypothetical protein T6H22.9
MALVRRCLCGSEEDCRALLGMENLRLFSYREIRAGTNNFDQSNKLGRGGFGTVYKGVLRDGTEFAAKVLSSESEQGIKEFLAEIESISQVKHANLVRLLGCCVQRKKRILVYEYLANNSLDHALKGAAADLPWSTRSGICLGTAKGLSYLHEEHEPNIVHRDIKASNVLLDRDYLPKIGDFGLAKLFPDNITHISTAVVGTSGYLAPEYFVHGQLTKKADVYSFGVLVLEIISGRRVSQTIQVGHVPGARGMDDVPARQAARDRGREHGELPGEGGAPVHQGGAGLHAGHAQQPPHDAPGACLAVGTEMLPPSFAEHRGHHTAPALGGLPAGPLIHASPRARWPAAAPSAATSPKQVLSLNAQPAIRHVTETDIVTCEAAFVLSRNHLR

SEQ ID NO: 37340 - protein, 369 aa, Zea mays subsp. mays
  peptide (1)..(369): Ceres Seq. ID no. 12377633
  misc_feature (2)..(221): NCBI GI NO: 38344039 NR Description: OSJNBb0017I01.6
  misc_feature (3)..(220): NCBI GI NO: 34901978 NR Description: putative receptor ser/thr protein
  misc_feature (3)..(214): NCBI GI NO: 5923666 NR Description: putative receptor ser/thr protein kinase
  misc_feature (3)..(214): NCBI GI NO: 18398327 NR Description: putative receptor ser/thr protein kinase
  misc_feature (3)..(214): NCBI GI NO: 6403501 NR Description: putative protein kinase [Arabidopsis thaliana]
  misc_feature (1)..(220): NCBI GI NO: 18394385 NR Description: receptor-like serine/threonine kinase, putative
  misc_feature (1)..(220): NCBI GI NO: 25287648 NR Description: hypothetical protein F19K19.4
  misc_feature (7)..(215): NCBI GI NO: 6056375 NR Description: Similar to serine/threonine kinases
  misc_feature (7)..(215): NCBI GI NO: 18405703 NR Description: receptor protein kinase, putative
  misc_feature (7)..(224): NCBI GI NO: 25404093 NR Description: hypothetical protein T6H22.9
MENLRLFSYREIRAGTNNFDQSNKLGRGGFGTVYKGVLRDGTEFAAKVLSSESEQGIKEFLAEIESISQVKHANLVRLLGCCVQRKKRILVYEYLANNSLDHALKGAAADLPWSTRSGICLGTAKGLSYLHEEHEPNIVHRDIKASNVLLDRDYLPKIGDFGLAKLFPDNITHISTAVVGTSGYLAPEYFVHGQLTKKADVYSFGVLVLEIISGRRVSQTIQVGHVPGARGMDDVPARQAARDRGREHGELPGEGGAPVHQGGAGLHAGHAQQPPHDAPGACLAVGTEMLPPSFAEHRGHHTAPALGGLPAGPLIHASPRARWPAAAPSAATSPKQVLSLNAQPAIRHVTETDIVTCEAAFVLSRNHLR

SEQ ID NO: 37341 - DNA, 582 bp, Zea mays subsp. mays
  misc_feature (1)..(582): Ceres Seq. ID no. 13598824
gcaattggaaaggatgttcaggccatgaaggcagtcgttggagaggaggcactctcgtctgaggatctgctttacttagagttccttgacaagtttgagaggaagtttgtgacacaaggagcatacgacacacggaacatcttccagtcactagatcttgcatggacattgcttcggatcttccctcgcgaacttctccaccgtatcccggcgaagaccttggaccagtactatagcagagatgcctcccactgaatcactgatcgttgatcagtgttccaatagtttggcaagtgttgaataaattgaacagattggcttcatggccttttccctgtatttatgtgtagtcaggtccaattcttttctgttgatgagcgcaagtttttcgtagatgactcgcggtcacggcaatatttgtgatattgtgtcatctgtggactatggttaaatttcagttatttgttttctttcaccttccagaactgttagcaagagcattctggaccaggatgctcgaacacaactggctgtatgtacatttgtgaatggtgaataaagaaggggcaataaactgctgcc

SEQ ID NO: 37342 - protein, 84 aa, Zea mays subsp. mays
  peptide (1)..(84): Ceres Seq. ID no. 13598825
  misc_feature (1)..(84): NCBI GI NO: 14150751 NR Description: vacuolar ATPase B subunit [Oryza sativa]
  misc_feature (1)..(84): NCBI GI NO: 34910488 NR Description: putative H+-transporting ATP synthase
  misc_feature (1)..(84): NCBI GI NO: 2493130 NR Description: Vacuolar ATP synthase subunit B isoform 2
  misc_feature (1)..(84): NCBI GI NO: 2493132 NR Description: Vacuolar ATP synthase subunit B isoform 2
  misc_feature (1)..(84): NCBI GI NO: 2493131 NR Description: Vacuolar ATP synthase subunit B isoform 1
  misc_feature (1)..(84): NCBI GI NO: 26986106 NR Description: vacuolar ATPase subunit B
  misc_feature (1)..(84): NCBI GI NO: 29424043 NR Description: vacuolar H(+)-ATPase subunit B
  misc_feature (1)..(84): NCBI GI NO: 11266665 NR Description: H+-transporting two-sector ATPase (EC 3
  misc_feature (1)..(84): NCBI GI NO: 15010616 NR Description: AT4g38510/F20M13_70 [Arabidopsis thaliana]
  misc_feature (1)..(84): NCBI GI NO: 15233891 NR Description: probable H+-transporting ATPase
AIGKDVQAMKAVVGEEALSSEDLLYLEFLDKFERKFVTQGAYDTRNIFQSLDLAWTLLRIFPRELLHRIPAKTLDQYYSRDASH

SEQ ID NO: 37343 - protein, 76 aa, Zea mays subsp. mays
  peptide (1)..(76): Ceres Seq. ID no. 13598826
  misc_feature (1)..(76): NCBI GI NO: 14150751 NR Description: vacuolar ATPase B subunit [Oryza sativa]
  misc_feature (1)..(76): NCBI GI NO: 34910488 NR Description: putative H+-transporting ATP synthase
  misc_feature (1)..(76): NCBI GI NO: 2493130 NR Description: Vacuolar ATP synthase subunit B isoform 2
  misc_feature (1)..(76): NCBI GI NO: 2493132 NR Description: Vacuolar ATP synthase subunit B isoform 2
  misc_feature (1)..(76): NCBI GI NO: 2493131 NR Description: Vacuolar ATP synthase subunit B isoform 1
  misc_feature (1)..(76): NCBI GI NO: 26986106 NR Description: vacuolar ATPase subunit B
  misc_feature (1)..(76): NCBI GI NO: 29424043 NR Description: vacuolar H(+)-ATPase subunit B
  misc_feature (1)..(76): NCBI GI NO: 11266665 NR Description: H+-transporting two-sector ATPase (EC 3
  misc_feature (1)..(76): NCBI GI NO: 15233891 NR Description: probable H+-transporting ATPase
  misc_feature (1)..(76): NCBI GI NO: 15010616 NR Description: AT4g38510/F20M13_70 [Arabidopsis thaliana]
MKAVVGEEALSSEDLLYLEFLDKFERKFVTQGAYDTRNIFQSLDLAWTLLRIFPRELLHRIPAKTLDQYYSRDASH

SEQ ID NO: 37344 - DNA, 758 bp, Zea mays subsp. mays
  misc_feature (1)..(758): Ceres Seq. ID no. 13493495
atcaaccctaaaccacccactatacccacccgcccggctagggttttgccaccatggccgccgccgcggccgccgcccggaggctcctctcccgccgcgcctcctcgaactcgctctccgcgttcctccgccgcggcgctgccccggagcagtcgctgctgcgcccggccgtcgtcgcggcggcctcccgcctcggcttcccgcgcgggatggcgcggcggcctggcggggacggctacggcgcgggccgggaccgcgcgcccacggagatggcgccgctgttccccggctgcgactacgagcactggctcatcgtgatggacaagcccggcggggagggcgccaccaagcagcagatgatcgactgctacatccagaccctcgccaaggtcctcggaagtgaggaggaggcgaagaagaagatctacaacgtctcgtgcgagcgctatttcgggttcgggtgcgagatcgatgaggagacatctaacaagctcgaggggctccctggtgttctctttgtgctaccggattcgtatgttgaccctgagtacaaggactacggagctgaactgcttgttaacggtgagattgttcagaggcctcctgagaggcagagaagggtcgagcccgtgccacagagggctgcagacaggcctaggtacaatgacaggacccgctacgcacgcaggagggagaaccagcgatgagatgaaaaaagtccacaataacaagttcaggtggtttgagctctgtaattc

SEQ ID NO: 37345 - protein, 217 aa, Zea mays subsp. mays
  peptide (1)..(217): Ceres Seq. ID no. 13493496
  misc_feature (2)..(217): NCBI GI NO: 34897972 NR Description: putative plastid protein
  misc_feature (1)..(216): NCBI GI NO: 38344141 NR Description: OSJNBa0041A02.8
  misc_feature (67)..(217): NCBI GI NO: 15226108 NR Description: plastid protein [Arabidopsis thaliana]
  misc_feature (67)..(217): NCBI GI NO: 25370552 NR Description: DAG protein homolog
  misc_feature (67)..(217): NCBI GI NO: 21617909 NR Description: plastid protein [Arabidopsis thaliana]
  misc_feature (67)..(217): NCBI GI NO: 2440029 NR Description: DAL1 protein [Arabidopsis thaliana]
  misc_feature (1)..(217): NCBI GI NO: 15223247 NR Description: plastid protein -related [Arabidopsis thaliana]
  misc_feature (67)..(217): NCBI GI NO: 15226934 NR Description: expressed protein [Arabidopsis thaliana]
  misc_feature (1)..(214): NCBI GI NO: 38636775 NR Description: putative DAG protein
  misc_feature (40)..(217): NCBI GI NO: 27754695 NR Description: putative DAG protein [Arabidopsis thaliana]
MAAAAAAARRLLSRRASSNSLSAFLRRGAAPEQSLLRPAVVAAASRLGFPRGMARRPGGDGYGAGRDRAPTEMAPLFPGCDYEHWLIVMDKPGGEGATKQQMIDCYIQTLAKVLGSEEEAKKKIYNVSCERYFGFGCEIDEETSNKLEGLPGVLFVLPDSYVDPEYKDYGAELLVNGEIVQRPPERQRRVEPVPQRAADRPRYNDRTRYARRRENQR

SEQ ID NO: 37346 - protein, 165 aa, Zea mays subsp. mays
  peptide (1)..(165): Ceres Seq. ID no. 13493497
  misc_feature (1)..(165): NCBI GI NO: 34897972 NR Description: putative plastid protein
  misc_feature (1)..(164): NCBI GI NO: 38344141 NR Description: OSJNBa0041A02.8
  misc_feature (15)..(165): NCBI GI NO: 15226108 NR Description: plastid protein [Arabidopsis thaliana]
  misc_feature (15)..(165): NCBI GI NO: 25370552 NR Description: DAG protein homolog
  misc_feature (15)..(165): NCBI GI NO: 21617909 NR Description: plastid protein [Arabidopsis thaliana]
  misc_feature (15)..(165): NCBI GI NO: 2440029 NR Description: DAL1 protein [Arabidopsis thaliana]
  misc_feature (1)..(165): NCBI GI NO: 15223247 NR Description: plastid protein -related [Arabidopsis thaliana]
  misc_feature (15)..(165): NCBI GI NO: 15226934 NR Description: expressed protein [Arabidopsis thaliana]
  misc_feature (1)..(162): NCBI GI NO: 38636775 NR Description: putative DAG protein
  misc_feature (1)..(165): NCBI GI NO: 27754695 NR Description: putative DAG protein [Arabidopsis thaliana]
MARRPGGDGYGAGRDRAPTEMAPLFPGCDYEHWLIVMDKPGGEGATKQQMIDCYIQTLAKVLGSEEEAKKKIYNVSCERYFGFGCEIDEETSNKLEGLPGVLFVLPDSYVDPEYKDYGAELLVNGEIVQRPPERQRRVEPVPQRAADRPRYNDRTRYARRRENQR

SEQ ID NO: 37347 - protein, 145 aa, Zea mays subsp. mays
  peptide (1)..(145): Ceres Seq. ID no. 13493498
  misc_feature (1)..(145): NCBI GI NO: 34897972 NR Description: putative plastid protein
  misc_feature (1)..(144): NCBI GI NO: 38344141 NR Description: OSJNBa0041A02.8
  misc_feature (1)..(145): NCBI GI NO: 15226108 NR Description: plastid protein [Arabidopsis thaliana]
  misc_feature (1)..(145): NCBI GI NO: 25370552 NR Description: DAG protein homolog
  misc_feature (1)..(145): NCBI GI NO: 21617909 NR Description: plastid protein [Arabidopsis thaliana]
  misc_feature (1)..(145): NCBI GI NO: 2440029 NR Description: DAL1 protein [Arabidopsis thaliana]
  misc_feature (1)..(145): NCBI GI NO: 15223247 NR Description: plastid protein -related [Arabidopsis thaliana]
  misc_feature (1)..(145): NCBI GI NO: 15226934 NR Description: expressed protein [Arabidopsis thaliana]
  misc_feature (1)..(142): NCBI GI NO: 38636775 NR Description: putative DAG protein
  misc_feature (1)..(145): NCBI GI NO: 27754695 NR Description: putative DAG protein [Arabidopsis thaliana]
MAPLFPGCDYEHWLIVMDKPGGEGATKQQMIDCYIQTLAKVLGSEEEAKKKIYNVSCERYFGFGCEIDEETSNKLEGLPGVLFVLPDSYVDPEYKDYGAELLVNGEIVQRPPERQRRVEPVPQRAADRPRYNDRTRYARRRENQR

SEQ ID NO: 37348 - DNA, 1973 bp, Zea mays subsp. mays
  misc_feature (1)..(1973): Ceres Seq. ID no. 12366695
acatatgagtatatgacatatccccactctagccaagtagccagtcctctctccactctcctctcgcaccaccaaaaaaaccggccccaccgttcgccatgagctccgaagcagaatgcgcagctccagccgccgccgcgccggatggggcgggcggcggcagggtggagatcgacacgtccgcgccgttcgagtccgtgcgggaggccgtcgaccggttcggtggcagcgccgtctggagctccgacctcgtcaggcgcatgttcgcgccctccaagaaacatgaacagtctgaccaagctgcagaggccatcaacgccgaggagcaggctgcacagctagagaacgagctggcagttaaagaaagggagactcttgatgtgctcaaggagctggaggcaaccaagaagatcatagcagacctgaaactgaagatacggaaggaagccactgaaacatcccctgaagaggctgctgaccaggtttctgaggcgggagctcaacagcagaaacctgaaaacaccaacattgatgtggtggtggacatggaaggtgtagaggagaaccattcaggttcggttccggtggatctcgagcaggcgaaggcaaacctgaacagagctacatgtgatctggctgcggtgcgggctgcagtcgagctactgcgaaacagcatagcgaaagagaaagtgttgcttgaaagagcccgagagaagctctcctctgatacttcgtcggtttcttctttggaggatgacctggatcagacagcgcaaaagatggaaacgctgaaggatctgcagaggagacgcaaagacccctcagatatttttgtagagatcaagaaaatgaccaccgaggtgcagcagctcaggagcatggcagacgattcgaaatctgaggcaatggtgttggctgcagaaatcgagcaggtaaaggccagcatttgcacggctgaggtcaggtgcattgcagccaggaagatggaagacgccgctagagcagcagaggccctcgcgctggccgagatcaaagcgctagtgagcagcggaagttctttcgaaggagacaccgcttccgatggaggaggggtaactctctcgatggaggagtatttcaagctgtgctcccgagctctggaagctgacgaaagctccaggaggaaagtggagaacgcaatgctgcaggtagacgcagctgacgattcagagtccgagtctgtcaagaggctcgaggatgccagagtggaggtcgaggagtgcaagaaggcgctgcaagaggccctgaggagggtagaggctgcaaaccatgggaagtttgcggtggaagagattcttcgtagatggaaatctgagagcgggcacaagaggcggtctcttggtggctccccaagattcaaaagggcggcagctcaccgtcgcgaagattcgcacgccacggatatgatctctgatgcttcagacagaccacccaaaccaacattgtcgatcgggcagatactgagcatgaagctaatgggacctgatgggtacgacaagagtgtttgggatgacaaaacaggcgagataccggagatctcgctcggtcagattataaacaggagtggtgttctgtgcagagaggatgtggctgctcgcagaagaatttcggggaagaggaagaagtttgcattgactgggctttctgttctcctggccaagcaatcgaagaacaagaagaagagagaatccttttaagctggtacaagtcgtcccacaaatatcagtgctgtactttatagtcttgtgatatgcagttgtagttcaaccttgtcattagtagctggttatatcgagatattttgtatgaggaatgaggtagtatattttagttcctcatgttaaatgtaccggtagcgattatttgctgctaattagagtagcgactggcagttctctgctatgtatgctgttgaggtctacgtaattggaccc

SEQ ID NO: 37349 - protein, 545 aa, Zea mays subsp. mays
  peptide (1)..(545): Ceres Seq. ID no. 12366696
  misc_feature (136)..(396): Pfam Name: DUF827 Pfam Description: Plant protein of unknown function
  misc_feature (11)..(543): NCBI GI NO: 33146426 NR Description: myosin heavy chain-like
  misc_feature (136)..(543): NCBI GI NO: 15224495 NR Description: hypothetical protein; protein id: At2g38370.1
  misc_feature (71)..(463): NCBI GI NO: 15234171 NR Description: putative protein; protein id: At4g33390.1
  misc_feature (63)..(429): NCBI GI NO: 15225334 NR Description: unknown protein; protein id: At2g26570.1
  misc_feature (19)..(206): NCBI GI NO: 4433618 NR Description: putative myosin heavy chain
  misc_feature (53)..(432): NCBI GI NO: 34906758 NR Description: putative paramyosin
  misc_feature (57)..(426): NCBI GI NO: 14029007 NR Description: Putative myosin heavy chain-like [Oryza sativa]
  misc_feature (1)..(431): NCBI GI NO: 15239100 NR Description: putative protein; protein id: At5g42880.1
  misc_feature (2)..(384): NCBI GI NO: 15224495 NR Description: hypothetical protein; protein id: At2g38370.1
  misc_feature (10)..(432): NCBI GI NO: 24431601 NR Description: Hypothetical protein
MSSEAECAAPAAAAPDGAGGGRVEIDTSAPFESVREAVDRFGGSAVWSSDLVRRMFAPSKKHEQSDQAAEAINAEEQAAQLENELAVKERETLDVLKELEATKKIIADLKLKIRKEATETSPEEAADQVSEAGAQQQKPENTNIDVVVDMEGVEENHSGSVPVDLEQAKANLNRATCDLAAVRAAVELLRNSIAKEKVLLERAREKLSSDTSSVSSLEDDLDQTAQKMETLKDLQRRRKDPSDIFVEIKKMTTEVQQLRSMADDSKSEAMVLAAEIEQVKASICTAEVRCIAARKMEDAARAAEALALAEIKALVSSGSSFEGDTASDGGGVTLSMEEYFKLCSRALEADESSRRKVENAMLQVDAADDSESESVKRLEDARVEVEECKKALQEALRRVEAANHGKFAVEEILRRWKSESGHKRRSLGGSPRFKRAAAHRREDSHATDMISDASDRPPKPTLSIGQILSMKLMGPDGYDKSVWDDKTGEIPEISLGQIINRSGVLCREDVAARRRISGKRKKFALTGLSVLLAKQSKNKKKRESF

SEQ ID NO: 37350 - protein, 491 aa, Zea mays subsp. mays
  peptide (1)..(491): Ceres Seq. ID no. 12366697
  misc_feature (82)..(342): Pfam Name: DUF827 Pfam Description: Plant protein of unknown function
  misc_feature (1)..(489): NCBI GI NO: 33146426 NR Description: myosin heavy chain-like
  misc_feature (82)..(489): NCBI GI NO: 15224495 NR Description: hypothetical protein; protein id: At2g38370.1
  misc_feature (17)..(409): NCBI GI NO: 15234171 NR Description: putative protein; protein id: At4g33390.1
  misc_feature (9)..(375): NCBI GI NO: 15225334 NR Description: unknown protein; protein id: At2g26570.1
  misc_feature (1)..(152): NCBI GI NO: 4433618 NR Description: putative myosin heavy chain
  misc_feature (1)..(378): NCBI GI NO: 34906758 NR Description: putative paramyosin
  misc_feature (3)..(372): NCBI GI NO: 14029007 NR Description: Putative myosin heavy chain-like [Oryza sativa]
  misc_feature (1)..(377): NCBI GI NO: 15239100 NR Description: putative protein; protein id: At5g42880.1
  misc_feature (1)..(330): NCBI GI NO: 15224495 NR Description: hypothetical protein; protein id: At2g38370.1
  misc_feature (1)..(378): NCBI GI NO: 24431601 NR Description: Hypothetical protein
MFAPSKKHEQSDQAAEAINAEEQAAQLENELAVKERETLDVLKELEATKKIIADLKLKIRKEATETSPEEAADQVSEAGAQQQKPENTNIDVVVDMEGVEENHSGSVPVDLEQAKANLNRATCDLAAVRAAVELLRNSIAKEKVLLERAREKLSSDTSSVSSLEDDLDQTAQKMETLKDLQRRRKDPSDIFVEIKKMTTEVQQLRSMADDSKSEAMVLAAEIEQVKASICTAEVRCIAARKMEDAARAAEALALAEIKALVSSGSSFEGDTASDGGGVTLSMEEYFKLCSRALEADESSRRKVENAMLQVDAADDSESESVKRLEDARVEVEECKKALQEALRRVEAANHGKFAVEEILRRWKSESGHKRRSLGGSPRFKRAAAHRREDSHATDMISDASDRPPKPTLSIGQILSMKLMGPDGYDKSVWDDKTGEIPEISLGQIINRSGVLCREDVAARRRISGKRKKFALTGLSVLLAKQSKNKKKRESF

SEQ ID NO: 37351 - protein, 396 aa, Zea mays subsp. mays
  peptide (1)..(396): Ceres Seq. ID no. 12366698
  misc_feature (1)..(247): Pfam Name: DUF827 Pfam Description: Plant protein of unknown function
  misc_feature (1)..(394): NCBI GI NO: 33146426 NR Description: myosin heavy chain-like
  misc_feature (1)..(394): NCBI GI NO: 15224495 NR Description: hypothetical protein; protein id: At2g38370.1
  misc_feature (1)..(314): NCBI GI NO: 15234171 NR Description: putative protein; protein id: At4g33390.1
  misc_feature (1)..(280): NCBI GI NO: 15225334 NR Description: unknown protein; protein id: At2g26570.1
  misc_feature (1)..(57): NCBI GI NO: 4433618 NR Description: putative myosin heavy chain
  misc_feature (1)..(283): NCBI GI NO: 34906758 NR Description: putative paramyosin
  misc_feature (1)..(277): NCBI GI NO: 14029007 NR Description: Putative myosin heavy chain-like [Oryza sativa]
  misc_feature (1)..(282): NCBI GI NO: 15239100 NR Description: putative protein; protein id: At5g42880.1
  misc_feature (1)..(235): NCBI GI NO: 15224495 NR Description: hypothetical protein; protein id: At2g38370.1
  misc_feature (1)..(283): NCBI GI NO: 24431601 NR Description: Hypothetical protein
MEGVEENHSGSVPVDLEQAKANLNRATCDLAAVRAAVELLRNSIAKEKVLLERAREKLSSDTSSVSSLEDDLDQTAQKMETLKDLQRRRKDPSDIFVEIKKMTTEVQQLRSMADDSKSEAMVLAAEIEQVKASICTAEVRCIAARKMEDAARAAEALALAEIKALVSSGSSFEGDTASDGGGVTLSMEEYFKLCSRALEADESSRRKVENAMLQVDAADDSESESVKRLEDARVEVEECKKALQEALRRVEAANHGKFAVEEILRRWKSESGHKRRSLGGSPRFKRAAAHRREDSHATDMISDASDRPPKPTLSIGQILSMKLMGPDGYDKSVWDDKTGEIPEISLGQIINRSGVLCREDVAARRRISGKRKKFALTGLSVLLAKQSKNKKKRESF

SEQ ID NO: 37352 - DNA, 1601 bp, Zea mays subsp. mays
  misc_feature (1)..(1601): Ceres Seq. ID no. 12373088
cacaacacaacacccctccctttccaggattctcctctcctccaaaagatcggtggcgggtcacgggtgagacgagaaggaaagaagctgacaaaggcgagaagggatagagagaggagagaaagggaaggtagaaactggacagaaagtttctccccgctagaagtagctcggcggtgagggagcgagagacctgccgcctacccttgccccaccgtttttttcataccgtctcgccggaatcctgctttattttcccggccagtccaccgccttctcgggctaccacgctgatccggcgtcgtctgcggtccttccgaccaactcttcaatcttgtgaattgcttttcgcccagttagggcagatcaccattccttgcaggagttcgttgccgtctctccaatcctccctggctcgactgctcagtggtgactgatgtggtccactgccctgccctgcacctgcaagttagtttcactcgtgatccgtcagcttgccacccagcaaccgctgattatcagaaatccacttctcaaagcttcaaggagcatccttcgaacaagttcctgattccttcgcctcccgccctccccgtttcttctctggcatccttgtccgttgaccacagagggaagaaatctgttccgggcaggcaggcgcattctccgccacaatggacgatggagctgacctcccctgccagttgctcttctcccacccggagatgcctcacagcttcgacgagttcttcagcagcgccacgaccacgaccacctgcacccacacgcacagctgcgaccctccgggcccctcggccgccatgcatacccacacgtgcctgcacacgcacacccaggtcctgggcagcggcggggaggacgacggctcagcgaagccgcggaggcccctgggaaacagggaagccgtgcgcaagtaccgcgagaagaagaaggcgcgcgcggccttcctggaaggggaggtcaagaagctgcgcgccgccaaccagcagctcgtgcggcggctgcaagaccacgcggctctggaggcggaggtggcgaggctcaggggcctcctgctcgacgtccggggcaggatcgacgccgaggtcggcgtgtccccgtttcagaggccatgcagcgcgggctctgtggagtgcggcgctgatccagctctgcgcttcgatggcagctcggaggtagtaggaggtggtggctgggagaagagctcaagccctcaagttgcggactgcaggatcgatgaagggggaggagggatgtcacgggaacttgatgttctagaagtttcggggcctctgccagcttctttgggctttgctttaaagataaattaaattattcatggatttaggagaatgaggaaccgacagtgagtagaactatcttcgcatcgctgtggtttatgtttcttatgctggtgttcagtgtgtatatatagggtacagaatactttcatatgagcactgaagaaatcgaaattgacaatgtttcatgcgaaattgtactgcgggtatgtaaatgaagtgcgcctgacttctgacttgtagcctgtttgtgcttagctgaaatattattaagctatt

SEQ ID NO: 37353 - protein, 225 aa, Zea mays subsp. mays
  peptide (1)..(225): Ceres Seq. ID no. 12373089
  misc_feature (74)..(136): Pfam Name: Pfam Description:  bZIP transcription factor
  misc_feature (1)..(153): NCBI GI NO: 25370607 NR Description: hypothetical protein At2g16770
  misc_feature (1)..(153): NCBI GI NO: 30679757 NR Description: bZIP protein [Arabidopsis thaliana]
  misc_feature (21)..(156): NCBI GI NO: 7486791 NR Description: hypothetical protein M4E13
  misc_feature (21)..(156): NCBI GI NO: 18418563 NR Description: bZIP protein; protein id: At4g35040
  misc_feature (21)..(156): NCBI GI NO: 21554283 NR Description: putative transcription factor
  misc_feature (64)..(207): NCBI GI NO: 34908964 NR Description: P0003D09.19
  misc_feature (16)..(153): NCBI GI NO: 18855044 NR Description: putative transcription factor [Oryza sativa]
  misc_feature (32)..(158): NCBI GI NO: 30693560 NR Description: bZIP family transcription factor
  misc_feature (32)..(158): NCBI GI NO: 11357780 NR Description: hypothetical protein F4F15
  misc_feature (32)..(158): NCBI GI NO: 30693563 NR Description: bZIP family transcription factor
MDDGADLPCQLLFSHPEMPHSFDEFFSSATTTTTCTHTHSCDPPGPSAAMHTHTCLHTHTQVLGSGGEDDGSAKPRRPLGNREAVRKYREKKKARAAFLEGEVKKLRAANQQLVRRLQDHAALEAEVARLRGLLLDVRGRIDAEVGVSPFQRPCSAGSVECGADPALRFDGSSEVVGGGGWEKSSSPQVADCRIDEGGGGMSRELDVLEVSGPLPASLGFALKIN

SEQ ID NO: 37354 - protein, 208 aa, Zea mays subsp. mays
  peptide (1)..(208): Ceres Seq. ID no. 12373090
  misc_feature (57)..(119): Pfam Name: Pfam Description:  bZIP transcription factor
  misc_feature (1)..(136): NCBI GI NO: 25370607 NR Description: hypothetical protein At2g16770
  misc_feature (1)..(136): NCBI GI NO: 30679757 NR Description: bZIP protein [Arabidopsis thaliana]
  misc_feature (4)..(139): NCBI GI NO: 7486791 NR Description: hypothetical protein M4E13
  misc_feature (4)..(139): NCBI GI NO: 18418563 NR Description: bZIP protein; protein id: At4g35040
  misc_feature (4)..(139): NCBI GI NO: 21554283 NR Description: putative transcription factor
  misc_feature (47)..(190): NCBI GI NO: 34908964 NR Description: P0003D09.19
  misc_feature (1)..(136): NCBI GI NO: 18855044 NR Description: putative transcription factor [Oryza sativa]
  misc_feature (15)..(141): NCBI GI NO: 30693560 NR Description: bZIP family transcription factor
  misc_feature (15)..(141): NCBI GI NO: 11357780 NR Description: hypothetical protein F4F15
  misc_feature (15)..(141): NCBI GI NO: 30693563 NR Description: bZIP family transcription factor
MPHSFDEFFSSATTTTTCTHTHSCDPPGPSAAMHTHTCLHTHTQVLGSGGEDDGSAKPRRPLGNREAVRKYREKKKARAAFLEGEVKKLRAANQQLVRRLQDHAALEAEVARLRGLLLDVRGRIDAEVGVSPFQRPCSAGSVECGADPALRFDGSSEVVGGGGWEKSSSPQVADCRIDEGGGGMSRELDVLEVSGPLPASLGFALKIN

SEQ ID NO: 37355 - protein, 176 aa, Zea mays subsp. mays
  peptide (1)..(176): Ceres Seq. ID no. 12373091
  misc_feature (25)..(87): Pfam Name: Pfam Description:  bZIP transcription factor
  misc_feature (1)..(104): NCBI GI NO: 25370607 NR Description: hypothetical protein At2g16770
  misc_feature (1)..(104): NCBI GI NO: 30679757 NR Description: bZIP protein [Arabidopsis thaliana]
  misc_feature (1)..(107): NCBI GI NO: 7486791 NR Description: hypothetical protein M4E13
  misc_feature (1)..(107): NCBI GI NO: 18418563 NR Description: bZIP protein; protein id: At4g35040
  misc_feature (1)..(107): NCBI GI NO: 21554283 NR Description: putative transcription factor
  misc_feature (15)..(158): NCBI GI NO: 34908964 NR Description: P0003D09.19
  misc_feature (1)..(104): NCBI GI NO: 18855044 NR Description: putative transcription factor [Oryza sativa]
  misc_feature (1)..(109): NCBI GI NO: 30693560 NR Description: bZIP family transcription factor
  misc_feature (1)..(109): NCBI GI NO: 11357780 NR Description: hypothetical protein F4F15
  misc_feature (1)..(109): NCBI GI NO: 30693563 NR Description: bZIP family transcription factor
MHTHTCLHTHTQVLGSGGEDDGSAKPRRPLGNREAVRKYREKKKARAAFLEGEVKKLRAANQQLVRRLQDHAALEAEVARLRGLLLDVRGRIDAEVGVSPFQRPCSAGSVECGADPALRFDGSSEVVGGGGWEKSSSPQVADCRIDEGGGGMSRELDVLEVSGPLPASLGFALKIN

SEQ ID NO: 37356 - DNA, 1418 bp, Zea mays subsp. mays; identical to SEQ ID NO: 27506
  misc_feature (1)..(1418): Ceres Seq. ID no. 13564606

SEQ ID NO: 37357 - protein, 321 aa, Zea mays subsp. mays; identical to SEQ ID NO: 27507
  peptide (1)..(321): Ceres Seq. ID no. 15222577
  misc_feature (160)..(314): Pfam Name: Pfam Description:  CDP-alcohol phosphatidyltransferase
  misc_feature (1)..(321): NCBI GI NO: 24796824 NR Description: putative phosphatidylglycerolphosphate synthase
  misc_feature (119)..(321): NCBI GI NO: 15225064 NR Description: phosphatidylglycerolphosphate synthase (PGS1)
  misc_feature (101)..(321): NCBI GI NO: 15233163 NR Description: phosphatidylglycerolphosphate synthase
  misc_feature (127)..(316): NCBI GI NO: 23061902 NR Description: hypothetical protein
  misc_feature (127)..(316): NCBI GI NO: 23472904 NR Description: hypothetical protein
  misc_feature (127)..(316): NCBI GI NO: 27753591 NR Description: CDP-diacylglycerol-glycerol-3-phosphate
  misc_feature (127)..(316): NCBI GI NO: 28870198 NR Description: CDP-diacylglycerol --glycerol-3-phosphate 3-phosphatidyltransferase
  misc_feature (127)..(316): NCBI GI NO: 26990792 NR Description: CDP-diacylglycerol --glycerol-3-phosphate 3-phosphatidyltransferase
  misc_feature (127)..(316): NCBI GI NO: 23104171 NR Description: hypothetical protein [Azotobacter vinelandii]
  misc_feature (127)..(316): NCBI GI NO: 15597780 NR Description: CDP-diacylglycerol --glycerol-3-phosphate 3-phosphatidyltransferase
  misc_feature (23)..(23): Xaa is any aa, unknown or other

SEQ ID NO: 37358 - protein, 239 aa, Zea mays subsp. mays; identical to SEQ ID NO: 27508
  peptide (1)..(239): Ceres Seq. ID no. 15222578
  misc_feature (78)..(232): Pfam Name: Pfam Description:  CDP-alcohol phosphatidyltransferase
  misc_feature (1)..(239): NCBI GI NO: 24796824 NR Description: putative phosphatidylglycerolphosphate synthase
  misc_feature (37)..(239): NCBI GI NO: 15225064 NR Description: phosphatidylglycerolphosphate synthase (PGS1)
  misc_feature (19)..(239): NCBI GI NO: 15233163 NR Description: phosphatidylglycerolphosphate synthase
  misc_feature (45)..(234): NCBI GI NO: 23061902 NR Description: hypothetical protein
  misc_feature (45)..(234): NCBI GI NO: 23472904 NR Description: hypothetical protein
  misc_feature (45)..(234): NCBI GI NO: 27753591 NR Description: CDP-diacylglycerol-glycerol-3-phosphate
  misc_feature (45)..(234): NCBI GI NO: 28870198 NR Description: CDP-diacylglycerol --glycerol-3-phosphate 3-phosphatidyltransferase
  misc_feature (45)..(234): NCBI GI NO: 26990792 NR Description: CDP-diacylglycerol --glycerol-3-phosphate 3-phosphatidyltransferase
  misc_feature (45)..(234): NCBI GI NO: 23104171 NR Description: hypothetical protein [Azotobacter vinelandii]
  misc_feature (45)..(234): NCBI GI NO: 15597780 NR Description: CDP-diacylglycerol --glycerol-3-phosphate 3-phosphatidyltransferase

SEQ ID NO: 37359 - protein, 210 aa, Zea mays subsp. mays; identical to SEQ ID NO: 27509
  peptide (1)..(210): Ceres Seq. ID no. 15222579
  misc_feature (49)..(203): Pfam Name: Pfam Description:  CDP-alcohol phosphatidyltransferase
  misc_feature (1)..(210): NCBI GI NO: 24796824 NR Description: putative phosphatidylglycerolphosphate synthase
  misc_feature (8)..(210): NCBI GI NO: 15225064 NR Description: phosphatidylglycerolphosphate synthase (PGS1)
  misc_feature (1)..(210): NCBI GI NO: 15233163 NR Description: phosphatidylglycerolphosphate synthase
  misc_feature (16)..(205): NCBI GI NO: 23061902 NR Description: hypothetical protein
  misc_feature (16)..(205): NCBI GI NO: 23472904 NR Description: hypothetical protein
  misc_feature (16)..(205): NCBI GI NO: 27753591 NR Description: CDP-diacylglycerol-glycerol-3-phosphate
  misc_feature (16)..(205): NCBI GI NO: 28870198 NR Description: CDP-diacylglycerol --glycerol-3-phosphate 3-phosphatidyltransferase
  misc_feature (16)..(205): NCBI GI NO: 26990792 NR Description: CDP-diacylglycerol --glycerol-3-phosphate 3-phosphatidyltransferase
  misc_feature (16)..(205): NCBI GI NO: 23104171 NR Description: hypothetical protein [Azotobacter vinelandii]
  misc_feature (16)..(205): NCBI GI NO: 15597780 NR Description: CDP-diacylglycerol --glycerol-3-phosphate 3-phosphatidyltransferase

SEQ ID NO: 37360 - DNA, 1423 bp, Zea mays subsp. mays
  misc_feature (1)..(1423): Ceres Seq. ID no. 12407049
agaccaagcggcacgcacaagcgcagagccacggtgagcagagaagaaacgcatccacagaagggacaaacgtccggagcggattccacattccagtctcggtctcggtccatgggcgcgggaaagggaggagacggcggcgaggcggcgcccgaggccgcgcaggcgcagcccgtcgtgctgaagatgaacctgcattgcgccggctgcgcgcacaaggtcaagaaggccatcaagcgcgtccccggtgtggactccatcgtcacagacgtcgcggcgaacaaggtcgttgtggcggggacggccgacgcgggcgcgctcaagacgcggctcgaggccaagaccaacaagcccgtggagatcgtctccgccggcggtgcccccaggaagcctcccgccgcggagcccaagcaggacgccggcgacggcgagaagcagggggtcaaaggcgcgagccccaacgaggaggagaaagagaaagagaaggggaagaagcaacaggcggaggagaaagagaaagagaaggggaagaagcagcaggtggagtcggtgctgctcaagatccgcctgcactgcgacggctgcgcctaccgcatcaggcaacgcatcggcaagatcaaaggcgtcaaggatgtggtgctggaggccaatgccaaggacgaggtggaggtcacgggcaccatggacataccgaacatggtctcctacctcaaggagaagctcaaccgcgacgtggaggccgtggtgctgcccgtcaggaaagacggcggcggcggcggcgagggcgagggcgagggcaaggacgacaagaagcacagcggcggcggcggcggcaaggacaaggtcgcggccggggcagccggcgacgacaggatgaacaagggcaaagggatcgaggcgtcggcggccggtccgtcaacggcggccgccgcggcgtacatgtctgcgccggcgggggcgagcacgtaccacgtggctccgccgcacgggtacgtggcgtatgagcaggccccgcctcctgccagctactatccctacccgtactacggctacggcagtggcgatggcatgggccacgccaacccctcctactaccagcagcagccgcagccgcagcccgacgggaaccagcagccgcaggtggcgtacccgccatacccgtaccaattcgacatggcgccggcgccgcagctcttcagcgacgagaaccccaacgcttgctccgtgatgtgacgccgccgccggtgcgtgtccttgttgcgttccgtcggcgagctcactgatccgccgtcagctttaaccttagccatccgggcatccggccgagaaagaactcgacctgtacatatcgtcaatgaggaatcagccttagtccagagccctaggattatattttcctgatgaaattttgcttcatttgttt

SEQ ID NO: 37361 - protein, 410 aa, Zea mays subsp. mays
  peptide (1)..(410): Ceres Seq. ID no. 12407050
  misc_feature (343)..(396): Pfam Name: Pfam Description:  High molecular weight glutenin subunit
  misc_feature (26)..(347): NCBI GI NO: 37534752 NR Description: putative metal-binding protein
  misc_feature (47)..(410): NCBI GI NO: 15242741 NR Description: expressed protein; protein id: At5g03380
  misc_feature (107)..(304): NCBI GI NO: 27529838 NR Description: hypothetical protein [Nicotiana tabacum]
  misc_feature (366)..(410): NCBI GI NO: 27529838 NR Description: hypothetical protein [Nicotiana tabacum]
  misc_feature (153)..(345): NCBI GI NO: 9758294 NR Description: contains similarity to ATFP3~gene_id:MLE2.16
  misc_feature (23)..(149): NCBI GI NO: 9758294 NR Description: contains similarity to ATFP3~gene_id:MLE2.16
  misc_feature (377)..(410): NCBI GI NO: 9758294 NR Description: contains similarity to ATFP3~gene_id:MLE2.16
  misc_feature (153)..(345): NCBI GI NO: 18424719 NR Description: copper chaperone
  misc_feature (23)..(149): NCBI GI NO: 18424719 NR Description: copper chaperone
  misc_feature (377)..(410): NCBI GI NO: 18424719 NR Description: copper chaperone
RPSGTHKRRATVSREETHPQKGQTSGADSTFQSRSRSMGAGKGGDGGEAAPEAAQAQPVVLKMNLHCAGCAHKVKKAIKRVPGVDSIVTDVAANKVVVAGTADAGALKTRLEAKTNKPVEIVSAGGAPRKPPAAEPKQDAGDGEKQGVKGASPNEEEKEKEKGKKQQAEEKEKEKGKKQQVESVLLKIRLHCDGCAYRIRQRIGKIKGVKDVVLEANAKDEVEVTGTMDIPNMVSYLKEKLNRDVEAVVLPVRKDGGGGGEGEGEGKDDKKHSGGGGGKDKVAAGAAGDDRMNKGKGIEASAAGPSTAAAAAYMSAPAGASTYHVAPPHGYVAYEQAPPPASYYPYPYYGYGSGDGMGHANPSYYQQQPQPQPDGNQQPQVAYPPYPYQFDMAPAPQLFSDENPNACSVM

SEQ ID NO: 37362 - protein, 373 aa, Zea mays subsp. mays
  peptide (1)..(373): Ceres Seq. ID no. 12407051
  misc_feature (306)..(359): Pfam Name: Pfam Description:  High molecular weight glutenin subunit
  misc_feature (1)..(310): NCBI GI NO: 37534752 NR Description: putative metal-binding protein
  misc_feature (10)..(373): NCBI GI NO: 15242741 NR Description: expressed protein; protein id: At5g03380
  misc_feature (70)..(267): NCBI GI NO: 27529838 NR Description: hypothetical protein [Nicotiana tabacum]
  misc_feature (329)..(373): NCBI GI NO: 27529838 NR Description: hypothetical protein [Nicotiana tabacum]
  misc_feature (116)..(308): NCBI GI NO: 9758294 NR Description: contains similarity to ATFP3~gene_id:MLE2.16
  misc_feature (1)..(112): NCBI GI NO: 9758294 NR Description: contains similarity to ATFP3~gene_id:MLE2.16
  misc_feature (340)..(373): NCBI GI NO: 9758294 NR Description: contains similarity to ATFP3~gene_id:MLE2.16
  misc_feature (116)..(308): NCBI GI NO: 18424719 NR Description: copper chaperone
  misc_feature (1)..(112): NCBI GI NO: 18424719 NR Description: copper chaperone
  misc_feature (340)..(373): NCBI GI NO: 18424719 NR Description: copper chaperone
MGAGKGGDGGEAAPEAAQAQPVVLKMNLHCAGCAHKVKKAIKRVPGVDSIVTDVAANKVVVAGTADAGALKTRLEAKTNKPVEIVSAGGAPRKPPAAEPKQDAGDGEKQGVKGASPNEEEKEKEKGKKQQAEEKEKEKGKKQQVESVLLKIRLHCDGCAYRIRQRIGKIKGVKDVVLEANAKDEVEVTGTMDIPNMVSYLKEKLNRDVEAVVLPVRKDGGGGGEGEGEGKDDKKHSGGGGGKDKVAAGAAGDDRMNKGKGIEASAAGPSTAAAAAYMSAPAGASTYHVAPPHGYVAYEQAPPPASYYPYPYYGYGSGDGMGHANPSYYQQQPQPQPDGNQQPQVAYPPYPYQFDMAPAPQLFSDENPNACSVM

SEQ ID NO: 37363 - protein, 348 aa, Zea mays subsp. mays
  peptide (1)..(348): Ceres Seq. ID no. 12407052
  misc_feature (281)..(334): Pfam Name: Pfam Description:  High molecular weight glutenin subunit
  misc_feature (1)..(285): NCBI GI NO: 37534752 NR Description: putative metal-binding protein
  misc_feature (1)..(348): NCBI GI NO: 15242741 NR Description: expressed protein; protein id: At5g03380
  misc_feature (45)..(242): NCBI GI NO: 27529838 NR Description: hypothetical protein [Nicotiana tabacum]
  misc_feature (304)..(348): NCBI GI NO: 27529838 NR Description: hypothetical protein [Nicotiana tabacum]
  misc_feature (91)..(283): NCBI GI NO: 9758294 NR Description: contains similarity to ATFP3~gene_id:MLE2.16
  misc_feature (1)..(87): NCBI GI NO: 9758294 NR Description: contains similarity to ATFP3~gene_id:MLE2.16
  misc_feature (315)..(348): NCBI GI NO: 9758294 NR Description: contains similarity to ATFP3~gene_id:MLE2.16
  misc_feature (91)..(283): NCBI GI NO: 18424719 NR Description: copper chaperone
  misc_feature (1)..(87): NCBI GI NO: 18424719 NR Description: copper chaperone
  misc_feature (315)..(348): NCBI GI NO: 18424719 NR Description: copper chaperone
MNLHCAGCAHKVKKAIKRVPGVDSIVTDVAANKVVVAGTADAGALKTRLEAKTNKPVEIVSAGGAPRKPPAAEPKQDAGDGEKQGVKGASPNEEEKEKEKGKKQQAEEKEKEKGKKQQVESVLLKIRLHCDGCAYRIRQRIGKIKGVKDVVLEANAKDEVEVTGTMDIPNMVSYLKEKLNRDVEAVVLPVRKDGGGGGEGEGEGKDDKKHSGGGGGKDKVAAGAAGDDRMNKGKGIEASAAGPSTAAAAAYMSAPAGASTYHVAPPHGYVAYEQAPPPASYYPYPYYGYGSGDGMGHANPSYYQQQPQPQPDGNQQPQVAYPPYPYQFDMAPAPQLFSDENPNACSVM

SEQ ID NO: 37364 - DNA, 1517 bp, Zea mays subsp. mays
  misc_feature (1)..(1517): Ceres Seq. ID no. 12350177
attcgttcactctctcgtacgcatcctcattctatattgtggatgggcgtcgtcgaaccgtgccgcatcgcacgatcgccctcccgtcaagctacaccatgccccatcccgccacattgtcccatcggcctcctgtcccgctgcccacgacactagtctcttgtctcgtcgtgctgcctcctcaacgctttgttaacattagagattgaaaggtagcatcgtagcaaaatgaaggcaccatcactactggttcagtgtttccctggcttgcttcccagcaaggccactagttgcgtgccaattgtatctgagaaggatctgcagctaccatcaccagctgttgaaataatcccctcaaagagtgttcatccatacaaatatgctggagagaaggttgatgtgcaaggtcttaatattttcaagggtaaagtcagtgtagcagatatgatagttatctcaccttctgaagtagcatcatcaaaatatgatggaactccgaaatactgggagagttccattacccttgtcgacattcttaaaaatgagatccgtgatggccagttgagcttcaggggcaagcgggttctagagcttggatgtggatatggcctctctgggatttttgcctgcttgaagggtgcatccacagttcactttcaggacataaatgcagaaacgatacggtgcagaacaatacccaatgttcttgcaaatcttgagcaggctcaggaccgacagaacagaccatcagagagccctgttacaccatctaggcagctcttggctcctaatgtacatttctatgctggagagtgggatgaactcccaacaattctctcagttgtgcagccacctgcagcaccaacaaacctcagcttctctgaggatgattttatggatggctgcagtagccatgatggaagcagtgtagttggtcatgactactgccccaggagatctaggaagctttctggtagccgtgcatgggagagagctagtgagaccgaccaggcagatagtggctatgatgtgatcttgatttctgatgtcccctacgcagctaactctctgaagaagctctatgcgcttatttcaaagtgcctacgtcctccttatggagtcctgtacgtcgcttccaagaagaacttggttggttccaatggtggcgccaggcagcttcgagctctcatggaagaggaaggtgtccttggtggccacttcttgactgaggtgtgtgacagggagatatggaagttctttttcaagtgagcaaatataggaagtgggaagagaaggaaatgagttctgacgttgaaacccagtttttatggtttctatatgcagcgatgtacataccgcgaggcatagttccattaattctttggtagtaggttgaaacttcaagaaatatctgcagttgagcttgcacaagtgttggaatcctttaccgctttgtagatctgctatgtgctaatgtcgctctattaagtacagaaagcaaattgtggtaacgtttt

SEQ ID NO: 37365 - protein, 346 aa, Zea mays subsp. mays
  peptide (1)..(346): Ceres Seq. ID no. 12350178
  misc_feature (1)..(346): NCBI GI NO: 38346224 NR Description: OJ990528_30.4
  misc_feature (1)..(346): NCBI GI NO: 18406207 NR Description: expressed protein; protein id: At2g43320
  misc_feature (1)..(346): NCBI GI NO: 16226903 NR Description: At2g43320/T1O24.6 [Arabidopsis thaliana]
  misc_feature (1)..(294): NCBI GI NO: 25408858 NR Description: hypothetical protein At2g43320
  misc_feature (290)..(346): NCBI GI NO: 25408858 NR Description: hypothetical protein At2g43320
  misc_feature (28)..(206): NCBI GI NO: 21554662 NR Description: unknown [Arabidopsis thaliana]
  misc_feature (258)..(346): NCBI GI NO: 21554662 NR Description: unknown [Arabidopsis thaliana]
  misc_feature (27)..(206): NCBI GI NO: 18414120 NR Description: expressed protein; protein id: At4g14000
  misc_feature (258)..(346): NCBI GI NO: 18414120 NR Description: expressed protein; protein id: At4g14000
  misc_feature (27)..(150): NCBI GI NO: 7485012 NR Description: hypothetical protein - Arabidopsis thaliana
MKAPSLLVQCFPGLLPSKATSCVPIVSEKDLQLPSPAVEIIPSKSVHPYKYAGEKVDVQGLNIFKGKVSVADMIVISPSEVASSKYDGTPKYWESSITLVDILKNEIRDGQLSFRGKRVLELGCGYGLSGIFACLKGASTVHFQDINAETIRCRTIPNVLANLEQAQDRQNRPSESPVTPSRQLLAPNVHFYAGEWDELPTILSVVQPPAAPTNLSFSEDDFMDGCSSHDGSSVVGHDYCPRRSRKLSGSRAWERASETDQADSGYDVILISDVPYAANSLKKLYALISKCLRPPYGVLYVASKKNLVGSNGGARQLRALMEEEGVLGGHFLTEVCDREIWKFFFK

SEQ ID NO: 37366 - protein, 274 aa, Zea mays subsp. mays
  peptide (1)..(274): Ceres Seq. ID no. 12350179
  misc_feature (1)..(274): NCBI GI NO: 38346224 NR Description: OJ990528_30.4
  misc_feature (1)..(274): NCBI GI NO: 18406207 NR Description: expressed protein; protein id: At2g43320
  misc_feature (1)..(274): NCBI GI NO: 16226903 NR Description: At2g43320/T1O24.6 [Arabidopsis thaliana]
  misc_feature (1)..(222): NCBI GI NO: 25408858 NR Description: hypothetical protein At2g43320
  misc_feature (218)..(274): NCBI GI NO: 25408858 NR Description: hypothetical protein At2g43320
  misc_feature (1)..(134): NCBI GI NO: 21554662 NR Description: unknown [Arabidopsis thaliana]
  misc_feature (186)..(274): NCBI GI NO: 21554662 NR Description: unknown [Arabidopsis thaliana]
  misc_feature (1)..(134): NCBI GI NO: 18414120 NR Description: expressed protein; protein id: At4g14000
  misc_feature (186)..(274): NCBI GI NO: 18414120 NR Description: expressed protein; protein id: At4g14000
  misc_feature (1)..(78): NCBI GI NO: 7485012 NR Description: hypothetical protein - Arabidopsis thaliana
MIVISPSEVASSKYDGTPKYWESSITLVDILKNEIRDGQLSFRGKRVLELGCGYGLSGIFACLKGASTVHFQDINAETIRCRTIPNVLANLEQAQDRQNRPSESPVTPSRQLLAPNVHFYAGEWDELPTILSVVQPPAAPTNLSFSEDDFMDGCSSHDGSSVVGHDYCPRRSRKLSGSRAWERASETDQADSGYDVILISDVPYAANSLKKLYALISKCLRPPYGVLYVASKKNLVGSNGGARQLRALMEEEGVLGGHFLTEVCDREIWKFFFK

SEQ ID NO: 37367 - DNA, 1874 bp, Zea mays subsp. mays
  misc_feature (1)..(1874): Ceres Seq. ID no. 12360030
aaccccaccagaccttcaaccgctacatttccgtcactaccggagccgccactccgacgaacgcgggcggcggagcggaagcgaaccagagcaccggtaaaaagaaaaggatgaggcttgggagtataaacggcttgcggttcacgcagcttaaacttgtcatccttgcgttcttcatgttgtttgttctctggaaatgggagaagggctcgtcatactacgattccgaaatcctccagccagatccgttggttctgactcatccagctaactcgaagtttgtagaccagcatacatccccagaagaagactttccaagtgcagatcgatcacaccggtcagtaggtaaagtagaaaagccggttactagtgcgctgccaccattgtctacgataggctattctgttgatgttgcagatgggaatgaagtgccacctcctgagaagaaagaatgcgagtacaggaatgggaagtgggtttctgacaatcgtagaccactatactcagggtttggttgtaagcaatggctttcagagagttggtcctgcagactaacccagcgaaaagatttcgcgtatgaaaaattcagatggcagcctgaagcttgtgagatgccagagtttgaggcctcccacttcttgagaagaatgcaggataaaaccatcgcttacgtgggcgattctctagggaggcagatgtttcagtcgatgatgtgtatggtcactggtggaaaggagaggctggatgtagaagatattggcgcagagtatggctttgtgttagcgccgggtgcaaaaaggccagacggctgggcctaccggttcccgagcaccaacacaacaattctataccactggtcatcaacgctctgtgatttggagcccctgaacccatcagaccgagcgaccagttattccatgcacctggaccgcccgcctgcttttctgaagagcaacctccacaggctccatgtcctggtcctcaacaccggccaccactggaaccgggggaagctgagggcgaacaggtgggagatgtatctcggcggagcgccgaacaacgacaggaacaccgccgtcatttggaaggccaagaacttcaccgtccacaacgtcgtcaggtgggtggacgcgcagctcccccgccaccccaagctgaaggcgttctacaggtcgatatcgccccggcacttcttcaacggtgactgggacaccggaggcagctgcgacaacaccagccctctggccaagggagggagcggcgtccacctcgaccgttcggaggacgccgacgccgagggcgccgtgaggggcaccggggtcaggctcctggacgtcactgccctatcgcggctgagggacgaagggcatatttcgcggtacagcatcaaggccacttctggcgttcaggattgcctgcactggtgccttcccggcgtgcctgacacctggaacgagatccttgcggcccagctatagcctgtagctgaatttgaagatgccaagggctacatcgaattgtttatgggtgaagctcgtatatacagtaactaccacggagtactacgtcgttgccggagacccaatgctgctggtagtgaaacactgagctgcagtacattctttagggaccgtgcttaactgtagaaaatacagggcctttttttgtgtaagtacatgttgtgtttgcctactattacctatgtacgccagttgttaattggagaactggattgatagatagtttggaagtgttgcctgagaggtagggcaacgtatcttgcagcatccagtcctttgagaactcatctgttatgtaccaaacacgaacagagagcatcatgcattgctgatccatgtgatgtggttgttggt

SEQ ID NO: 37368 - protein, 491 aa, Zea mays subsp. mays
  peptide (1)..(491): Ceres Seq. ID no. 12360031
  misc_feature (333)..(491): Pfam Name: Pfam Description:  Arabidopsis proteins of unknown function
  misc_feature (98)..(491): NCBI GI NO: 15810385 NR Description: unknown protein [Arabidopsis thaliana]
  misc_feature (98)..(491): NCBI GI NO: 18420285 NR Description: putative protein; protein id: At5g20680
  misc_feature (147)..(491): NCBI GI NO: 8777315 NR Description: gene_id:MBM17
  misc_feature (151)..(491): NCBI GI NO: 30697938 NR Description: expressed protein [Arabidopsis thaliana]
  misc_feature (147)..(491): NCBI GI NO: 15224349 NR Description: unknown protein; protein id: At2g37720.1
  misc_feature (149)..(491): NCBI GI NO: 9759321 NR Description: gb|AAF00670
  misc_feature (149)..(491): NCBI GI NO: 18415139 NR Description: putative protein; protein id: At5g06230
  misc_feature (151)..(489): NCBI GI NO: 6862912 NR Description: unknown protein [Arabidopsis thaliana]
  misc_feature (151)..(491): NCBI GI NO: 15229797 NR Description: hypothetical protein; protein id: At3g11570.1
  misc_feature (151)..(489): NCBI GI NO: 15239660 NR Description: putative protein; protein id: At5g19160.1
PHQTFNRYISVTTGAATPTNAGGGAEANQSTGKKKRMRLGSINGLRFTQLKLVILAFFMLFVLWKWEKGSSYYDSEILQPDPLVLTHPANSKFVDQHTSPEEDFPSADRSHRSVGKVEKPVTSALPPLSTIGYSVDVADGNEVPPPEKKECEYRNGKWVSDNRRPLYSGFGCKQWLSESWSCRLTQRKDFAYEKFRWQPEACEMPEFEASHFLRRMQDKTIAYVGDSLGRQMFQSMMCMVTGGKERLDVEDIGAEYGFVLAPGAKRPDGWAYRFPSTNTTILYHWSSTLCDLEPLNPSDRATSYSMHLDRPPAFLKSNLHRLHVLVLNTGHHWNRGKLRANRWEMYLGGAPNNDRNTAVIWKAKNFTVHNVVRWVDAQLPRHPKLKAFYRSISPRHFFNGDWDTGGSCDNTSPLAKGGSGVHLDRSEDADAEGAVRGTGVRLLDVTALSRLRDEGHISRYSIKATSGVQDCLHWCLPGVPDTWNEILAAQL

SEQ ID NO: 37369 - protein, 455 aa, Zea mays subsp. mays
  peptide (1)..(455): Ceres Seq. ID no. 12360032
  misc_feature (297)..(455): Pfam Name: Pfam Description:  Arabidopsis proteins of unknown function
  misc_feature (62)..(455): NCBI GI NO: 15810385 NR Description: unknown protein [Arabidopsis thaliana]
  misc_feature (62)..(455): NCBI GI NO: 18420285 NR Description: putative protein; protein id: At5g20680
  misc_feature (111)..(455): NCBI GI NO: 8777315 NR Description: gene_id:MBM17
  misc_feature (115)..(455): NCBI GI NO: 30697938 NR Description: expressed protein [Arabidopsis thaliana]
  misc_feature (111)..(455): NCBI GI NO: 15224349 NR Description: unknown protein; protein id: At2g37720.1
  misc_feature (113)..(455): NCBI GI NO: 9759321 NR Description: gb|AAF00670
  misc_feature (113)..(455): NCBI GI NO: 18415139 NR Description: putative protein; protein id: At5g06230
  misc_feature (115)..(453): NCBI GI NO: 6862912 NR Description: unknown protein [Arabidopsis thaliana]
  misc_feature (115)..(455): NCBI GI NO: 15229797 NR Description: hypothetical protein; protein id: At3g11570.1
  misc_feature (115)..(453): NCBI GI NO: 15239660 NR Description: putative protein; protein id: At5g19160.1
MRLGSINGLRFTQLKLVILAFFMLFVLWKWEKGSSYYDSEILQPDPLVLTHPANSKFVDQHTSPEEDFPSADRSHRSVGKVEKPVTSALPPLSTIGYSVDVADGNEVPPPEKKECEYRNGKWVSDNRRPLYSGFGCKQWLSESWSCRLTQRKDFAYEKFRWQPEACEMPEFEASHFLRRMQDKTIAYVGDSLGRQMFQSMMCMVTGGKERLDVEDIGAEYGFVLAPGAKRPDGWAYRFPSTNTTILYHWSSTLCDLEPLNPSDRATSYSMHLDRPPAFLKSNLHRLHVLVLNTGHHWNRGKLRANRWEMYLGGAPNNDRNTAVIWKAKNFTVHNVVRWVDAQLPRHPKLKAFYRSISPRHFFNGDWDTGGSCDNTSPLAKGGSGVHLDRSEDADAEGAVRGTGVRLLDVTALSRLRDEGHISRYSIKATSGVQDCLHWCLPGVPDTWNEILAAQL

SEQ ID NO: 37370 - protein, 433 aa, Zea mays subsp. mays
  peptide (1)..(433): Ceres Seq. ID no. 12360033
  misc_feature (275)..(433): Pfam Name: Pfam Description:  Arabidopsis proteins of unknown function
  misc_feature (40)..(433): NCBI GI NO: 15810385 NR Description: unknown protein [Arabidopsis thaliana]
  misc_feature (40)..(433): NCBI GI NO: 18420285 NR Description: putative protein; protein id: At5g20680
  misc_feature (89)..(433): NCBI GI NO: 8777315 NR Description: gene_id:MBM17
  misc_feature (93)..(433): NCBI GI NO: 30697938 NR Description: expressed protein [Arabidopsis thaliana]
  misc_feature (89)..(433): NCBI GI NO: 15224349 NR Description: unknown protein; protein id: At2g37720.1
  misc_feature (91)..(433): NCBI GI NO: 9759321 NR Description: gb|AAF00670
  misc_feature (91)..(433): NCBI GI NO: 18415139 NR Description: putative protein; protein id: At5g06230
  misc_feature (93)..(431): NCBI GI NO: 6862912 NR Description: unknown protein [Arabidopsis thaliana]
  misc_feature (93)..(433): NCBI GI NO: 15229797 NR Description: hypothetical protein; protein id: At3g11570.1
  misc_feature (93)..(431): NCBI GI NO: 15239660 NR Description: putative protein; protein id: At5g19160.1
MLFVLWKWEKGSSYYDSEILQPDPLVLTHPANSKFVDQHTSPEEDFPSADRSHRSVGKVEKPVTSALPPLSTIGYSVDVADGNEVPPPEKKECEYRNGKWVSDNRRPLYSGFGCKQWLSESWSCRLTQRKDFAYEKFRWQPEACEMPEFEASHFLRRMQDKTIAYVGDSLGRQMFQSMMCMVTGGKERLDVEDIGAEYGFVLAPGAKRPDGWAYRFPSTNTTILYHWSSTLCDLEPLNPSDRATSYSMHLDRPPAFLKSNLHRLHVLVLNTGHHWNRGKLRANRWEMYLGGAPNNDRNTAVIWKAKNFTVHNVVRWVDAQLPRHPKLKAFYRSISPRHFFNGDWDTGGSCDNTSPLAKGGSGVHLDRSEDADAEGAVRGTGVRLLDVTALSRLRDEGHISRYSIKATSGVQDCLHWCLPGVPDTWNEILAAQL

SEQ ID NO: 37371 - DNA, 1326 bp, Zea mays subsp. mays
  misc_feature (1)..(1326): Ceres Seq. ID no. 12359521
  misc_feature (1057)..(1057): n is a, c, t, g, unknown, or other
gtcagtccctcccaacctccattccttcctcctttgccaatgcagctctgatctctcctacctgagaatgtcagtgtgagtggccattccatctgcacaacatcctcctccacgcacgcacgcaaaacatacaaaaaggcagaagcggaggagatgaaggcaatggccgggccaaagctgctcgtcgtccacgcgtcgtcgaacaaggccctgaacgggatggcgcccacgtcgccgccgtcgcccggctggtcccggtgcctgtggctggtggtgttcctggccttgttcacctgcgtgtccctcctgaccgtgctctccacggcgcgcgcctcggccggggcgccggcgtgccaggcggcgtcgctcacggccagcgctgccggcgccacggaggccggcctgccgcggcacgtgttcgacgcgctggtgcagtacgcggcggcggcagggaacttgtcgtcgagcatgccggagccggacgtgcgcgcgatcgcgtcggtgctccggcggcgcgcgccgtgcaacctgctggtgttcgggctgggcgcggagacgccgctgtggcgcgcgctcaaccacggcgggcgcacggtgttcctggacgagaacccgtactacgtggcccacctggagggcaagcacccggggctggaggcctacgacgtggcctacgccacggcggtgcgcgagctccccgacctcctcgacgccgcccgtgccgcgcgcgccgccgagtgccgccccgtccagaacctgctcttctccgagtgccgcctcgccatcaacgacctccccaaccagctctacgacgtcgcctgggacgtcatcctcgtcgacggcccgcgcgggttcatggaggggtcgccggggaggatgtcggcgatctactcggctgcggtgatggcgcggaccaagggcgcggagacggaggtgatggtgcacgactacgagcgggaggtggagcgcgcgtgcggccgggagttcctgtgcgacgagaaccgggtcacggcgaccagcacgccgtcgctcggccacgtcgtcgtgcgcgacggcnccgccgccaaccgggaagccttctgcgggccgcccgccggcgccgctcagaaatcgaaaccgagctaagcgagtcgtagtcgttacttctccttcaaacaaatcatgtaattaactcaaggaagtataggtcagtggttcctcgtatttttttcgaacaaatcctgtgggtggtggtggtccaatgatttctcccttcaaacatactgtaatgcctgacgtgccaacacatttgacacgtttaagagaaattttgcatttacaactctt

SEQ ID NO: 37372 - protein, 323 aa, Zea mays subsp. mays
  peptide (1)..(323): Ceres Seq. ID no. 12359522
  misc_feature (75)..(310): Pfam Name: DUF579 Pfam Description: Protein of unknown function
  misc_feature (39)..(320): NCBI GI NO: 10241434 NR Description: putative protein
  misc_feature (37)..(310): NCBI GI NO: 15229700 NR Description: putative protein; protein id: At3g50220
  misc_feature (37)..(323): NCBI GI NO: 15240242 NR Description: putative protein; protein id: At5g67210.1
  misc_feature (37)..(310): NCBI GI NO: 21593034 NR Description: unknown [Arabidopsis thaliana]
  misc_feature (1)..(309): NCBI GI NO: 18397819 NR Description: expressed protein; protein id: At2g15440
  misc_feature (39)..(310): NCBI GI NO: 15217566 NR Description: unknown protein; protein id: At1g09610.1
  misc_feature (84)..(280): NCBI GI NO: 18409879 NR Description: hypothetical protein; protein id: At1g71690.1
  misc_feature (84)..(280): NCBI GI NO: 25354648 NR Description: hypothetical protein F14O23.3
  misc_feature (84)..(280): NCBI GI NO: 18398986 NR Description: expressed protein; protein id: At1g33800
  misc_feature (84)..(310): NCBI GI NO: 25402555 NR Description: hypothetical protein
  misc_feature (302)..(302): Xaa is any aa, unknown or other
MKAMAGPKLLVVHASSNKALNGMAPTSPPSPGWSRCLWLVVFLALFTCVSLLTVLSTARASAGAPACQAASLTASAAGATEAGLPRHVFDALVQYAAAAGNLSSSMPEPDVRAIASVLRRRAPCNLLVFGLGAETPLWRALNHGGRTVFLDENPYYVAHLEGKHPGLEAYDVAYATAVRELPDLLDAARAARAAECRPVQNLLFSECRLAINDLPNQLYDVAWDVILVDGPRGFMEGSPGRMSAIYSAAVMARTKGAETEVMVHDYEREVERACGREFLCDENRVTATSTPSLGHVVVRDGXAANREAFCGPPAGAAQKSKPS

SEQ ID NO: 37373 - protein, 320 aa, Zea mays subsp. mays
  peptide (1)..(320): Ceres Seq. ID no. 12359523
  misc_feature (72)..(307): Pfam Name: DUF579 Pfam Description: Protein of unknown function
  misc_feature (36)..(317): NCBI GI NO: 10241434 NR Description: putative protein
  misc_feature (34)..(307): NCBI GI NO: 15229700 NR Description: putative protein; protein id: At3g50220
  misc_feature (34)..(320): NCBI GI NO: 15240242 NR Description: putative protein; protein id: At5g67210.1
  misc_feature (34)..(307): NCBI GI NO: 21593034 NR Description: unknown [Arabidopsis thaliana]
  misc_feature (1)..(306): NCBI GI NO: 18397819 NR Description: expressed protein; protein id: At2g15440
  misc_feature (36)..(307): NCBI GI NO: 15217566 NR Description: unknown protein; protein id: At1g09610.1
  misc_feature (81)..(277): NCBI GI NO: 18409879 NR Description: hypothetical protein; protein id: At1g71690.1
  misc_feature (81)..(277): NCBI GI NO: 25354648 NR Description: hypothetical protein F14O23.3
  misc_feature (81)..(277): NCBI GI NO: 18398986 NR Description: expressed protein; protein id: At1g33800
  misc_feature (81)..(307): NCBI GI NO: 25402555 NR Description: hypothetical protein
  misc_feature (299)..(299): Xaa is any aa, unknown or other
MAGPKLLVVHASSNKALNGMAPTSPPSPGWSRCLWLVVFLALFTCVSLLTVLSTARASAGAPACQAASLTASAAGATEAGLPRHVFDALVQYAAAAGNLSSSMPEPDVRAIASVLRRRAPCNLLVFGLGAETPLWRALNHGGRTVFLDENPYYVAHLEGKHPGLEAYDVAYATAVRELPDLLDAARAARAAECRPVQNLLFSECRLAINDLPNQLYDVAWDVILVDGPRGFMEGSPGRMSAIYSAAVMARTKGAETEVMVHDYEREVERACGREFLCDENRVTATSTPSLGHVVVRDGXAANREAFCGPPAGAAQKSKPS

SEQ ID NO: 37374 - protein, 301 aa, Zea mays subsp. mays
  peptide (1)..(301): Ceres Seq. ID no. 12359524
  misc_feature (53)..(288): Pfam Name: DUF579 Pfam Description: Protein of unknown function
  misc_feature (17)..(298): NCBI GI NO: 10241434 NR Description: putative protein
  misc_feature (15)..(288): NCBI GI NO: 15229700 NR Description: putative protein; protein id: At3g50220
  misc_feature (15)..(301): NCBI GI NO: 15240242 NR Description: putative protein; protein id: At5g67210.1
  misc_feature (15)..(288): NCBI GI NO: 21593034 NR Description: unknown [Arabidopsis thaliana]
  misc_feature (1)..(287): NCBI GI NO: 18397819 NR Description: expressed protein; protein id: At2g15440
  misc_feature (17)..(288): NCBI GI NO: 15217566 NR Description: unknown protein; protein id: At1g09610.1
  misc_feature (62)..(258): NCBI GI NO: 18409879 NR Description: hypothetical protein; protein id: At1g71690.1
  misc_feature (62)..(258): NCBI GI NO: 25354648 NR Description: hypothetical protein F14O23.3
  misc_feature (62)..(258): NCBI GI NO: 18398986 NR Description: expressed protein; protein id: At1g33800
  misc_feature (62)..(288): NCBI GI NO: 25402555 NR Description: hypothetical protein
  misc_feature (280)..(280): Xaa is any aa, unknown or other
MAPTSPPSPGWSRCLWLVVFLALFTCVSLLTVLSTARASAGAPACQAASLTASAAGATEAGLPRHVFDALVQYAAAAGNLSSSMPEPDVRAIASVLRRRAPCNLLVFGLGAETPLWRALNHGGRTVFLDENPYYVAHLEGKHPGLEAYDVAYATAVRELPDLLDAARAARAAECRPVQNLLFSECRLAINDLPNQLYDVAWDVILVDGPRGFMEGSPGRMSAIYSAAVMARTKGAETEVMVHDYEREVERACGREFLCDENRVTATSTPSLGHVVVRDGXAANREAFCGPPAGAAQKSKPS

SEQ ID NO: 37375 - DNA, 1268 bp, Zea mays subsp. mays
  misc_feature (1)..(1268): Ceres Seq. ID no. 12364236
gcacgagaccattacctagaacatcctaatcgaaaaatcagagataggagagacgaacaagaaaagacgagatcatatataccgtacgttatagagtaggaaaatagaaatacgaatgatgatcacgggacggcagcgaaaccctgcaaggctgcaggtgtcgtcgtccttcctgcttgcccttgttttcgcatcatcggtgctcgtcggcatcgtggccggcggcagcttctacgaggagtgcgacgcgacttgggagccccagaactgctgggcctacgacgatggcaacaggctctccctcgcgctcgtcagcagttcctcaggttccatgatccggtcgaagcggcagttcgtgtacgggaccgtgtccaccatgatccagcttgtccccggcgactccgccggcaccgtcaccacctactatacgtcgtcgctgggcgacaaccacgacgagatcgacttcgagttcttgggcaacgtgagcgggcagccctacaccatccacaccaacgtgtacgctgccggcgtgggcaacaaggagatgcagttcaagccatggttcgaccccaccgccgactaccacaactacaccatctcctggactccctgcatgatcgcgtggtacgtcgacggcgtccccatccgcgtgttccgcaactacgcggcgagccacggcgtggcgttcccgacgagccagcccatgtacgcctactctagcatctgggcggcggaggactgggccacgcagggcggccgcgtcaaggccgactggtccaaggcgcccttcgtcgccagctaccacggcatcgacctcggcgtctgcgagtgctacggcgggggcgcctgcgtctccagctgcgccgcggcgttcgccgccagccactgcagcctgagcgacgcgcaggtgggggagatgcgctgggtgcagggcagctacaggatctacgactactgcgtcgaccccaagcgcttggtcaacggccagaggccggtcgagtgcgacctgccgcagtactgaacggatcggagctccgatcaggtccttgttgcgtatgaatgaggaagcaataatcatacgtatttactcaatcaacagtgcaaggggccggccgggaattccaacaagccgacatatacccaccaggttgggtcgagtcacgacgatcaaagaggccgcccgtctcactcgtctattttcatggataatgcaattggttttgtgctcattttactcttttaccgatatataactatgagtttttgag

SEQ ID NO: 37376 - protein, 301 aa, Zea mays subsp. mays
  peptide (1)..(301): Ceres Seq. ID no. 12364237
  misc_feature (39)..(221): Pfam Name: Pfam Description:  Glycosyl hydrolases family 16
  misc_feature (17)..(301): NCBI GI NO: 14330336 NR Description: Xet3 protein [Festuca pratensis]
  misc_feature (23)..(298): NCBI GI NO: 15242778 NR Description: xyloglucan endotransglycosylase, putative
  misc_feature (22)..(299): NCBI GI NO: 7447403 NR Description: xyloglucan endo-1,4-beta-D-glucanase (EC 3
  misc_feature (24)..(298): NCBI GI NO: 7447413 NR Description: xyloglucan endo-1,4-beta-D-glucanase (EC 3
  misc_feature (22)..(298): NCBI GI NO: 15242779 NR Description: xyloglucan endotransglycosylase, putative
  misc_feature (17)..(298): NCBI GI NO: 8886867 NR Description: xyloglucan endotransglycosylase XET2
  misc_feature (18)..(299): NCBI GI NO: 29691676 NR Description: putative xyloglucan endotransglycosylase
  misc_feature (20)..(298): NCBI GI NO: 15235998 NR Description: xyloglucan endotransglycosylase XTR9
  misc_feature (16)..(299): NCBI GI NO: 29500891 NR Description: putative xyloglucan endotransglycosylase
  misc_feature (19)..(296): NCBI GI NO: 22947852 NR Description: xyloglucan endotransglycosylase
MMITGRQRNPARLQVSSSFLLALVFASSVLVGIVAGGSFYEECDATWEPQNCWAYDDGNRLSLALVSSSSGSMIRSKRQFVYGTVSTMIQLVPGDSAGTVTTYYTSSLGDNHDEIDFEFLGNVSGQPYTIHTNVYAAGVGNKEMQFKPWFDPTADYHNYTISWTPCMIAWYVDGVPIRVFRNYAASHGVAFPTSQPMYAYSSIWAAEDWATQGGRVKADWSKAPFVASYHGIDLGVCECYGGGACVSSCAAAFAASHCSLSDAQVGEMRWVQGSYRIYDYCVDPKRLVNGQRPVECDLPQY

SEQ ID NO: 37377 - protein, 300 aa, Zea mays subsp. mays
  peptide (1)..(300): Ceres Seq. ID no. 12364238
  misc_feature (38)..(220): Pfam Name: Pfam Description:  Glycosyl hydrolases family 16
  misc_feature (16)..(300): NCBI GI NO: 14330336 NR Description: Xet3 protein [Festuca pratensis]
  misc_feature (22)..(297): NCBI GI NO: 15242778 NR Description: xyloglucan endotransglycosylase, putative
  misc_feature (21)..(298): NCBI GI NO: 7447403 NR Description: xyloglucan endo-1,4-beta-D-glucanase (EC 3
  misc_feature (23)..(297): NCBI GI NO: 7447413 NR Description: xyloglucan endo-1,4-beta-D-glucanase (EC 3
  misc_feature (21)..(297): NCBI GI NO: 15242779 NR Description: xyloglucan endotransglycosylase, putative
  misc_feature (16)..(297): NCBI GI NO: 8886867 NR Description: xyloglucan endotransglycosylase XET2
  misc_feature (17)..(298): NCBI GI NO: 29691676 NR Description: putative xyloglucan endotransglycosylase
  misc_feature (19)..(297): NCBI GI NO: 15235998 NR Description: xyloglucan endotransglycosylase XTR9
  misc_feature (15)..(298): NCBI GI NO: 29500891 NR Description: putative xyloglucan endotransglycosylase
  misc_feature (18)..(295): NCBI GI NO: 22947852 NR Description: xyloglucan endotransglycosylase
MITGRQRNPARLQVSSSFLLALVFASSVLVGIVAGGSFYEECDATWEPQNCWAYDDGNRLSLALVSSSSGSMIRSKRQFVYGTVSTMIQLVPGDSAGTVTTYYTSSLGDNHDEIDFEFLGNVSGQPYTIHTNVYAAGVGNKEMQFKPWFDPTADYHNYTISWTPCMIAWYVDGVPIRVFRNYAASHGVAFPTSQPMYAYSSIWAAEDWATQGGRVKADWSKAPFVASYHGIDLGVCECYGGGACVSSCAAAFAASHCSLSDAQVGEMRWVQGSYRIYDYCVDPKRLVNGQRPVECDLPQY

SEQ ID NO: 37378 - protein, 229 aa, Zea mays subsp. mays
  peptide (1)..(229): Ceres Seq. ID no. 12364239
  misc_feature (1)..(149): Pfam Name: Pfam Description:  Glycosyl hydrolases family 16
  misc_feature (1)..(229): NCBI GI NO: 14330336 NR Description: Xet3 protein [Festuca pratensis]
  misc_feature (1)..(226): NCBI GI NO: 15242778 NR Description: xyloglucan endotransglycosylase, putative
  misc_feature (1)..(227): NCBI GI NO: 7447403 NR Description: xyloglucan endo-1,4-beta-D-glucanase (EC 3
  misc_feature (1)..(226): NCBI GI NO: 7447413 NR Description: xyloglucan endo-1,4-beta-D-glucanase (EC 3
  misc_feature (1)..(226): NCBI GI NO: 15242779 NR Description: xyloglucan endotransglycosylase, putative
  misc_feature (1)..(226): NCBI GI NO: 8886867 NR Description: xyloglucan endotransglycosylase XET2
  misc_feature (1)..(227): NCBI GI NO: 29691676 NR Description: putative xyloglucan endotransglycosylase
  misc_feature (1)..(226): NCBI GI NO: 15235998 NR Description: xyloglucan endotransglycosylase XTR9
  misc_feature (1)..(227): NCBI GI NO: 29500891 NR Description: putative xyloglucan endotransglycosylase
  misc_feature (1)..(224): NCBI GI NO: 22947852 NR Description: xyloglucan endotransglycosylase
MIRSKRQFVYGTVSTMIQLVPGDSAGTVTTYYTSSLGDNHDEIDFEFLGNVSGQPYTIHTNVYAAGVGNKEMQFKPWFDPTADYHNYTISWTPCMIAWYVDGVPIRVFRNYAASHGVAFPTSQPMYAYSSIWAAEDWATQGGRVKADWSKAPFVASYHGIDLGVCECYGGGACVSSCAAAFAASHCSLSDAQVGEMRWVQGSYRIYDYCVDPKRLVNGQRPVECDLPQY

SEQ ID NO: 37379 - DNA, 1052 bp, Zea mays subsp. mays
  misc_feature (1)..(1052): Ceres Seq. ID no. 12381283
aaatagccattcaatcattcaagcgaagcagccaccactctctccactgtgactccgtgacctgcctgccctgctgcgacaagcacagcacacacaccccgcacaccgcaccagctcagctcagctcaccaagacaatcaatcatggctcgtccgcgcagtgtcgctgccgctgcccccctcctcctgctgctcgccgccgccgcagcggggctcgtgtccgccgcgtcgccggcagccagcgacttcgtccgcaagtcgtgccgcacgacgcagtacccttcggtgtgcgagcagagcctggcgtcgtacggcgggtcgccgccgccacggagcccgcgggagctggcgcgcgccgcgctgtcggtgagcgcggaccgcgcgcgcgccgcgtcggcgtacgtgggccgcctgtgcggcgccagcaacggcaaaggcgcgaagaaggggtcgggatcggcgtcggcgtcggcaggtcccgtgcgcgactgcctggacaatctggcggacagcgtgggccacctccgcgacgcggcgcaggagatgggcggcgccgggatgggccgcgcggggacgccggcgttcaggtggcacctcagcaacgtgcagacctggtgcagcgccgcgctcaccgacgaggacacctgcctcgacggcctctcgtcccgcgccgtcgacgccggcacgcgcgccgccatccggggcaaggtcgtcgaggtcgcgcaggtcaccagcaacgcgctcgcgctcgtcaataaggtcgggcctgggtactaacacgggaaggggacccaagatccaggcccaggcccaggcccaggcccagcccagataccacacccgctactagtatagtactaggcgcctccacctccacggcgttgggtgtttctcgtccgttaatagctcggtttgctttgcttgtgtttgtgtaagatatacattagttaagggcaataagcttgtactattatgagtggcggccgaggagtacagtacgttctcctctgtccgatcatgccaccatattaatgtgggagatatcttttgtcc

SEQ ID NO: 37380 - protein, 257 aa, Zea mays subsp. mays
  peptide (1)..(257): Ceres Seq. ID no. 12381284
  misc_feature (59)..(255): NCBI GI NO: 32489696 NR Description: OSJNBb0004G23.9
  misc_feature (48)..(252): NCBI GI NO: 7406663 NR Description: putative ripening-related protein [Vitis vinifera]
  misc_feature (60)..(257): NCBI GI NO: 15241799 NR Description: ripening-related protein - like
  misc_feature (60)..(257): NCBI GI NO: 21618088 NR Description: ripening-related protein-like
  misc_feature (81)..(251): NCBI GI NO: 18394174 NR Description: expressed protein; protein id: At1g14890
  misc_feature (48)..(257): NCBI GI NO: 112717 NR Description: 21 KD PROTEIN PRECURSOR (1.2 PROTEIN)
  misc_feature (61)..(252): NCBI GI NO: 18407657 NR Description: expressed protein; protein id: At1g62770
  misc_feature (61)..(252): NCBI GI NO: 21618013 NR Description: putative ripening-related protein
  misc_feature (60)..(252): NCBI GI NO: 15234547 NR Description: putative protein; protein id: At4g12390
  misc_feature (71)..(252): NCBI GI NO: 7488727 NR Description: 21K protein precursor - alfalfa
IAIQSFKRSSHHSLHCDSVTCLPCCDKHSTHTPHTAPAQLSSPRQSIMARPRSVAAAAPLLLLLAAAAAGLVSAASPAASDFVRKSCRTTQYPSVCEQSLASYGGSPPPRSPRELARAALSVSADRARAASAYVGRLCGASNGKGAKKGSGSASASAGPVRDCLDNLADSVGHLRDAAQEMGGAGMGRAGTPAFRWHLSNVQTWCSAALTDEDTCLDGLSSRAVDAGTRAAIRGKVVEVAQVTSNALALVNKVGPGY

SEQ ID NO: 37381 - protein, 210 aa, Zea mays subsp. mays
  peptide (1)..(210): Ceres Seq. ID no. 12381285
  misc_feature (12)..(208): NCBI GI NO: 32489696 NR Description: OSJNBb0004G23.9
  misc_feature (1)..(205): NCBI GI NO: 7406663 NR Description: putative ripening-related protein [Vitis vinifera]
  misc_feature (13)..(210): NCBI GI NO: 15241799 NR Description: ripening-related protein - like
  misc_feature (13)..(210): NCBI GI NO: 21618088 NR Description: ripening-related protein-like
  misc_feature (34)..(204): NCBI GI NO: 18394174 NR Description: expressed protein; protein id: At1g14890
  misc_feature (1)..(210): NCBI GI NO: 112717 NR Description: 21 KD PROTEIN PRECURSOR (1.2 PROTEIN)
  misc_feature (14)..(205): NCBI GI NO: 18407657 NR Description: expressed protein; protein id: At1g62770
  misc_feature (14)..(205): NCBI GI NO: 21618013 NR Description: putative ripening-related protein
  misc_feature (13)..(205): NCBI GI NO: 15234547 NR Description: putative protein; protein id: At4g12390
  misc_feature (24)..(205): NCBI GI NO: 7488727 NR Description: 21K protein precursor - alfalfa
MARPRSVAAAAPLLLLLAAAAAGLVSAASPAASDFVRKSCRTTQYPSVCEQSLASYGGSPPPRSPRELARAALSVSADRARAASAYVGRLCGASNGKGAKKGSGSASASAGPVRDCLDNLADSVGHLRDAAQEMGGAGMGRAGTPAFRWHLSNVQTWCSAALTDEDTCLDGLSSRAVDAGTRAAIRGKVVEVAQVTSNALALVNKVGPGY

SEQ ID NO: 37382 - DNA, 1543 bp, Zea mays subsp. mays
  misc_feature (1)..(1543): Ceres Seq. ID no. 12406084
gcacgagaccattacctagaacatcctaatcgaaaaaaatacagggggaaaagcaagacgcgtgagcacttccttatcgtctcttcctttcaccccctcgaccccgatcgaatcgctcgaacaattccctgtgcatcgatcgatctaggcttgcgcgaggatccaattccatccggctctcctttgagctcgtgatcctcggagttggaggagttcttcgcgagtctctttttgccccgatttctttttggcttatttgtgcgagctttctcaggagcagaagggaagaggcagtttgcaattccgatgcacccaggcctcaagattcaactctgaggccttatccgaggcatccgcatcgatctccgcaagaggatgggtaacgtgggaagcaacggtggaggcgccgccactggtcaccgccgtcggagctccggccacggccatcaccagcaggcgccgccgcctccccagccgcaggagactgcgcccaaccgctacgtgttcgcggccgccacgccgtacccgccccagtaccctaaccccaatccgccgcagtactacccgcagtacgggaactactacccgccgccaccatcatccgtgccggtgccccttccggcgccgtacgaccaccaccacaggccacccaccgccgcccctggcgagttcccgcccccaccccccgtccacccccacaactaccccggctgggccgggcggtatccctcctacggaccgcatctgtctatgccgacgccttacgttgagcaccagaaggccgtcactatccgcaacgacatcaaccttaagaaggagacgcttcggatcgagcctgatgaagaacgccctggccgcttcctcgtcgccttcacctttgacgccacggtcgctggcagcatgactgtttacttctttgcaaaggaagagctcaactgcaatctaacaacagtgaaagaagacctaattaagcccattactgttagcttcaaagagggtcttggtcaaaaattcaggcaaccttcaggaacaggaattgacttttcagtgtttgaagaatcagatttattaaagcagggggacatggatgtatatccacttgcagttaaagctgaaacaacattgtctgttgatcacccaccagaaggggatgaccaaaagatgataactcctaactcacagatcacccaggccgtttttgaaaagaaagaaaatggggattatcaagtaagagttgtttgccagatcctctgggtcaatggaactaggtatgaactgcaagaaatatatggcatagggaactccatggaaggtgatgctgatgcaaatgatccagggaaagaatgtgttatttgcctctcagaaccaagggatactactgtcctgccatgtaggcatatgtgcatgtgcagtgagtgcgccaaggtcctgaggtaccaaaccactcggtgccccatctgcaggcagcctgtggagcgtctcctggagatcaaagtgaacaacaaatctgaagatcagcagcagacgccccaatcgccaccgc

SEQ ID NO: 37383 - protein, 389 aa, Zea mays subsp. mays
  peptide (1)..(389): Ceres Seq. ID no. 12406085
  misc_feature (324)..(362): Pfam Name: RING finger Pfam Description: Zinc finger, C3HC4 type
  misc_feature (1)..(388): NCBI GI NO: 37532246 NR Description: putative hydroxyproline-rich glycoprotein
  misc_feature (1)..(386): NCBI GI NO: 18398633 NR Description: expressed protein; protein id: At3g09770
  misc_feature (1)..(342): NCBI GI NO: 30681003 NR Description: putative RING zinc finger protein
  misc_feature (88)..(380): NCBI GI NO: 15231808 NR Description: putative protein; protein id: At3g53410
  misc_feature (23)..(375): NCBI GI NO: 21618140 NR Description: putative RING zinc finger protein
  misc_feature (23)..(375): NCBI GI NO: 15242675 NR Description: expressed protein; protein id: At5g03200
  misc_feature (23)..(375): NCBI GI NO: 26449588 NR Description: unknown protein [Arabidopsis thaliana]
  misc_feature (10)..(382): NCBI GI NO: 15239642 NR Description: unknown protein; protein id: At5g19080.1
  misc_feature (12)..(379): NCBI GI NO: 6862918 NR Description: putative RING zinc finger protein
  misc_feature (12)..(379): NCBI GI NO: 18397483 NR Description: putative RING zinc finger protein
MGNVGSNGGGAATGHRRRSSGHGHHQQAPPPPQPQETAPNRYVFAAATPYPPQYPNPNPPQYYPQYGNYYPPPPSSVPVPLPAPYDHHHRPPTAAPGEFPPPPPVHPHNYPGWAGRYPSYGPHLSMPTPYVEHQKAVTIRNDINLKKETLRIEPDEERPGRFLVAFTFDATVAGSMTVYFFAKEELNCNLTTVKEDLIKPITVSFKEGLGQKFRQPSGTGIDFSVFEESDLLKQGDMDVYPLAVKAETTLSVDHPPEGDDQKMITPNSQITQAVFEKKENGDYQVRVVCQILWVNGTRYELQEIYGIGNSMEGDADANDPGKECVICLSEPRDTTVLPCRHMCMCSECAKVLRYQTTRCPICRQPVERLLEIKVNNKSEDQQQTPQSPP

SEQ ID NO: 37384 - protein, 264 aa, Zea mays subsp. mays
  peptide (1)..(264): Ceres Seq. ID no. 12406086
  misc_feature (199)..(237): Pfam Name: RING finger Pfam Description: Zinc finger, C3HC4 type
  misc_feature (1)..(263): NCBI GI NO: 37532246 NR Description: putative hydroxyproline-rich glycoprotein
  misc_feature (1)..(261): NCBI GI NO: 18398633 NR Description: expressed protein; protein id: At3g09770
  misc_feature (1)..(217): NCBI GI NO: 30681003 NR Description: putative RING zinc finger protein
  misc_feature (1)..(255): NCBI GI NO: 15231808 NR Description: putative protein; protein id: At3g53410
  misc_feature (1)..(250): NCBI GI NO: 21618140 NR Description: putative RING zinc finger protein
  misc_feature (1)..(250): NCBI GI NO: 15242675 NR Description: expressed protein; protein id: At5g03200
  misc_feature (1)..(250): NCBI GI NO: 26449588 NR Description: unknown protein [Arabidopsis thaliana]
  misc_feature (1)..(257): NCBI GI NO: 15239642 NR Description: unknown protein; protein id: At5g19080.1
  misc_feature (1)..(254): NCBI GI NO: 6862918 NR Description: putative RING zinc finger protein
  misc_feature (1)..(254): NCBI GI NO: 18397483 NR Description: putative RING zinc finger protein
MPTPYVEHQKAVTIRNDINLKKETLRIEPDEERPGRFLVAFTFDATVAGSMTVYFFAKEELNCNLTTVKEDLIKPITVSFKEGLGQKFRQPSGTGIDFSVFEESDLLKQGDMDVYPLAVKAETTLSVDHPPEGDDQKMITPNSQITQAVFEKKENGDYQVRVVCQILWVNGTRYELQEIYGIGNSMEGDADANDPGKECVICLSEPRDTTVLPCRHMCMCSECAKVLRYQTTRCPICRQPVERLLEIKVNNKSEDQQQTPQSPP

SEQ ID NO: 37385 - protein, 214 aa, Zea mays subsp. mays
  peptide (1)..(214): Ceres Seq. ID no. 12406087
  misc_feature (149)..(187): Pfam Name: RING finger Pfam Description: Zinc finger, C3HC4 type
  misc_feature (1)..(213): NCBI GI NO: 37532246 NR Description: putative hydroxyproline-rich glycoprotein
  misc_feature (1)..(211): NCBI GI NO: 18398633 NR Description: expressed protein; protein id: At3g09770
  misc_feature (1)..(167): NCBI GI NO: 30681003 NR Description: putative RING zinc finger protein
  misc_feature (1)..(205): NCBI GI NO: 15231808 NR Description: putative protein; protein id: At3g53410
  misc_feature (1)..(200): NCBI GI NO: 21618140 NR Description: putative RING zinc finger protein
  misc_feature (1)..(200): NCBI GI NO: 15242675 NR Description: expressed protein; protein id: At5g03200
  misc_feature (1)..(200): NCBI GI NO: 26449588 NR Description: unknown protein [Arabidopsis thaliana]
  misc_feature (1)..(207): NCBI GI NO: 15239642 NR Description: unknown protein; protein id: At5g19080.1
  misc_feature (1)..(204): NCBI GI NO: 6862918 NR Description: putative RING zinc finger protein
  misc_feature (1)..(204): NCBI GI NO: 18397483 NR Description: putative RING zinc finger protein
MTVYFFAKEELNCNLTTVKEDLIKPITVSFKEGLGQKFRQPSGTGIDFSVFEESDLLKQGDMDVYPLAVKAETTLSVDHPPEGDDQKMITPNSQITQAVFEKKENGDYQVRVVCQILWVNGTRYELQEIYGIGNSMEGDADANDPGKECVICLSEPRDTTVLPCRHMCMCSECAKVLRYQTTRCPICRQPVERLLEIKVNNKSEDQQQTPQSPP

SEQ ID NO: 37386 - DNA, 1113 bp, Zea mays subsp. mays
  misc_feature (1)..(1113): Ceres Seq. ID no. 12353094
aaatagagcccgagcgccgagggaggagggcaaaccgggagagagagagagagacacctcctccttttcccccctttgcattgggttgccgcaacactacagacacaaacacagtctaggaggcttcttccgctcgctcaggtaggtgtactgtactgtagtaggttggttctccattcatcattcagctcacaggtccctccgcctccgccgtatcggagggagaggaagcggaaggcttggaaggagaagagaatggcggggcggcgcgcggaggaggagtacgactacctgttcaaggtggtgctgatcggggactcgggcgtcggcaagtccaacctcctctcccgcttcacccgcaacgagttctgcctcgagtccaagtccaccatcggcgtcgagttcgccacacggacactccatgttgagggcaagatcatcaaggcgcagatctgggacacggcaggccaggagcgggtaccgggcgatcaccagcgcctactatcgcggggcgctgggcgcggtcctggtctacgacgtgagcaagcccaccaccttcgagaacatcagccggtggctcaaggagctacgcgaccacgccgactccaacaccaggatcatgctcgtcggcaacaagaccgacctgaggcacctccgggccgtcgccaccgacgacgctcggagcttcgctgaggcagaaggcctgtcctacatcgagacgtccgcgctggaggccaccaacgtggaggaggcgttccagctcatcctgggcgacatttaccgggccgtcagcaagaagcctgtggcgtccgacgaggttggcgccggccagggaggcgtcaaggaaggtaagaccatcgatgtggcgactggtgctgatgccgccgctcacaagaagcagtgctgctcggcttagaagttagaagaacccatgctggtggtctctcgttcagtggcgtatgtgttgttgtgatggttgtcgttgttgttttttttctcttcttccagtccaaaagtttgttgattcgttttgccagatagtacctttgttggagggataatcatgctcacatatatattctctaaagcaagcagttatatatgattataccg

SEQ ID NO: 37387 - protein, 164 aa, Zea mays subsp. mays
  peptide (1)..(164): Ceres Seq. ID no. 12353095
  misc_feature (20)..(121): Pfam Name: Pfam Description:  Ras family
  misc_feature (20)..(164): NCBI GI NO: 15217568 NR Description: GTP-binding protein, putative
  misc_feature (20)..(164): NCBI GI NO: 15232652 NR Description: GTP-binding protein, putative
  misc_feature (20)..(163): NCBI GI NO: 3024501 NR Description: RAS-RELATED PROTEIN RAB11C
  misc_feature (20)..(163): NCBI GI NO: 15222396 NR Description: GTP-binding protein, putative
  misc_feature (20)..(164): NCBI GI NO: 34897394 NR Description: Ras-related GTP-binding protein
  misc_feature (20)..(163): NCBI GI NO: 3024528 NR Description: RAS-RELATED PROTEIN RAB2BV
  misc_feature (20)..(163): NCBI GI NO: 15237828 NR Description: Ras-related GTP-binding protein, putative
  misc_feature (20)..(163): NCBI GI NO: 15239462 NR Description: GTP-binding protein, putative
  misc_feature (20)..(163): NCBI GI NO: 13195452 NR Description: GTP-binding protein [Oryza sativa]
  misc_feature (20)..(163): NCBI GI NO: 25294121 NR Description: protein F22G5.24 [imported] - Arabidopsis thaliana
MLRARSSRRRSGTRQARSGYRAITSAYYRGALGAVLVYDVSKPTTFENISRWLKELRDHADSNTRIMLVGNKTDLRHLRAVATDDARSFAEAEGLSYIETSALEATNVEEAFQLILGDIYRAVSKKPVASDEVGAGQGGVKEGKTIDVATGADAAAHKKQCCSA

SEQ ID NO: 37388 - protein, 145 aa, Zea mays subsp. mays
  peptide (1)..(145): Ceres Seq. ID no. 12353096
  misc_feature (15)..(74): Pfam Name: Pfam Description:  Ras family
  misc_feature (4)..(74): NCBI GI NO: 15217568 NR Description: GTP-binding protein, putative
  misc_feature (5)..(74): NCBI GI NO: 15232652 NR Description: GTP-binding protein, putative
  misc_feature (5)..(74): NCBI GI NO: 3024501 NR Description: RAS-RELATED PROTEIN RAB11C
  misc_feature (5)..(74): NCBI GI NO: 15222396 NR Description: GTP-binding protein, putative
  misc_feature (5)..(74): NCBI GI NO: 34897394 NR Description: Ras-related GTP-binding protein
  misc_feature (5)..(74): NCBI GI NO: 3024528 NR Description: RAS-RELATED PROTEIN RAB2BV
  misc_feature (5)..(74): NCBI GI NO: 15237828 NR Description: Ras-related GTP-binding protein, putative
  misc_feature (1)..(74): NCBI GI NO: 15239462 NR Description: GTP-binding protein, putative
  misc_feature (2)..(74): NCBI GI NO: 13195452 NR Description: GTP-binding protein [Oryza sativa]
  misc_feature (5)..(57): NCBI GI NO: 25294121 NR Description: protein F22G5.24 [imported] - Arabidopsis thaliana
MAGRRAEEEYDYLFKVVLIGDSGVGKSNLLSRFTRNEFCLESKSTIGVEFATRTLHVEGKIIKAQIWDTAGQERVPGDHQRLLSRGAGRGPGLRREQAHHLREHQPVAQGATRPRRLQHQDHARRQQDRPEAPPGRRHRRRSELR

SEQ ID NO: 37389 - protein, 98 aa, Zea mays subsp. mays
  peptide (1)..(98): Ceres Seq. ID no. 12353097
  misc_feature (1)..(55): Pfam Name: Pfam Description:  Ras family
  misc_feature (1)..(98): NCBI GI NO: 15217568 NR Description: GTP-binding protein, putative
  misc_feature (1)..(98): NCBI GI NO: 15232652 NR Description: GTP-binding protein, putative
  misc_feature (1)..(97): NCBI GI NO: 3024501 NR Description: RAS-RELATED PROTEIN RAB11C
  misc_feature (1)..(97): NCBI GI NO: 15222396 NR Description: GTP-binding protein, putative
  misc_feature (1)..(98): NCBI GI NO: 34897394 NR Description: Ras-related GTP-binding protein
  misc_feature (1)..(97): NCBI GI NO: 3024528 NR Description: RAS-RELATED PROTEIN RAB2BV
  misc_feature (1)..(97): NCBI GI NO: 15237828 NR Description: Ras-related GTP-binding protein, putative
  misc_feature (1)..(97): NCBI GI NO: 15239462 NR Description: GTP-binding protein, putative
  misc_feature (1)..(97): NCBI GI NO: 13195452 NR Description: GTP-binding protein [Oryza sativa]
  misc_feature (1)..(97): NCBI GI NO: 25294121 NR Description: protein F22G5.24 [imported] - Arabidopsis thaliana
MLVGNKTDLRHLRAVATDDARSFAEAEGLSYIETSALEATNVEEAFQLILGDIYRAVSKKPVASDEVGAGQGGVKEGKTIDVATGADAAAHKKQCCSA

SEQ ID NO: 37390 - DNA, 1442 bp, Zea mays subsp. mays
  misc_feature (1)..(1442): Ceres Seq. ID no. 12361081
gcacgagaccattacctagaacatcctaatcgaaaaactagccacagtaccacctcagcccaggtcccttcgcctccgctcaactgccgccgcagggcccgctgcaggcttccatgtgtggtagggcccggtgtaccctcagcccggccgaggttgccagggccttcggcttccccaccacctccgccaacgcgggcggcggtggtgacggccccgctgtgccgacgctccatcttaaccggttccggccgtcgtacaatgtgttgcctggggcgtacctgcctgtgggcgccatgcgggcactaccaggttgcgcccacggaggaggaggttcggatggggaggggccggtgatccagtgcatgaagtgggggctggtgcccagcttcaccggcaaggccgagaaacccgaccatttcaggatgttcaatgccagatcagagtccgtaaaagaaaaggtttcattccgtcgactaattcaaaaaaataggtgccttgttgcagtagaagggttttatgagtggaaaaagaatggatcaaaaaaacagccatactacatacatttccaagatcataggcctcttgtctttgcagccttgtatgatgcatggacaaattcagaaggagagatcacccatacattcactattttgactacacatgcctcaacttctctaaattggcttcatgatagaatgcctgttatcttaggcagtaaggactatgttgatgcttggttaaatgatgtttctgtaaaacttgaagaaattactgcaccttacgaaggagctgatctggtttggtatccagtgacatccgcattgggtaaagcatcatttgatggacctgagtgcatcaaagaggtacatatcggagctactgataagcctatttcaaaattcttcaccaagaaatcgactgcctacgatctatcagggaagtatgagaatatgtcacgggagcttgctcatgcttacaaagcagcgaaagtggaatgcgatggatcagtagaaaatcaaggaggggacggcaaccaacaccagtcccgagagaagcaaactactaattgtactataaaggatgaacctgtcaccttggaaccacaagttttcgagacaccgtggagcatcgagcatgaagatactatgactctggctggtgccactttggaaacacaacgtgatttgggattcaagagaaagatcgaggacactcaagtcgaagctagcatgaagccctctcagcttaccaggaaggaaaaagctgtaaaagcagcttcggatgggcaggcatcgttgctttcatatttcgcaaggaagcagggtcgctcgatgaagtagtttgcggtagccgtgccatgtattcctgtgtaactcaaactttaccagtacctgtcctccgtgttcgggacaaactatttcggttttaattttgttttggct

SEQ ID NO: 37391 - protein, 408 aa, Zea mays subsp. mays
  peptide (1)..(408): Ceres Seq. ID no. 12361082
  misc_feature (36)..(246): Pfam Name: Pfam Description:  Uncharacterised ACR, COG2135
  misc_feature (36)..(283): NCBI GI NO: 30683129 NR Description: expressed protein [Arabidopsis thaliana]
  misc_feature (1)..(283): NCBI GI NO: 7487880 NR Description: hypothetical protein At2g26470
  misc_feature (43)..(252): NCBI GI NO: 39995151 NR Description: conserved hypothetical protein
  misc_feature (134)..(315): NCBI GI NO: 38494381 NR Description: Unknown (protein for MGC:75607)
  misc_feature (1)..(151): NCBI GI NO: 38494381 NR Description: Unknown (protein for MGC:75607)
  misc_feature (82)..(248): NCBI GI NO: 17230686 NR Description: hypothetical protein [Nostoc sp. PCC 7120]
  misc_feature (75)..(248): NCBI GI NO: 23124313 NR Description: hypothetical protein [Nostoc punctiforme]
  misc_feature (46)..(251): NCBI GI NO: 37522067 NR Description: hypothetical protein gll2498
  misc_feature (84)..(259): NCBI GI NO: 22963055 NR Description: hypothetical protein [Rhodopseudomonas palustris]
  misc_feature (44)..(249): NCBI GI NO: 23134918 NR Description: hypothetical protein [Cytophaga hutchinsonii]
MCGRARCTLSPAEVARAFGFPTTSANAGGGGDGPAVPTLHLNRFRPSYNVLPGAYLPVGAMRALPGCAHGGGGSDGEGPVIQCMKWGLVPSFTGKAEKPDHFRMFNARSESVKEKVSFRRLIQKNRCLVAVEGFYEWKKNGSKKQPYYIHFQDHRPLVFAALYDAWTNSEGEITHTFTILTTHASTSLNWLHDRMPVILGSKDYVDAWLNDVSVKLEEITAPYEGADLVWYPVTSALGKASFDGPECIKEVHIGATDKPISKFFTKKSTAYDLSGKYENMSRELAHAYKAAKVECDGSVENQGGDGNQHQSREKQTTNCTIKDEPVTLEPQVFETPWSIEHEDTMTLAGATLETQRDLGFKRKIEDTQVEASMKPSQLTRKEKAVKAASDGQASLLSYFARKQGRSMK

SEQ ID NO: 37392 - protein, 348 aa, Zea mays subsp. mays
  peptide (1)..(348): Ceres Seq. ID no. 12361083
  misc_feature (1)..(186): Pfam Name: Pfam Description:  Uncharacterised ACR, COG2135
  misc_feature (1)..(223): NCBI GI NO: 30683129 NR Description: expressed protein [Arabidopsis thaliana]
  misc_feature (1)..(223): NCBI GI NO: 7487880 NR Description: hypothetical protein At2g26470
  misc_feature (1)..(192): NCBI GI NO: 39995151 NR Description: conserved hypothetical protein
  misc_feature (74)..(255): NCBI GI NO: 38494381 NR Description: Unknown (protein for MGC:75607)
  misc_feature (1)..(91): NCBI GI NO: 38494381 NR Description: Unknown (protein for MGC:75607)
  misc_feature (22)..(188): NCBI GI NO: 17230686 NR Description: hypothetical protein [Nostoc sp. PCC 7120]
  misc_feature (15)..(188): NCBI GI NO: 23124313 NR Description: hypothetical protein [Nostoc punctiforme]
  misc_feature (1)..(191): NCBI GI NO: 37522067 NR Description: hypothetical protein gll2498
  misc_feature (24)..(199): NCBI GI NO: 22963055 NR Description: hypothetical protein [Rhodopseudomonas palustris]
  misc_feature (1)..(189): NCBI GI NO: 23134918 NR Description: hypothetical protein [Cytophaga hutchinsonii]
MRALPGCAHGGGGSDGEGPVIQCMKWGLVPSFTGKAEKPDHFRMFNARSESVKEKVSFRRLIQKNRCLVAVEGFYEWKKNGSKKQPYYIHFQDHRPLVFAALYDAWTNSEGEITHTFTILTTHASTSLNWLHDRMPVILGSKDYVDAWLNDVSVKLEEITAPYEGADLVWYPVTSALGKASFDGPECIKEVHIGATDKPISKFFTKKSTAYDLSGKYENMSRELAHAYKAAKVECDGSVENQGGDGNQHQSREKQTTNCTIKDEPVTLEPQVFETPWSIEHEDTMTLAGATLETQRDLGFKRKIEDTQVEASMKPSQLTRKEKAVKAASDGQASLLSYFARKQGRSMK

SEQ ID NO: 37393 - protein, 325 aa, Zea mays subsp. mays
  peptide (1)..(325): Ceres Seq. ID no. 12361084
  misc_feature (1)..(163): Pfam Name: Pfam Description:  Uncharacterised ACR, COG2135
  misc_feature (1)..(200): NCBI GI NO: 30683129 NR Description: expressed protein [Arabidopsis thaliana]
  misc_feature (1)..(200): NCBI GI NO: 7487880 NR Description: hypothetical protein At2g26470
  misc_feature (1)..(169): NCBI GI NO: 39995151 NR Description: conserved hypothetical protein
  misc_feature (51)..(232): NCBI GI NO: 38494381 NR Description: Unknown (protein for MGC:75607)
  misc_feature (1)..(68): NCBI GI NO: 38494381 NR Description: Unknown (protein for MGC:75607)
  misc_feature (1)..(165): NCBI GI NO: 17230686 NR Description: hypothetical protein [Nostoc sp. PCC 7120]
  misc_feature (1)..(165): NCBI GI NO: 23124313 NR Description: hypothetical protein [Nostoc punctiforme]
  misc_feature (1)..(168): NCBI GI NO: 37522067 NR Description: hypothetical protein gll2498
  misc_feature (1)..(176): NCBI GI NO: 22963055 NR Description: hypothetical protein [Rhodopseudomonas palustris]
  misc_feature (1)..(166): NCBI GI NO: 23134918 NR Description: hypothetical protein [Cytophaga hutchinsonii]
MKWGLVPSFTGKAEKPDHFRMFNARSESVKEKVSFRRLIQKNRCLVAVEGFYEWKKNGSKKQPYYIHFQDHRPLVFAALYDAWTNSEGEITHTFTILTTHASTSLNWLHDRMPVILGSKDYVDAWLNDVSVKLEEITAPYEGADLVWYPVTSALGKASFDGPECIKEVHIGATDKPISKFFTKKSTAYDLSGKYENMSRELAHAYKAAKVECDGSVENQGGDGNQHQSREKQTTNCTIKDEPVTLEPQVFETPWSIEHEDTMTLAGATLETQRDLGFKRKIEDTQVEASMKPSQLTRKEKAVKAASDGQASLLSYFARKQGRSMK

SEQ ID NO: 37394 - DNA, 1352 bp, Zea mays subsp. mays
  misc_feature (1)..(1352): Ceres Seq. ID no. 12383204
agcacagagtggtaagcatggcgagcaccacagacaaccgtggcctcctcgtcgtggccgccgccaccgtcgtcctcgccgtggccgcggccccggcgcatacaccggggggcaatactgctacccctccgccgccgttccggacggtgtacgcgttcggcgactcgttcacggacacggggaacacgcggtcgacgacggggccctactcgttcggctacgtgtccagcccgccctacggcgccaccttcttccaccgctcgaccaaccgctactccgacggccgcctggtggtggacttcctggccgaggcgctggcgctgccgtcctacctcccgccctacctcgccgtgtccgtctccaacgccaacgccacggcggccggagccggcgtcaacttcgcggtggccggcgccacggccatcgagcacgacttcttcgcgcggaacaacctcagcatcgacgtcacgccgcagtccatcatgacgcagtctgggctggttcgacgcgcacctgctccgctcctcctcctccgccgccgccgccgccgacgcgctcttctgggtgggcgagatcggcgccaacgactacgcctacacagtggtcgcccgcgacaccatccctcccaagctcgtccgcaccatggccgtccagagggtcaccgccttcgtcgagggcctgctggagcgaggcgccaagtacgtgatcgtgcaggggctgccgctgacggggtgcctgccgctggccatgacgctggcgcgcgccgacgaccgcgacgccgtgggctgcgccgcctccgtcaaccgccagagctacgcgcacaaccgccgcctcctggcggccctccgcgcgctgcgccgccgccacccgggcgccgtcgttgcgtacgccgattactacgccgcgcacctcgccgtgatgcggagccccgcgcgccacggcttcgccgagcccttccgcacctgctgcggctccggcggcggcgcctacaacttcgacctcttcgccacctgcggctcgccgcaggtcaccacggcctgcgcgcgccccgccgagtacgtcaactgggacggcgtccacatgacggaggccatgtacaaggtcgtcgccggcatgttcttcagtggcgacggctactgccgcccagcgttcaaggacctgctggccatgaaagcccgccaggggaagccgtgattttgagacaatcagaatgcacgttccaattacaataagtagagctgcatgcgtgacgaatccatgtcatcttcatcgtgaacccttaaccatttatcaggcatttataattggatccacatacgtatgatgatgatgagcacaaaggatttaacttc

SEQ ID NO: 37395 - protein, 409 aa, Zea mays subsp. mays
  peptide (1)..(409): Ceres Seq. ID no. 12383205
  misc_feature (49)..(163): Pfam Name: Pfam Description:  GDSL-like Lipase/Acylhydrolase
  misc_feature (45)..(163): NCBI GI NO: 15228381 NR Description: lipase - like protein; protein id: At3g48460
  misc_feature (17)..(164): NCBI GI NO: 37533980 NR Description: putative lipase
  misc_feature (37)..(157): NCBI GI NO: 34903986 NR Description: unnamed protein product
  misc_feature (30)..(184): NCBI GI NO: 37533968 NR Description: putative lipase
  misc_feature (38)..(151): NCBI GI NO: 15218731 NR Description: lipase, putative; protein id: At1g28600
  misc_feature (19)..(140): NCBI GI NO: 34894838 NR Description: putative lipase homolog
  misc_feature (2)..(139): NCBI GI NO: 33147015 NR Description: putative early nodulin 8 precursor
  misc_feature (15)..(145): NCBI GI NO: 15220995 NR Description: lipase, putative; protein id: At1g53940.1
  misc_feature (46)..(188): NCBI GI NO: 26449492 NR Description: unknown protein [Arabidopsis thaliana]
  misc_feature (17)..(138): NCBI GI NO: 7485419 NR Description: hypothetical protein F13C5
HRVVSMASTTDNRGLLVVAAATVVLAVAAAPAHTPGGNTATPPPPFRTVYAFGDSFTDTGNTRSTTGPYSFGYVSSPPYGATFFHRSTNRYSDGRLVVDFLAEALALPSYLPPYLAVSVSNANATAAGAGVNFAVAGATAIEHDFFARNNLSIDVTPQSIMTQSGLVRRAPAPLLLLRRRRRRRALLGGRDRRQRLRLHSGRPRHHPSQARPHHGRPEGHRLRRGPAGARRQVRDRAGAAADGVPAAGHDAGARRRPRRRGLRRLRQPPELRAQPPPPGGPPRAAPPPPGRRRCVRRLLRRAPRRDAEPRAPRLRRALPHLLRLRRRRLQLRPLRHLRLAAGHHGLRAPRRVRQLGRRPHDGGHVQGRRRHVLQWRRLLPPSVQGPAGHESPPGEAVILRQSECTFQLQ

SEQ ID NO: 37396 - protein, 404 aa, Zea mays subsp. mays
  peptide (1)..(404): Ceres Seq. ID no. 12383206
  misc_feature (44)..(158): Pfam Name: Pfam Description:  GDSL-like Lipase/Acylhydrolase
  misc_feature (40)..(158): NCBI GI NO: 15228381 NR Description: lipase - like protein; protein id: At3g48460
  misc_feature (12)..(159): NCBI GI NO: 37533980 NR Description: putative lipase
  misc_feature (32)..(152): NCBI GI NO: 34903986 NR Description: unnamed protein product
  misc_feature (25)..(179): NCBI GI NO: 37533968 NR Description: putative lipase
  misc_feature (33)..(146): NCBI GI NO: 15218731 NR Description: lipase, putative; protein id: At1g28600
  misc_feature (14)..(135): NCBI GI NO: 34894838 NR Description: putative lipase homolog
  misc_feature (1)..(134): NCBI GI NO: 33147015 NR Description: putative early nodulin 8 precursor
  misc_feature (10)..(140): NCBI GI NO: 15220995 NR Description: lipase, putative; protein id: At1g53940.1
  misc_feature (41)..(183): NCBI GI NO: 26449492 NR Description: unknown protein [Arabidopsis thaliana]
  misc_feature (12)..(133): NCBI GI NO: 7485419 NR Description: hypothetical protein F13C5
MASTTDNRGLLVVAAATVVLAVAAAPAHTPGGNTATPPPPFRTVYAFGDSFTDTGNTRSTTGPYSFGYVSSPPYGATFFHRSTNRYSDGRLVVDFLAEALALPSYLPPYLAVSVSNANATAAGAGVNFAVAGATAIEHDFFARNNLSIDVTPQSIMTQSGLVRRAPAPLLLLRRRRRRRALLGGRDRRQRLRLHSGRPRHHPSQARPHHGRPEGHRLRRGPAGARRQVRDRAGAAADGVPAAGHDAGARRRPRRRGLRRLRQPPELRAQPPPPGGPPRAAPPPPGRRRCVRRLLRRAPRRDAEPRAPRLRRALPHLLRLRRRRLQLRPLRHLRLAAGHHGLRAPRRVRQLGRRPHDGGHVQGRRRHVLQWRRLLPPSVQGPAGHESPPGEAVILRQSECTFQLQ

SEQ ID NO: 37397 - protein, 249 aa, Zea mays subsp. mays
  peptide (1)..(249): Ceres Seq. ID no. 12383207
  misc_feature (1)..(24): NCBI GI NO: 37533968 NR Description: putative lipase
  misc_feature (1)..(28): NCBI GI NO: 26449492 NR Description: unknown protein [Arabidopsis thaliana]
MTQSGLVRRAPAPLLLLRRRRRRRALLGGRDRRQRLRLHSGRPRHHPSQARPHHGRPEGHRLRRGPAGARRQVRDRAGAAADGVPAAGHDAGARRRPRRRGLRRLRQPPELRAQPPPPGGPPRAAPPPPGRRRCVRRLLRRAPRRDAEPRAPRLRRALPHLLRLRRRRLQLRPLRHLRLAAGHHGLRAPRRVRQLGRRPHDGGHVQGRRRHVLQWRRLLPPSVQGPAGHESPPGEAVILRQSECTFQLQ

SEQ ID NO: 37398 - DNA, 1671 bp, Zea mays subsp. mays
  misc_feature (1)..(1671): Ceres Seq. ID no. 12352733
accaagcgcccaacaactgccgccccaagccaagggaagggaaaaggctatcgttctcgtcagtcgtcacgagagccgcgacggcgcgcatggcggcgacggcagcggcgctccggtgctgcttccccggatcctccggtgtcggtagtggcttcgtcaagcccaactcctccaggcgaggctggtgcgcagcggccgtggcggcgccgtcgcgggaggcggaaccggtttcgtcgctggggcaccgcacccgcgtcgacttccccatccttcaccaggaatttgatgatgccaaattagtttacttcgacaatggtgcaacatcgcagaaaccatgtagtgtgatgaaaacattagatgagtactaccgatcgtacaattcgaatgttcatcgtggtatccatgcactcaggctactcatgcatatgaggatgcaagaagaaaagttgcaaattttgtcaacgcagctgatagcagagagattgttttcactcgtaatgctactgaagctattaatctggtagcctattcatggggactatctaacttgaaagaaggagatgaaattgttcttacagttgcagagcatcatagtgctattgttccatggcaatttgtttcccagaagactggtgccaccttaaaatatgttggattgactaaagaaaatgtcccagacattgagcagttaaaagggtttctgtcgaacaagacaaagatagttgttgttcatcatgtctcaaatgttctaggttccatgcttcctatcgaggagattgtaacatggtcaaacagagttggagctaaagtccttgtagatgcttgccaaagtgttccccatatgccagttgatgttcagaaacttggcgcggactttcttgtcgcatcctctcataagatgtgtggccctacaggcgtcggatttttgcatggtaaatttgagattttgtcgtctatggagcctttcttaggtggtggtgaaatgattgcggatgtattcgaagacaaatccacatatgctgagcctccctctagatttgaggctggaactcctgcaattggagaagctataggactgggagcagccatcgactatttatcatgcattggcatggagcagatccacgaatatgagaaagagctggggacatacctctacgaaagccttctctctgttccaaatgtccagatatatggcccggcgccttcccagactgtccaccgtgctccgttgtgctccttcaatatcgagaacgtccatcctacagatatcgcagagattcttgatctgcagcatagcgtagcgattcggtcggggcatcactgcgcgcagatcttgcataggacccttggcatcaacgcaagtgctcgtgcgagtcttcacttctacaacacaaaagacgaggtggataccttcgtcgacgcgcttaaagccaccgttgatttcctcacggatcgatactagtgcggttcagttcacttcccttttttttttgccagtttcatcgctctctcgtttgaactgttgtatgcacacacaaaaaagtatgcatatatatttggtataaagaaaacatacaaagtgtacggcttggcaaagtgagctcccttatttggagttttggactgtactcccttatttggcggttgttgttgaattaaacgtagttc

SEQ ID NO: 37399 - protein, 235 aa, Zea mays subsp. mays
  peptide (1)..(235): Ceres Seq. ID no. 12352734
  misc_feature (1)..(220): Pfam Name: Pfam Description:  Aminotransferase class-V
  misc_feature (1)..(230): NCBI GI NO: 22329419 NR Description: nitrogen fixation protein
  misc_feature (1)..(126): NCBI GI NO: 6664318 NR Description: T27G7.17 [Arabidopsis thaliana]
  misc_feature (99)..(230): NCBI GI NO: 6664318 NR Description: T27G7.17 [Arabidopsis thaliana]
  misc_feature (1)..(230): NCBI GI NO: 23129616 NR Description: hypothetical protein [Nostoc punctiforme]
  misc_feature (1)..(230): NCBI GI NO: 17229987 NR Description: probable aminotransferase [Nostoc sp. PCC 7120]
  misc_feature (1)..(233): NCBI GI NO: 23040580 NR Description: hypothetical protein
  misc_feature (1)..(233): NCBI GI NO: 22299611 NR Description: cysteine desulfurase
  misc_feature (1)..(232): NCBI GI NO: 34765746 NR Description: SufS [Synechococcus sp. PCC 7002]
  misc_feature (1)..(233): NCBI GI NO: 16331747 NR Description: NifS protein [Synechocystis sp. PCC 6803]
  misc_feature (1)..(235): NCBI GI NO: 23024352 NR Description: hypothetical protein
MLPIEEIVTWSNRVGAKVLVDACQSVPHMPVDVQKLGADFLVASSHKMCGPTGVGFLHGKFEILSSMEPFLGGGEMIADVFEDKSTYAEPPSRFEAGTPAIGEAIGLGAAIDYLSCIGMEQIHEYEKELGTYLYESLLSVPNVQIYGPAPSQTVHRAPLCSFNIENVHPTDIAEILDLQHSVAIRSGHHCAQILHRTLGINASARASLHFYNTKDEVDTFVDALKATVDFLTDRY

SEQ ID NO: 37400 - protein, 207 aa, Zea mays subsp. mays
  peptide (1)..(207): Ceres Seq. ID no. 12352735
  misc_feature (1)..(192): Pfam Name: Pfam Description:  Aminotransferase class-V
  misc_feature (1)..(202): NCBI GI NO: 22329419 NR Description: nitrogen fixation protein
  misc_feature (1)..(98): NCBI GI NO: 6664318 NR Description: T27G7.17 [Arabidopsis thaliana]
  misc_feature (71)..(202): NCBI GI NO: 6664318 NR Description: T27G7.17 [Arabidopsis thaliana]
  misc_feature (1)..(202): NCBI GI NO: 23129616 NR Description: hypothetical protein [Nostoc punctiforme]
  misc_feature (1)..(202): NCBI GI NO: 17229987 NR Description: probable aminotransferase [Nostoc sp. PCC 7120]
  misc_feature (1)..(205): NCBI GI NO: 23040580 NR Description: hypothetical protein
  misc_feature (1)..(205): NCBI GI NO: 22299611 NR Description: cysteine desulfurase
  misc_feature (1)..(204): NCBI GI NO: 34765746 NR Description: SufS [Synechococcus sp. PCC 7002]
  misc_feature (1)..(205): NCBI GI NO: 16331747 NR Description: NifS protein [Synechocystis sp. PCC 6803]
  misc_feature (1)..(207): NCBI GI NO: 23024352 NR Description: hypothetical protein
MPVDVQKLGADFLVASSHKMCGPTGVGFLHGKFEILSSMEPFLGGGEMIADVFEDKSTYAEPPSRFEAGTPAIGEAIGLGAAIDYLSCIGMEQIHEYEKELGTYLYESLLSVPNVQIYGPAPSQTVHRAPLCSFNIENVHPTDIAEILDLQHSVAIRSGHHCAQILHRTLGINASARASLHFYNTKDEVDTFVDALKATVDFLTDRY

SEQ ID NO: 37401 - protein, 188 aa, Zea mays subsp. mays
  peptide (1)..(188): Ceres Seq. ID no. 12352736
  misc_feature (1)..(173): Pfam Name: Pfam Description:  Aminotransferase class-V
  misc_feature (1)..(183): NCBI GI NO: 22329419 NR Description: nitrogen fixation protein
  misc_feature (1)..(79): NCBI GI NO: 6664318 NR Description: T27G7.17 [Arabidopsis thaliana]
  misc_feature (52)..(183): NCBI GI NO: 6664318 NR Description: T27G7.17 [Arabidopsis thaliana]
  misc_feature (1)..(183): NCBI GI NO: 23129616 NR Description: hypothetical protein [Nostoc punctiforme]
  misc_feature (1)..(183): NCBI GI NO: 17229987 NR Description: probable aminotransferase [Nostoc sp. PCC 7120]
  misc_feature (1)..(186): NCBI GI NO: 23040580 NR Description: hypothetical protein
  misc_feature (1)..(186): NCBI GI NO: 22299611 NR Description: cysteine desulfurase
  misc_feature (1)..(185): NCBI GI NO: 34765746 NR Description: SufS [Synechococcus sp. PCC 7002]
  misc_feature (1)..(186): NCBI GI NO: 16331747 NR Description: NifS protein [Synechocystis sp. PCC 6803]
  misc_feature (1)..(188): NCBI GI NO: 23024352 NR Description: hypothetical protein
MCGPTGVGFLHGKFEILSSMEPFLGGGEMIADVFEDKSTYAEPPSRFEAGTPAIGEAIGLGAAIDYLSCIGMEQIHEYEKELGTYLYESLLSVPNVQIYGPAPSQTVHRAPLCSFNIENVHPTDIAEILDLQHSVAIRSGHHCAQILHRTLGINASARASLHFYNTKDEVDTFVDALKATVDFLTDRY

SEQ ID NO: 37402 - DNA, 1847 bp, Zea mays subsp. mays
  misc_feature (1)..(1847): Ceres Seq. ID no. 12362207
gcacgagaccattacctagaacatcctaatcgaaaagtttttgtcagtcatgcggccagcttcctccccgctagctcactagccaggcccgggcgcctcaccgccacggtgaccgccgccttctttgacgcctgcggcctgcctaaccccgaagtctctcagtgcgtgtttggccgaaatccacggggagggcttgtcctcgcctttgctgagctgctccggagcggagccgtgcctacttgagttcaggtttgtttcgccatccgaggccaagattcggagcgtcgccgaagggaggcgatgaagggcaaaggcgggccggtggacaggaggtcctccgccagatggaggctgctggtgctctgcgcattcagcttcggcatcggcatgatcttcaccgaccggttctggacagcaccggataccagtagccataccatgtctcaacgctggaggcaagagcaagagctccaacttgtatcagaagattgcaacacaaagaggaagcatggggaagacaaggatataatgggagaggtaaccaagactcatgaagccatacaatcattggataagtccatctcaacgctgcagatggagcttgcagcaaagcggagcacacttgagctactccgatctagtggttcaccagtaacctctgaaactagccaaccaaggaaaaaggcttttgttgtcattggagtcaacactgcattcagcagccgcaagcgccgtgattctgtccgggagacatggatgcctcaaggagaaaagctgcaacaattagaagaacagaagggaatagttatccgcttcactatcgggcacagtgctacatccaacagtatactggacaaagctatagattcagaggacgctcagcatcatgactttcttaggctggaccatgttgagggatatcatgaactctcagctaagacaaaaatattcttctctactgctgttggcatctgggacgctgacttctacgtcaaggtcgatgatgatgtgcatgtaaacctaggaatgcttgccactacccttgctcggcataaatcgaaaccaagaacttatattggctgcatgaagtcaggcccagttcttgctgacaagaatgtgaagtaccatgaacctgagtactggaaatttggggaggaaggaaataagtacttccgtcatgctacagggcagatatatgccatttcgaaagatctggcgacttatatctcaatcaatcggcctatcttgcacaaatacgcaaacgaagacgtgtcgcttggatcgtggttcatcggtttggaagttaatcacatcgatgaaaggaacatgtgctgtggaactccaccagactgtgagtggaaagggcaagctggcaatgtctgcgtagcgtctttcgactggagctgcagtggcatatgcaagtctgttgagaggatcaaagatgtacatgctcgctgcggcgaaggggattcagcagtttggagtgctcttgtctagcacataccctcctttgcccgtaaatatgtagcataattggtaagctttggtggtggtggacaccagcataggcgttaggcaactccccaagtaaacttgacaaaacccagagatcatgatcatgccccgtggaacattgccaatggtaactctggctggaaaaattctgcgtaattttggtctgtcactgttcatgaccttcggacttcggtggtgttaggagctccaaggtagggttgcaactgatgttactgatcttacatgtagggggagagtttctcagctgatgcgagatcatgtaatgcagaggacattgttttatgcaaattttgacattcttttgcgggttc

SEQ ID NO: 37403 - protein, 398 aa, Zea mays subsp. mays
  peptide (1)..(398): Ceres Seq. ID no. 12362208
  misc_feature (143)..(341): Pfam Name: Pfam Description:  Galactosyltransferase
  misc_feature (13)..(397): NCBI GI NO: 4138265 NR Description: Avr9 elicitor response protein [Nicotiana tabacum]
  misc_feature (13)..(398): NCBI GI NO: 30699558 NR Description: Avr9 elicitor response protein -related
  misc_feature (13)..(398): NCBI GI NO: 12323294 NR Description: putative
  misc_feature (6)..(396): NCBI GI NO: 15220440 NR Description: putative AVR9 elicitor response protein
  misc_feature (8)..(396): NCBI GI NO: 18395060 NR Description: Expressed protein; protein id: At1g22015
  misc_feature (1)..(396): NCBI GI NO: 15225684 NR Description: unknown protein; protein id: At2g32430.1
  misc_feature (18)..(391): NCBI GI NO: 15217544 NR Description: elicitor response protein, putative
  misc_feature (13)..(396): NCBI GI NO: 18416895 NR Description: Avr9 elicitor response like protein
  misc_feature (13)..(396): NCBI GI NO: 7485336 NR Description: hypothetical protein F10M23
  misc_feature (13)..(394): NCBI GI NO: 15223337 NR Description: Avr9 elicitor response protein, putative
MKGKGGPVDRRSSARWRLLVLCAFSFGIGMIFTDRFWTAPDTSSHTMSQRWRQEQELQLVSEDCNTKRKHGEDKDIMGEVTKTHEAIQSLDKSISTLQMELAAKRSTLELLRSSGSPVTSETSQPRKKAFVVIGVNTAFSSRKRRDSVRETWMPQGEKLQQLEEQKGIVIRFTIGHSATSNSILDKAIDSEDAQHHDFLRLDHVEGYHELSAKTKIFFSTAVGIWDADFYVKVDDDVHVNLGMLATTLARHKSKPRTYIGCMKSGPVLADKNVKYHEPEYWKFGEEGNKYFRHATGQIYAISKDLATYISINRPILHKYANEDVSLGSWFIGLEVNHIDERNMCCGTPPDCEWKGQAGNVCVASFDWSCSGICKSVERIKDVHARCGEGDSAVWSALV

SEQ ID NO: 37404 - protein, 369 aa, Zea mays subsp. mays
  peptide (1)..(369): Ceres Seq. ID no. 12362209
  misc_feature (114)..(312): Pfam Name: Pfam Description:  Galactosyltransferase
  misc_feature (1)..(368): NCBI GI NO: 4138265 NR Description: Avr9 elicitor response protein [Nicotiana tabacum]
  misc_feature (1)..(369): NCBI GI NO: 30699558 NR Description: Avr9 elicitor response protein -related
  misc_feature (1)..(369): NCBI GI NO: 12323294 NR Description: putative
  misc_feature (1)..(367): NCBI GI NO: 15220440 NR Description: putative AVR9 elicitor response protein
  misc_feature (1)..(367): NCBI GI NO: 18395060 NR Description: Expressed protein; protein id: At1g22015
  misc_feature (1)..(367): NCBI GI NO: 15225684 NR Description: unknown protein; protein id: At2g32430.1
  misc_feature (1)..(362): NCBI GI NO: 15217544 NR Description: elicitor response protein, putative
  misc_feature (1)..(367): NCBI GI NO: 18416895 NR Description: Avr9 elicitor response like protein
  misc_feature (1)..(367): NCBI GI NO: 7485336 NR Description: hypothetical protein F10M23
  misc_feature (1)..(365): NCBI GI NO: 15223337 NR Description: Avr9 elicitor response protein, putative
MIFTDRFWTAPDTSSHTMSQRWRQEQELQLVSEDCNTKRKHGEDKDIMGEVTKTHEAIQSLDKSISTLQMELAAKRSTLELLRSSGSPVTSETSQPRKKAFVVIGVNTAFSSRKRRDSVRETWMPQGEKLQQLEEQKGIVIRFTIGHSATSNSILDKAIDSEDAQHHDFLRLDHVEGYHELSAKTKIFFSTAVGIWDADFYVKVDDDVHVNLGMLATTLARHKSKPRTYIGCMKSGPVLADKNVKYHEPEYWKFGEEGNKYFRHATGQIYAISKDLATYISINRPILHKYANEDVSLGSWFIGLEVNHIDERNMCCGTPPDCEWKGQAGNVCVASFDWSCSGICKSVERIKDVHARCGEGDSAVWSALV

SEQ ID NO: 37405 - protein, 352 aa, Zea mays subsp. mays
  peptide (1)..(352): Ceres Seq. ID no. 12362210
  misc_feature (97)..(295): Pfam Name: Pfam Description:  Galactosyltransferase
  misc_feature (1)..(351): NCBI GI NO: 4138265 NR Description: Avr9 elicitor response protein [Nicotiana tabacum]
  misc_feature (1)..(352): NCBI GI NO: 30699558 NR Description: Avr9 elicitor response protein -related
  misc_feature (1)..(352): NCBI GI NO: 12323294 NR Description: putative
  misc_feature (1)..(350): NCBI GI NO: 15220440 NR Description: putative AVR9 elicitor response protein
  misc_feature (1)..(350): NCBI GI NO: 18395060 NR Description: Expressed protein; protein id: At1g22015
  misc_feature (1)..(350): NCBI GI NO: 15225684 NR Description: unknown protein; protein id: At2g32430.1
  misc_feature (1)..(345): NCBI GI NO: 15217544 NR Description: elicitor response protein, putative
  misc_feature (1)..(350): NCBI GI NO: 18416895 NR Description: Avr9 elicitor response like protein
  misc_feature (1)..(350): NCBI GI NO: 7485336 NR Description: hypothetical protein F10M23
  misc_feature (1)..(348): NCBI GI NO: 15223337 NR Description: Avr9 elicitor response protein, putative
MSQRWRQEQELQLVSEDCNTKRKHGEDKDIMGEVTKTHEAIQSLDKSISTLQMELAAKRSTLELLRSSGSPVTSETSQPRKKAFVVIGVNTAFSSRKRRDSVRETWMPQGEKLQQLEEQKGIVIRFTIGHSATSNSILDKAIDSEDAQHHDFLRLDHVEGYHELSAKTKIFFSTAVGIWDADFYVKVDDDVHVNLGMLATTLARHKSKPRTYIGCMKSGPVLADKNVKYHEPEYWKFGEEGNKYFRHATGQIYAISKDLATYISINRPILHKYANEDVSLGSWFIGLEVNHIDERNMCCGTPPDCEWKGQAGNVCVASFDWSCSGICKSVERIKDVHARCGEGDSAVWSALV

SEQ ID NO: 37406 - DNA, 1368 bp, Zea mays subsp. mays
  misc_feature (1)..(1368): Ceres Seq. ID no. 12407575
attaacaaagctgcagcttcgaggcctcacctcccgagccgaaagcgattcatagcatcatctattcatccgcgcgtggtgcaatggaggaggctcccacgacgccgccgcggaaggcgaagccgctgatgtcgcgcctcatgcggctttccatcaaggtcgtggacagggtcaccgacgccacccgccgggcagacgggacgctgaatcgttttgcgctctcgctgctggacccgcgtgtcccggccatctcctccccttgccgtggcgtcgcctcccgggacgtcatcctcgacggcgccctccgcctccgcgcgcgcctattccacccggccacgacgtcaaaatccacggcccctctccccgtgatcgtctttttccacggcggcgggttcgcgtacctctccgcggcgtccccggcctacgacgccgcgtgccgccgcatcgcgcggtacgcctccgcggcagtgctctcggtcgactaccgccgcgctcccgagcaccggttcccgggcgccctacgatgacggtatcgcggcgctgcgcttcctcgacgatccaaagaaccaccccaccccgctcgacgtgtcccgcagcttcgtcgcgggcgacagcgctggcggcaacatcgcccaccacgtggcccgccgctacgcgtccgacgtcgcctcgttcaggaacatccgtgtcgccggcctgatcgccatccagcccttcttcggcggcgaggagcggacaccctccgagctccgcctagacggcgccgcgcccatcgtgtccatcgaccgcaccgactggatgtggcgcgcgttcctgccgcccggctgcgaccgtacccacgagggtgccaacttcgcatccccagcagccgccgccggcctcgactcccaggcgttccctcccgtcctgctcgtcatcggtggcttcgacccgctgcaggattggcagcgccggtacggcgagatgctgaagagcatgggcaaggatgtgcgagtggttgagtaccctgacgccatccacgccttctacgtcttccccgggttcgacaacgcgcgagatttcatgatacgcatcgccaagttcgtcgccgaaagcgccagcggcagaagtagcagctagcgagttgtcggagctggagatacagtctgcacactgtgcagtggtcaggtgtttggtgcaagtggcgtgtcgtgcgtcgcaatttgcagccttggctgtggcgttttggaggatgcggcggtatggttgcgtggttgagtgagagaagaagatgtgtctggttgttattgttaactttcgtaaaagtttggtctgataagtctgatgaatgatgtaattttaattaactaatcaagttggtgatttcgt

SEQ ID NO: 37407 - protein, 147 aa, Zea mays subsp. mays
  peptide (1)..(147): Ceres Seq. ID no. 12407576
  misc_feature (80)..(138): Pfam Name: Pfam Description:  Carboxylesterase
  misc_feature (10)..(145): NCBI GI NO: 34904770 NR Description: similar to carboxylesterase
  misc_feature (1)..(145): NCBI GI NO: 34393714 NR Description: putative esterase
  misc_feature (1)..(145): NCBI GI NO: 34904774 NR Description: similar to carboxylesterase
  misc_feature (20)..(145): NCBI GI NO: 34904772 NR Description: similar to carboxylesterase
  misc_feature (21)..(143): NCBI GI NO: 15237783 NR Description: putative protein; protein id: At5g23530
  misc_feature (21)..(143): NCBI GI NO: 21618039 NR Description: unknown [Arabidopsis thaliana]
  misc_feature (36)..(145): NCBI GI NO: 34904758 NR Description: hypothetical protein~predicted by GeneMark
  misc_feature (35)..(145): NCBI GI NO: 15240483 NR Description: putative protein; protein id: At5g27320
  misc_feature (1)..(145): NCBI GI NO: 15229905 NR Description: unknown protein; protein id: At3g05120.1
  misc_feature (10)..(145): NCBI GI NO: 15229371 NR Description: putative protein; protein id: At3g63010.1
MEEAPTTPPRKAKPLMSRLMRLSIKVVDRVTDATRRADGTLNRFALSLLDPRVPAISSPCRGVASRDVILDGALRLRARLFHPATTSKSTAPLPVIVFFHGGGFAYLSAASPAYDAACRRIARYASAAVLSVDYRRAPEHRFPGALR

SEQ ID NO: 37408 - protein, 132 aa, Zea mays subsp. mays
  peptide (1)..(132): Ceres Seq. ID no. 12407577
  misc_feature (65)..(123): Pfam Name: Pfam Description:  Carboxylesterase
  misc_feature (1)..(130): NCBI GI NO: 34904770 NR Description: similar to carboxylesterase
  misc_feature (1)..(130): NCBI GI NO: 34393714 NR Description: putative esterase
  misc_feature (1)..(130): NCBI GI NO: 34904774 NR Description: similar to carboxylesterase
  misc_feature (5)..(130): NCBI GI NO: 34904772 NR Description: similar to carboxylesterase
  misc_feature (6)..(128): NCBI GI NO: 15237783 NR Description: putative protein; protein id: At5g23530
  misc_feature (6)..(128): NCBI GI NO: 21618039 NR Description: unknown [Arabidopsis thaliana]
  misc_feature (21)..(130): NCBI GI NO: 34904758 NR Description: hypothetical protein~predicted by GeneMark
  misc_feature (20)..(130): NCBI GI NO: 15240483 NR Description: putative protein; protein id: At5g27320
  misc_feature (1)..(130): NCBI GI NO: 15229905 NR Description: unknown protein; protein id: At3g05120.1
  misc_feature (1)..(130): NCBI GI NO: 15229371 NR Description: putative protein; protein id: At3g63010.1
MSRLMRLSIKVVDRVTDATRRADGTLNRFALSLLDPRVPAISSPCRGVASRDVILDGALRLRARLFHPATTSKSTAPLPVIVFFHGGGFAYLSAASPAYDAACRRIARYASAAVLSVDYRRAPEHRFPGALR

SEQ ID NO: 37409 - protein, 128 aa, Zea mays subsp. mays
  peptide (1)..(128): Ceres Seq. ID no. 12407578
  misc_feature (61)..(119): Pfam Name: Pfam Description:  Carboxylesterase
  misc_feature (1)..(126): NCBI GI NO: 34904770 NR Description: similar to carboxylesterase
  misc_feature (1)..(126): NCBI GI NO: 34393714 NR Description: putative esterase
  misc_feature (1)..(126): NCBI GI NO: 34904774 NR Description: similar to carboxylesterase
  misc_feature (1)..(126): NCBI GI NO: 34904772 NR Description: similar to carboxylesterase
  misc_feature (2)..(124): NCBI GI NO: 15237783 NR Description: putative protein; protein id: At5g23530
  misc_feature (2)..(124): NCBI GI NO: 21618039 NR Description: unknown [Arabidopsis thaliana]
  misc_feature (17)..(126): NCBI GI NO: 34904758 NR Description: hypothetical protein~predicted by GeneMark
  misc_feature (16)..(126): NCBI GI NO: 15240483 NR Description: putative protein; protein id: At5g27320
  misc_feature (1)..(126): NCBI GI NO: 15229905 NR Description: unknown protein; protein id: At3g05120.1
  misc_feature (1)..(126): NCBI GI NO: 15229371 NR Description: putative protein; protein id: At3g63010.1
MRLSIKVVDRVTDATRRADGTLNRFALSLLDPRVPAISSPCRGVASRDVILDGALRLRARLFHPATTSKSTAPLPVIVFFHGGGFAYLSAASPAYDAACRRIARYASAAVLSVDYRRAPEHRFPGALR

SEQ ID NO: 37410 - DNA, 1171 bp, Zea mays subsp. mays
  misc_feature (1)..(1171): Ceres Seq. ID no. 12404842
accaacgccaccaaaaccaacactccgatggatgttttcaccaagcaactcctccccatgcctcaccagcgggaccccaactacccttcctcttccacctcttcctcctcgtcgtcgtcctcctccacgcccccatctcgccctcaccaccgtgcgcaaccccagccccacaacctcccccagtcccccagacccgtcccgcgcaccatcgacaccaccccgttccccaccaccttcgtccaggccgacaccacctcgttcaagcaggtcgtccagatgctcaccggcgccgagcagccggccaacaacgacgcgacgacggcgggcgcagccgctgccgctgccgccaacggcggtggcgccggcgcccaggcggccagcggtggaccgtgctgccggcccaagaagccgtcgttcaagctgtacgagcggcggagcagcctgaagaacctgaagatgatcgcgccgctggcgatgggctcgccgccgtcgccgtcgccgcggagggcggcgccggagatcctgtcgccgagcgtgctggacttcccgtccctcacgctcagcccggtgacgccgctcgccggcgacccctttaaccgctcgccggcgtcggcgtcgtcctccgaggaggccgagcgcgcggccatcgccgagaggggcttcttcctccacccgtccccgaggggcgccgagcccccgcgcctgctcccgctcttccccgtcgtctcgccccggatggccggcgccgcggcggcgccgtcgtccgagtgaagatcccccgacgcgggcgcgcgcctgctctaccgtagccgccgccgccgccaccaccaccaccatcagtactactactactacaacaaccgtcgccgtcgccgtaccgtccgtccttgtttcgtgaggtgcttgctttgctgttcttcttgatcgacgccgctgtaatttttgcccccttcttgcttttcttggaacgggcgaggaagggagttctctctctctctctctttttttttgcttcgtttcggagcggcgacacgcgagcgatcagcgatctgacgatccaggctcgctcggttcctgatcgctcgcgtcgcgggagcctccggccgggatgaaatgatgggatggatgaattagacagttaataattaatgaagcctaatctgaagatttg

SEQ ID NO: 37411 - protein, 256 aa, Zea mays subsp. mays
  peptide (1)..(256): Ceres Seq. ID no. 12404843
  misc_feature (73)..(103): Pfam Name: Pfam Description:  VQ motif
  misc_feature (10)..(247): NCBI GI NO: 34909488 NR Description: P0481E12.14
  misc_feature (1)..(255): NCBI GI NO: 25518323 NR Description: hypothetical protein F3H9.7
  misc_feature (60)..(244): NCBI GI NO: 34903674 NR Description: B1015E06.22
  misc_feature (7)..(255): NCBI GI NO: 30690315 NR Description: expressed protein [Arabidopsis thaliana]
  misc_feature (7)..(255): NCBI GI NO: 13877535 NR Description: Unknown protein [Arabidopsis thaliana]
  misc_feature (30)..(151): NCBI GI NO: 15238851 NR Description: putative protein; protein id: At5g53830
  misc_feature (163)..(244): NCBI GI NO: 15238851 NR Description: putative protein; protein id: At5g53830
  misc_feature (139)..(255): NCBI GI NO: 21618308 NR Description: unknown [Arabidopsis thaliana]
  misc_feature (33)..(247): NCBI GI NO: 15232547 NR Description: unknown protein; protein id: At3g15300.1
  misc_feature (133)..(241): NCBI GI NO: 15226165 NR Description: hypothetical protein; protein id: At2g33780.1
TNATKTNTPMDVFTKQLLPMPHQRDPNYPSSSTSSSSSSSSSTPPSRPHHRAQPQPHNLPQSPRPVPRTIDTTPFPTTFVQADTTSFKQVVQMLTGAEQPANNDATTAGAAAAAAANGGGAGAQAASGGPCCRPKKPSFKLYERRSSLKNLKMIAPLAMGSPPSPSPRRAAPEILSPSVLDFPSLTLSPVTPLAGDPFNRSPASASSSEEAERAAIAERGFFLHPSPRGAEPPRLLPLFPVVSPRMAGAAAAPSSE

SEQ ID NO: 37412 - protein, 247 aa, Zea mays subsp. mays
  peptide (1)..(247): Ceres Seq. ID no. 12404844
  misc_feature (64)..(94): Pfam Name: Pfam Description:  VQ motif
  misc_feature (1)..(238): NCBI GI NO: 34909488 NR Description: P0481E12.14
  misc_feature (1)..(246): NCBI GI NO: 25518323 NR Description: hypothetical protein F3H9.7
  misc_feature (51)..(235): NCBI GI NO: 34903674 NR Description: B1015E06.22
  misc_feature (1)..(246): NCBI GI NO: 30690315 NR Description: expressed protein [Arabidopsis thaliana]
  misc_feature (1)..(246): NCBI GI NO: 13877535 NR Description: Unknown protein [Arabidopsis thaliana]
  misc_feature (21)..(142): NCBI GI NO: 15238851 NR Description: putative protein; protein id: At5g53830
  misc_feature (154)..(235): NCBI GI NO: 15238851 NR Description: putative protein; protein id: At5g53830
  misc_feature (130)..(246): NCBI GI NO: 21618308 NR Description: unknown [Arabidopsis thaliana]
  misc_feature (24)..(238): NCBI GI NO: 15232547 NR Description: unknown protein; protein id: At3g15300.1
  misc_feature (124)..(232): NCBI GI NO: 15226165 NR Description: hypothetical protein; protein id: At2g33780.1
MDVFTKQLLPMPHQRDPNYPSSSTSSSSSSSSSTPPSRPHHRAQPQPHNLPQSPRPVPRTIDTTPFPTTFVQADTTSFKQVVQMLTGAEQPANNDATTAGAAAAAAANGGGAGAQAASGGPCCRPKKPSFKLYERRSSLKNLKMIAPLAMGSPPSPSPRRAAPEILSPSVLDFPSLTLSPVTPLAGDPFNRSPASASSSEEAERAAIAERGFFLHPSPRGAEPPRLLPLFPVVSPRMAGAAAAPSSE

SEQ ID NO: 37413 - protein, 237 aa, Zea mays subsp. mays
  peptide (1)..(237): Ceres Seq. ID no. 12404845
  misc_feature (54)..(84): Pfam Name: Pfam Description:  VQ motif
  misc_feature (1)..(228): NCBI GI NO: 34909488 NR Description: P0481E12.14
  misc_feature (1)..(236): NCBI GI NO: 25518323 NR Description: hypothetical protein F3H9.7
  misc_feature (41)..(225): NCBI GI NO: 34903674 NR Description: B1015E06.22
  misc_feature (1)..(236): NCBI GI NO: 30690315 NR Description: expressed protein [Arabidopsis thaliana]
  misc_feature (1)..(236): NCBI GI NO: 13877535 NR Description: Unknown protein [Arabidopsis thaliana]
  misc_feature (11)..(132): NCBI GI NO: 15238851 NR Description: putative protein; protein id: At5g53830
  misc_feature (144)..(225): NCBI GI NO: 15238851 NR Description: putative protein; protein id: At5g53830
  misc_feature (120)..(236): NCBI GI NO: 21618308 NR Description: unknown [Arabidopsis thaliana]
  misc_feature (14)..(228): NCBI GI NO: 15232547 NR Description: unknown protein; protein id: At3g15300.1
  misc_feature (114)..(222): NCBI GI NO: 15226165 NR Description: hypothetical protein; protein id: At2g33780.1
MPHQRDPNYPSSSTSSSSSSSSSTPPSRPHHRAQPQPHNLPQSPRPVPRTIDTTPFPTTFVQADTTSFKQVVQMLTGAEQPANNDATTAGAAAAAAANGGGAGAQAASGGPCCRPKKPSFKLYERRSSLKNLKMIAPLAMGSPPSPSPRRAAPEILSPSVLDFPSLTLSPVTPLAGDPFNRSPASASSSEEAERAAIAERGFFLHPSPRGAEPPRLLPLFPVVSPRMAGAAAAPSSE

SEQ ID NO: 37414 - DNA, 1415 bp, Zea mays subsp. mays; identical to SEQ ID NO: 29761
  misc_feature (1)..(1415): Ceres Seq. ID no. 12406615

SEQ ID NO: 37415 - protein, 336 aa, Zea mays subsp. mays; identical to SEQ ID NO: 29762
  peptide (1)..(336): Ceres Seq. ID no. 12406616
  misc_feature (41)..(197): Pfam Name: Pfam Description:  Formin Homology 2 Domain
  misc_feature (59)..(197): NCBI GI NO: 7446482 NR Description: probable cell wall-plasma membrane linker proteinPRP precursor - rape
  misc_feature (62)..(202): NCBI GI NO: 7446482 NR Description: probable cell wall-plasma membrane linker proteinPRP precursor - rape
  misc_feature (28)..(202): NCBI GI NO: 7446483 NR Description: probable cell wall protein - garden pea
  misc_feature (35)..(199): NCBI GI NO: 18396941 NR Description: expressed protein; protein id: At2g10940
  misc_feature (62)..(202): NCBI GI NO: 7446482 NR Description: probable cell wall-plasma membrane linker proteinPRP precursor - rape
  misc_feature (58)..(202): NCBI GI NO: 1076501 NR Description: cell wall protein - alfalfa
  misc_feature (58)..(197): NCBI GI NO: 7446482 NR Description: probable cell wall-plasma membrane linker proteinPRP precursor - rape
  misc_feature (56)..(202): NCBI GI NO: 1076501 NR Description: cell wall protein - alfalfa
  misc_feature (58)..(202): NCBI GI NO: 11994732 NR Description: contains similarity to cell wall-plasma membranelinker protein~gene_id:MKA23
  misc_feature (58)..(202): NCBI GI NO: 15233282 NR Description: unknown protein; protein id: At3g22120.1

SEQ ID NO: 37416 - protein, 320 aa, Zea mays subsp. mays; identical to SEQ ID NO: 29763
  peptide (1)..(320): Ceres Seq. ID no. 12406617
  misc_feature (25)..(181): Pfam Name: Pfam Description:  Formin Homology 2 Domain
  misc_feature (43)..(181): NCBI GI NO: 7446482 NR Description: probable cell wall-plasma membrane linker proteinPRP precursor - rape
  misc_feature (46)..(186): NCBI GI NO: 7446482 NR Description: probable cell wall-plasma membrane linker proteinPRP precursor - rape
  misc_feature (12)..(186): NCBI GI NO: 7446483 NR Description: probable cell wall protein - garden pea
  misc_feature (19)..(183): NCBI GI NO: 18396941 NR Description: expressed protein; protein id: At2g10940
  misc_feature (46)..(186): NCBI GI NO: 7446482 NR Description: probable cell wall-plasma membrane linker proteinPRP precursor - rape
  misc_feature (42)..(186): NCBI GI NO: 1076501 NR Description: cell wall protein - alfalfa
  misc_feature (42)..(181): NCBI GI NO: 7446482 NR Description: probable cell wall-plasma membrane linker proteinPRP precursor - rape
  misc_feature (40)..(186): NCBI GI NO: 1076501 NR Description: cell wall protein - alfalfa
  misc_feature (42)..(186): NCBI GI NO: 11994732 NR Description: contains similarity to cell wall-plasma membranelinker protein~gene_id:MKA23
  misc_feature (42)..(186): NCBI GI NO: 15233282 NR Description: unknown protein; protein id: At3g22120.1

SEQ ID NO: 37417 - protein, 208 aa, Zea mays subsp. mays; identical to SEQ ID NO: 29764
  peptide (1)..(208): Ceres Seq. ID no. 12406618

SEQ ID NO: 37418 - DNA, 1076 bp, Zea mays subsp. mays
  misc_feature (1)..(1076): Ceres Seq. ID no. 12407567
accttgctttgctcgcactcgcacacagttgcgagcgcattgcttgcattggcgcagccgcaggccgcagcacgaagctagccagtaggcggtagatggcgagcagcgcggggaaccgcttcctgaggcagctgagcgcgagcaacggcgacgaagcggtctgcggcggcctgcagatggaccagcaggagtacggcggcgccggcgtggggaggaggggatcccggcggtggtcgaagaagcgggccgccgccgccgccgccgcgaggggctacggcgccggcagcgggaatggcgtgaagcagccggcctctgccgcggggaagcgggtgatggtggtggtggacgagagctcgggagccaaccacgccatgatgtgggcgctcacccacgtcgccgacaagggggacttcctcacgctgctccacgtcctgccgcgctccggcagcggcaggggcgaggaggcctcctccctcgccaactcgctcggcacgctctgcaaggcctccaggccagaggtggaggtcgaagcgcttgtgatccaagggcccaagctgggcaccgtgctcagccaggtgaagaagctggaggcctccgtgctggtgctcagccagtgcaggccatctccctgctggttaagctgcttcctgcggagcagcggcgaggagtttgtggagcagtgcatcaaccaggcggagtgcctgacgctggcggtgaggaagcagagcaagggcgtctgtgggtacctcatcagcacccggtggcagaagaacttctggctcctggcctgacaaccatgcattttacctagctagttactactgctacatgatcacatttgttttaagtcactcccgtatatgtgctgtcatttcgtgtcatcaagtgcgtcacaagaaagaccatctctctctctccttcatcctgttgtaaagcgaaaagagcctccgaatctgaccacctttctacgaacctgtatcttccctgcaagtctttagcgtgcgtgtagtactgtgatctgcactgaacaatcatgtaatgctgcataaatgaccaattctgttgtaaaaaaaatt

SEQ ID NO: 37419 - protein, 231 aa, Zea mays subsp. mays
  peptide (1)..(231): Ceres Seq. ID no. 12407568
  misc_feature (77)..(208): Pfam Name: Pfam Description:  Universal stress protein family
  misc_feature (1)..(231): NCBI GI NO: 34907308 NR Description: hypothetical protein~similar to Arabidopsisthaliana chromosome 1
  misc_feature (40)..(231): NCBI GI NO: 15219439 NR Description: hypothetical protein; protein id: At1g44760
  misc_feature (68)..(231): NCBI GI NO: 15237955 NR Description: putative protein; protein id: At5g17390.1
  misc_feature (80)..(231): NCBI GI NO: 15227695 NR Description: unknown protein; protein id: At2g03720.1
  misc_feature (68)..(231): NCBI GI NO: 15228516 NR Description: hypothetical protein; protein id: At3g03290.1
  misc_feature (124)..(231): NCBI GI NO: 18409190 NR Description: expressed protein; protein id: At1g69080
  misc_feature (124)..(231): NCBI GI NO: 21592322 NR Description: unknown [Arabidopsis thaliana]
MASSAGNRFLRQLSASNGDEAVCGGLQMDQQEYGGAGVGRRGSRRWSKKRAAAAAAARGYGAGSGNGVKQPASAAGKRVMVVVDESSGANHAMMWALTHVADKGDFLTLLHVLPRSGSGRGEEASSLANSLGTLCKASRPEVEVEALVIQGPKLGTVLSQVKKLEASVLVLSQCRPSPCWLSCFLRSSGEEFVEQCINQAECLTLAVRKQSKGVCGYLISTRWQKNFWLLA

SEQ ID NO: 37420 - protein, 204 aa, Zea mays subsp. mays
  peptide (1)..(204): Ceres Seq. ID no. 12407569
  misc_feature (50)..(181): Pfam Name: Pfam Description:  Universal stress protein family
  misc_feature (1)..(204): NCBI GI NO: 34907308 NR Description: hypothetical protein~similar to Arabidopsisthaliana chromosome 1
  misc_feature (13)..(204): NCBI GI NO: 15219439 NR Description: hypothetical protein; protein id: At1g44760
  misc_feature (41)..(204): NCBI GI NO: 15237955 NR Description: putative protein; protein id: At5g17390.1
  misc_feature (53)..(204): NCBI GI NO: 15227695 NR Description: unknown protein; protein id: At2g03720.1
  misc_feature (41)..(204): NCBI GI NO: 15228516 NR Description: hypothetical protein; protein id: At3g03290.1
  misc_feature (97)..(204): NCBI GI NO: 18409190 NR Description: expressed protein; protein id: At1g69080
  misc_feature (97)..(204): NCBI GI NO: 21592322 NR Description: unknown [Arabidopsis thaliana]
MDQQEYGGAGVGRRGSRRWSKKRAAAAAAARGYGAGSGNGVKQPASAAGKRVMVVVDESSGANHAMMWALTHVADKGDFLTLLHVLPRSGSGRGEEASSLANSLGTLCKASRPEVEVEALVIQGPKLGTVLSQVKKLEASVLVLSQCRPSPCWLSCFLRSSGEEFVEQCINQAECLTLAVRKQSKGVCGYLISTRWQKNFWLLA

SEQ ID NO: 37421 - protein, 152 aa, Zea mays subsp. mays
  peptide (1)..(152): Ceres Seq. ID no. 12407570
  misc_feature (1)..(129): Pfam Name: Pfam Description:  Universal stress protein family
  misc_feature (1)..(152): NCBI GI NO: 34907308 NR Description: hypothetical protein~similar to Arabidopsisthaliana chromosome 1
  misc_feature (1)..(152): NCBI GI NO: 15219439 NR Description: hypothetical protein; protein id: At1g44760
  misc_feature (1)..(152): NCBI GI NO: 15237955 NR Description: putative protein; protein id: At5g17390.1
  misc_feature (1)..(152): NCBI GI NO: 15227695 NR Description: unknown protein; protein id: At2g03720.1
  misc_feature (1)..(152): NCBI GI NO: 15228516 NR Description: hypothetical protein; protein id: At3g03290.1
  misc_feature (45)..(152): NCBI GI NO: 18409190 NR Description: expressed protein; protein id: At1g69080
  misc_feature (45)..(152): NCBI GI NO: 21592322 NR Description: unknown [Arabidopsis thaliana]
MVVVDESSGANHAMMWALTHVADKGDFLTLLHVLPRSGSGRGEEASSLANSLGTLCKASRPEVEVEALVIQGPKLGTVLSQVKKLEASVLVLSQCRPSPCWLSCFLRSSGEEFVEQCINQAECLTLAVRKQSKGVCGYLISTRWQKNFWLLA

SEQ ID NO: 37422 - DNA, 1314 bp, Zea mays subsp. mays
  misc_feature (1)..(1314): Ceres Seq. ID no. 12363419
gcacgagaccattacctagaacatcctaatcgaaaaatttttcgacatgccgcgcgagctggaggtccggtacggtggctggctggacgctgggatccgggaggagtacgagcactacgcggacgtctgcttcggggcgttcggcgaccgggtgcggctctggacgaccttcaacgagcccaacctgctggtcaagttccagtacatgctgggcgcgtacccgcccagccgctgctccccgccgttcggcagctgcgggagcggcgactcgcgccgggagccgtacgccgcggcgcacaacatcatcatgtcccccgccgccgtccgcgcctacagggacaagtaccaggcgacgcagggcggctccgtcgggatcgtggccgccatgaaatggtacgagccgctgacgaactccacggacgacatcctggccgcgcggcgcgcgcaggctttcgagacggactggtttctggagccgatattcttgggcgattaccccggagcgatgcgggagatcctgggatcggacctgccgaccttcaccgcggaggagaaggcgctgctgctgcggtacaaggcggacttcatcgggctgaaccactacacggcgatctacgccagggactgcctgcgctccccgtgcaacctcgggtcgtacgaagggaacgccttcgtctcggcgactggggaaagggacgacggggtcaagatcgggggagatactgcgctggcaggtttcttcgacgtcccagaggccatagagctggctatccagtacgtgaacgggaggtacaagggcacgcctgtgtatattactgagaacggttactcgcagtggagtgatgccagcagggaggagctgatcaacgatgtgaggagaaagaactacctgcagggctacatcacgtatctatccaaagcagtcaggaacggagcaaacgtgcggggctacttcgtgtggacgctgctggacaacttcgagtgggcgttcggttacaggttgaagtacgggctgtaccacgtcgacttcgacacacaggagaggacgccccggatgtctgcgaggtggtaccagggcttcctcacggcccgcaccagccagcgcgacgaagcagcgcaggcacggagagcagactcgtgatgaaccattcccacttccaccgatatatatcatcgaacgccttgctagacagccgagggtctcatgactcgtgctcatttccgtcctcgcggtatattggaataactgtggctgtggtgtcctaatgtctgtatatgcatatatcatatattttgacctcaaaagaggtttag

SEQ ID NO: 37423 - protein, 364 aa, Zea mays subsp. mays
  peptide (1)..(364): Ceres Seq. ID no. 12363420
  misc_feature (1)..(364): NCBI GI NO: 38345327 NR Description: OSJNBa0004N05.24
  misc_feature (1)..(346): NCBI GI NO: 38345329 NR Description: OSJNBa0004N05.26
  misc_feature (1)..(356): NCBI GI NO: 38345324 NR Description: OSJNBa0004N05.21
  misc_feature (1)..(364): NCBI GI NO: 22328863 NR Description: glycosyl hydrolase family 1; protein id:At4g21760
  misc_feature (1)..(355): NCBI GI NO: 7435450 NR Description: beta-glucosidase homolog F8K4
  misc_feature (1)..(355): NCBI GI NO: 30696622 NR Description: glycosyl hydrolase family 1 [Arabidopsis thaliana]
  misc_feature (1)..(355): NCBI GI NO: 30696625 NR Description: glycosyl hydrolase family 1 [Arabidopsis thaliana]
  misc_feature (1)..(354): NCBI GI NO: 15220627 NR Description: glycosyl hydrolase family 1; protein id:At1g61810
  misc_feature (1)..(364): NCBI GI NO: 3820531 NR Description: beta-glucosidase [Pinus contorta]
  misc_feature (141)..(364): NCBI GI NO: 38345326 NR Description: OSJNBa0004N05.23
MPRELEVRYGGWLDAGIREEYEHYADVCFGAFGDRVRLWTTFNEPNLLVKFQYMLGAYPPSRCSPPFGSCGSGDSRREPYAAAHNIIMSPAAVRAYRDKYQATQGGSVGIVAAMKWYEPLTNSTDDILAARRAQAFETDWFLEPIFLGDYPGAMREILGSDLPTFTAEEKALLLRYKADFIGLNHYTAIYARDCLRSPCNLGSYEGNAFVSATGERDDGVKIGGDTALAGFFDVPEAIELAIQYVNGRYKGTPVYITENGYSQWSDASREELINDVRRKNYLQGYITYLSKAVRNGANVRGYFVWTLLDNFEWAFGYRLKYGLYHVDFDTQERTPRMSARWYQGFLTARTSQRDEAAQARRADS

SEQ ID NO: 37424 - protein, 311 aa, Zea mays subsp. mays
  peptide (1)..(311): Ceres Seq. ID no. 12363421
  misc_feature (1)..(311): NCBI GI NO: 38345327 NR Description: OSJNBa0004N05.24
  misc_feature (1)..(293): NCBI GI NO: 38345329 NR Description: OSJNBa0004N05.26
  misc_feature (1)..(303): NCBI GI NO: 38345324 NR Description: OSJNBa0004N05.21
  misc_feature (1)..(311): NCBI GI NO: 22328863 NR Description: glycosyl hydrolase family 1; protein id:At4g21760
  misc_feature (1)..(302): NCBI GI NO: 7435450 NR Description: beta-glucosidase homolog F8K4
  misc_feature (1)..(302): NCBI GI NO: 30696622 NR Description: glycosyl hydrolase family 1 [Arabidopsis thaliana]
  misc_feature (1)..(302): NCBI GI NO: 30696625 NR Description: glycosyl hydrolase family 1 [Arabidopsis thaliana]
  misc_feature (1)..(301): NCBI GI NO: 15220627 NR Description: glycosyl hydrolase family 1; protein id:At1g61810
  misc_feature (1)..(311): NCBI GI NO: 3820531 NR Description: beta-glucosidase [Pinus contorta]
  misc_feature (88)..(311): NCBI GI NO: 38345326 NR Description: OSJNBa0004N05.23
MLGAYPPSRCSPPFGSCGSGDSRREPYAAAHNIIMSPAAVRAYRDKYQATQGGSVGIVAAMKWYEPLTNSTDDILAARRAQAFETDWFLEPIFLGDYPGAMREILGSDLPTFTAEEKALLLRYKADFIGLNHYTAIYARDCLRSPCNLGSYEGNAFVSATGERDDGVKIGGDTALAGFFDVPEAIELAIQYVNGRYKGTPVYITENGYSQWSDASREELINDVRRKNYLQGYITYLSKAVRNGANVRGYFVWTLLDNFEWAFGYRLKYGLYHVDFDTQERTPRMSARWYQGFLTARTSQRDEAAQARRADS

SEQ ID NO: 37425 - protein, 277 aa, Zea mays subsp. mays
  peptide (1)..(277): Ceres Seq. ID no. 12363422
  misc_feature (1)..(277): NCBI GI NO: 38345327 NR Description: OSJNBa0004N05.24
  misc_feature (1)..(259): NCBI GI NO: 38345329 NR Description: OSJNBa0004N05.26
  misc_feature (1)..(269): NCBI GI NO: 38345324 NR Description: OSJNBa0004N05.21
  misc_feature (1)..(277): NCBI GI NO: 22328863 NR Description: glycosyl hydrolase family 1; protein id:At4g21760
  misc_feature (1)..(268): NCBI GI NO: 7435450 NR Description: beta-glucosidase homolog F8K4
  misc_feature (1)..(268): NCBI GI NO: 30696622 NR Description: glycosyl hydrolase family 1 [Arabidopsis thaliana]
  misc_feature (1)..(268): NCBI GI NO: 30696625 NR Description: glycosyl hydrolase family 1 [Arabidopsis thaliana]
  misc_feature (1)..(267): NCBI GI NO: 15220627 NR Description: glycosyl hydrolase family 1; protein id:At1g61810
  misc_feature (1)..(277): NCBI GI NO: 3820531 NR Description: beta-glucosidase [Pinus contorta]
  misc_feature (54)..(277): NCBI GI NO: 38345326 NR Description: OSJNBa0004N05.23
MSPAAVRAYRDKYQATQGGSVGIVAAMKWYEPLTNSTDDILAARRAQAFETDWFLEPIFLGDYPGAMREILGSDLPTFTAEEKALLLRYKADFIGLNHYTAIYARDCLRSPCNLGSYEGNAFVSATGERDDGVKIGGDTALAGFFDVPEAIELAIQYVNGRYKGTPVYITENGYSQWSDASREELINDVRRKNYLQGYITYLSKAVRNGANVRGYFVWTLLDNFEWAFGYRLKYGLYHVDFDTQERTPRMSARWYQGFLTARTSQRDEAAQARRADS

SEQ ID NO: 37426 - DNA, 1726 bp, Zea mays subsp. mays
  misc_feature (1)..(1726): Ceres Seq. ID no. 12363262
gcacgagaccattacctagaacatcctaatcgaaaaacactctcctcgcgtttcccgccattaactctgcaacctattctcttcctcgcgaaaccgcttccttcgattcattccccctctcccctctccaagacccaaaaccctaacccctacgacccccgtgaccgccgccgccgtcgatgcctgcgctctccgacgtcgcgcttcaggctgccatcgccggcaacctccgcctcctgaagctggtggcgagcaagatgaatctgcgcgaagcgaaggacgccgctgggcggaacgcgctccacctggccgcggagatgggccgtcttgaggtttgcaggttcctggtggaggaatcgggcttcgaggtgaacttcgcctgcgccgaaggcgggtcgccggtccactgcgccgcggccgggggcagcgagagcgtcttgggctaccttctcgaccacggtggcgaccctgtgatgccggactccatgggctccactccactgcatgatgcggcagaggaagggcattgtgcggctgtgaggatgctgctgtccaagggtgtcgatgtggatccacacggctgtcgtgggacgccgctgcacttggcctgctccaatgaccgggatcaggttgttaggatcctgctggaacatggcgcagatcccaacaaagttgtcggtcatgtcctcccaccactcatgatggcatactgtggcggttctttgagatgcatgaagctactgattgaggctggtgcggatgtgaacttgattgctccttctggagtaattttggctcaggcagtttgtgatgggtcaactgagattgtcaagtttttgctagaggttggagctgatcctaacattcctgatgaggatgggaaaatcccgatcatgtacccagcatttaatgggcatcgggagcttgttgaaattctatttcctaagacaagaccagtttcatctttgccagactggagcgttgatgggattattagaagtatgaaagatctgtttttcaagcctcaggatgcagctgtggtggaaaaaaagatagctgatgcgaagtcacaagggaaggaagctttcgcaaggggagagtaccctgcagcagtatacttctataccatggtactagagaacgaccttgatgctactgcgtttgccaaccggagcctgtgctggttgcggctgagggagggggccaaggctctgttagatgctcaacagtgcaaaatgatacggcctcgttggtcgaaggcatggtatcgcgagggcgcggctctcagcttgctgaaggactaccaaggggcagtcaacgcgttcacggaagcattgaaactggatcctgcaagtttagagatcaagaaagccttaagggaggccaccgattccctggcgaacgttggccgctccggagaacagaacccatgagctgctgctgcatccatgtgctttatctcacgttaagaatcctctaacactatgtggctcagcctcatattatatgttgatatatgtcgccttaacgcactgctggagatactagtttcgatctcagcctatatgttttgctccttcgggatgcagcctaagatacatgtggcaaccaagtgaggttgggcagggtagcatatctatggactggttgaactattatatgtatctggatatctaagtgcacctgttgctcctagtaaagttgcagttctaatgaccccttcgtc

SEQ ID NO: 37427 - protein, 417 aa, Zea mays subsp. mays
  peptide (1)..(417): Ceres Seq. ID no. 12363263
  misc_feature (325)..(358): Pfam Name: Pfam Description:  TPR Domain
  misc_feature (11)..(406): NCBI GI NO: 27542766 NR Description: ankyrin-like protein-like protein
  misc_feature (9)..(400): NCBI GI NO: 27542768 NR Description: ankyrin-like protein-like protein
  misc_feature (9)..(283): NCBI GI NO: 13435243 NR Description: putative gag-pol polyprotein [Oryza sativa]
  misc_feature (288)..(399): NCBI GI NO: 13435243 NR Description: putative gag-pol polyprotein [Oryza sativa]
  misc_feature (41)..(414): NCBI GI NO: 34896852 NR Description: putative ankyrin [Oryza sativa]
  misc_feature (37)..(406): NCBI GI NO: 13435247 NR Description: putative ankyrin [Oryza sativa]
  misc_feature (9)..(276): NCBI GI NO: 34329680 NR Description: unknown [Nicotiana benthamiana]
  misc_feature (9)..(291): NCBI GI NO: 24745936 NR Description: ankyrin-like protein [Solanum tuberosum]
  misc_feature (9)..(276): NCBI GI NO: 15229331 NR Description: ankyrin-like protein; protein id: At3g04710
  misc_feature (162)..(407): NCBI GI NO: 34910278 NR Description: OSJNBa0089K24.26
MPALSDVALQAAIAGNLRLLKLVASKMNLREAKDAAGRNALHLAAEMGRLEVCRFLVEESGFEVNFACAEGGSPVHCAAAGGSESVLGYLLDHGGDPVMPDSMGSTPLHDAAEEGHCAAVRMLLSKGVDVDPHGCRGTPLHLACSNDRDQVVRILLEHGADPNKVVGHVLPPLMMAYCGGSLRCMKLLIEAGADVNLIAPSGVILAQAVCDGSTEIVKFLLEVGADPNIPDEDGKIPIMYPAFNGHRELVEILFPKTRPVSSLPDWSVDGIIRSMKDLFFKPQDAAVVEKKIADAKSQGKEAFARGEYPAAVYFYTMVLENDLDATAFANRSLCWLRLREGAKALLDAQQCKMIRPRWSKAWYREGAALSLLKDYQGAVNAFTEALKLDPASLEIKKALREATDSLANVGRSGEQNP

SEQ ID NO: 37428 - protein, 391 aa, Zea mays subsp. mays
  peptide (1)..(391): Ceres Seq. ID no. 12363264
  misc_feature (299)..(332): Pfam Name: Pfam Description:  TPR Domain
  misc_feature (1)..(380): NCBI GI NO: 27542766 NR Description: ankyrin-like protein-like protein
  misc_feature (1)..(374): NCBI GI NO: 27542768 NR Description: ankyrin-like protein-like protein
  misc_feature (1)..(257): NCBI GI NO: 13435243 NR Description: putative gag-pol polyprotein [Oryza sativa]
  misc_feature (262)..(373): NCBI GI NO: 13435243 NR Description: putative gag-pol polyprotein [Oryza sativa]
  misc_feature (15)..(388): NCBI GI NO: 34896852 NR Description: putative ankyrin [Oryza sativa]
  misc_feature (11)..(380): NCBI GI NO: 13435247 NR Description: putative ankyrin [Oryza sativa]
  misc_feature (1)..(250): NCBI GI NO: 34329680 NR Description: unknown [Nicotiana benthamiana]
  misc_feature (1)..(265): NCBI GI NO: 24745936 NR Description: ankyrin-like protein [Solanum tuberosum]
  misc_feature (1)..(250): NCBI GI NO: 15229331 NR Description: ankyrin-like protein; protein id: At3g04710
  misc_feature (136)..(381): NCBI GI NO: 34910278 NR Description: OSJNBa0089K24.26
MNLREAKDAAGRNALHLAAEMGRLEVCRFLVEESGFEVNFACAEGGSPVHCAAAGGSESVLGYLLDHGGDPVMPDSMGSTPLHDAAEEGHCAAVRMLLSKGVDVDPHGCRGTPLHLACSNDRDQVVRILLEHGADPNKVVGHVLPPLMMAYCGGSLRCMKLLIEAGADVNLIAPSGVILAQAVCDGSTEIVKFLLEVGADPNIPDEDGKIPIMYPAFNGHRELVEILFPKTRPVSSLPDWSVDGIIRSMKDLFFKPQDAAVVEKKIADAKSQGKEAFARGEYPAAVYFYTMVLENDLDATAFANRSLCWLRLREGAKALLDAQQCKMIRPRWSKAWYREGAALSLLKDYQGAVNAFTEALKLDPASLEIKKALREATDSLANVGRSGEQNP

SEQ ID NO: 37429 - protein, 371 aa, Zea mays subsp. mays
  peptide (1)..(371): Ceres Seq. ID no. 12363265
  misc_feature (279)..(312): Pfam Name: Pfam Description:  TPR Domain
  misc_feature (1)..(360): NCBI GI NO: 27542766 NR Description: ankyrin-like protein-like protein
  misc_feature (1)..(354): NCBI GI NO: 27542768 NR Description: ankyrin-like protein-like protein
  misc_feature (1)..(237): NCBI GI NO: 13435243 NR Description: putative gag-pol polyprotein [Oryza sativa]
  misc_feature (242)..(353): NCBI GI NO: 13435243 NR Description: putative gag-pol polyprotein [Oryza sativa]
  misc_feature (1)..(368): NCBI GI NO: 34896852 NR Description: putative ankyrin [Oryza sativa]
  misc_feature (1)..(360): NCBI GI NO: 13435247 NR Description: putative ankyrin [Oryza sativa]
  misc_feature (1)..(230): NCBI GI NO: 34329680 NR Description: unknown [Nicotiana benthamiana]
  misc_feature (1)..(245): NCBI GI NO: 24745936 NR Description: ankyrin-like protein [Solanum tuberosum]
  misc_feature (1)..(230): NCBI GI NO: 15229331 NR Description: ankyrin-like protein; protein id: At3g04710
  misc_feature (116)..(361): NCBI GI NO: 34910278 NR Description: OSJNBa0089K24.26
MGRLEVCRFLVEESGFEVNFACAEGGSPVHCAAAGGSESVLGYLLDHGGDPVMPDSMGSTPLHDAAEEGHCAAVRMLLSKGVDVDPHGCRGTPLHLACSNDRDQVVRILLEHGADPNKVVGHVLPPLMMAYCGGSLRCMKLLIEAGADVNLIAPSGVILAQAVCDGSTEIVKFLLEVGADPNIPDEDGKIPIMYPAFNGHRELVEILFPKTRPVSSLPDWSVDGIIRSMKDLFFKPQDAAVVEKKIADAKSQGKEAFARGEYPAAVYFYTMVLENDLDATAFANRSLCWLRLREGAKALLDAQQCKMIRPRWSKAWYREGAALSLLKDYQGAVNAFTEALKLDPASLEIKKALREATDSLANVGRSGEQNP

SEQ ID NO: 37430 - DNA, 1585 bp, Zea mays subsp. mays; identical to SEQ ID NO: 26255
  misc_feature (1)..(1585): Ceres Seq. ID no. 12381056
  misc_feature (1553)..(1553): n is a, c, t, g, unknown, or other
  misc_feature (1555)..(1555): n is a, c, t, g, unknown, or other
  misc_feature (1552)..(1552): n is a, c, t, g, unknown, or other

SEQ ID NO: 37431 - protein, 287 aa, Zea mays subsp. mays; identical to SEQ ID NO: 26256
  peptide (1)..(287): Ceres Seq. ID no. 12381057
  misc_feature (1)..(284): NCBI GI NO: 22331664 NR Description: DP-E2F-like protein 1; protein id: At3g48160
  misc_feature (1)..(267): NCBI GI NO: 30692988 NR Description: DP-E2F-related protein 1 [Arabidopsis thaliana]
  misc_feature (1)..(267): NCBI GI NO: 7487385 NR Description: hypothetical protein T24C20
  misc_feature (14)..(281): NCBI GI NO: 22330789 NR Description: DP-E2F-like protein 3; protein id: At3g01330
  misc_feature (48)..(284): NCBI GI NO: 15242176 NR Description: DP-E2F-like 2; protein id: At5g14960
  misc_feature (1)..(49): NCBI GI NO: 15242176 NR Description: DP-E2F-like 2; protein id: At5g14960
  misc_feature (14)..(264): NCBI GI NO: 6094551 NR Description: hypothetical protein [Arabidopsis thaliana]
  misc_feature (1)..(142): NCBI GI NO: 26334515 NR Description: unnamed protein product [Mus musculus]
  misc_feature (1)..(170): NCBI GI NO: 40254337 NR Description: E2F transcription factor 7 [Mus musculus]
  misc_feature (1)..(170): NCBI GI NO: 26326999 NR Description: unnamed protein product [Mus musculus]

SEQ ID NO: 37432 - protein, 278 aa, Zea mays subsp. mays; identical to SEQ ID NO: 26257
  peptide (1)..(278): Ceres Seq. ID no. 12381058
  misc_feature (1)..(275): NCBI GI NO: 22331664 NR Description: DP-E2F-like protein 1; protein id: At3g48160
  misc_feature (1)..(258): NCBI GI NO: 30692988 NR Description: DP-E2F-related protein 1 [Arabidopsis thaliana]
  misc_feature (1)..(258): NCBI GI NO: 7487385 NR Description: hypothetical protein T24C20
  misc_feature (5)..(272): NCBI GI NO: 22330789 NR Description: DP-E2F-like protein 3; protein id: At3g01330
  misc_feature (39)..(275): NCBI GI NO: 15242176 NR Description: DP-E2F-like 2; protein id: At5g14960
  misc_feature (1)..(40): NCBI GI NO: 15242176 NR Description: DP-E2F-like 2; protein id: At5g14960
  misc_feature (5)..(255): NCBI GI NO: 6094551 NR Description: hypothetical protein [Arabidopsis thaliana]
  misc_feature (1)..(133): NCBI GI NO: 26334515 NR Description: unnamed protein product [Mus musculus]
  misc_feature (1)..(161): NCBI GI NO: 40254337 NR Description: E2F transcription factor 7 [Mus musculus]
  misc_feature (1)..(161): NCBI GI NO: 26326999 NR Description: unnamed protein product [Mus musculus]

SEQ ID NO: 37433 - protein, 207 aa, Zea mays subsp. mays; identical to SEQ ID NO: 26258
  peptide (1)..(207): Ceres Seq. ID no. 12381059
  misc_feature (1)..(204): NCBI GI NO: 22331664 NR Description: DP-E2F-like protein 1; protein id: At3g48160
  misc_feature (1)..(187): NCBI GI NO: 30692988 NR Description: DP-E2F-related protein 1 [Arabidopsis thaliana]
  misc_feature (1)..(187): NCBI GI NO: 7487385 NR Description: hypothetical protein T24C20
  misc_feature (1)..(201): NCBI GI NO: 22330789 NR Description: DP-E2F-like protein 3; protein id: At3g01330
  misc_feature (1)..(204): NCBI GI NO: 15242176 NR Description: DP-E2F-like 2; protein id: At5g14960
  misc_feature (1)..(184): NCBI GI NO: 6094551 NR Description: hypothetical protein [Arabidopsis thaliana]
  misc_feature (1)..(62): NCBI GI NO: 26334515 NR Description: unnamed protein product [Mus musculus]
  misc_feature (1)..(90): NCBI GI NO: 40254337 NR Description: E2F transcription factor 7 [Mus musculus]
  misc_feature (1)..(90): NCBI GI NO: 26326999 NR Description: unnamed protein product [Mus musculus]
  misc_feature (1)..(90): NCBI GI NO: 29741773 NR Description: similar to Transcription factor E2F dimerisationpartner

SEQ ID NO: 37434 - DNA, 1274 bp, Zea mays subsp. mays
  misc_feature (1)..(1274): Ceres Seq. ID no. 12372822
ccaaccaaacttccggtcttctcttctccactacccacccgcctgcccgcccgccttctcctccaccactgccccgccgctaaccaaccactcgtgcgccacaagtctcccgtcgtggaatagggcaaaggccaggcatctcgcttctgtcctctgtcgaggggatcggacccgatcggagaaagaatgggctcggaggcggactgcgacaggatcaggggcccgtggagccccgaggaggacgacgcgctgcggcggctcgtggagcggcacggcgcgcgcaactggacggcgatcgggcgcgagatcccggggcggtcgggcaagtcgtgccgcctgcggtggtgcaaccagctgtcgccgcaggtggagcgccggcccttcacggcggaggaggacgcggccatcgtccgcgcccacgcccgcctcggcaaccgctgggccgccatcgcgcgcctcctccccggccgcaccgacaacgccgtcaagaaccactggaactgctcgctcaagcgcaagctcgccgccgcgtccgccccggcgggttcctccgacgtcgaggcgcgcccgaccaagcgcgtcagcctctcgcccgacagcccgtcggggtcggggtcggggtcagggtcagggtccgggtccgggtccgggtccgaccgtagcgacctgagccacggcgccggccaggtttaccgcccagtggcgcggtccggcgggttcgagccggcggactgcgcgatgagccgtccgctggaggaagaggaggaggaaaaggaggacccgctcacctccctcagcctctcgcttccaggcacggaccagcggttccaccacgaccgcgcccacagccagttccaggagctcccggcgtcgccgccctcgccctccccgcctccgccgccggttctctcggcgtacccgttcagccccgtgttcatggaggcgatgcaggagctgatccgcacggaggtgcagcggtacatggcgagcgtgggcgtgcgcgccgggtgcggcgccgccggcggggccgacctctgcatgccgcaactggtcgacggcgtcatgcgcgccgccgccgagcgggtcggccggatgcagtagcagtagctcctgccatcaaatgctcccgaaccgtcaatcgatcttctaggacgaacgcgcagcagctgttgttatcagtagcaaacttccaagttattattttcctttttttaaaactttattctctcgaaccgctgtgaaaccgaaacagcagtgaaaagagtcagcaactg

SEQ ID NO: 37435 - protein, 304 aa, Zea mays subsp. mays
  peptide (1)..(304): Ceres Seq. ID no. 12372823
  misc_feature (11)..(57): Pfam Name: Pfam Description:  Myb-like DNA-binding domain
  misc_feature (8)..(259): NCBI GI NO: 9954112 NR Description: tuber-specific and sucrose-responsive elementbinding factor
  misc_feature (6)..(256): NCBI GI NO: 27529846 NR Description: Myb-like protein [Nicotiana tabacum]
  misc_feature (6)..(291): NCBI GI NO: 21593586 NR Description: putative MYB family transcription factor
  misc_feature (6)..(291): NCBI GI NO: 15227806 NR Description: MYB family transcription factor
  misc_feature (8)..(280): NCBI GI NO: 15450393 NR Description: AT5g67300/K8K14_2 [Arabidopsis thaliana]
  misc_feature (8)..(280): NCBI GI NO: 15240708 NR Description: myb family transcription factor
  misc_feature (8)..(280): NCBI GI NO: 2129648 NR Description: myb-related protein, 33.3K - Arabidopsis thaliana
  misc_feature (8)..(280): NCBI GI NO: 21592897 NR Description: myb-related protein, 33.3K [Arabidopsis thaliana]
  misc_feature (8)..(280): NCBI GI NO: 15229664 NR Description: myb DNA-binding protein
  misc_feature (9)..(248): NCBI GI NO: 9954114 NR Description: tuber-specific and sucrose-responsive elementbinding factor
MGSEADCDRIRGPWSPEEDDALRRLVERHGARNWTAIGREIPGRSGKSCRLRWCNQLSPQVERRPFTAEEDAAIVRAHARLGNRWAAIARLLPGRTDNAVKNHWNCSLKRKLAAASAPAGSSDVEARPTKRVSLSPDSPSGSGSGSGSGSGSGSGSDRSDLSHGAGQVYRPVARSGGFEPADCAMSRPLEEEEEEKEDPLTSLSLSLPGTDQRFHHDRAHSQFQELPASPPSPSPPPPPVLSAYPFSPVFMEAMQELIRTEVQRYMASVGVRAGCGAAGGADLCMPQLVDGVMRAAAERVGRMQ

SEQ ID NO: 37436 - protein, 222 aa, Zea mays subsp. mays
  peptide (1)..(222): Ceres Seq. ID no. 12372824
  misc_feature (17)..(222): NCBI GI NO: 30424862 NR Description: RIKEN cDNA 5033413A03 [Mus musculus]
  misc_feature (37)..(222): NCBI GI NO: 30424862 NR Description: RIKEN cDNA 5033413A03 [Mus musculus]
  misc_feature (17)..(222): NCBI GI NO: 30313663 NR Description: sublingual apomucin [Mus musculus]
  misc_feature (116)..(221): NCBI GI NO: 30140331 NR Description: putative arabinagalactan protein [Lotus japonicus]
  misc_feature (53)..(222): NCBI GI NO: 30424862 NR Description: RIKEN cDNA 5033413A03 [Mus musculus]
  misc_feature (33)..(222): NCBI GI NO: 30313663 NR Description: sublingual apomucin [Mus musculus]
  misc_feature (54)..(222): NCBI GI NO: 30354095 NR Description: Similar to serine/arginine repetitive matrix 2
QPNFRSSLLHYPPACPPAFSSTTAPPLTNHSCATSLPSWNRAKARHLASVLCRGDRTRSEKEWARRRTATGSGARGAPRRTTRCGGSWSGTARATGRRSGARSRGGRASRAACGGATSCRRRWSAGPSRRRRTRPSSAPTPASATAGPPSRASSPAAPTTPSRTTGTARSSASSPPRPPRRVPPTSRRARPSASASRPTARRGRGRGQGQGPGPGPGPTVAT

SEQ ID NO: 37437 - DNA, 1200 bp, Zea mays subsp. mays
  misc_feature (1)..(1200): Ceres Seq. ID no. 12406443
  misc_feature (718)..(718): n is a, c, t, g, unknown, or other
gcacgagaccattacctagaacatcctaatcaaaaaactgaaccaaccaaccaccgctccttcttccttccttccttccttccccagttcccctcgtctcaccagtcaccaaggttccgagagcagagaaagataaaaaaaaggtaatccgacggaaacgacaagggcgcggcgagggcggggacagggtcggggaggccctgggcgcgggggcgccaagcgcatggcatcgtcgagggtgatgccgtcgtcctcgccgtcgcacacggcctctgatctcgcgcgcctagcgcaggccgccagcaggcccggcggcgggggcagcgggctgggctccatgaacgtggaggagctcctccgcggcatctacagcgacatgcccaccccggcgccgcccgcgtcggagcccgaacgcccgaggtcgccggccccggcgccggaggtcgccacgcggaggacggcggaggaggtgtggaaggagatcaccggcggaggtggcagtggggaacccgcgccccccgtggcggctcaggctgccgtccccgctggtggcgccggcggcccggagatgacgctggaggacttcctggctagggaggagggcgcggtgaaggaggatggggttagggtttcgggcccctctgcgccggccatggggttcctgggcggagcggagggcgtgggtgtgcctggcggcggaggcgggaggggaaggaancggcacctcatggatccagtggatcgcgccgcgatgcagcgacagaaacgaatgatcaaaaaccgcgagtctgctgcccggtcacgggagaggaagcaggcttatatcgccgagctagaatcgctggtaacgcacctcgaggaggagaatgccgagttgttgagagaacaggaagagcggcaccagaagcggcttaaagagctcttggaacgggtgacgccagtcattctgaggaaaaaaccatcaggagatcttagaagaacgaactcaatgcagtggtagattggagccaagctcagtcgccgtctctttacagttataacatagaatttgcccctgtatgtcatttttctatttatatatgcgccaactaagttgtagtatcttagctgaaatagcatgggcaattagccgacacaaaggttaaacgaaatcatattatgtaggagtgctcatgaccaagaaaggttgctgttcctgtc

SEQ ID NO: 37438 - protein, 258 aa, Zea mays subsp. mays
  peptide (1)..(258): Ceres Seq. ID no. 12406444
  misc_feature (174)..(235): Pfam Name: Pfam Description:  bZIP transcription factor
  misc_feature (3)..(258): NCBI GI NO: 34908608 NR Description: putative DNA binding protein
  misc_feature (52)..(258): NCBI GI NO: 7489466 NR Description: DNA binding protein - rice
  misc_feature (52)..(258): NCBI GI NO: 7638404 NR Description: OSE2 [Oryza sativa]
  misc_feature (77)..(258): NCBI GI NO: 29367541 NR Description: OSE2-like protein
  misc_feature (66)..(258): NCBI GI NO: 15219608 NR Description: G-box binding factor 4, GBF4; protein id:At1g03970
  misc_feature (78)..(258): NCBI GI NO: 21554353 NR Description: unknown [Arabidopsis thaliana]
  misc_feature (78)..(258): NCBI GI NO: 15240086 NR Description: bZIP transcription factor
  misc_feature (1)..(251): NCBI GI NO: 18404091 NR Description: ABA-responsive element binding protein, putative
  misc_feature (1)..(251): NCBI GI NO: 25408456 NR Description: probable bZIP transcription factor
  misc_feature (155)..(258): NCBI GI NO: 7406677 NR Description: putative ripening-related bZIP protein
  misc_feature (165)..(165): Xaa is any aa, unknown or other
MASSRVMPSSSPSHTASDLARLAQAASRPGGGGSGLGSMNVEELLRGIYSDMPTPAPPASEPERPRSPAPAPEVATRRTAEEVWKEITGGGGSGEPAPPVAAQAAVPAGGAGGPEMTLEDFLAREEGAVKEDGVRVSGPSAPAMGFLGGAEGVGVPGGGGGRGRXRHLMDPVDRAAMQRQKRMIKNRESAARSRERKQAYIAELESLVTHLEEENAELLREQEERHQKRLKELLERVTPVILRKKPSGDLRRTNSMQW

SEQ ID NO: 37439 - protein, 252 aa, Zea mays subsp. mays
  peptide (1)..(252): Ceres Seq. ID no. 12406445
  misc_feature (168)..(229): Pfam Name: Pfam Description:  bZIP transcription factor
  misc_feature (1)..(252): NCBI GI NO: 34908608 NR Description: putative DNA binding protein
  misc_feature (46)..(252): NCBI GI NO: 7489466 NR Description: DNA binding protein - rice
  misc_feature (46)..(252): NCBI GI NO: 7638404 NR Description: OSE2 [Oryza sativa]
  misc_feature (71)..(252): NCBI GI NO: 29367541 NR Description: OSE2-like protein
  misc_feature (60)..(252): NCBI GI NO: 15219608 NR Description: G-box binding factor 4, GBF4; protein id:At1g03970
  misc_feature (72)..(252): NCBI GI NO: 21554353 NR Description: unknown [Arabidopsis thaliana]
  misc_feature (72)..(252): NCBI GI NO: 15240086 NR Description: bZIP transcription factor
  misc_feature (1)..(245): NCBI GI NO: 18404091 NR Description: ABA-responsive element binding protein, putative
  misc_feature (1)..(245): NCBI GI NO: 25408456 NR Description: probable bZIP transcription factor
  misc_feature (149)..(252): NCBI GI NO: 7406677 NR Description: putative ripening-related bZIP protein
  misc_feature (159)..(159): Xaa is any aa, unknown or other
MPSSSPSHTASDLARLAQAASRPGGGGSGLGSMNVEELLRGIYSDMPTPAPPASEPERPRSPAPAPEVATRRTAEEVWKEITGGGGSGEPAPPVAAQAAVPAGGAGGPEMTLEDFLAREEGAVKEDGVRVSGPSAPAMGFLGGAEGVGVPGGGGGRGRXRHLMDPVDRAAMQRQKRMIKNRESAARSRERKQAYIAELESLVTHLEEENAELLREQEERHQKRLKELLERVTPVILRKKPSGDLRRTNSMQW

SEQ ID NO: 37440 - protein, 220 aa, Zea mays subsp. mays
  peptide (1)..(220): Ceres Seq. ID no. 12406446
  misc_feature (136)..(197): Pfam Name: Pfam Description:  bZIP transcription factor
  misc_feature (1)..(220): NCBI GI NO: 34908608 NR Description: putative DNA binding protein
  misc_feature (14)..(220): NCBI GI NO: 7489466 NR Description: DNA binding protein - rice
  misc_feature (14)..(220): NCBI GI NO: 7638404 NR Description: OSE2 [Oryza sativa]
  misc_feature (39)..(220): NCBI GI NO: 29367541 NR Description: OSE2-like protein
  misc_feature (28)..(220): NCBI GI NO: 15219608 NR Description: G-box binding factor 4, GBF4; protein id:At1g03970
  misc_feature (40)..(220): NCBI GI NO: 21554353 NR Description: unknown [Arabidopsis thaliana]
  misc_feature (40)..(220): NCBI GI NO: 15240086 NR Description: bZIP transcription factor
  misc_feature (1)..(213): NCBI GI NO: 18404091 NR Description: ABA-responsive element binding protein, putative
  misc_feature (1)..(213): NCBI GI NO: 25408456 NR Description: probable bZIP transcription factor
  misc_feature (117)..(220): NCBI GI NO: 7406677 NR Description: putative ripening-related bZIP protein
  misc_feature (127)..(127): Xaa is any aa, unknown or other
MNVEELLRGIYSDMPTPAPPASEPERPRSPAPAPEVATRRTAEEVWKEITGGGGSGEPAPPVAAQAAVPAGGAGGPEMTLEDFLAREEGAVKEDGVRVSGPSAPAMGFLGGAEGVGVPGGGGGRGRXRHLMDPVDRAAMQRQKRMIKNRESAARSRERKQAYIAELESLVTHLEEENAELLREQEERHQKRLKELLERVTPVILRKKPSGDLRRTNSMQW

SEQ ID NO: 37441 - DNA, 1322 bp, Zea mays subsp. mays
  misc_feature (1)..(1322): Ceres Seq. ID no. 12374300
agataatgtagagtgcgccgcgccgtgacggcgcggatgagaaagcctccaaacctctctgtttcgggctctccgtccccggcgtccaacacccatactctccccaggttgtgtgccacacccacactcaactatatacgaaaaccgccggcgcctggcccctaggccctagtcacagacccttgttctttcttcgacgcgcccccgggcatggcgaaccgcagtgttgccatgggcgtggccctcgcgttcgtggccatgaccgcgctctgttgcgcgccgggcgccgcggagttgcccaggctggaccacccggccaggagcgacggatcgctgaagctgctcgtcgtcggggactggggacgcaaggggactcacaaccagtcccgggtcgccgaccagatgggaagggtcggggagaagctcgatatcgactttgttatatccaccggggacaacttctacaaggacggcctcaagggcgtgcgcgaccaggcatttgaagaatcgttcgtggatatctacacagctcaaagcttacagaagccatggtactcagttctaggaaatcatgattacaggggcaatgcgctcgcacagcttagcccagtcttgaggaagatcgacgaccgattcatttgcatgagatcgttcatcgttaacgcagaacttgtggacttcttctttgtcgacaccactccgttccaactggagtattggactcaccctggcaaggatcgttatgactggagaggggtggcgcctcgaggcaagtacatagccaatttgctgaaggatctggatgtggctatgaagaaatcaactgcaaggtggaagattgtggctgggcatcacaccatgaggagtgtgagtgagcacggggacactaaggagcttctggaattactacttccagtcctcaaggacaatggcgtcgacttctacatcaatggacacgatcactgcctggagcacattagcagcagagacagtccactccagtatttcacgagcggaggcggttccaaggcatggagaggagtcttccatccaaacaaggacaaactccggttcttctacgacgggcaagggttcatgtccctccagctgaaccaagaccaggcgcacttcatcttttacgacgttttcgggaacatactgtaccgatggagctcgagacatccccagccctccacctatctcgatgaggaataaattggattgattttgcgccattgatatgtacaaaacaccgcctgccaactgtcatgtatgtgaaatgatgagtgttagacgcaaagaaggttatacaccagttaggg

SEQ ID NO: 37442 - protein, 334 aa, Zea mays subsp. mays
  peptide (1)..(334): Ceres Seq. ID no. 12374301
  misc_feature (42)..(253): Pfam Name: Pfam Description:  Calcineurin-like phosphoesterase
  misc_feature (8)..(321): NCBI GI NO: 37530584 NR Description: putative purple acid phosphatase
  misc_feature (11)..(322): NCBI GI NO: 39918795 NR Description: putative acid phosphatase [Lupinus luteus]
  misc_feature (27)..(326): NCBI GI NO: 30683951 NR Description: calcineurin-like phosphoesterase family
  misc_feature (27)..(326): NCBI GI NO: 30911094 NR Description: putative purple acid phosphatase
  misc_feature (28)..(320): NCBI GI NO: 18401643 NR Description: acid phosphatase type 5; protein id: At3g17790
  misc_feature (19)..(322): NCBI GI NO: 7331195 NR Description: putative purple acid phosphatase precursor
  misc_feature (28)..(320): NCBI GI NO: 21536860 NR Description: acid phosphatase type 5 [Arabidopsis thaliana]
  misc_feature (27)..(326): NCBI GI NO: 25752249 NR Description: probable acid phosphatase (EC 3
  misc_feature (14)..(322): NCBI GI NO: 22325419 NR Description: putative purple acid phosphatase
  misc_feature (5)..(322): NCBI GI NO: 22329781 NR Description: hypothetical protein; protein id: At1g25230
MANRSVAMGVALAFVAMTALCCAPGAAELPRLDHPARSDGSLKLLVVGDWGRKGTHNQSRVADQMGRVGEKLDIDFVISTGDNFYKDGLKGVRDQAFEESFVDIYTAQSLQKPWYSVLGNHDYRGNALAQLSPVLRKIDDRFICMRSFIVNAELVDFFFVDTTPFQLEYWTHPGKDRYDWRGVAPRGKYIANLLKDLDVAMKKSTARWKIVAGHHTMRSVSEHGDTKELLELLLPVLKDNGVDFYINGHDHCLEHISSRDSPLQYFTSGGGSKAWRGVFHPNKDKLRFFYDGQGFMSLQLNQDQAHFIFYDVFGNILYRWSSRHPQPSTYLDEE

SEQ ID NO: 37443 - protein, 327 aa, Zea mays subsp. mays
  peptide (1)..(327): Ceres Seq. ID no. 12374302
  misc_feature (35)..(246): Pfam Name: Pfam Description:  Calcineurin-like phosphoesterase
  misc_feature (1)..(314): NCBI GI NO: 37530584 NR Description: putative purple acid phosphatase
  misc_feature (4)..(315): NCBI GI NO: 39918795 NR Description: putative acid phosphatase [Lupinus luteus]
  misc_feature (20)..(319): NCBI GI NO: 30683951 NR Description: calcineurin-like phosphoesterase family
  misc_feature (20)..(319): NCBI GI NO: 30911094 NR Description: putative purple acid phosphatase
  misc_feature (21)..(313): NCBI GI NO: 18401643 NR Description: acid phosphatase type 5; protein id: At3g17790
  misc_feature (12)..(315): NCBI GI NO: 7331195 NR Description: putative purple acid phosphatase precursor
  misc_feature (21)..(313): NCBI GI NO: 21536860 NR Description: acid phosphatase type 5 [Arabidopsis thaliana]
  misc_feature (20)..(319): NCBI GI NO: 25752249 NR Description: probable acid phosphatase (EC 3
  misc_feature (7)..(315): NCBI GI NO: 22325419 NR Description: putative purple acid phosphatase
  misc_feature (1)..(315): NCBI GI NO: 22329781 NR Description: hypothetical protein; protein id: At1g25230
MGVALAFVAMTALCCAPGAAELPRLDHPARSDGSLKLLVVGDWGRKGTHNQSRVADQMGRVGEKLDIDFVISTGDNFYKDGLKGVRDQAFEESFVDIYTAQSLQKPWYSVLGNHDYRGNALAQLSPVLRKIDDRFICMRSFIVNAELVDFFFVDTTPFQLEYWTHPGKDRYDWRGVAPRGKYIANLLKDLDVAMKKSTARWKIVAGHHTMRSVSEHGDTKELLELLLPVLKDNGVDFYINGHDHCLEHISSRDSPLQYFTSGGGSKAWRGVFHPNKDKLRFFYDGQGFMSLQLNQDQAHFIFYDVFGNILYRWSSRHPQPSTYLDEE

SEQ ID NO: 37444 - protein, 318 aa, Zea mays subsp. mays
  peptide (1)..(318): Ceres Seq. ID no. 12374303
  misc_feature (26)..(237): Pfam Name: Pfam Description:  Calcineurin-like phosphoesterase
  misc_feature (1)..(305): NCBI GI NO: 37530584 NR Description: putative purple acid phosphatase
  misc_feature (1)..(306): NCBI GI NO: 39918795 NR Description: putative acid phosphatase [Lupinus luteus]
  misc_feature (11)..(310): NCBI GI NO: 30683951 NR Description: calcineurin-like phosphoesterase family
  misc_feature (11)..(310): NCBI GI NO: 30911094 NR Description: putative purple acid phosphatase
  misc_feature (12)..(304): NCBI GI NO: 18401643 NR Description: acid phosphatase type 5; protein id: At3g17790
  misc_feature (3)..(306): NCBI GI NO: 7331195 NR Description: putative purple acid phosphatase precursor
  misc_feature (12)..(304): NCBI GI NO: 21536860 NR Description: acid phosphatase type 5 [Arabidopsis thaliana]
  misc_feature (11)..(310): NCBI GI NO: 25752249 NR Description: probable acid phosphatase (EC 3
  misc_feature (1)..(306): NCBI GI NO: 22325419 NR Description: putative purple acid phosphatase
  misc_feature (1)..(306): NCBI GI NO: 22329781 NR Description: hypothetical protein; protein id: At1g25230
MTALCCAPGAAELPRLDHPARSDGSLKLLVVGDWGRKGTHNQSRVADQMGRVGEKLDIDFVISTGDNFYKDGLKGVRDQAFEESFVDIYTAQSLQKPWYSVLGNHDYRGNALAQLSPVLRKIDDRFICMRSFIVNAELVDFFFVDTTPFQLEYWTHPGKDRYDWRGVAPRGKYIANLLKDLDVAMKKSTARWKIVAGHHTMRSVSEHGDTKELLELLLPVLKDNGVDFYINGHDHCLEHISSRDSPLQYFTSGGGSKAWRGVFHPNKDKLRFFYDGQGFMSLQLNQDQAHFIFYDVFGNILYRWSSRHPQPSTYLDEE

SEQ ID NO: 37445 - DNA, 1305 bp, Zea mays subsp. mays
  misc_feature (1)..(1305): Ceres Seq. ID no. 12350207
accgcaaacgccaccacgcccacgcctcgccgcgcaccacatctgaaacctccagcccgacgccggcgccggcgccgctgctcgcctgctcgtcacatttcctggtgcccgccaagccccgcgacctgggctccccagctccatccatcaaccgcctgcagccgcggaaatggcagcgccgacgacgctgcgctcggcggcggcgcgggcgcgcgcgcgcgcagcggagctcgtgagagggcggtggccgcagcggcgtctggggacgacgtccgcggcggagacggagagcaaaaagaataaggaggaggaggaggagggggccgggtgggagctctcggcggcgcgggagtactacgactaccgcaagtctatctacggcgacgtcacgcaccgcgccctcctcgtcggacgccgtcggcaccctcgtcgtccccgcccagcccaccgcgcaggtgtataagagcattggtgagaagtatggagtgaagtactcggaagacgagatcctgatgagataccggcgggcatacgagcaaccatggggtggatcacgtctcaggtatgtggatgatgggagaaccttttggcagcatatagtcacttcttctacaggatgttcagatgcacagtactttgaggaactctatcaatactttatgacagaaaaggcctggaagctttgtgaccccgatgccgaaagtgtatttaaagctttgaggaaagctggcgttaaaactgcagtcgtctccaatttcgatacccgtctacggccactcctgcaggccttgaaatgtgaccactggtttgatgcagttgcagtctctgcagaggttgcagcagagaagccgaacccaataatattcttgaaggcctgtgagttactgggcgtgaagcctgaagaagctgtgcacgttggcgacgatcgtagaaatgatatatggggagcgagagatgcaggctgcgatgcttggctctggggcagcgacgttcgctctttcaaggaggttgccgagcggatcggtgttgaggtgacgaagtgaggtaggatggtgaatatacggaggcagaggtagtagttacccaggatcgcggtcgtgaaggaagccagtgacccccatccttgtggtgaaattcctgtgctggtttgtaggcttgtagctgtatgtatgacaacttattagggttccgttgaacctactatgcatgcatgcttgctgccctgacagtgacaggcgaatgcgtgccacgcacttgaatctgagggtctgggactctgggttattgaattattatcgcctggtt

SEQ ID NO: 37446 - protein, 176 aa, Zea mays subsp. mays
  peptide (1)..(176): Ceres Seq. ID no. 12350208
  misc_feature (1)..(159): Pfam Name: Pfam Description:  haloacid dehalogenase-like hydrolase
  misc_feature (1)..(165): NCBI GI NO: 34899086 NR Description: contains ESTsAU091627
  misc_feature (1)..(174): NCBI GI NO: 15227309 NR Description: hypothetical protein; protein id: At2g41250
  misc_feature (1)..(170): NCBI GI NO: 28393346 NR Description: unknown protein [Arabidopsis thaliana]
  misc_feature (1)..(170): NCBI GI NO: 30683719 NR Description: haloacid dehalogenase-like hydrolase family
  misc_feature (1)..(150): NCBI GI NO: 37520921 NR Description: hypothetical protein gll1352
  misc_feature (1)..(155): NCBI GI NO: 27714603 NR Description: similar to RIKEN cDNA 2810435D12
  misc_feature (1)..(158): NCBI GI NO: 17553988 NR Description: Predicted CDS
  misc_feature (1)..(155): NCBI GI NO: 17231587 NR Description: hypothetical protein [Nostoc sp. PCC 7120]
  misc_feature (1)..(155): NCBI GI NO: 23041810 NR Description: hypothetical protein
  misc_feature (1)..(155): NCBI GI NO: 21312204 NR Description: RIKEN cDNA 2810435D12 [Mus musculus]
MRYRRAYEQPWGGSRLRYVDDGRTFWQHIVTSSTGCSDAQYFEELYQYFMTEKAWKLCDPDAESVFKALRKAGVKTAVVSNFDTRLRPLLQALKCDHWFDAVAVSAEVAAEKPNPIIFLKACELLGVKPEEAVHVGDDRRNDIWGARDAGCDAWLWGSDVRSFKEVAERIGVEVTK

SEQ ID NO: 37447 - protein, 127 aa, Zea mays subsp. mays
  peptide (1)..(127): Ceres Seq. ID no. 12350209
  misc_feature (1)..(110): Pfam Name: Pfam Description:  haloacid dehalogenase-like hydrolase
  misc_feature (1)..(116): NCBI GI NO: 34899086 NR Description: contains ESTsAU091627
  misc_feature (1)..(125): NCBI GI NO: 15227309 NR Description: hypothetical protein; protein id: At2g41250
  misc_feature (1)..(121): NCBI GI NO: 28393346 NR Description: unknown protein [Arabidopsis thaliana]
  misc_feature (1)..(121): NCBI GI NO: 30683719 NR Description: haloacid dehalogenase-like hydrolase family
  misc_feature (1)..(101): NCBI GI NO: 37520921 NR Description: hypothetical protein gll1352
  misc_feature (1)..(106): NCBI GI NO: 27714603 NR Description: similar to RIKEN cDNA 2810435D12
  misc_feature (1)..(109): NCBI GI NO: 17553988 NR Description: Predicted CDS
  misc_feature (1)..(106): NCBI GI NO: 17231587 NR Description: hypothetical protein [Nostoc sp. PCC 7120]
  misc_feature (1)..(106): NCBI GI NO: 23041810 NR Description: hypothetical protein
  misc_feature (1)..(106): NCBI GI NO: 21312204 NR Description: RIKEN cDNA 2810435D12 [Mus musculus]
MTEKAWKLCDPDAESVFKALRKAGVKTAVVSNFDTRLRPLLQALKCDHWFDAVAVSAEVAAEKPNPIIFLKACELLGVKPEEAVHVGDDRRNDIWGARDAGCDAWLWGSDVRSFKEVAERIGVEVTK

SEQ ID NO: 37448 - protein, 100 aa, Zea mays subsp. mays
  peptide (1)..(100): Ceres Seq. ID no. 12350210
TANATTPTPRRAPHLKPPARRRRRRRCSPARHISWCPPSPATWAPQLHPSTACSRGNGSADDAALGGGAGARARSGARERAVAAAASGDDVRGGDGEQKE

SEQ ID NO: 37449 - DNA, 1206 bp, Zea mays subsp. mays
  misc_feature (1)..(1206): Ceres Seq. ID no. 12406819
gttcccccggttattctattccctttccctcccccgcctcctctgctcctcgctctcccacccgctcgggcatccgccacacggccacaccaacactgcactccaccgcggcccgccacagtcctcctcctccgtcgccgtcgttcttcagcggcgccttcgcttccccagcacggtaccctagcatcagcgattcagcgctcaatacaagccaccgcggccatggcgcccgcaccggcagctctctccgcggccaacgccctctcgctgctcgcgcccgctagagtctcctccggaaggtggagcagcctgtccgtctccgtctcagcccggcccgtgaccggggtggtgtctgtcgcggcggccacggcgcagaggaggctggtcgccgcggcggcggcgacggagatggcgcccgcggcgagcggggaagaagggagcaagccgttcgtggaggagatgcgggcggtcgcgatgaagctccacaccaaggaccaggcccgggagggggagaaggagccccaggcgccccccgtcgccaagtgggagccctccgtcgaggggtacctccgattcctcgtcgacagcaagctcgtcttccagacgctcgaagccattgtcgagcgcgccgccgtcccgtggtatgcagagtttcggaatactgggctggagagatcagaggcgctgaaaaatgatctggaatggttcaggcaacagggccacacaattccagaaccatcggctcctggcaccacatacgcttctctactggaagagctgtctgaggaggacccccaggcctttatctgccatttctataacgtgtactttgctcatactgctggaggccgaatgattggcaaaaaggtttccgagaagattctgaacaacaaagagctggagttctacaagtgggagggcaatctctcctagctgctgcagaacgtccgcaacaagcttaaccaagtcgcttcgagctggtctcgggaggagaaggaccactgcctggaggagacggagaagtcgttctcttactcaggaggcctcctccgccatatatttacctgatctatcattgctggttgatccagtctcaaacgctgtaaatacatagtcctttgaatgttaaaactttattactggtgagggggatctcctgccccaggtacggtttacctgcattcaagttgctcagtgtcttacttg

SEQ ID NO: 37450 - protein, 310 aa, Zea mays subsp. mays
  peptide (1)..(310): Ceres Seq. ID no. 12406820
  misc_feature (173)..(310): Pfam Name: Pfam Description:  Heme oxygenase
  misc_feature (173)..(310): NCBI GI NO: 14485571 NR Description: heme oxygenase 1 [Sorghum bicolor]
  misc_feature (127)..(310): NCBI GI NO: 14485575 NR Description: heme oxygenase 1 [Lycopersicon esculentum]
  misc_feature (110)..(310): NCBI GI NO: 14485569 NR Description: heme oxygenase 3 [Glycine max]
  misc_feature (85)..(310): NCBI GI NO: 15225771 NR Description: heme oxygenase 1 (HO1); protein id: At2g26670
  misc_feature (77)..(310): NCBI GI NO: 15222425 NR Description: putative heme oxygenase; protein id: At1g69720
  misc_feature (120)..(310): NCBI GI NO: 14485567 NR Description: heme oxygenase 1 [Glycine max]
  misc_feature (95)..(310): NCBI GI NO: 21450864 NR Description: putative heme oxygenase HO1 [Arabidopsis thaliana]
  misc_feature (128)..(310): NCBI GI NO: 14485579 NR Description: heme oxygenase 1 [Pinus taeda]
  misc_feature (128)..(310): NCBI GI NO: 14030647 NR Description: At2g26670/F18A8.4 [Arabidopsis thaliana]
  misc_feature (125)..(310): NCBI GI NO: 15076863 NR Description: putative heme oxygenase 1 precursor
VPPVILFPFPPPPPLLLALPPARASATRPHQHCTPPRPATVLLLRRRRSSAAPSLPQHGTLASAIQRSIQATAAMAPAPAALSAANALSLLAPARVSSGRWSSLSVSVSARPVTGVVSVAAATAQRRLVAAAAATEMAPAASGEEGSKPFVEEMRAVAMKLHTKDQAREGEKEPQAPPVAKWEPSVEGYLRFLVDSKLVFQTLEAIVERAAVPWYAEFRNTGLERSEALKNDLEWFRQQGHTIPEPSAPGTTYASLLEELSEEDPQAFICHFYNVYFAHTAGGRMIGKKVSEKILNNKELEFYKWEGNLS

SEQ ID NO: 37451 - protein, 236 aa, Zea mays subsp. mays
  peptide (1)..(236): Ceres Seq. ID no. 12406821
  misc_feature (99)..(236): Pfam Name: Pfam Description:  Heme oxygenase
  misc_feature (99)..(236): NCBI GI NO: 14485571 NR Description: heme oxygenase 1 [Sorghum bicolor]
  misc_feature (53)..(236): NCBI GI NO: 14485575 NR Description: heme oxygenase 1 [Lycopersicon esculentum]
  misc_feature (36)..(236): NCBI GI NO: 14485569 NR Description: heme oxygenase 3 [Glycine max]
  misc_feature (11)..(236): NCBI GI NO: 15225771 NR Description: heme oxygenase 1 (HO1); protein id: At2g26670
  misc_feature (3)..(236): NCBI GI NO: 15222425 NR Description: putative heme oxygenase; protein id: At1g69720
  misc_feature (46)..(236): NCBI GI NO: 14485567 NR Description: heme oxygenase 1 [Glycine max]
  misc_feature (21)..(236): NCBI GI NO: 21450864 NR Description: putative heme oxygenase HO1 [Arabidopsis thaliana]
  misc_feature (54)..(236): NCBI GI NO: 14485579 NR Description: heme oxygenase 1 [Pinus taeda]
  misc_feature (54)..(236): NCBI GI NO: 14030647 NR Description: At2g26670/F18A8.4 [Arabidopsis thaliana]
  misc_feature (51)..(236): NCBI GI NO: 15076863 NR Description: putative heme oxygenase 1 precursor
MAPAPAALSAANALSLLAPARVSSGRWSSLSVSVSARPVTGVVSVAAATAQRRLVAAAAATEMAPAASGEEGSKPFVEEMRAVAMKLHTKDQAREGEKEPQAPPVAKWEPSVEGYLRFLVDSKLVFQTLEAIVERAAVPWYAEFRNTGLERSEALKNDLEWFRQQGHTIPEPSAPGTTYASLLEELSEEDPQAFICHFYNVYFAHTAGGRMIGKKVSEKILNNKELEFYKWEGNLS

SEQ ID NO: 37452 - protein, 174 aa, Zea mays subsp. mays
  peptide (1)..(174): Ceres Seq. ID no. 12406822
  misc_feature (37)..(174): Pfam Name: Pfam Description:  Heme oxygenase
  misc_feature (37)..(174): NCBI GI NO: 14485571 NR Description: heme oxygenase 1 [Sorghum bicolor]
  misc_feature (1)..(174): NCBI GI NO: 14485575 NR Description: heme oxygenase 1 [Lycopersicon esculentum]
  misc_feature (1)..(174): NCBI GI NO: 14485569 NR Description: heme oxygenase 3 [Glycine max]
  misc_feature (1)..(174): NCBI GI NO: 15225771 NR Description: heme oxygenase 1 (HO1); protein id: At2g26670
  misc_feature (1)..(174): NCBI GI NO: 15222425 NR Description: putative heme oxygenase; protein id: At1g69720
  misc_feature (1)..(174): NCBI GI NO: 14485567 NR Description: heme oxygenase 1 [Glycine max]
  misc_feature (1)..(174): NCBI GI NO: 21450864 NR Description: putative heme oxygenase HO1 [Arabidopsis thaliana]
  misc_feature (1)..(174): NCBI GI NO: 14485579 NR Description: heme oxygenase 1 [Pinus taeda]
  misc_feature (1)..(174): NCBI GI NO: 14030647 NR Description: At2g26670/F18A8.4 [Arabidopsis thaliana]
  misc_feature (1)..(174): NCBI GI NO: 15076863 NR Description: putative heme oxygenase 1 precursor
MAPAASGEEGSKPFVEEMRAVAMKLHTKDQAREGEKEPQAPPVAKWEPSVEGYLRFLVDSKLVFQTLEAIVERAAVPWYAEFRNTGLERSEALKNDLEWFRQQGHTIPEPSAPGTTYASLLEELSEEDPQAFICHFYNVYFAHTAGGRMIGKKVSEKILNNKELEFYKWEGNLS

SEQ ID NO: 37453 - DNA, 1863 bp, Zea mays subsp. mays
  misc_feature (1)..(1863): Ceres Seq. ID no. 12406346
gattcctccactccggccttgcccgacgatctccagctgtccttcaatcaaattatcaacccaacgccatttcggcgctcccgcttcccacaggagtcacagctcaacaaatccctacccaaatccacctccccgccccccaccgccatggctcccccaccaacctcgcgctgcctcgccctcgctctcatcctcatcggcgccctctgcgccgccgccgccgccgcgcggttcgccccggcggacaaccacctccttgcgtgcggcgcggcggcgcccgccgtcctccccgacggccgccgcttcgtgccggactctggctgcgcatccacccgcctccggtcatcctccccgtccctctcctccgcggcgccgcccggctccccgccgccgccgtcctcgctcctcgcctccgctcgggtcttctcctgccgcgcgtcctacgacctcgatgtccgccgccgcgggcaccacatcctccgcctccatttctaccccttcgtccccgccctcgccgcggcccgcttccacgtcggcgccggggggctcctcctcctccacaacttcacggcctcgtcccccgtcgtcaaggagttcatcctccccgtggactccgacgtcctcgtgctcaccttcgtccccgactccggctccactgccttcgtcaacgccatcgagctcgtctctgcgcccgaagagctcgttggcgacatcggcaccctagtcacgtccggcggcgccgctcagatacacgagctgtcgtctcaggtgtttgagactctctacaggatcaacgtcgcggggcgcaaggtcacgccattcaacgacacactgtggcggacatgggttaacgatgagaaattcctcatcgacaccgactcctccaactacatggtgtggtcgtccagtggccggattgcttatcccaagggtagcaagcagatgacaagagaagtggctcctgacaatgtctacaactctgcaagatccgtgaggccaggggtgaatgtgacttggggtttccctgtgcctgctagcagccggtaccttgtgcgtatgcacttctgtgacattgctagcaaggctctgtatgagctctacttcaatatctacgtcaatggtgatcttgcagtcaaggatttcgatctctccagtgcaactggattcttggcctatccttattacattgactttatcgtcgatgtgaaggatgaggggatactgaaattggcgattggtggcttaaagaagagtcgatctgatgaagtaagtggtatccttaatgcactggagataatgaggatgaacaagaccagtggaggtatggatggagacttcccaattgatctacacatggaatatgtggtgagtaaggggattggagaatttgcccgctccctgctctgtggtttcatctttgttgggttgtttgtggctttggtcacgctgatggtgaggttgaggaccgagttgaggaataacggcacagcttggtcctggagacagatgaactccgatgaagggaaactggccagaacatatcagcttgtgcccagtaagacggactattgaatattgcaggctgggcatctttgaggagtgacaacctgcggctgttgtgtgcatctaatcacatcatactttttattaagttgtaagtactgtagttttatcacctctctaaaagtattgtagttttgtatcatcactcctttcatgcttggactttgcattctccatgctttgtcaatggtcaatggaggacatgctcatgatgctgtaaaagtactctaccctagatgtggctgtattgctattgcctcatttattcagtttgacttctgaaacatggattcacagctg

SEQ ID NO: 37454 - protein, 523 aa, Zea mays subsp. mays
  peptide (1)..(523): Ceres Seq. ID no. 12406347
  misc_feature (76)..(523): NCBI GI NO: 15237872 NR Description: receptor-protein kinase-like protein
  misc_feature (53)..(498): NCBI GI NO: 15234944 NR Description: putative receptor-like protein kinase
  misc_feature (53)..(446): NCBI GI NO: 14488367 NR Description: putative protein kinase
  misc_feature (66)..(498): NCBI GI NO: 15226565 NR Description: putative protein kinase; protein id: At2g21480.1
  misc_feature (208)..(490): NCBI GI NO: 18411279 NR Description: contains weak similarity to S
  misc_feature (61)..(363): NCBI GI NO: 24417422 NR Description: unknown [Arabidopsis thaliana]
  misc_feature (56)..(485): NCBI GI NO: 15239630 NR Description: receptor-protein kinase-like protein
  misc_feature (61)..(505): NCBI GI NO: 15240228 NR Description: receptor-like protein kinase precursor - like
  misc_feature (64)..(444): NCBI GI NO: 24796812 NR Description: putative receptor-like protein kinase
  misc_feature (78)..(474): NCBI GI NO: 15231393 NR Description: receptor protein kinase -like
DSSTPALPDDLQLSFNQIINPTPFRRSRFPQESQLNKSLPKSTSPPPTAMAPPPTSRCLALALILIGALCAAAAAARFAPADNHLLACGAAAPAVLPDGRRFVPDSGCASTRLRSSSPSLSSAAPPGSPPPPSSLLASARVFSCRASYDLDVRRRGHHILRLHFYPFVPALAAARFHVGAGGLLLLHNFTASSPVVKEFILPVDSDVLVLTFVPDSGSTAFVNAIELVSAPEELVGDIGTLVTSGGAAQIHELSSQVFETLYRINVAGRKVTPFNDTLWRTWVNDEKFLIDTDSSNYMVWSSSGRIAYPKGSKQMTREVAPDNVYNSARSVRPGVNVTWGFPVPASSRYLVRMHFCDIASKALYELYFNIYVNGDLAVKDFDLSSATGFLAYPYYIDFIVDVKDEGILKLAIGGLKKSRSDEVSGILNALEIMRMNKTSGGMDGDFPIDLHMEYVVSKGIGEFARSLLCGFIFVGLFVALVTLMVRLRTELRNNGTAWSWRQMNSDEGKLARTYQLVPSKTDY

SEQ ID NO: 37455 - protein, 474 aa, Zea mays subsp. mays
  peptide (1)..(474): Ceres Seq. ID no. 12406348
  misc_feature (27)..(474): NCBI GI NO: 15237872 NR Description: receptor-protein kinase-like protein
  misc_feature (4)..(449): NCBI GI NO: 15234944 NR Description: putative receptor-like protein kinase
  misc_feature (4)..(397): NCBI GI NO: 14488367 NR Description: putative protein kinase
  misc_feature (17)..(449): NCBI GI NO: 15226565 NR Description: putative protein kinase; protein id: At2g21480.1
  misc_feature (159)..(441): NCBI GI NO: 18411279 NR Description: contains weak similarity to S
  misc_feature (12)..(314): NCBI GI NO: 24417422 NR Description: unknown [Arabidopsis thaliana]
  misc_feature (7)..(436): NCBI GI NO: 15239630 NR Description: receptor-protein kinase-like protein
  misc_feature (12)..(456): NCBI GI NO: 15240228 NR Description: receptor-like protein kinase precursor - like
  misc_feature (15)..(395): NCBI GI NO: 24796812 NR Description: putative receptor-like protein kinase
  misc_feature (29)..(425): NCBI GI NO: 15231393 NR Description: receptor protein kinase -like
MAPPPTSRCLALALILIGALCAAAAAARFAPADNHLLACGAAAPAVLPDGRRFVPDSGCASTRLRSSSPSLSSAAPPGSPPPPSSLLASARVFSCRASYDLDVRRRGHHILRLHFYPFVPALAAARFHVGAGGLLLLHNFTASSPVVKEFILPVDSDVLVLTFVPDSGSTAFVNAIELVSAPEELVGDIGTLVTSGGAAQIHELSSQVFETLYRINVAGRKVTPFNDTLWRTWVNDEKFLIDTDSSNYMVWSSSGRIAYPKGSKQMTREVAPDNVYNSARSVRPGVNVTWGFPVPASSRYLVRMHFCDIASKALYELYFNIYVNGDLAVKDFDLSSATGFLAYPYYIDFIVDVKDEGILKLAIGGLKKSRSDEVSGILNALEIMRMNKTSGGMDGDFPIDLHMEYVVSKGIGEFARSLLCGFIFVGLFVALVTLMVRLRTELRNNGTAWSWRQMNSDEGKLARTYQLVPSKTDY

SEQ ID NO: 37456 - DNA, 1407 bp, Zea mays subsp. mays
  misc_feature (1)..(1407): Ceres Seq. ID no. 12406721
aaaacctctgaaccctcatcgagtttctgtggacgccacgccacgcgaccatacgtgtatagcacgcagcgcggcatcggcgtcgcacgcactcgcgcttgccgctggacggaggagcggagcaccgatcggccgggctcggtgcacgcgcctagcggatgaagatggccgtgctcgcgggcgcggccgtcgttgcggtggcggcggcggcgatggtcgccgcgctcctgtcctccccggacgcgctgcgcgacgtcgcggtgctggagattggcggcggggaaaggccgtgtcgagttggtccccgtggacgccggcgccgcggggcccgagagcctggcgttcgacccggccggcggcggcccgtacgcgggcgtgtcggacggccgcgtcctccggtgggtccccggcgagcggcgctgggaagagcactcggcctcctgcgcgcccgaactgctggacagctgcaggggctcccaggacccggggcgcgagcacgagtgcgggcgcccgttgggcctcaagttcaaccccgacacgggggagctctacgtggccgacgcctaccacggcctgcgcatggtcgcgccgggcccgggcggcggcaaggcgtcgaggccggtggcgccggagtggtggcagggcgcgcgcgccttcagcttcgccaacggcgtcgaggtcgacccgggcaccggcgccgtctacttcaccgagacgagcacgaggttccagaggcgggagttcctgcgcatcgtcgtgtccggcgacacgacggggcggctgctgcggtacgacccgaggggcggcggtggggtggaggtgctggccgacggcctggcgttccccaacggcctcgcgatgagcagcgacggcacgcacctgctgctggcggagaccaccacggggaggatcctccggtactggctccgcccgacggctcccaaggcgccggcgctgctggaggaggtggcgcggctgccgtggttcccggacaacatcaggatgagcccccggggcggcttctgggtggggctccacgccaggaggggcaagctcgcccagtactgcatctcctacccctggctccggcgcctggtgctggcgctgccgccgcgccacgtccagcgcgcctcgtcgctgctcagccgcctcgggcggcaggtcatcgcgctgcggctgagcgaggaggacgggagggtggtggagatggccagcgtccacggggatcttcggagggtgttcaggtccgtcagcgaagtggcggagaggaacggcagcatctggattggctctgtcatgtcgccgtttctcggagtctacaagttgcagtagaggcatttacgcttaaatatggattcagtagcttattatagcaaaggaaaacatacatcgcatctatatttgtgt

SEQ ID NO: 37457 - protein, 404 aa, Zea mays subsp. mays
  peptide (1)..(404): Ceres Seq. ID no. 12406722
  misc_feature (38)..(286): NCBI GI NO: 23105951 NR Description: hypothetical protein [Azotobacter vinelandii]
  misc_feature (1)..(363): NCBI GI NO: 465445 NR Description: PROBABLE NUCLEAR ANTIGEN
MKMAVLAGAAVVAVAAAAMVAALLSSPDALRDVAVLEIGGGERPCRVGPRGRRRRGAREPGVRPGRRRPVRGRVGRPRPPVGPRRAALGRALGLLRARTAGQLQGLPGPGARARVRAPVGPQVQPRHGGALRGRRLPRPAHGRAGPGRRQGVEAGGAGVVAGRARLQLRQRRRGRPGHRRRLLHRDEHEVPEAGVPAHRRVRRHDGAAAAVRPEGRRWGGGAGRRPGVPQRPRDEQRRHAPAAGGDHHGEDPPVLAPPDGSQGAGAAGGGGAAAVVPGQHQDEPPGRLLGGAPRQEGQARPVLHLLPLAPAPGAGAAAAPRPARLVAAQPPRAAGHRAAAERGGREGGGDGQRPRGSSEGVQVRQRSGGEERQHLDWLCHVAVSRSLQVAVEAFTLKYGFSSLL

SEQ ID NO: 37458 - protein, 402 aa, Zea mays subsp. mays
  peptide (1)..(402): Ceres Seq. ID no. 12406723
  misc_feature (36)..(284): NCBI GI NO: 23105951 NR Description: hypothetical protein [Azotobacter vinelandii]
  misc_feature (1)..(361): NCBI GI NO: 465445 NR Description: PROBABLE NUCLEAR ANTIGEN
MAVLAGAAVVAVAAAAMVAALLSSPDALRDVAVLEIGGGERPCRVGPRGRRRRGAREPGVRPGRRRPVRGRVGRPRPPVGPRRAALGRALGLLRARTAGQLQGLPGPGARARVRAPVGPQVQPRHGGALRGRRLPRPAHGRAGPGRRQGVEAGGAGVVAGRARLQLRQRRRGRPGHRRRLLHRDEHEVPEAGVPAHRRVRRHDGAAAAVRPEGRRWGGGAGRRPGVPQRPRDEQRRHAPAAGGDHHGEDPPVLAPPDGSQGAGAAGGGGAAAVVPGQHQDEPPGRLLGGAPRQEGQARPVLHLLPLAPAPGAGAAAAPRPARLVAAQPPRAAGHRAAAERGGREGGGDGQRPRGSSEGVQVRQRSGGEERQHLDWLCHVAVSRSLQVAVEAFTLKYGFSSLL

SEQ ID NO: 37459 - protein, 386 aa, Zea mays subsp. mays
  peptide (1)..(386): Ceres Seq. ID no. 12406724
  misc_feature (20)..(268): NCBI GI NO: 23105951 NR Description: hypothetical protein [Azotobacter vinelandii]
  misc_feature (1)..(345): NCBI GI NO: 465445 NR Description: PROBABLE NUCLEAR ANTIGEN
MVAALLSSPDALRDVAVLEIGGGERPCRVGPRGRRRRGAREPGVRPGRRRPVRGRVGRPRPPVGPRRAALGRALGLLRARTAGQLQGLPGPGARARVRAPVGPQVQPRHGGALRGRRLPRPAHGRAGPGRRQGVEAGGAGVVAGRARLQLRQRRRGRPGHRRRLLHRDEHEVPEAGVPAHRRVRRHDGAAAAVRPEGRRWGGGAGRRPGVPQRPRDEQRRHAPAAGGDHHGEDPPVLAPPDGSQGAGAAGGGGAAAVVPGQHQDEPPGRLLGGAPRQEGQARPVLHLLPLAPAPGAGAAAAPRPARLVAAQPPRAAGHRAAAERGGREGGGDGQRPRGSSEGVQVRQRSGGEERQHLDWLCHVAVSRSLQVAVEAFTLKYGFSSLL

SEQ ID NO: 37460 - DNA, 1517 bp, Zea mays subsp. mays; identical to SEQ ID NO: 27701
  misc_feature (1)..(1517): Ceres Seq. ID no. 13570867

SEQ ID NO: 37461 - protein, 413 aa, Zea mays subsp. mays; identical to SEQ ID NO: 27702
  peptide (1)..(413): Ceres Seq. ID no. 13570868
  misc_feature (75)..(400): Pfam Name: Pfam Description:  GDSL-like Lipase/Acylhydrolase
  misc_feature (50)..(411): NCBI GI NO: 34903956 NR Description: OSJNBa0038J17.23
  misc_feature (52)..(413): NCBI GI NO: 34903958 NR Description: OSJNBa0038J17.24
  misc_feature (70)..(411): NCBI GI NO: 34903978 NR Description: unnamed protein product
  misc_feature (39)..(411): NCBI GI NO: 34903996 NR Description: unnamed protein product
  misc_feature (39)..(411): NCBI GI NO: 34903994 NR Description: unnamed protein product
  misc_feature (39)..(413): NCBI GI NO: 34903986 NR Description: unnamed protein product
  misc_feature (49)..(408): NCBI GI NO: 15242538 NR Description: GDSL-motif lipase/hydrolase protein
  misc_feature (51)..(413): NCBI GI NO: 21593234 NR Description: lipase, putative [Arabidopsis thaliana]
  misc_feature (49)..(408): NCBI GI NO: 21553708 NR Description: GDSL-motif lipase/hydrolase-like protein
  misc_feature (51)..(413): NCBI GI NO: 10764858 NR Description: F1K23.17 [Arabidopsis thaliana]

SEQ ID NO: 37462 - protein, 397 aa, Zea mays subsp. mays; identical to SEQ ID NO: 27703
  peptide (1)..(397): Ceres Seq. ID no. 13570869
  misc_feature (59)..(384): Pfam Name: Pfam Description:  GDSL-like Lipase/Acylhydrolase
  misc_feature (34)..(395): NCBI GI NO: 34903956 NR Description: OSJNBa0038J17.23
  misc_feature (36)..(397): NCBI GI NO: 34903958 NR Description: OSJNBa0038J17.24
  misc_feature (54)..(395): NCBI GI NO: 34903978 NR Description: unnamed protein product
  misc_feature (23)..(395): NCBI GI NO: 34903996 NR Description: unnamed protein product
  misc_feature (23)..(395): NCBI GI NO: 34903994 NR Description: unnamed protein product
  misc_feature (23)..(397): NCBI GI NO: 34903986 NR Description: unnamed protein product
  misc_feature (33)..(392): NCBI GI NO: 15242538 NR Description: GDSL-motif lipase/hydrolase protein
  misc_feature (35)..(397): NCBI GI NO: 21593234 NR Description: lipase, putative [Arabidopsis thaliana]
  misc_feature (33)..(392): NCBI GI NO: 21553708 NR Description: GDSL-motif lipase/hydrolase-like protein
  misc_feature (35)..(397): NCBI GI NO: 10764858 NR Description: F1K23.17 [Arabidopsis thaliana]

SEQ ID NO: 37463 - protein, 379 aa, Zea mays subsp. mays; identical to SEQ ID NO: 27704
  peptide (1)..(379): Ceres Seq. ID no. 13570870
  misc_feature (41)..(366): Pfam Name: Pfam Description:  GDSL-like Lipase/Acylhydrolase
  misc_feature (16)..(377): NCBI GI NO: 34903956 NR Description: OSJNBa0038J17.23
  misc_feature (18)..(379): NCBI GI NO: 34903958 NR Description: OSJNBa0038J17.24
  misc_feature (36)..(377): NCBI GI NO: 34903978 NR Description: unnamed protein product
  misc_feature (5)..(377): NCBI GI NO: 34903996 NR Description: unnamed protein product
  misc_feature (5)..(377): NCBI GI NO: 34903994 NR Description: unnamed protein product
  misc_feature (5)..(379): NCBI GI NO: 34903986 NR Description: unnamed protein product
  misc_feature (15)..(374): NCBI GI NO: 15242538 NR Description: GDSL-motif lipase/hydrolase protein
  misc_feature (17)..(379): NCBI GI NO: 21593234 NR Description: lipase, putative [Arabidopsis thaliana]
  misc_feature (15)..(374): NCBI GI NO: 21553708 NR Description: GDSL-motif lipase/hydrolase-like protein
  misc_feature (17)..(379): NCBI GI NO: 10764858 NR Description: F1K23.17 [Arabidopsis thaliana]

SEQ ID NO: 37464 - DNA, 1392 bp, Zea mays subsp. mays
  misc_feature (1)..(1392): Ceres Seq. ID no. 12381052
gcacgagaccattacctagaacatcctaatcaaaaagtttcttcgccgtcgctttgcgagtgtggacgggacggatacatgagggagaacggcgccgccagggacgagggccccgccttgtgcaaggccgctgcggcggacgggggcggggatgtgggcgccgcctccgcccgccgccgccgccggctcgggcgtgccacggaggggcctgctccgacgaagagaatccggtcggggtcgcagaggtcgccgtacgactcgtctctggagacggcgacggacggctgctgctggccggcgcgcctatcgcatggcgccgtgtcggtgatcgggcggcggagggagatggaggacgcgttcgccgtcgcgctctcgttcctggcctcggaggcggtgggcggcgagcaggagcaggagctggacttcttcgccgtgtacgatggccacggcggtgcaagggtggcggaggcgtgccgggagcggatgcacgtggtgctggccgaggaggtcagcctgcgccgccgccgcagcggcagcgacgacctgcgctgggaggaggccatggcggccagcttcgcccgagtggacggcgaggtgaccggcggcttgtcgtccccgcaccatgacgacgccggcagcagcttgccctaccgcaccgtcgggtccaccgccgtcgtcgccgtcgtgggccggcgccgcatcgtcgtcggcaactgcggcgactcccgcgccgtgctctcacgcggcggcgtcgcggtgccgctctccagcgatcacaagccggaccgtccggacgagatgcagagggtggaagcagccggcggcagagtcgtcaactggaacggctaccgcgtgctgggagtcctggcaacctccaggtccatcggcgactactacctgaagccgtacgtgagcgcggagccggaggtgacggtggtggagcggacggagcgggacgagttcctcatcctggccagcgacgggctgtgggacgtggtctccaacgaggcggcgtgcaagatcgccaggagctgcctgagcgggcgcgcggcctccaggttccccgggtccgtggccggccgcaccgccgcggacgccgccgcgctgctcgcggagctggccttgtcccgcggcagcagggacaacatcagcgtcgtcgtggtcgagctgcggcggctccagacggaccagatgacgagggtttagtttgctgagactgagttgagttgagttgagagcgtaccgagtagtagatgatgatgacattgttaagtatttgagcagcctgtgctgagaagctgtggggggattaagagagtctccctcccgccttcagcacttgggtgccgtttggttcacatatttgtaacgtaatgggtaacggataacgtt

SEQ ID NO: 37465 - protein, 401 aa, Zea mays subsp. mays
  peptide (1)..(401): Ceres Seq. ID no. 12381053
  misc_feature (141)..(382): Pfam Name: Pfam Description:  Protein phosphatase 2C
  misc_feature (141)..(391): NCBI GI NO: 4336434 NR Description: nodule-enhanced protein phosphatase type 2C
  misc_feature (39)..(372): NCBI GI NO: 34908256 NR Description: putative protein phosphatase 2C
  misc_feature (361)..(392): NCBI GI NO: 34908256 NR Description: putative protein phosphatase 2C
  misc_feature (44)..(349): NCBI GI NO: 34902050 NR Description: putative Serine/threonine phosphatases
  misc_feature (335)..(392): NCBI GI NO: 34902050 NR Description: putative Serine/threonine phosphatases
  misc_feature (105)..(392): NCBI GI NO: 10432446 NR Description: protein phosphatase 2C [Nicotiana tabacum]
  misc_feature (101)..(382): NCBI GI NO: 15222398 NR Description: protein phosphatase 2C
  misc_feature (356)..(392): NCBI GI NO: 15222398 NR Description: protein phosphatase 2C
  misc_feature (101)..(382): NCBI GI NO: 21537020 NR Description: protein phosphatase 2C, putative
  misc_feature (356)..(392): NCBI GI NO: 21537020 NR Description: protein phosphatase 2C, putative
ARDHYLEHPNQKVSSPSLCECGRDGYMRENGAARDEGPALCKAAAADGGGDVGAASARRRRRLGRATEGPAPTKRIRSGSQRSPYDSSLETATDGCCWPARLSHGAVSVIGRRREMEDAFAVALSFLASEAVGGEQEQELDFFAVYDGHGGARVAEACRERMHVVLAEEVSLRRRRSGSDDLRWEEAMAASFARVDGEVTGGLSSPHHDDAGSSLPYRTVGSTAVVAVVGRRRIVVGNCGDSRAVLSRGGVAVPLSSDHKPDRPDEMQRVEAAGGRVVNWNGYRVLGVLATSRSIGDYYLKPYVSAEPEVTVVERTERDEFLILASDGLWDVVSNEAACKIARSCLSGRAASRFPGSVAGRTAADAAALLAELALSRGSRDNISVVVVELRRLQTDQMTRV

SEQ ID NO: 37466 - protein, 375 aa, Zea mays subsp. mays
  peptide (1)..(375): Ceres Seq. ID no. 12381054
  misc_feature (115)..(356): Pfam Name: Pfam Description:  Protein phosphatase 2C
  misc_feature (115)..(365): NCBI GI NO: 4336434 NR Description: nodule-enhanced protein phosphatase type 2C
  misc_feature (13)..(346): NCBI GI NO: 34908256 NR Description: putative protein phosphatase 2C
  misc_feature (335)..(366): NCBI GI NO: 34908256 NR Description: putative protein phosphatase 2C
  misc_feature (18)..(323): NCBI GI NO: 34902050 NR Description: putative Serine/threonine phosphatases
  misc_feature (309)..(366): NCBI GI NO: 34902050 NR Description: putative Serine/threonine phosphatases
  misc_feature (79)..(366): NCBI GI NO: 10432446 NR Description: protein phosphatase 2C [Nicotiana tabacum]
  misc_feature (75)..(356): NCBI GI NO: 15222398 NR Description: protein phosphatase 2C
  misc_feature (330)..(366): NCBI GI NO: 15222398 NR Description: protein phosphatase 2C
  misc_feature (75)..(356): NCBI GI NO: 21537020 NR Description: protein phosphatase 2C, putative
  misc_feature (330)..(366): NCBI GI NO: 21537020 NR Description: protein phosphatase 2C, putative
MRENGAARDEGPALCKAAAADGGGDVGAASARRRRRLGRATEGPAPTKRIRSGSQRSPYDSSLETATDGCCWPARLSHGAVSVIGRRREMEDAFAVALSFLASEAVGGEQEQELDFFAVYDGHGGARVAEACRERMHVVLAEEVSLRRRRSGSDDLRWEEAMAASFARVDGEVTGGLSSPHHDDAGSSLPYRTVGSTAVVAVVGRRRIVVGNCGDSRAVLSRGGVAVPLSSDHKPDRPDEMQRVEAAGGRVVNWNGYRVLGVLATSRSIGDYYLKPYVSAEPEVTVVERTERDEFLILASDGLWDVVSNEAACKIARSCLSGRAASRFPGSVAGRTAADAAALLAELALSRGSRDNISVVVVELRRLQTDQMTRV

SEQ ID NO: 37467 - protein, 286 aa, Zea mays subsp. mays
  peptide (1)..(286): Ceres Seq. ID no. 12381055
  misc_feature (26)..(267): Pfam Name: Pfam Description:  Protein phosphatase 2C
  misc_feature (26)..(276): NCBI GI NO: 4336434 NR Description: nodule-enhanced protein phosphatase type 2C
  misc_feature (1)..(257): NCBI GI NO: 34908256 NR Description: putative protein phosphatase 2C
  misc_feature (246)..(277): NCBI GI NO: 34908256 NR Description: putative protein phosphatase 2C
  misc_feature (1)..(234): NCBI GI NO: 34902050 NR Description: putative Serine/threonine phosphatases
  misc_feature (220)..(277): NCBI GI NO: 34902050 NR Description: putative Serine/threonine phosphatases
  misc_feature (1)..(277): NCBI GI NO: 10432446 NR Description: protein phosphatase 2C [Nicotiana tabacum]
  misc_feature (1)..(267): NCBI GI NO: 15222398 NR Description: protein phosphatase 2C
  misc_feature (241)..(277): NCBI GI NO: 15222398 NR Description: protein phosphatase 2C
  misc_feature (1)..(267): NCBI GI NO: 21537020 NR Description: protein phosphatase 2C, putative
  misc_feature (241)..(277): NCBI GI NO: 21537020 NR Description: protein phosphatase 2C, putative
MEDAFAVALSFLASEAVGGEQEQELDFFAVYDGHGGARVAEACRERMHVVLAEEVSLRRRRSGSDDLRWEEAMAASFARVDGEVTGGLSSPHHDDAGSSLPYRTVGSTAVVAVVGRRRIVVGNCGDSRAVLSRGGVAVPLSSDHKPDRPDEMQRVEAAGGRVVNWNGYRVLGVLATSRSIGDYYLKPYVSAEPEVTVVERTERDEFLILASDGLWDVVSNEAACKIARSCLSGRAASRFPGSVAGRTAADAAALLAELALSRGSRDNISVVVVELRRLQTDQMTRV

SEQ ID NO: 37468 - DNA, 1411 bp, Zea mays subsp. mays
  misc_feature (1)..(1411): Ceres Seq. ID no. 12382286
  misc_feature (882)..(882): n is a, c, t, g, unknown, or other
  misc_feature (978)..(978): n is a, c, t, g, unknown, or other
  misc_feature (867)..(867): n is a, c, t, g, unknown, or other
  misc_feature (885)..(885): n is a, c, t, g, unknown, or other
  misc_feature (884)..(884): n is a, c, t, g, unknown, or other
  misc_feature (1034)..(1034): n is a, c, t, g, unknown, or other
  misc_feature (905)..(905): n is a, c, t, g, unknown, or other
  misc_feature (890)..(890): n is a, c, t, g, unknown, or other
  misc_feature (883)..(883): n is a, c, t, g, unknown, or other
  misc_feature (915)..(915): n is a, c, t, g, unknown, or other
  misc_feature (874)..(874): n is a, c, t, g, unknown, or other
  misc_feature (879)..(879): n is a, c, t, g, unknown, or other
  misc_feature (886)..(886): n is a, c, t, g, unknown, or other
  misc_feature (858)..(858): n is a, c, t, g, unknown, or other
gcacgagaccattacctagaacatcctaatcgaaaactctctctctctctctctctctctataacaaacaggacgaggggagattgtggaatgctcacccagcaaggaggccgacctgttcaatgccgtcctgggaggcctaggccagttcggcatcataaccagggccaggatcctgctgcaggaggctccggagaaggtgacgtgggtgagggccttctacgacgacttgggcgccttcaccagggaccaggagctgctggtgtcgattccggattcggtggactacgtggaagggttcatggtcctgaacgagcggtccctccacagctcctccatcgccttccccgcgagcgtggacttcagcccggatttcggcaccaggagcagccctaggatctactactgcgtcgagttcgcggtccaccaccaccacggttaccagcagcagtctcaggcggccgtggaggccatctcgaggcggatgagccacatggcgtcccagctgtacagcgtggaggtgtcctacttggacttcctgaaccgggtcaggatggaggaggtgagcctgcggagcgccgggatgtgggaggaggtgcaccacccgtggctcaacatgttcgtgcccaaggccggggtcgctggcttcagggatctgctcatggacaacgtctcgccggatagcttccagggcctcatcctcatctacccactcctcagagacaagtgggacaccaacacgtcggtcgtgatcccggactccgggcccaccgcggacgacccggtgatgtacgtggtcggcatcctcaggtccgcgaaccctggtccagaagaagacggtgacggctgctcccaccnctgcctgcncgagctnctccncannnnncgcnggatcgccgacgccncggaggcgcncctcggcgccaagcagtacctgcctcaccacccgaccccggcccgctggcagcagcacctggnccggcgttgggagcgcttcgcggaccgcaaggcccggttcgacccgctgcgcatcntggggcccggccagggcatattccctcggacggcccaggatgctgccgccgctgctgcgtacgggagctagcattttatatatatacggcatgaaacagtatagattattaattatcagctgactagctaggatgcgatcttctttcttcttcttcttctctcttcagtttcctctgcattttgagggcatgtggggccggttgttgggttattctgtgaggctctggcctccggggcactttgagaggacctgatggtggtggtggtggtggtgattggtgattggtgaatgtcactgggaattttggaacttttgtacaggttgatggaggaagcacaggctttaagtttataagggaatagacatagcgcttct

SEQ ID NO: 37469 - protein, 267 aa, Zea mays subsp. mays
  peptide (1)..(267): Ceres Seq. ID no. 12382287
  misc_feature (1)..(265): NCBI GI NO: 37535474 NR Description: putative cytokinin oxidase
  misc_feature (1)..(262): NCBI GI NO: 32489847 NR Description: OSJNBb0065J09.7
  misc_feature (1)..(256): NCBI GI NO: 38520861 NR Description: cytokinin oxidase 2 [Zea mays var. nobilis]
  misc_feature (1)..(256): NCBI GI NO: 38520863 NR Description: cytokinin oxidase 3 [Zea mays]
  misc_feature (1)..(256): NCBI GI NO: 38520865 NR Description: cytokinin oxidase 3 [Zea mays]
  misc_feature (1)..(256): NCBI GI NO: 20161335 NR Description: putative cytokinin oxidase
  misc_feature (1)..(254): NCBI GI NO: 23267157 NR Description: cytokinin dehydrogenase 2 [Hordeum vulgare]
  misc_feature (1)..(255): NCBI GI NO: 15227374 NR Description: putative cytokinin oxidase; protein id: At2g41510
  misc_feature (1)..(254): NCBI GI NO: 27312007 NR Description: cytokinin dehydrogenase 2 [Hordeum vulgare]
  misc_feature (1)..(252): NCBI GI NO: 11120516 NR Description: cytokinin oxidase [Arabidopsis thaliana]
  misc_feature (186)..(186): Xaa is any aa, unknown or other
  misc_feature (189)..(189): Xaa is any aa, unknown or other
  misc_feature (191)..(191): Xaa is any aa, unknown or other
  misc_feature (193)..(193): Xaa is any aa, unknown or other
  misc_feature (194)..(194): Xaa is any aa, unknown or other
  misc_feature (195)..(195): Xaa is any aa, unknown or other
  misc_feature (197)..(197): Xaa is any aa, unknown or other
  misc_feature (202)..(202): Xaa is any aa, unknown or other
  misc_feature (205)..(205): Xaa is any aa, unknown or other
  misc_feature (226)..(226): Xaa is any aa, unknown or other
  misc_feature (245)..(245): Xaa is any aa, unknown or other
MVLNERSLHSSSIAFPASVDFSPDFGTRSSPRIYYCVEFAVHHHHGYQQQSQAAVEAISRRMSHMASQLYSVEVSYLDFLNRVRMEEVSLRSAGMWEEVHHPWLNMFVPKAGVAGFRDLLMDNVSPDSFQGLILIYPLLRDKWDTNTSVVIPDSGPTADDPVMYVVGILRSANPGPEEDGDGCSHXCLXEXLXXXRXIADAXEAXLGAKQYLPHHPTPARWQQHLXRRWERFADRKARFDPLRIXGPGQGIFPRTAQDAAAAAAYGS

SEQ ID NO: 37470 - protein, 206 aa, Zea mays subsp. mays
  peptide (1)..(206): Ceres Seq. ID no. 12382288
  misc_feature (1)..(204): NCBI GI NO: 37535474 NR Description: putative cytokinin oxidase
  misc_feature (1)..(201): NCBI GI NO: 32489847 NR Description: OSJNBb0065J09.7
  misc_feature (1)..(195): NCBI GI NO: 38520861 NR Description: cytokinin oxidase 2 [Zea mays var. nobilis]
  misc_feature (1)..(195): NCBI GI NO: 38520863 NR Description: cytokinin oxidase 3 [Zea mays]
  misc_feature (1)..(195): NCBI GI NO: 38520865 NR Description: cytokinin oxidase 3 [Zea mays]
  misc_feature (1)..(195): NCBI GI NO: 20161335 NR Description: putative cytokinin oxidase
  misc_feature (1)..(193): NCBI GI NO: 23267157 NR Description: cytokinin dehydrogenase 2 [Hordeum vulgare]
  misc_feature (1)..(194): NCBI GI NO: 15227374 NR Description: putative cytokinin oxidase; protein id: At2g41510
  misc_feature (1)..(193): NCBI GI NO: 27312007 NR Description: cytokinin dehydrogenase 2 [Hordeum vulgare]
  misc_feature (1)..(191): NCBI GI NO: 11120516 NR Description: cytokinin oxidase [Arabidopsis thaliana]
  misc_feature (125)..(125): Xaa is any aa, unknown or other
  misc_feature (128)..(128): Xaa is any aa, unknown or other
  misc_feature (130)..(130): Xaa is any aa, unknown or other
  misc_feature (132)..(132): Xaa is any aa, unknown or other
  misc_feature (133)..(133): Xaa is any aa, unknown or other
  misc_feature (134)..(134): Xaa is any aa, unknown or other
  misc_feature (136)..(136): Xaa is any aa, unknown or other
  misc_feature (141)..(141): Xaa is any aa, unknown or other
  misc_feature (144)..(144): Xaa is any aa, unknown or other
  misc_feature (165)..(165): Xaa is any aa, unknown or other
  misc_feature (184)..(184): Xaa is any aa, unknown or other
MSHMASQLYSVEVSYLDFLNRVRMEEVSLRSAGMWEEVHHPWLNMFVPKAGVAGFRDLLMDNVSPDSFQGLILIYPLLRDKWDTNTSVVIPDSGPTADDPVMYVVGILRSANPGPEEDGDGCSHXCLXEXLXXXRXIADAXEAXLGAKQYLPHHPTPARWQQHLXRRWERFADRKARFDPLRIXGPGQGIFPRTAQDAAAAAAYGS

SEQ ID NO: 37471 - protein, 203 aa, Zea mays subsp. mays
  peptide (1)..(203): Ceres Seq. ID no. 12382289
  misc_feature (1)..(201): NCBI GI NO: 37535474 NR Description: putative cytokinin oxidase
  misc_feature (1)..(198): NCBI GI NO: 32489847 NR Description: OSJNBb0065J09.7
  misc_feature (1)..(192): NCBI GI NO: 38520861 NR Description: cytokinin oxidase 2 [Zea mays var. nobilis]
  misc_feature (1)..(192): NCBI GI NO: 38520863 NR Description: cytokinin oxidase 3 [Zea mays]
  misc_feature (1)..(192): NCBI GI NO: 38520865 NR Description: cytokinin oxidase 3 [Zea mays]
  misc_feature (1)..(192): NCBI GI NO: 20161335 NR Description: putative cytokinin oxidase
  misc_feature (1)..(190): NCBI GI NO: 23267157 NR Description: cytokinin dehydrogenase 2 [Hordeum vulgare]
  misc_feature (1)..(191): NCBI GI NO: 15227374 NR Description: putative cytokinin oxidase; protein id: At2g41510
  misc_feature (1)..(190): NCBI GI NO: 27312007 NR Description: cytokinin dehydrogenase 2 [Hordeum vulgare]
  misc_feature (1)..(188): NCBI GI NO: 11120516 NR Description: cytokinin oxidase [Arabidopsis thaliana]
  misc_feature (122)..(122): Xaa is any aa, unknown or other
  misc_feature (125)..(125): Xaa is any aa, unknown or other
  misc_feature (127)..(127): Xaa is any aa, unknown or other
  misc_feature (129)..(129): Xaa is any aa, unknown or other
  misc_feature (130)..(130): Xaa is any aa, unknown or other
  misc_feature (131)..(131): Xaa is any aa, unknown or other
  misc_feature (133)..(133): Xaa is any aa, unknown or other
  misc_feature (138)..(138): Xaa is any aa, unknown or other
  misc_feature (141)..(141): Xaa is any aa, unknown or other
  misc_feature (162)..(162): Xaa is any aa, unknown or other
  misc_feature (181)..(181): Xaa is any aa, unknown or other
MASQLYSVEVSYLDFLNRVRMEEVSLRSAGMWEEVHHPWLNMFVPKAGVAGFRDLLMDNVSPDSFQGLILIYPLLRDKWDTNTSVVIPDSGPTADDPVMYVVGILRSANPGPEEDGDGCSHXCLXEXLXXXRXIADAXEAXLGAKQYLPHHPTPARWQQHLXRRWERFADRKARFDPLRIXGPGQGIFPRTAQDAAAAAAYGS

SEQ ID NO: 37472 - DNA, 783 bp, Zea mays subsp. mays
  misc_feature (1)..(783): Ceres Seq. ID no. 12354505
gaccacctctcgtatcgattctccaagcgccgcgccgcgccgagcgaagaagctcgtctcgtctccatggcggccgcagcggtggccgtctccacctctgtgtgcacgtcctcaaggcgtagcacgggctgtccgaacgtgaggccccaggcccgtccgctcctaggcaggccgtcgccgcgccggaggctgcagacggccttggccgcgacgggcaagacgccgggcgaggcggaggagcaggtccccgcgtgggccaagcccggcgcggacgagccgccaccctgggagcgcgagggcggggccgcgcgtggacaggaggcccggcaggtccccttctacgcgtacctgctcgcgtccacgatcaccgccatcgccgcgatcggctccatcttcgagtacaccaaccagcggccggtgttcgggatcgtcggccccgacagcgtcctgtacgcgccgctcctgggcttcttcggtcttcaccggcatcccgacctccgcgtttctgtggttcaaggccgtgcagacggccaacagagaggccgaggagcaagaccgcagagacggattcctgtgagaggctgtgggtgactccggcgcactcgccggtgccgtcgccgtgcagaagaacgcgcaccgcaccaccggtattcgcagcgacgggtgacgggtcatgttgtcatgttatgtatgtcggtgtactgtatactagaatttgagagagcggatggatttgcggcacaaatcagagaaaatatcttaatcatcattcgtatgagtggc

SEQ ID NO: 37473 - protein, 196 aa, Zea mays subsp. mays
  peptide (1)..(196): Ceres Seq. ID no. 12354506
  misc_feature (23)..(160): NCBI GI NO: 15230505 NR Description: putative protein; protein id: At3g51510
DHLSYRFSKRRAAPSEEARLVSMAAAAVAVSTSVCTSSRRSTGCPNVRPQARPLLGRPSPRRRLQTALAATGKTPGEAEEQVPAWAKPGADEPPPWEREGGAARGQEARQVPFYAYLLASTITAIAAIGSIFEYTNQRPVFGIVGPDSVLYAPLLGFFGLHRHPDLRVSVVQGRADGQQRGRGARPQRRIPVRGCG

SEQ ID NO: 37474 - protein, 174 aa, Zea mays subsp. mays
  peptide (1)..(174): Ceres Seq. ID no. 12354507
  misc_feature (1)..(138): NCBI GI NO: 15230505 NR Description: putative protein; protein id: At3g51510
MAAAAVAVSTSVCTSSRRSTGCPNVRPQARPLLGRPSPRRRLQTALAATGKTPGEAEEQVPAWAKPGADEPPPWEREGGAARGQEARQVPFYAYLLASTITAIAAIGSIFEYTNQRPVFGIVGPDSVLYAPLLGFFGLHRHPDLRVSVVQGRADGQQRGRGARPQRRIPVRGCG

SEQ ID NO: 37475 - DNA, 1349 bp, Zea mays subsp. mays
  misc_feature (1)..(1349): Ceres Seq. ID no. 12364087
acaactgttatattcccaccggcgccgccggctcttcgtcgtcctcctccgggtgtgccccagttcgctgcccgttccccagccgccgatccctcgatctccgctagcttcgttccttcgtacaggaacggtcgagcagaaactagcagccactcccgagtcccgactcccgatcgcgattacttgccgcggcaccagtactccagcggccaccatgagcagcgggaagcgatccttcttcgcgcccaagaagaaggccaccaacccgttcgattccgactccgacgacgacaaaccgcagcagcggccagcgcgggcgtcctccgtgcctcccccggacgagcagcggggctcctcctctctcttcggcgccggcgacagaggcgggctcttctcttccgcggccaaccatcactaccggaacgacttccgcgacgctggcggccttgagggccagtccgtgcaggagctggagggcctacgcggcgtacaaggccgaggagaccacgcgccggacgcgggggtgcgtcaggatcgccgaggagatgagggacaccgcatccaagacgctcgtcaccgtccaccagcaggggcagcagatccaccgcacgcacatgatggccgtcgacatcgaccaggatctcttcaggagtgagaagctattgggcgatcttgggggtctattttccaaaaagtggaagccaaagaagaatggcgccatcaggggtcctatgctaactagagatgattccttcataaggaaggggagtcatttggagcaaaggcagaaactagggctggcagatcatccacctccatcaaatgcgcgccaattccgttctgaaccctcatcagcacttgagaaagttgagatagagaaggcaaagcaggatgatgatctgtctgatctaagcaacatactgacggagctgaaagggatggccgttgacatgggctctgagatcgagaggcaaacaaaagcaatgggggatgcagagaaggattatgacgagctgaacttcagggtcaagggagcaaacactcgagctcgccgtctcctcgggagataaaaaaatgcatatattcttgtctcttggatggtccataacacattaactatatgggggcatcaaattctgatgattttgtgcatcagattttgattagcattgttaccgtggacatgtcggcgtgtatggtagttgagacatattttatatgtttgcttcttttttctatttttttagcattgcacgagcttaggatttcagtggattttacatggaaaaccttgtctgattagaaacttcttttcgggtaaataatgctgatacatagtgatttgtcgc

SEQ ID NO: 37476 - protein, 217 aa, Zea mays subsp. mays
  peptide (1)..(217): Ceres Seq. ID no. 12364088
  misc_feature (83)..(159): NCBI GI NO: 15240163 NR Description: syntaxin SNAP33; protein id: At5g61210
  misc_feature (83)..(159): NCBI GI NO: 21553460 NR Description: snap25a [Arabidopsis thaliana]
QLLYSHRRRRLFVVLLRVCPSSLPVPQPPIPRSPLASFLRTGTVEQKLAATPESRLPIAITCRGTSTPAATMSSGKRSFFAPKKKATNPFDSDSDDDKPQQRPARASSVPPPDEQRGSSSLFGAGDRGGLFSSAANHHYRNDFRDAGGLEGQSVQELEGLRGVQGRGDHAPDAGVRQDRRGDEGHRIQDARHRPPAGAADPPHAHDGRRHRPGSLQE

SEQ ID NO: 37477 - protein, 174 aa, Zea mays subsp. mays
  peptide (1)..(174): Ceres Seq. ID no. 12364089
  misc_feature (114)..(174): Pfam Name: Pfam Description:  SNARE domain
  misc_feature (1)..(174): NCBI GI NO: 32308074 NR Description: SNAP-34 [Hordeum vulgare subsp. vulgare]
  misc_feature (1)..(174): NCBI GI NO: 15240163 NR Description: syntaxin SNAP33; protein id: At5g61210
  misc_feature (1)..(174): NCBI GI NO: 21553460 NR Description: snap25a [Arabidopsis thaliana]
  misc_feature (1)..(174): NCBI GI NO: 15222976 NR Description: synaptosomal associated protein
  misc_feature (1)..(172): NCBI GI NO: 15241436 NR Description: SNAP25 - like protein; protein id: At5g07880.1
  misc_feature (1)..(173): NCBI GI NO: 18765733 NR Description: synaptosomal-associated protein 25 isoform SNAP25A
  misc_feature (1)..(173): NCBI GI NO: 40555928 NR Description: synaptosomal-associated protein 25
  misc_feature (1)..(173): NCBI GI NO: 37589647 NR Description: Unknown (protein for MGC:73063) [Danio rerio]
  misc_feature (1)..(172): NCBI GI NO: 28279149 NR Description: Similar to synaptosomal-associated protein, 23kD
  misc_feature (1)..(173): NCBI GI NO: 548943 NR Description: Synaptosomal-associated protein 25A (SNAP-25A)
MRDTASKTLVTVHQQGQQIHRTHMMAVDIDQDLFRSEKLLGDLGGLFSKKWKPKKNGAIRGPMLTRDDSFIRKGSHLEQRQKLGLADHPPPSNARQFRSEPSSALEKVEIEKAKQDDDLSDLSNILTELKGMAVDMGSEIERQTKAMGDAEKDYDELNFRVKGANTRARRLLGR

SEQ ID NO: 37478 - protein, 151 aa, Zea mays subsp. mays
  peptide (1)..(151): Ceres Seq. ID no. 12364090
  misc_feature (91)..(151): Pfam Name: Pfam Description:  SNARE domain
  misc_feature (1)..(151): NCBI GI NO: 32308074 NR Description: SNAP-34 [Hordeum vulgare subsp. vulgare]
  misc_feature (1)..(151): NCBI GI NO: 15240163 NR Description: syntaxin SNAP33; protein id: At5g61210
  misc_feature (1)..(151): NCBI GI NO: 21553460 NR Description: snap25a [Arabidopsis thaliana]
  misc_feature (1)..(151): NCBI GI NO: 15222976 NR Description: synaptosomal associated protein
  misc_feature (1)..(149): NCBI GI NO: 15241436 NR Description: SNAP25 - like protein; protein id: At5g07880.1
  misc_feature (1)..(150): NCBI GI NO: 18765733 NR Description: synaptosomal-associated protein 25 isoform SNAP25A
  misc_feature (1)..(150): NCBI GI NO: 40555928 NR Description: synaptosomal-associated protein 25
  misc_feature (1)..(150): NCBI GI NO: 37589647 NR Description: Unknown (protein for MGC:73063) [Danio rerio]
  misc_feature (1)..(149): NCBI GI NO: 28279149 NR Description: Similar to synaptosomal-associated protein, 23kD
  misc_feature (1)..(150): NCBI GI NO: 548943 NR Description: Synaptosomal-associated protein 25A (SNAP-25A)
MMAVDIDQDLFRSEKLLGDLGGLFSKKWKPKKNGAIRGPMLTRDDSFIRKGSHLEQRQKLGLADHPPPSNARQFRSEPSSALEKVEIEKAKQDDDLSDLSNILTELKGMAVDMGSEIERQTKAMGDAEKDYDELNFRVKGANTRARRLLGR

SEQ ID NO: 37479 - protein, 146 aa, Zea mays subsp. mays
  peptide (1)..(146): Ceres Seq. ID no. 12364091
  misc_feature (12)..(88): NCBI GI NO: 15240163 NR Description: syntaxin SNAP33; protein id: At5g61210
  misc_feature (12)..(88): NCBI GI NO: 21553460 NR Description: snap25a [Arabidopsis thaliana]
MSSGKRSFFAPKKKATNPFDSDSDDDKPQQRPARASSVPPPDEQRGSSSLFGAGDRGGLFSSAANHHYRNDFRDAGGLEGQSVQELEGLRGVQGRGDHAPDAGVRQDRRGDEGHRIQDARHRPPAGAADPPHAHDGRRHRPGSLQE

SEQ ID NO: 37480 - DNA, 1576 bp, Zea mays subsp. mays
  misc_feature (1)..(1576): Ceres Seq. ID no. 12350195
aaaactcccccaactgacggccacctcgaacggaaggggatcccccttaattatgagacaattattgctgaaattatttttttcggaatccaatcaggtagtagtatttgtgtgattgtgtccaggccctatacataagccgccatttgcagtccggacgcagccccgttcagtcgcagcccaggccgacgacggcagagagcgagccgacgccgccgcaccctcgtgccaggttacacggtgtgaaaatgtcaggaagggctttgaaagatctcaatgtttctcagtcagcagacctggagaacggaaaagacaattctgtgaaatcctgcatcaccaagcctgtgttgaatggcaacaaatgtgccaacaaggaagaaaaggctccgtctgcttgccacgacgctgtgactaatggaaatgcggctgccattgcagatgtggagtacattgattctgaaaatctagtagatctcccagatgtcgatgcagctctaagtaccttagctaaaagattggattcaaaggactgggttatgacatgtgaagctctcaacaatgttcgtcagttggcaatgtatcacaaggaacgattgcaggagcttctggagcctgtagttcctcttatcgtgaaatctgtgaagaacccaagaagtgctgtatgcaaaactgcactaatgacttgtgctgacatctttaaggcctatggtgacttaatggttcactcaatcgatccactgctagtacaactgtttctgaaggcttcacaagataagcgttttgtctgtgaagctgcagaggcagctcttatatcgatgacaagttggatctcccctttactactcttgccaagaatgctgccttacctcaagaacaagaatccacggatccgagcaaaagcatcagtgtgtttcagcaagagtgtaccacgccttgatgtggtgggaatcaaagaatatggtatggataagctcatccagattgcggcaacccaacttagcgaccagcttcctgaatcaagggaggctgctcgcaacctggcactggaactgcaagcattctatgagaagtctcaggcctcaacttctgacgaacacgaggtcgaggcctctgcctcgccagatgctgaatcatgggaggctttctgccagtccaagctctccgcattaagtgcccaagccattcttcgtgtgacctctactactacaaaagagtgcgtcacctctgccccaaaagaagggttggctgtgggttgctagcacaagccacaggggagatattgcgatttttcaccctgttcgctgttttgctgtacatgcttttggtttgtcctgcggtgcacccagtcgtgaaaaggttaatcattggttcaggagttcaggtgtgaccacggtgttaatattggtgtgggatatatatccattatagttggttgtacaatcatttggttccactacttggtattggagtgtagatttttttccccatggttcagcgttatacacaacagtccttattttttgtttttgatgctggttctgttattttgaaggaaatgacatattttgtgtttcgg

SEQ ID NO: 37481 - protein, 336 aa, Zea mays subsp. mays
  peptide (1)..(336): Ceres Seq. ID no. 12350196
  misc_feature (1)..(332): NCBI GI NO: 15241493 NR Description: putative protein; protein id: At5g14790
  misc_feature (1)..(335): NCBI GI NO: 18395821 NR Description: expressed protein; protein id: At3g01450
  misc_feature (1)..(335): NCBI GI NO: 21537265 NR Description: unknown [Arabidopsis thaliana]
  misc_feature (42)..(318): NCBI GI NO: 21593517 NR Description: unknown [Arabidopsis thaliana]
  misc_feature (42)..(318): NCBI GI NO: 18414533 NR Description: expressed protein; protein id: At4g15830
  misc_feature (1)..(230): NCBI GI NO: 15229670 NR Description: unknown protein; protein id: At3g18530.1
  misc_feature (259)..(335): NCBI GI NO: 15229670 NR Description: unknown protein; protein id: At3g18530.1
  misc_feature (1)..(240): NCBI GI NO: 9294314 NR Description: gb|AAF24615
  misc_feature (123)..(318): NCBI GI NO: 7485173 NR Description: hypothetical protein - Arabidopsis thaliana
  misc_feature (1)..(196): NCBI GI NO: 34865276 NR Description: similar to KIAA0423 [Rattus norvegicus]
MSGRALKDLNVSQSADLENGKDNSVKSCITKPVLNGNKCANKEEKAPSACHDAVTNGNAAAIADVEYIDSENLVDLPDVDAALSTLAKRLDSKDWVMTCEALNNVRQLAMYHKERLQELLEPVVPLIVKSVKNPRSAVCKTALMTCADIFKAYGDLMVHSIDPLLVQLFLKASQDKRFVCEAAEAALISMTSWISPLLLLPRMLPYLKNKNPRIRAKASVCFSKSVPRLDVVGIKEYGMDKLIQIAATQLSDQLPESREAARNLALELQAFYEKSQASTSDEHEVEASASPDAESWEAFCQSKLSALSAQAILRVTSTTTKECVTSAPKEGLAVGC

SEQ ID NO: 37482 - protein, 240 aa, Zea mays subsp. mays
  peptide (1)..(240): Ceres Seq. ID no. 12350197
  misc_feature (1)..(236): NCBI GI NO: 15241493 NR Description: putative protein; protein id: At5g14790
  misc_feature (1)..(239): NCBI GI NO: 18395821 NR Description: expressed protein; protein id: At3g01450
  misc_feature (1)..(239): NCBI GI NO: 21537265 NR Description: unknown [Arabidopsis thaliana]
  misc_feature (1)..(222): NCBI GI NO: 21593517 NR Description: unknown [Arabidopsis thaliana]
  misc_feature (1)..(222): NCBI GI NO: 18414533 NR Description: expressed protein; protein id: At4g15830
  misc_feature (1)..(134): NCBI GI NO: 15229670 NR Description: unknown protein; protein id: At3g18530.1
  misc_feature (163)..(239): NCBI GI NO: 15229670 NR Description: unknown protein; protein id: At3g18530.1
  misc_feature (1)..(144): NCBI GI NO: 9294314 NR Description: gb|AAF24615
  misc_feature (27)..(222): NCBI GI NO: 7485173 NR Description: hypothetical protein - Arabidopsis thaliana
  misc_feature (1)..(100): NCBI GI NO: 34865276 NR Description: similar to KIAA0423 [Rattus norvegicus]
MTCEALNNVRQLAMYHKERLQELLEPVVPLIVKSVKNPRSAVCKTALMTCADIFKAYGDLMVHSIDPLLVQLFLKASQDKRFVCEAAEAALISMTSWISPLLLLPRMLPYLKNKNPRIRAKASVCFSKSVPRLDVVGIKEYGMDKLIQIAATQLSDQLPESREAARNLALELQAFYEKSQASTSDEHEVEASASPDAESWEAFCQSKLSALSAQAILRVTSTTTKECVTSAPKEGLAVGC

SEQ ID NO: 37483 - protein, 227 aa, Zea mays subsp. mays
  peptide (1)..(227): Ceres Seq. ID no. 12350198
  misc_feature (1)..(223): NCBI GI NO: 15241493 NR Description: putative protein; protein id: At5g14790
  misc_feature (1)..(226): NCBI GI NO: 18395821 NR Description: expressed protein; protein id: At3g01450
  misc_feature (1)..(226): NCBI GI NO: 21537265 NR Description: unknown [Arabidopsis thaliana]
  misc_feature (1)..(209): NCBI GI NO: 21593517 NR Description: unknown [Arabidopsis thaliana]
  misc_feature (1)..(209): NCBI GI NO: 18414533 NR Description: expressed protein; protein id: At4g15830
  misc_feature (1)..(121): NCBI GI NO: 15229670 NR Description: unknown protein; protein id: At3g18530.1
  misc_feature (150)..(226): NCBI GI NO: 15229670 NR Description: unknown protein; protein id: At3g18530.1
  misc_feature (1)..(131): NCBI GI NO: 9294314 NR Description: gb|AAF24615
  misc_feature (14)..(209): NCBI GI NO: 7485173 NR Description: hypothetical protein - Arabidopsis thaliana
  misc_feature (1)..(87): NCBI GI NO: 34865276 NR Description: similar to KIAA0423 [Rattus norvegicus]
MYHKERLQELLEPVVPLIVKSVKNPRSAVCKTALMTCADIFKAYGDLMVHSIDPLLVQLFLKASQDKRFVCEAAEAALISMTSWISPLLLLPRMLPYLKNKNPRIRAKASVCFSKSVPRLDVVGIKEYGMDKLIQIAATQLSDQLPESREAARNLALELQAFYEKSQASTSDEHEVEASASPDAESWEAFCQSKLSALSAQAILRVTSTTTKECVTSAPKEGLAVGC

SEQ ID NO: 37484 - DNA, 1639 bp, Zea mays subsp. mays
  misc_feature (1)..(1639): Ceres Seq. ID no. 12406238
gcacgagaccattacctagaacatcctaatcgaaaaactctctcccgcgggtctcggcctcctctcctcggctcgctataagcaggctccaccgcttccgcaatggccacctaattcgctcggcgtcgggggagaagagaagcgcgcgcgatggcaccgggaagatctcttcgccctgcggggacggcggcggttctgtgggcggcgtcgctgctgctgctggcgacgtcgtgcgcgcgcgcaggtggcgcgtacgcggggccggggtgccggaagcacgtggcgagggtcacggagtacggcgcggtcggggacgggaggacgctcaacacggcggcgttcgccagggctgtggcggacctggcgcggcgcgcgcccgacggcggcgctgcgctggtggtgccgccggggaagtggctcacggggcccttcaacctcaccagctgcttcacgctctacctcgacgagggcgcccgagatcctcgcgtcccaggacatgaagcattggcccctcatagctcccctgccgtcctacgggagaggaagggacgagcctggcccaaggtacagcaatttcatcggaggatccaatctcactgacgtcatcatcacgggcaaaaatggaacgatcaacgggcaggggcaggtctggtgggacaagttccacgccaaggagctcaagttcacccgcggccacctcctcgagctcctctactctgacaacatcatcatctccaatgtcaccttcgtcgacgcgccgtactggaacctccaccctacctattgcaccaatgtgaccatcagtggcgtcaccattctcgcgccggtgaattcgcctaataccgatggaattgacccggattcttcctcgcgtgtcaagatcgaggactgctacatcgtctccggcgacgactgcgtggccgtgaagagcgggtgggacgagtacggcatcaggttcaacatgccgagccagcacatcgtcatccggaggctgacctgcgtctcccccacgagcgccatgatcgcgctgggcagcgagatgtccggcggcatccgcgacgtgcgcgccgaggacagcgtggccatcaacacggagtcggccgtcagggtcaagtccggcgccgggaggggcggcttcgtcagggacatcttcgtgcgcggcctcagcctccacaccatgaagtgggtgttctggatgaccggcaactacgggcagcaccccgacaacacgtccgaccccaacgccatgcccgaggtcaccggcatcaactacagcgacgtgttcgccgagaacgtgaccatggccggcaggatggagggcatccctaaggacccctacaccgggatctgcatatccaacgtgaccgcccgcctcgcgccggacgccaaggagctgcagtggaactgcaccaacgtcaagggggtcacctcccacgtctcgcccaagccgtgcccggagctcgccgcggagggcaagccgtgcgccttcccggaggaagagctcgtcatcggcccacccgagctgccgaagtgtagctattgaggccgattgccaaaagagatcattgatcatataggctcttcggtgatagtctagacaagcagtatgagaaatgcagctgaaatacgtttgcattgc

SEQ ID NO: 37485 - protein, 348 aa, Zea mays subsp. mays
  peptide (1)..(348): Ceres Seq. ID no. 12406239
  misc_feature (1)..(319): Pfam Name: Pfam Description:  Glycosyl hydrolases family 28
  misc_feature (1)..(346): NCBI GI NO: 15229058 NR Description: polygalacturonase, putative; protein id:At3g48950
  misc_feature (1)..(348): NCBI GI NO: 30692538 NR Description: polygalacturonase-like protein
  misc_feature (1)..(348): NCBI GI NO: 34897760 NR Description: ESTs AU029388
  misc_feature (1)..(348): NCBI GI NO: 15233124 NR Description: polygalacturonase, putative; protein id:At3g61490
  misc_feature (1)..(347): NCBI GI NO: 15224072 NR Description: polygalacturonase, putative; protein id:At2g23900
  misc_feature (1)..(346): NCBI GI NO: 15236514 NR Description: polygalacturonase, putative; protein id:At4g23500
  misc_feature (1)..(333): NCBI GI NO: 18412253 NR Description: polygalacturonase, putative; protein id:At3g62110
  misc_feature (1)..(333): NCBI GI NO: 11263971 NR Description: hypothetical protein T17J13
  misc_feature (1)..(325): NCBI GI NO: 40714685 NR Description: putative polygalacturonase
  misc_feature (1)..(326): NCBI GI NO: 15236625 NR Description: polygalacturonase, putative; protein id:At4g23820
MKHWPLIAPLPSYGRGRDEPGPRYSNFIGGSNLTDVIITGKNGTINGQGQVWWDKFHAKELKFTRGHLLELLYSDNIIISNVTFVDAPYWNLHPTYCTNVTISGVTILAPVNSPNTDGIDPDSSSRVKIEDCYIVSGDDCVAVKSGWDEYGIRFNMPSQHIVIRRLTCVSPTSAMIALGSEMSGGIRDVRAEDSVAINTESAVRVKSGAGRGGFVRDIFVRGLSLHTMKWVFWMTGNYGQHPDNTSDPNAMPEVTGINYSDVFAENVTMAGRMEGIPKDPYTGICISNVTARLAPDAKELQWNCTNVKGVTSHVSPKPCPELAAEGKPCAFPEEELVIGPPELPKCSY

SEQ ID NO: 37486 - protein, 193 aa, Zea mays subsp. mays
  peptide (1)..(193): Ceres Seq. ID no. 12406240
  misc_feature (1)..(164): Pfam Name: Pfam Description:  Glycosyl hydrolases family 28
  misc_feature (1)..(191): NCBI GI NO: 15229058 NR Description: polygalacturonase, putative; protein id:At3g48950
  misc_feature (1)..(193): NCBI GI NO: 30692538 NR Description: polygalacturonase-like protein
  misc_feature (1)..(193): NCBI GI NO: 34897760 NR Description: ESTs AU029388
  misc_feature (1)..(193): NCBI GI NO: 15233124 NR Description: polygalacturonase, putative; protein id:At3g61490
  misc_feature (1)..(192): NCBI GI NO: 15224072 NR Description: polygalacturonase, putative; protein id:At2g23900
  misc_feature (1)..(191): NCBI GI NO: 15236514 NR Description: polygalacturonase, putative; protein id:At4g23500
  misc_feature (1)..(178): NCBI GI NO: 18412253 NR Description: polygalacturonase, putative; protein id:At3g62110
  misc_feature (1)..(178): NCBI GI NO: 11263971 NR Description: hypothetical protein T17J13
  misc_feature (1)..(170): NCBI GI NO: 40714685 NR Description: putative polygalacturonase
  misc_feature (1)..(171): NCBI GI NO: 15236625 NR Description: polygalacturonase, putative; protein id:At4g23820
MPSQHIVIRRLTCVSPTSAMIALGSEMSGGIRDVRAEDSVAINTESAVRVKSGAGRGGFVRDIFVRGLSLHTMKWVFWMTGNYGQHPDNTSDPNAMPEVTGINYSDVFAENVTMAGRMEGIPKDPYTGICISNVTARLAPDAKELQWNCTNVKGVTSHVSPKPCPELAAEGKPCAFPEEELVIGPPELPKCSY

SEQ ID NO: 37487 - protein, 174 aa, Zea mays subsp. mays
  peptide (1)..(174): Ceres Seq. ID no. 12406241
  misc_feature (1)..(145): Pfam Name: Pfam Description:  Glycosyl hydrolases family 28
  misc_feature (1)..(172): NCBI GI NO: 15229058 NR Description: polygalacturonase, putative; protein id:At3g48950
  misc_feature (1)..(174): NCBI GI NO: 30692538 NR Description: polygalacturonase-like protein
  misc_feature (1)..(174): NCBI GI NO: 34897760 NR Description: ESTs AU029388
  misc_feature (1)..(174): NCBI GI NO: 15233124 NR Description: polygalacturonase, putative; protein id:At3g61490
  misc_feature (1)..(173): NCBI GI NO: 15224072 NR Description: polygalacturonase, putative; protein id:At2g23900
  misc_feature (1)..(172): NCBI GI NO: 15236514 NR Description: polygalacturonase, putative; protein id:At4g23500
  misc_feature (1)..(159): NCBI GI NO: 18412253 NR Description: polygalacturonase, putative; protein id:At3g62110
  misc_feature (1)..(159): NCBI GI NO: 11263971 NR Description: hypothetical protein T17J13
  misc_feature (1)..(151): NCBI GI NO: 40714685 NR Description: putative polygalacturonase
  misc_feature (1)..(152): NCBI GI NO: 15236625 NR Description: polygalacturonase, putative; protein id:At4g23820
MIALGSEMSGGIRDVRAEDSVAINTESAVRVKSGAGRGGFVRDIFVRGLSLHTMKWVFWMTGNYGQHPDNTSDPNAMPEVTGINYSDVFAENVTMAGRMEGIPKDPYTGICISNVTARLAPDAKELQWNCTNVKGVTSHVSPKPCPELAAEGKPCAFPEEELVIGPPELPKCSY

SEQ ID NO: 37488 - DNA, 1396 bp, Zea mays subsp. mays; identical to SEQ ID NO: 36146
  misc_feature (1)..(1396): Ceres Seq. ID no. 13636262

SEQ ID NO: 37489 - protein, 233 aa, Zea mays subsp. mays; identical to SEQ ID NO: 36147
  peptide (1)..(233): Ceres Seq. ID no. 13636263
  misc_feature (27)..(96): Pfam Name: Pfam Description:  Glycosyl hydrolases family 16
  misc_feature (12)..(96): NCBI GI NO: 7447413 NR Description: xyloglucan endo-1,4-beta-D-glucanase (EC 3
  misc_feature (5)..(81): NCBI GI NO: 14330332 NR Description: Xet1 protein [Festuca pratensis]
  misc_feature (9)..(96): NCBI GI NO: 8886867 NR Description: xyloglucan endotransglycosylase XET2
  misc_feature (1)..(96): NCBI GI NO: 8886865 NR Description: xyloglucan endotransglycosylase XET1
  misc_feature (9)..(96): NCBI GI NO: 7447412 NR Description: xyloglucan endo-1,4-beta-D-glucanase (EC 3
  misc_feature (6)..(96): NCBI GI NO: 15242781 NR Description: xyloglucan endotransglycosylase (TCH4)
  misc_feature (1)..(96): NCBI GI NO: 15235997 NR Description: xyloglucan endotransglycosylase (XTR-6)
  misc_feature (1)..(96): NCBI GI NO: 17064792 NR Description: xyloglucan endo-1, 4-beta-D-glucanase (XTR-6)
  misc_feature (7)..(96): NCBI GI NO: 22947852 NR Description: xyloglucan endotransglycosylase
  misc_feature (26)..(96): NCBI GI NO: 29500891 NR Description: putative xyloglucan endotransglycosylase

SEQ ID NO: 37490 - protein, 201 aa, Zea mays subsp. mays; identical to SEQ ID NO: 36148
  peptide (1)..(201): Ceres Seq. ID no. 13636264
  misc_feature (1)..(64): Pfam Name: Pfam Description:  Glycosyl hydrolases family 16
  misc_feature (1)..(64): NCBI GI NO: 7447413 NR Description: xyloglucan endo-1,4-beta-D-glucanase (EC 3
  misc_feature (1)..(49): NCBI GI NO: 14330332 NR Description: Xet1 protein [Festuca pratensis]
  misc_feature (1)..(64): NCBI GI NO: 8886867 NR Description: xyloglucan endotransglycosylase XET2
  misc_feature (1)..(64): NCBI GI NO: 8886865 NR Description: xyloglucan endotransglycosylase XET1
  misc_feature (1)..(64): NCBI GI NO: 7447412 NR Description: xyloglucan endo-1,4-beta-D-glucanase (EC 3
  misc_feature (1)..(64): NCBI GI NO: 15242781 NR Description: xyloglucan endotransglycosylase (TCH4)
  misc_feature (1)..(64): NCBI GI NO: 15235997 NR Description: xyloglucan endotransglycosylase (XTR-6)
  misc_feature (1)..(64): NCBI GI NO: 17064792 NR Description: xyloglucan endo-1, 4-beta-D-glucanase (XTR-6)
  misc_feature (1)..(64): NCBI GI NO: 22947852 NR Description: xyloglucan endotransglycosylase
  misc_feature (1)..(64): NCBI GI NO: 29500891 NR Description: putative xyloglucan endotransglycosylase

SEQ ID NO: 37491 - protein, 160 aa, Zea mays subsp. mays; identical to SEQ ID NO: 36149
  peptide (1)..(160): Ceres Seq. ID no. 13636265
  misc_feature (1)..(23): NCBI GI NO: 7447413 NR Description: xyloglucan endo-1,4-beta-D-glucanase (EC 3
  misc_feature (1)..(23): NCBI GI NO: 8886867 NR Description: xyloglucan endotransglycosylase XET2
  misc_feature (1)..(23): NCBI GI NO: 8886865 NR Description: xyloglucan endotransglycosylase XET1
  misc_feature (1)..(23): NCBI GI NO: 7447412 NR Description: xyloglucan endo-1,4-beta-D-glucanase (EC 3
  misc_feature (1)..(23): NCBI GI NO: 15242781 NR Description: xyloglucan endotransglycosylase (TCH4)
  misc_feature (1)..(23): NCBI GI NO: 15235997 NR Description: xyloglucan endotransglycosylase (XTR-6)
  misc_feature (1)..(23): NCBI GI NO: 17064792 NR Description: xyloglucan endo-1, 4-beta-D-glucanase (XTR-6)
  misc_feature (1)..(23): NCBI GI NO: 22947852 NR Description: xyloglucan endotransglycosylase
  misc_feature (1)..(23): NCBI GI NO: 29500891 NR Description: putative xyloglucan endotransglycosylase
  misc_feature (1)..(21): NCBI GI NO: 28804632 NR Description: xyloglucan endotransglycosylase [Pyrus communis]

SEQ ID NO: 37492 - DNA, 1414 bp, Zea mays subsp. mays
  misc_feature (1)..(1414): Ceres Seq. ID no. 12350215
atcgcttccagttcatatctatccgttctctctccataacaaacacccgaaacgccaggttataaggcggggagttaaaaaaccaaagcctattcaaacgaggagcaaaaggctactctcggagccggggttgaaccggagcggcgggcggccggccggcctcgcatcttcgccggaggaaaacaaaattaaagttcctcgcgtaggcacagatggccgacccgtcagcatcatcggtgccgccggttgtcaccatgggatccgtggtcactgtggcctcgccgcccacgggtggtggatcgacggtctctgcaggtatcacaggcggcggcaaagacgggcccgtgcgcagggtgcaaatacctgcggcgcaagtgccagccggactgcatatttgcgccctatttcccgcccgacaacctagacaagttcgcgtacgtgcaccgcgtcttcggcaccagcaacgtgatcaagattctcaacaacctccagccctaccagcgccagtacgccgtcaattcgctcgtttacgaggcggaaatgcgtatccgcgaccccatctacggctgcgtcggcgtcgtctccatgcttcagcaccgcctcatacggctcaagaaggcgctcgagagcgccagcttagagctgtccaactaccaggcggctgaagccgcggcggcctctgtggccgtgggaccccatggtgtggcagcagctgggatggcagacttcgtaggcaacgcagtgcccaattgcacacaaaacattatcaatgccgggtactccacgatggcgtcgatcaccggagctgggccgttcatgcagcaagacaactttgcctccgtgcagatgctggccatgagcttcgagggtgagaatggagctgcggcgagggtgggcatgaacggaggtggaggctatggcttcgcctactcgccggccatgggcgtcgggcacggtgtagtgtctggtcatgtgcagcagcagcagatcaacggtggacagttcttgaaaaacagcacgacgggcggggattaccggcccactatgtgatctttatcagttgcaggcgggatgaccggccgtgtcctttcggccggaggagggatggtggtggaggcgactatatgcacatgaggtgacgcgaagaaacagcagctacactagaggttgaaggctacgatccagctatttcagcagttaaatgcagcaggggcagctctacgcctctaagctagtcaattactcgaggatgtcagaaggtattttgcagagcgagggtgactggacacaaaacaacgataactcccaatgcaagaatgccgtcgtacgtacgtacgtgtagtgtaccagctgacattcaatgctcccgccaaatggagctactactagtctactactctcgctgcattcattc

SEQ ID NO: 37493 - protein, 169 aa, Zea mays subsp. mays
  peptide (1)..(169): Ceres Seq. ID no. 12350216
  misc_feature (1)..(166): NCBI GI NO: 34907508 NR Description: B1099D03.24
  misc_feature (1)..(68): NCBI GI NO: 15218746 NR Description: unknown protein; protein id: At1g65620
  misc_feature (1)..(169): NCBI GI NO: 15240110 NR Description: putative protein; protein id: At5g66870.1
  misc_feature (1)..(95): NCBI GI NO: 15242624 NR Description: putative protein; protein id: At5g63090
  misc_feature (1)..(57): NCBI GI NO: 34896184 NR Description: contains ESTs C98868
  misc_feature (1)..(51): NCBI GI NO: 9294470 NR Description: gb|AAB60912
  misc_feature (1)..(51): NCBI GI NO: 21618134 NR Description: unknown [Arabidopsis thaliana]
  misc_feature (1)..(51): NCBI GI NO: 29427827 NR Description: LOB domain protein 25
  misc_feature (1)..(51): NCBI GI NO: 18405472 NR Description: expressed protein; protein id: At3g27650
  misc_feature (1)..(54): NCBI GI NO: 15227870 NR Description: hypothetical protein; protein id: At2g23660.1
MRIRDPIYGCVGVVSMLQHRLIRLKKALESASLELSNYQAAEAAAASVAVGPHGVAAAGMADFVGNAVPNCTQNIINAGYSTMASITGAGPFMQQDNFASVQMLAMSFEGENGAAARVGMNGGGGYGFAYSPAMGVGHGVVSGHVQQQQINGGQFLKNSTTGGDYRPTM

SEQ ID NO: 37494 - protein, 154 aa, Zea mays subsp. mays
  peptide (1)..(154): Ceres Seq. ID no. 12350217
  misc_feature (1)..(151): NCBI GI NO: 34907508 NR Description: B1099D03.24
  misc_feature (1)..(53): NCBI GI NO: 15218746 NR Description: unknown protein; protein id: At1g65620
  misc_feature (1)..(154): NCBI GI NO: 15240110 NR Description: putative protein; protein id: At5g66870.1
  misc_feature (1)..(80): NCBI GI NO: 15242624 NR Description: putative protein; protein id: At5g63090
  misc_feature (1)..(42): NCBI GI NO: 34896184 NR Description: contains ESTs C98868
  misc_feature (1)..(36): NCBI GI NO: 9294470 NR Description: gb|AAB60912
  misc_feature (1)..(36): NCBI GI NO: 18405472 NR Description: expressed protein; protein id: At3g27650
  misc_feature (1)..(36): NCBI GI NO: 29427827 NR Description: LOB domain protein 25
  misc_feature (1)..(36): NCBI GI NO: 21618134 NR Description: unknown [Arabidopsis thaliana]
  misc_feature (1)..(39): NCBI GI NO: 15227870 NR Description: hypothetical protein; protein id: At2g23660.1
MLQHRLIRLKKALESASLELSNYQAAEAAAASVAVGPHGVAAAGMADFVGNAVPNCTQNIINAGYSTMASITGAGPFMQQDNFASVQMLAMSFEGENGAAARVGMNGGGGYGFAYSPAMGVGHGVVSGHVQQQQINGGQFLKNSTTGGDYRPTM

SEQ ID NO: 37495 - protein, 150 aa, Zea mays subsp. mays
  peptide (1)..(150): Ceres Seq. ID no. 12350218
MADPSASSVPPVVTMGSVVTVASPPTGGGSTVSAGITGGGKDGPVRRVQIPAAQVPAGLHICALFPARQPRQVRVRAPRLRHQQRDQDSQQPPALPAPVRRQFARLRGGNAYPRPHLRLRRRRLHASAPPHTAQEGARERQLRAVQLPGG

SEQ ID NO: 37496 - DNA, 1417 bp, Zea mays subsp. mays
  misc_feature (1)..(1417): Ceres Seq. ID no. 12407425
acaacacttcccgcaacagaagcatacgccgtgcccatctatctatagctagcactagcagtggtgcacactgaaatggacagcgccagcagcctcgtggacgacaccagcagcggtggcggcggcggcggcggcgcgtccacggacaagctaagggctttggccgtcttcgccgccgcctcggggacgccgctggagcgcatgggcagcggcgccagcgcggtcgtggacgcggccgagccgggcgccgaggcggactccggctccggtgccgccgcggtgagcgttggcgggaagctgccgtcgtccaggtacaagggcgtggtgccgcagcccaacgggcggtggggcgcgcagatctacgagcgccaccagcgcgtgtggctcggcaccttcgcgggcgaggccgacgcggcgcgcgcctacgacgtcgcggcgcagcggttccgcggccgcgacgcggtcaccaacttccgcccgctcgcggacgccgacccggacgcggccgccgagctccggttcctggcgtcccgctccaaggccgaggtcgtcgacatgctccgcaagcacacatacttcgacgagctcgcgcagaacaagcgcgccttcgccgccgcgtccgcggccaccgcctcgtcgctggccaacaacccttcttcctacgcgtcgctctcccccgcgaccgcgacggccgccgccgccgccgcgcgggagcacctcttcgacaagacggtcacccccagcgacgtgggcaagctgaaccggctggtgatcccgaagcagcacgccgagaagcacttcccgctgcagctcccgtccgccggcggcgagagcaagggcgtgctcctcaacctggaggacgccgcgggcaaggtgtggcggttccgctactcgtactggaacagcagccagagctacgtgctcaccaagggctggagccgcttcgtcaaggagaagggcctccaagccggcgacgtcgtcggcttctaccgctccgctgcaggcgccgacaccaagctcttcatcgactgcaagctgcggcccaacagcgtcgtcgccgcctcgacggcaggcccgtcgcctcgggcgccggtggcgaaggccgtgcgtctcttcggcgtcgacctgctgacggcaccggccaccgccgccgcggcgccggcggaggccgtggctgtggccgggtgcaagagagccagggacttgggttcgcccccgcaggcggcgttcaagaagcagctcgtggagctggcactagtgtagattaatgctacggagcgatcgatctttccctagctagctagtcttttttattttttttgctcgatcgctcaactcagatggtagcatcaccgagctgaatttagttccctctcggcatctcacttagttggttcgtttgttaatttccagtttc

SEQ ID NO: 37497 - protein, 395 aa, Zea mays subsp. mays
  peptide (1)..(395): Ceres Seq. ID no. 12407426
  misc_feature (215)..(321): Pfam Name: Pfam Description:  B3 DNA binding domain
  misc_feature (1)..(395): NCBI GI NO: 34911404 NR Description: DNA-binding protein RAV2-like
  misc_feature (35)..(326): NCBI GI NO: 15222622 NR Description: DNA-binding protein RAV2, putative
  misc_feature (5)..(322): NCBI GI NO: 18409138 NR Description: AP2 domain protein RAP2
  misc_feature (5)..(322): NCBI GI NO: 21554039 NR Description: putative RAV2-like DNA-binding protein
  misc_feature (5)..(325): NCBI GI NO: 15222217 NR Description: DNA-binding protein (RAV1); protein id:At1g13260
  misc_feature (211)..(351): NCBI GI NO: 34895676 NR Description: putative DNA binding protein RAV2
  misc_feature (76)..(202): NCBI GI NO: 34895676 NR Description: putative DNA binding protein RAV2
  misc_feature (35)..(322): NCBI GI NO: 2281641 NR Description: AP2 domain containing protein RAP2.8
  misc_feature (59)..(377): NCBI GI NO: 15230871 NR Description: AP2 domain transcription factor RAV, putative
  misc_feature (59)..(377): NCBI GI NO: 21593532 NR Description: AP2 domain transcription factor
MDSASSLVDDTSSGGGGGGGASTDKLRALAVFAAASGTPLERMGSGASAVVDAAEPGAEADSGSGAAAVSVGGKLPSSRYKGVVPQPNGRWGAQIYERHQRVWLGTFAGEADAARAYDVAAQRFRGRDAVTNFRPLADADPDAAAELRFLASRSKAEVVDMLRKHTYFDELAQNKRAFAAASAATASSLANNPSSYASLSPATATAAAAAAREHLFDKTVTPSDVGKLNRLVIPKQHAEKHFPLQLPSAGGESKGVLLNLEDAAGKVWRFRYSYWNSSQSYVLTKGWSRFVKEKGLQAGDVVGFYRSAAGADTKLFIDCKLRPNSVVAASTAGPSPRAPVAKAVRLFGVDLLTAPATAAAAPAEAVAVAGCKRARDLGSPPQAAFKKQLVELALV

SEQ ID NO: 37498 - protein, 353 aa, Zea mays subsp. mays
  peptide (1)..(353): Ceres Seq. ID no. 12407427
  misc_feature (173)..(279): Pfam Name: Pfam Description:  B3 DNA binding domain
  misc_feature (1)..(353): NCBI GI NO: 34911404 NR Description: DNA-binding protein RAV2-like
  misc_feature (1)..(284): NCBI GI NO: 15222622 NR Description: DNA-binding protein RAV2, putative
  misc_feature (1)..(280): NCBI GI NO: 18409138 NR Description: AP2 domain protein RAP2
  misc_feature (1)..(280): NCBI GI NO: 21554039 NR Description: putative RAV2-like DNA-binding protein
  misc_feature (1)..(283): NCBI GI NO: 15222217 NR Description: DNA-binding protein (RAV1); protein id:At1g13260
  misc_feature (169)..(309): NCBI GI NO: 34895676 NR Description: putative DNA binding protein RAV2
  misc_feature (34)..(160): NCBI GI NO: 34895676 NR Description: putative DNA binding protein RAV2
  misc_feature (1)..(280): NCBI GI NO: 2281641 NR Description: AP2 domain containing protein RAP2.8
  misc_feature (17)..(335): NCBI GI NO: 15230871 NR Description: AP2 domain transcription factor RAV, putative
  misc_feature (17)..(335): NCBI GI NO: 21593532 NR Description: AP2 domain transcription factor
MGSGASAVVDAAEPGAEADSGSGAAAVSVGGKLPSSRYKGVVPQPNGRWGAQIYERHQRVWLGTFAGEADAARAYDVAAQRFRGRDAVTNFRPLADADPDAAAELRFLASRSKAEVVDMLRKHTYFDELAQNKRAFAAASAATASSLANNPSSYASLSPATATAAAAAAREHLFDKTVTPSDVGKLNRLVIPKQHAEKHFPLQLPSAGGESKGVLLNLEDAAGKVWRFRYSYWNSSQSYVLTKGWSRFVKEKGLQAGDVVGFYRSAAGADTKLFIDCKLRPNSVVAASTAGPSPRAPVAKAVRLFGVDLLTAPATAAAAPAEAVAVAGCKRARDLGSPPQAAFKKQLVELALV

SEQ ID NO: 37499 - protein, 235 aa, Zea mays subsp. mays
  peptide (1)..(235): Ceres Seq. ID no. 12407428
  misc_feature (55)..(161): Pfam Name: Pfam Description:  B3 DNA binding domain
  misc_feature (1)..(235): NCBI GI NO: 34911404 NR Description: DNA-binding protein RAV2-like
  misc_feature (1)..(166): NCBI GI NO: 15222622 NR Description: DNA-binding protein RAV2, putative
  misc_feature (1)..(162): NCBI GI NO: 18409138 NR Description: AP2 domain protein RAP2
  misc_feature (1)..(162): NCBI GI NO: 21554039 NR Description: putative RAV2-like DNA-binding protein
  misc_feature (1)..(165): NCBI GI NO: 15222217 NR Description: DNA-binding protein (RAV1); protein id:At1g13260
  misc_feature (51)..(191): NCBI GI NO: 34895676 NR Description: putative DNA binding protein RAV2
  misc_feature (1)..(42): NCBI GI NO: 34895676 NR Description: putative DNA binding protein RAV2
  misc_feature (1)..(162): NCBI GI NO: 2281641 NR Description: AP2 domain containing protein RAP2.8
  misc_feature (1)..(217): NCBI GI NO: 15230871 NR Description: AP2 domain transcription factor RAV, putative
  misc_feature (1)..(217): NCBI GI NO: 21593532 NR Description: AP2 domain transcription factor
MLRKHTYFDELAQNKRAFAAASAATASSLANNPSSYASLSPATATAAAAAAREHLFDKTVTPSDVGKLNRLVIPKQHAEKHFPLQLPSAGGESKGVLLNLEDAAGKVWRFRYSYWNSSQSYVLTKGWSRFVKEKGLQAGDVVGFYRSAAGADTKLFIDCKLRPNSVVAASTAGPSPRAPVAKAVRLFGVDLLTAPATAAAAPAEAVAVAGCKRARDLGSPPQAAFKKQLVELALV

SEQ ID NO: 37500 - DNA, 1352 bp, Zea mays subsp. mays
  misc_feature (1)..(1352): Ceres Seq. ID no. 12406751
gagcagagcagcagtgaccagtgagctgcttgtccaagaatcgctcccactcccggctgtcgggagagcgcagcccagctagccgcctccgcttcttggaggtcgatggccgcgaaggggttgagggaggtggggaggaggagggcggcggaggtcgggcggcgctgcttgtctggcgggagcgctgggccgccggcgccggcggcgaagcggaaggagggagggaaggcggtgaacctgttcacggccgtcaaccaggcgctccacatcgccctcgacaccgacccccgcgcctacgtcttcggagaggacgtcgggttcggcggcgtcttccgctgcacgacaggcctcgccgatcggttcggcaagagcagagtgttcaacacgccgctgtgtgagcagggtattgctggatttgccatcggcctagcagcgatgggcaatcgagctatcgcagaaatccagtttgcggactacatctttccagcctttgatcagattgtcaatgaagcagctaagttcagatatcggagtggaaatgaatttaactgtggaggcttaacgattcgaactccctatggtgctgttgggcatggtggtcattaccattcacagtcaccagaggctttcttctgtcacgttcctggactcaaggttgtcataccacggagtccgcgcgaggctaaggggttgctgttggccagcatccgagatccaaacccagttgtattttttgagccaaagtggctgtatcgtttggctgttgaagaagttcctgaggaggattacatgctgccgttatccgaggcagaagtgattagggaaggaagtgatataacgcttgttggatggggagctcagcttgcggtgctgaaagaagcctgtgaagatgctgcaaaggacggggtgtcttgcgagctcattgatctgaaaacactcgtaccatgggacaaggaaacggtagaggcctcggtgaagaagaccgggaagctcctcgttagccacgaggctccagtcaccgggggcttcggcgcggagatcgccgcgtccattgccgagcgctgcttccagaggttagaagcacccgtggcgagagtctgcggtctcgacacccctttccctctcgtgtacgagccattttacatgcccaccaagaacaaggtcctggatgcgataaaagccaccatagatttctgaaacatgttgcttgatcgatacagagtactctagttacatgtgcacggtttgtgctggtctgggtctgtagcctgcctgaggatgagcgatccacaaaccggcttatttgtattcaacaatacagcgataaataaagccgcaaggtgcaaaattgt

SEQ ID NO: 37501 - protein, 363 aa, Zea mays subsp. mays
  peptide (1)..(363): Ceres Seq. ID no. 12406752
  misc_feature (233)..(353): Pfam Name: Pfam Description:  Transketolase, C-terminal domain
  misc_feature (1)..(363): NCBI GI NO: 34395021 NR Description: putative branched-chain alpha-keto aciddecarboxylase E1 beta subunit
  misc_feature (14)..(363): NCBI GI NO: 15222731 NR Description: branched-chain alpha-keto acid decarboxylase E1beta subunit
  misc_feature (14)..(363): NCBI GI NO: 11252215 NR Description: 3-methyl-2-oxobutanoate dehydrogenase
  misc_feature (38)..(363): NCBI GI NO: 15231242 NR Description: branched chain alpha-keto acid dehydrogenase E1beta subunit
  misc_feature (30)..(363): NCBI GI NO: 12964600 NR Description: branched-chain alpha-keto acid dehydrogenase E1-beta subunit
  misc_feature (1)..(363): NCBI GI NO: 27806223 NR Description: branched chain keto acid dehydrogenase E1
  misc_feature (1)..(363): NCBI GI NO: 4557353 NR Description: branched chain keto acid dehydrogenase E1
  misc_feature (30)..(363): NCBI GI NO: 481864 NR Description: 3-methyl-2-oxobutanoate dehydrogenase
  misc_feature (30)..(363): NCBI GI NO: 7546385 NR Description: Chain B
  misc_feature (30)..(363): NCBI GI NO: 346979 NR Description: 3-methyl-2-oxobutanoate dehydrogenase
MAAKGLREVGRRRAAEVGRRCLSGGSAGPPAPAAKRKEGGKAVNLFTAVNQALHIALDTDPRAYVFGEDVGFGGVFRCTTGLADRFGKSRVFNTPLCEQGIAGFAIGLAAMGNRAIAEIQFADYIFPAFDQIVNEAAKFRYRSGNEFNCGGLTIRTPYGAVGHGGHYHSQSPEAFFCHVPGLKVVIPRSPREAKGLLLASIRDPNPVVFFEPKWLYRLAVEEVPEEDYMLPLSEAEVIREGSDITLVGWGAQLAVLKEACEDAAKDGVSCELIDLKTLVPWDKETVEASVKKTGKLLVSHEAPVTGGFGAEIAASIAERCFQRLEAPVARVCGLDTPFPLVYEPFYMPTKNKVLDAIKATIDF

SEQ ID NO: 37502 - protein, 253 aa, Zea mays subsp. mays
  peptide (1)..(253): Ceres Seq. ID no. 12406753
  misc_feature (123)..(243): Pfam Name: Pfam Description:  Transketolase, C-terminal domain
  misc_feature (1)..(253): NCBI GI NO: 34395021 NR Description: putative branched-chain alpha-keto aciddecarboxylase E1 beta subunit
  misc_feature (1)..(253): NCBI GI NO: 15222731 NR Description: branched-chain alpha-keto acid decarboxylase E1beta subunit
  misc_feature (1)..(253): NCBI GI NO: 11252215 NR Description: 3-methyl-2-oxobutanoate dehydrogenase
  misc_feature (1)..(253): NCBI GI NO: 15231242 NR Description: branched chain alpha-keto acid dehydrogenase E1beta subunit
  misc_feature (1)..(253): NCBI GI NO: 12964600 NR Description: branched-chain alpha-keto acid dehydrogenase E1-beta subunit
  misc_feature (1)..(253): NCBI GI NO: 27806223 NR Description: branched chain keto acid dehydrogenase E1
  misc_feature (1)..(253): NCBI GI NO: 4557353 NR Description: branched chain keto acid dehydrogenase E1
  misc_feature (1)..(253): NCBI GI NO: 481864 NR Description: 3-methyl-2-oxobutanoate dehydrogenase
  misc_feature (1)..(253): NCBI GI NO: 7546385 NR Description: Chain B
  misc_feature (1)..(253): NCBI GI NO: 346979 NR Description: 3-methyl-2-oxobutanoate dehydrogenase
MGNRAIAEIQFADYIFPAFDQIVNEAAKFRYRSGNEFNCGGLTIRTPYGAVGHGGHYHSQSPEAFFCHVPGLKVVIPRSPREAKGLLLASIRDPNPVVFFEPKWLYRLAVEEVPEEDYMLPLSEAEVIREGSDITLVGWGAQLAVLKEACEDAAKDGVSCELIDLKTLVPWDKETVEASVKKTGKLLVSHEAPVTGGFGAEIAASIAERCFQRLEAPVARVCGLDTPFPLVYEPFYMPTKNKVLDAIKATIDF

SEQ ID NO: 37503 - DNA, 1501 bp, Zea mays subsp. mays
  misc_feature (1)..(1501): Ceres Seq. ID no. 12381108
cgtttgtctcttccccagtcgcgcaccgcgggccgcggttcgcctggcggctggcgtaaggtagcggctgcgacgtgagtgggcctatatcagcgcggcactcacggggaggcggtgccaacccatatccatcacggcgaagagacctcgggagtgagtgggccgctgggagagcagacaacactgcaacggggtgcgcgcccgcccgtgccgttctccgtcgtcaccgttcgcccgccgccgatccatggggtgggcgctggctctgcacggcggcgccggggacgtgccgcgcacgctgccgcccgagagcagggagccgcgcctcgccacactccgccgctgcctcgacatcggcaccgccgcgctccgggagggccgcaccgcgctcgacgttgtcgagctcgtcgtgagggagctggaggactgcccgcacttcaacgccggccggggctccgtgctcacctccgccggcaccgtcgagatggaggcctgcgtcatggagggcgccaccctgcactgcggcgcggtctccgggctctccaccgttgccaacgccgtctccctcgccagactcgtcatggagaagacgccgcacatctacctcgccttcgacggcgccgaggccttcgccagggaacagggggtggagactaaggatccaagccactttatcacggacaacaatatcgagcgtgaggcaggccaaagaggccaacagggtgcagatcgactacacccagccagcagcaggccaaagccaaaaggcccaggccgtggtggacgacaactgccagacgggcacggtagggtgcgtggccgtggacgcggcgggcaacctcgctacggcgacgtccacgggccgggctggtgaacaagatgcccggcaggatcggcgacacgcctctggtgggcgccggcacgtacgccaacgcgctgtgcgcggtgtccgccacgggcaagggcgaggagatcatccgccgcacggtggcgcgcgacgtcgcggcgctgatggagcgcggggacgcgctcccggctgcggcgacgccgcggcgcgcgtcgtggcgggggcggcccgcggccccgtggggctggtggccgtgtcgcgccagggggaggtttgtatggcgcacaacaccaccgccatgttcagggcgtgcgccaccgaggccggccacaccgaagtcggcatctggacggacgccgccgacgcaggcacgggcgcggacggagagactgtcagcgtcgcgctctagctctaggcatttcatccccgtgtggcgtattttatcgttcgcgtcccattattgccccctgtccgatagacaacttgttctcgattcggtaatttcaccgtgcttcagctgcgtgtgtttggaaaaattgattcggtttcgggtattgttaagagatcgatgggagaagtgaaacattgttgggcgttcagtatgcttttgtaataccttttgttttcttaaataaagtcctaaggagtgttggg

SEQ ID NO: 37504 - protein, 208 aa, Zea mays subsp. mays
  peptide (1)..(208): Ceres Seq. ID no. 12381109
  misc_feature (3)..(148): Pfam Name: Pfam Description:  Asparaginase
  misc_feature (1)..(169): NCBI GI NO: 34896688 NR Description: putative L-asparaginase
  misc_feature (1)..(179): NCBI GI NO: 15241528 NR Description: asparaginase; protein id: At5g08100
  misc_feature (1)..(179): NCBI GI NO: 1076292 NR Description: asparaginase (EC 3.5.1.1) - Arabidopsis thaliana
  misc_feature (2)..(150): NCBI GI NO: 231573 NR Description: L-ASPARAGINASE (L-ASPARAGINE AMIDOHYDROLASE)
  misc_feature (2)..(150): NCBI GI NO: 6685231 NR Description: L-asparaginase (L-asparagine amidohydrolase)
  misc_feature (2)..(150): NCBI GI NO: 1703447 NR Description: L-ASPARAGINASE (L-ASPARAGINE AMIDOHYDROLASE)
  misc_feature (3)..(148): NCBI GI NO: 11066973 NR Description: asparaginase [Hordeum vulgare]
  misc_feature (2)..(148): NCBI GI NO: 18401029 NR Description: putative L-asparaginase; protein id: At3g16150
  misc_feature (2)..(148): NCBI GI NO: 29420787 NR Description: L-asparaginase [Glycine max]
  misc_feature (19)..(150): NCBI GI NO: 231574 NR Description: L-ASPARAGINASE (L-ASPARAGINE AMIDOHYDROLASE)
MGWALALHGGAGDVPRTLPPESREPRLATLRRCLDIGTAALREGRTALDVVELVVRELEDCPHFNAGRGSVLTSAGTVEMEACVMEGATLHCGAVSGLSTVANAVSLARLVMEKTPHIYLAFDGAEAFAREQGVETKDPSHFITDNNIEREAGQRGQQGADRLHPASSRPKPKGPGRGGRQLPDGHGRVRGRGRGGQPRYGDVHGPGW

SEQ ID NO: 37505 - protein, 182 aa, Zea mays subsp. mays
  peptide (1)..(182): Ceres Seq. ID no. 12381110
  misc_feature (1)..(54): Pfam Name: Pfam Description:  Asparaginase
  misc_feature (1)..(54): NCBI GI NO: 11066973 NR Description: asparaginase [Hordeum vulgare]
  misc_feature (1)..(46): NCBI GI NO: 18401029 NR Description: putative L-asparaginase; protein id: At3g16150
  misc_feature (1)..(46): NCBI GI NO: 29420787 NR Description: L-asparaginase [Glycine max]
  misc_feature (1)..(46): NCBI GI NO: 23428804 NR Description: L-asparaginase [Glycine max]
  misc_feature (1)..(58): NCBI GI NO: 33602689 NR Description: putative L-asparaginase
  misc_feature (1)..(58): NCBI GI NO: 33597787 NR Description: putative L-asparaginase [Bordetella parapertussis]
  misc_feature (1)..(58): NCBI GI NO: 33593386 NR Description: putative L-asparaginase [Bordetella pertussis]
  misc_feature (1)..(56): NCBI GI NO: 21489983 NR Description: asparaginase-like sperm autoantigen
  misc_feature (1)..(45): NCBI GI NO: 15642598 NR Description: asparaginase, putative [Vibrio cholerae]
  misc_feature (1)..(89): NCBI GI NO: 33991572 NR Description: ASRGL1 protein [Homo sapiens]
MPGRIGDTPLVGAGTYANALCAVSATGKGEEIIRRTVARDVAALMERGDALPAAATPRRASWRGRPAAPWGWWPCRARGRFVWRTTPPPCSGRAPPRPATPKSASGRTPPTQARARTERLSASRSSSRHFIPVWRILSFASHYCPLSDRQLVLDSVISPCFSCVCLEKLIRFRVLLRDRWEK

SEQ ID NO: 37506 - protein, 138 aa, Zea mays subsp. mays
  peptide (1)..(138): Ceres Seq. ID no. 12381111
  misc_feature (1)..(14): NCBI GI NO: 33602689 NR Description: putative L-asparaginase
  misc_feature (1)..(14): NCBI GI NO: 33597787 NR Description: putative L-asparaginase [Bordetella parapertussis]
  misc_feature (1)..(14): NCBI GI NO: 33593386 NR Description: putative L-asparaginase [Bordetella pertussis]
  misc_feature (1)..(12): NCBI GI NO: 21489983 NR Description: asparaginase-like sperm autoantigen
  misc_feature (1)..(45): NCBI GI NO: 33991572 NR Description: ASRGL1 protein [Homo sapiens]
  misc_feature (1)..(11): NCBI GI NO: 12839092 NR Description: unnamed protein product [Mus musculus]
  misc_feature (1)..(12): NCBI GI NO: 23335749 NR Description: hypothetical protein
  misc_feature (1)..(11): NCBI GI NO: 18921183 NR Description: CG7860-PA [Drosophila melanogaster]
  misc_feature (1)..(11): NCBI GI NO: 21232345 NR Description: asparaginase
  misc_feature (1)..(11): NCBI GI NO: 21243819 NR Description: asparaginase
MERGDALPAAATPRRASWRGRPAAPWGWWPCRARGRFVWRTTPPPCSGRAPPRPATPKSASGRTPPTQARARTERLSASRSSSRHFIPVWRILSFASHYCPLSDRQLVLDSVISPCFSCVCLEKLIRFRVLLRDRWEK

SEQ ID NO: 37507 - DNA, 1589 bp, Zea mays subsp. mays
  misc_feature (1)..(1589): Ceres Seq. ID no. 12383341
gcacgagaccattacctagaacatcctaatcgaaaaaccaaaccaacgcgcgcctatttcaagccacggaacctcctagcctacgcaggccgcagctcccacgtcccaacaacttgccaattcgcaccgcgggaccggcgccgtcttgttgctccgctccggccgtgacacgagcgcacccgccaccaccgccagcccctcctcccccgtcgactcgagccacaggacaaggcatcccaaccgccgcccatctcctatcgtcatctgccgatccctcctcggttcctcacagtcacagagcctcacgtcacgtgtacctcccccaacgcaacccagcccaacccagcccaaaacctagcgggcgaggggccggggaaccgaccgccggacgcggagatggaccacgcggcggaggcgcagcggacggacctgatgacgatcacgcggcacgtgctcaacgagcagagccgccacccggagtcccgcggcgacttcaccatcctcctctcccacatcgtcctcggctgcaagttcgtcgccgccgcggtcaacaaggccggcctcgccaagctcatcggcctcgccggagagaccaacgtccagggcgaggagcaaaagaagctggatgtcctgtccaacgaggtcttcgtgaaggcgctcgtcagcagcggccgcacctgtgtcctcgtgtctgaagagaacgaggaggccatcttcgtcgacccggccctccgcgggaagtactgcgtctgcttcgacccgctggatggctcctccaacatcgactgtggtgtctcaatcggaacgatctttgggatttacatggtcaaagacaaggacaacgtgaccttggaggatgtgctgcagcctggaacaaacatgcttgctgctggctactgcatgtacgggagttcctgcacgcttgtgctgagcactgggaacggagtcaatggcttcactctcgatccttcccttggagagttcattttgactcatccaaatatcaagataccaaagaaagggaagatctattcagtgaacgaagggaacgcaaaaaactgggatgggcctacagctaaattcgtggagaaatgcaagtatcctgaggatggttcaccgcctagatccttgagatatatcggaagtatggttgctgatgtccatcgcaccttactatacgggggcatatttttgtacccagcagaccagaagagtccaaacgggaaactacgcgttctgtatgaagtcttcccgatgtcattcctgatggaacaagctggaggccaggccttcacaggcaaacaacgggcccttgaacttgctcccgctaaacttcacgacagatccccagtgttcctcgggagctacgatgacgttgaggagatcaaagcactgtacgcttcaatgtcaaacagcggttgacctttctgcctgaggaaacgagcgagatcaaaagcaccgtacgcttcagagtcaactgcttgatctttatagattgtaataaaataataaaagagtttgtaaaaaaaacaacaacactgcttgatctttctgcatgaggataaaaagcgcatagtttccccggttgg

SEQ ID NO: 37508 - protein, 341 aa, Zea mays subsp. mays
  peptide (1)..(341): Ceres Seq. ID no. 12383342
  misc_feature (13)..(335): Pfam Name: Pfam Description:  Fructose-1-6-bisphosphatase
  misc_feature (1)..(338): NCBI GI NO: 6684169 NR Description: fructose-1,6-bisphosphatase [Porteresia coarctata]
  misc_feature (1)..(338): NCBI GI NO: 3913640 NR Description: FRUCTOSE-1,6-BISPHOSPHATASE, CYTOSOLIC
  misc_feature (1)..(340): NCBI GI NO: 4741918 NR Description: cytosolic fructose-1,6-bisphosphatase
  misc_feature (13)..(340): NCBI GI NO: 2494417 NR Description: FRUCTOSE-1,6-BISPHOSPHATASE, CYTOSOLIC
  misc_feature (1)..(340): NCBI GI NO: 119748 NR Description: FRUCTOSE-1,6-BISPHOSPHATASE, CYTOSOLIC
  misc_feature (1)..(336): NCBI GI NO: 11139718 NR Description: cytosolic fructose-1,6-bisphosphatase
  misc_feature (1)..(340): NCBI GI NO: 20278691 NR Description: cytoplasmic fructose-1,6-bisphosphatase
  misc_feature (1)..(336): NCBI GI NO: 1169586 NR Description: FRUCTOSE-1,6-BISPHOSPHATASE, CYTOSOLIC
  misc_feature (13)..(336): NCBI GI NO: 5305145 NR Description: fructose-1,6-bisphosphatase [Pisum sativum]
  misc_feature (10)..(341): NCBI GI NO: 6679761 NR Description: fructose bisphosphatase 2; FBPase muscle
MDHAAEAQRTDLMTITRHVLNEQSRHPESRGDFTILLSHIVLGCKFVAAAVNKAGLAKLIGLAGETNVQGEEQKKLDVLSNEVFVKALVSSGRTCVLVSEENEEAIFVDPALRGKYCVCFDPLDGSSNIDCGVSIGTIFGIYMVKDKDNVTLEDVLQPGTNMLAAGYCMYGSSCTLVLSTGNGVNGFTLDPSLGEFILTHPNIKIPKKGKIYSVNEGNAKNWDGPTAKFVEKCKYPEDGSPPRSLRYIGSMVADVHRTLLYGGIFLYPADQKSPNGKLRVLYEVFPMSFLMEQAGGQAFTGKQRALELAPAKLHDRSPVFLGSYDDVEEIKALYASMSNSG

SEQ ID NO: 37509 - protein, 329 aa, Zea mays subsp. mays
  peptide (1)..(329): Ceres Seq. ID no. 12383343
  misc_feature (1)..(323): Pfam Name: Pfam Description:  Fructose-1-6-bisphosphatase
  misc_feature (1)..(326): NCBI GI NO: 6684169 NR Description: fructose-1,6-bisphosphatase [Porteresia coarctata]
  misc_feature (1)..(326): NCBI GI NO: 3913640 NR Description: FRUCTOSE-1,6-BISPHOSPHATASE, CYTOSOLIC
  misc_feature (1)..(328): NCBI GI NO: 4741918 NR Description: cytosolic fructose-1,6-bisphosphatase
  misc_feature (1)..(328): NCBI GI NO: 2494417 NR Description: FRUCTOSE-1,6-BISPHOSPHATASE, CYTOSOLIC
  misc_feature (1)..(328): NCBI GI NO: 119748 NR Description: FRUCTOSE-1,6-BISPHOSPHATASE, CYTOSOLIC
  misc_feature (1)..(324): NCBI GI NO: 11139718 NR Description: cytosolic fructose-1,6-bisphosphatase
  misc_feature (1)..(328): NCBI GI NO: 20278691 NR Description: cytoplasmic fructose-1,6-bisphosphatase
  misc_feature (1)..(324): NCBI GI NO: 1169586 NR Description: FRUCTOSE-1,6-BISPHOSPHATASE, CYTOSOLIC
  misc_feature (1)..(324): NCBI GI NO: 5305145 NR Description: fructose-1,6-bisphosphatase [Pisum sativum]
  misc_feature (1)..(329): NCBI GI NO: 6679761 NR Description: fructose bisphosphatase 2; FBPase muscle
MTITRHVLNEQSRHPESRGDFTILLSHIVLGCKFVAAAVNKAGLAKLIGLAGETNVQGEEQKKLDVLSNEVFVKALVSSGRTCVLVSEENEEAIFVDPALRGKYCVCFDPLDGSSNIDCGVSIGTIFGIYMVKDKDNVTLEDVLQPGTNMLAAGYCMYGSSCTLVLSTGNGVNGFTLDPSLGEFILTHPNIKIPKKGKIYSVNEGNAKNWDGPTAKFVEKCKYPEDGSPPRSLRYIGSMVADVHRTLLYGGIFLYPADQKSPNGKLRVLYEVFPMSFLMEQAGGQAFTGKQRALELAPAKLHDRSPVFLGSYDDVEEIKALYASMSNSG

SEQ ID NO: 37510 - protein, 199 aa, Zea mays subsp. mays
  peptide (1)..(199): Ceres Seq. ID no. 12383344
  misc_feature (1)..(193): Pfam Name: Pfam Description:  Fructose-1-6-bisphosphatase
  misc_feature (1)..(196): NCBI GI NO: 6684169 NR Description: fructose-1,6-bisphosphatase [Porteresia coarctata]
  misc_feature (1)..(196): NCBI GI NO: 3913640 NR Description: FRUCTOSE-1,6-BISPHOSPHATASE, CYTOSOLIC
  misc_feature (1)..(198): NCBI GI NO: 4741918 NR Description: cytosolic fructose-1,6-bisphosphatase
  misc_feature (1)..(198): NCBI GI NO: 2494417 NR Description: FRUCTOSE-1,6-BISPHOSPHATASE, CYTOSOLIC
  misc_feature (1)..(198): NCBI GI NO: 119748 NR Description: FRUCTOSE-1,6-BISPHOSPHATASE, CYTOSOLIC
  misc_feature (1)..(194): NCBI GI NO: 11139718 NR Description: cytosolic fructose-1,6-bisphosphatase
  misc_feature (1)..(198): NCBI GI NO: 20278691 NR Description: cytoplasmic fructose-1,6-bisphosphatase
  misc_feature (1)..(194): NCBI GI NO: 1169586 NR Description: FRUCTOSE-1,6-BISPHOSPHATASE, CYTOSOLIC
  misc_feature (1)..(194): NCBI GI NO: 5305145 NR Description: fructose-1,6-bisphosphatase [Pisum sativum]
  misc_feature (1)..(199): NCBI GI NO: 6679761 NR Description: fructose bisphosphatase 2; FBPase muscle
MVKDKDNVTLEDVLQPGTNMLAAGYCMYGSSCTLVLSTGNGVNGFTLDPSLGEFILTHPNIKIPKKGKIYSVNEGNAKNWDGPTAKFVEKCKYPEDGSPPRSLRYIGSMVADVHRTLLYGGIFLYPADQKSPNGKLRVLYEVFPMSFLMEQAGGQAFTGKQRALELAPAKLHDRSPVFLGSYDDVEEIKALYASMSNSG

SEQ ID NO: 37511 - DNA, 1998 bp, Zea mays subsp. mays
  misc_feature (1)..(1998): Ceres Seq. ID no. 12406235
aagatctttcccaaaattccagtggaatccgcacagcggagcgctgcctgagtccgtccccgttgcttgggtgcctgtgccggacgcccgcagtcccaccatcccaactctcaaccccagcgcagcagcctgcaccacaccagaaaccacaccaccacgctcaccgccgtgagcccgtgacccccacgtccccccacaccacggcacgtcggcaccagcttaactcccggtccgcggcgacacctcaccatcgcgcgcgcacacacacgagcgtgcgccgctccctgttcctcgtgacccccctccccgcctcccctctctctctctcacacacacacacaagtcggtgctgcagcagcagcagtcgcagtccagccgtgagctcttgccgtgcgagcgattcaccgcagggcgcacgggaatccaatcaaatcccccaggaaggtagccccgcggccgcccgttcctcgctccgccccgcgccgacgcctctccccgatcccgatctgtgcgcccgcaccctgcgtgggatggaggcggcgccgcggcggcagcagcaggaggaggaggggtgcccgtgcggcgggcccgaggccgcggaccacttcgagcggctccacgacgcggtgctgctcgacgtcctcaaccgcatcggcgacgtcaaggcgctcggccgctgcgccctcgtctcgcgccgcttccacgcgctcgtgccgctcgtcgactccgtcttcgtccgcgtcgactgcgtcatccccgacgacccaccctcttcctcctccgcgggcgccgcaccgggctccccgccgcaccaggcgccggcgccaaccgcgtgcgggcgcggcgcgctcgcgcgcgtcgcgcgcgccctgctcggcggcgtcgctaggcccatccacgcgctcggccagatcctctcctccgccgcggcgaccgtctcccggcgctccgagccactgcccgcttccccgccgcccgcgcccgtcgcggacgtctcccaccactcgccctccgaggtgctccgctccttcagggagctgcggcgccttcacatcgagctgcccacgggcgagctcggcattgacgacggcgtgctccttaagtggaaggccgacttcggctccaccctcggcagctgcgtcatcctcggcgcctcgtcggtctcgtccaagccgccggcagggtccgctcaggcggaaactgctgcggccgacagcacgcccgccgctcccgataccggtagggagactgaagagccgggaagccctgcctgattctctctacacaaatggagggctcaagctccgcgttgtctggaccatcagctccctgattgccgcgtcggcgaggcattacttgctgcacccgattatctgtaatcacggaacgcttgagagcttggacctgacagatgccgacgggcaaggggtgctcaccatggacaagaggcagctgcaggaactgcgggtgcggcccgtctctccatcagggagctcgcaccgcacactcatgccggcactcagtatgcgtctgcactacgcaccactcattgaactgcctgggggaacgctgctgaaaggtgcaacactagtggcgatcagaccaagcgaggatgccttgagggagggccaaggggttgcaggtcctgctggtacatgctggatttcagaggcctttgaggagccatatcggactgcggcaaaggtgctcctcaagagaagggcatattgccttgaaatgaactcgttctgagcaccagggattcacttccacagagttctacccatctgacaggatgggggaagtgagatgcccttcggttaatatatgggaattcatcattcagtgcaaaaattggaccaactctccccatcattaatttatctgatctcggtgaagagatgacttcgtgtacctgtacctttagggttgtaattacagatacgtatttgtgctggactactacacgcggaacggaatgctatttggccgattccg

SEQ ID NO: 37512 - protein, 423 aa, Zea mays subsp. mays
  peptide (1)..(423): Ceres Seq. ID no. 12406236
  misc_feature (202)..(248): Pfam Name: Pfam Description:  F-box domain
  misc_feature (200)..(421): NCBI GI NO: 15237391 NR Description: putative protein; protein id: At5g46170
  misc_feature (196)..(413): NCBI GI NO: 15236865 NR Description: hypothetical protein; protein id: At4g18380.1
  misc_feature (200)..(387): NCBI GI NO: 18397400 NR Description: expressed protein; protein id: At1g30200
  misc_feature (194)..(421): NCBI GI NO: 34909910 NR Description: P0665A11.15
  misc_feature (327)..(405): NCBI GI NO: 34909194 NR Description: P0425G02.20
  misc_feature (196)..(268): NCBI GI NO: 34909194 NR Description: P0425G02.20
  misc_feature (325)..(399): NCBI GI NO: 15219845 NR Description: hypothetical protein; protein id: At1g22220.1
  misc_feature (200)..(259): NCBI GI NO: 15219845 NR Description: hypothetical protein; protein id: At1g22220.1
  misc_feature (332)..(402): NCBI GI NO: 18411823 NR Description: expressed protein; protein id: At1g78100
  misc_feature (200)..(251): NCBI GI NO: 18411823 NR Description: expressed protein; protein id: At1g78100
DLSQNSSGIRTAERCLSPSPLLGCLCRTPAVPPSQLSTPAQQPAPHQKPHHHAHRREPVTPTSPHTTARRHQLNSRSAATPHHRARTHTSVRRSLFLVTPLPASPLSLSHTHTSRCCSSSSRSPAVSSCRASDSPQGARESNQIPQEGSPAAARSSLRPAPTPLPDPDLCARTLRGMEAAPRRQQQEEEGCPCGGPEAADHFERLHDAVLLDVLNRIGDVKALGRCALVSRRFHALVPLVDSVFVRVDCVIPDDPPSSSSAGAAPGSPPHQAPAPTACGRGALARVARALLGGVARPIHALGQILSSAAATVSRRSEPLPASPPPAPVADVSHHSPSEVLRSFRELRRLHIELPTGELGIDDGVLLKWKADFGSTLGSCVILGASSVSSKPPAGSAQAETAAADSTPAAPDTGRETEEPGSPA

SEQ ID NO: 37513 - protein, 247 aa, Zea mays subsp. mays
  peptide (1)..(247): Ceres Seq. ID no. 12406237
  misc_feature (26)..(72): Pfam Name: Pfam Description:  F-box domain
  misc_feature (24)..(245): NCBI GI NO: 15237391 NR Description: putative protein; protein id: At5g46170
  misc_feature (20)..(237): NCBI GI NO: 15236865 NR Description: hypothetical protein; protein id: At4g18380.1
  misc_feature (24)..(211): NCBI GI NO: 18397400 NR Description: expressed protein; protein id: At1g30200
  misc_feature (18)..(245): NCBI GI NO: 34909910 NR Description: P0665A11.15
  misc_feature (151)..(229): NCBI GI NO: 34909194 NR Description: P0425G02.20
  misc_feature (20)..(92): NCBI GI NO: 34909194 NR Description: P0425G02.20
  misc_feature (149)..(223): NCBI GI NO: 15219845 NR Description: hypothetical protein; protein id: At1g22220.1
  misc_feature (24)..(83): NCBI GI NO: 15219845 NR Description: hypothetical protein; protein id: At1g22220.1
  misc_feature (156)..(226): NCBI GI NO: 18411823 NR Description: expressed protein; protein id: At1g78100
  misc_feature (24)..(75): NCBI GI NO: 18411823 NR Description: expressed protein; protein id: At1g78100
MEAAPRRQQQEEEGCPCGGPEAADHFERLHDAVLLDVLNRIGDVKALGRCALVSRRFHALVPLVDSVFVRVDCVIPDDPPSSSSAGAAPGSPPHQAPAPTACGRGALARVARALLGGVARPIHALGQILSSAAATVSRRSEPLPASPPPAPVADVSHHSPSEVLRSFRELRRLHIELPTGELGIDDGVLLKWKADFGSTLGSCVILGASSVSSKPPAGSAQAETAAADSTPAAPDTGRETEEPGSPA

SEQ ID NO: 37514 - DNA, 1742 bp, Zea mays subsp. mays
  misc_feature (1)..(1742): Ceres Seq. ID no. 13498411
  misc_feature (131)..(131): n is a, c, t, g, unknown, or other
  misc_feature (1604)..(1604): n is a, c, t, g, unknown, or other
  misc_feature (174)..(174): n is a, c, t, g, unknown, or other
  misc_feature (1736)..(1736): n is a, c, t, g, unknown, or other
  misc_feature (1569)..(1569): n is a, c, t, g, unknown, or other
  misc_feature (1562)..(1562): n is a, c, t, g, unknown, or other
  misc_feature (133)..(133): n is a, c, t, g, unknown, or other
  misc_feature (1572)..(1572): n is a, c, t, g, unknown, or other
  misc_feature (1608)..(1608): n is a, c, t, g, unknown, or other
  misc_feature (132)..(132): n is a, c, t, g, unknown, or other
  misc_feature (175)..(175): n is a, c, t, g, unknown, or other
  misc_feature (150)..(150): n is a, c, t, g, unknown, or other
aaaaaagcgtcgcggagccacgaccgacgacccctattttggcacgcccgtcccccgcttatacgccgcgccggcgaggtcgctgctccgaatcaccttcccttcctattccctctctctctctctctctnnntctctctctctactctntctctctctctcccgcccgctccnnggcctcctcctctacccgccccacaaaccaaggccctccgctgtctgcacggcgacggcggtgcatgggcggcgggcgcgccgggacgacgacgacgacgaccgcgccgccatgaccaccaccaccacggccgcggccgcggtcgcgcagctctgcgccgggccacggcggcgcaagcaggcagcaggggctcggctcgacctgcgctgggcgcgcctgctccgcctcgccgtcgtcaccagggtgctccgcctcgcgcgcgaccagctgctcgcctgctcctcctgcgggggcggcaccgccgcccgccgccggtaccgccgcctcggcccgcccaccagcgccagcgccggtcccgtgctgtcacccgtcgacagggacgacgactgcgccgcggacgccgaggccgcggcccctcgcgacgcggccgacgacgaagacaacgttgtcagcctcaaggtcagcctgctcggcgactgccagattggcaagaccagcttcatggttaagtatgtgggagatgacggggaggagcagaacggcttgcagatgacgggcctgaatctcatggacaagacgatgcccgtcaggggagcaaggattgcctacagcatctgggatgtggcaggagaccaccagtccgtcgaccacgtcccaatcgcgtgcaaggacgccgtggcgatcctgtacatgttcgatctcacgagccgctgcacgcttaataacattgtagattggtacgggagggcgaggaaatggaataagacggctattccaatcctaatcgggacaaagtttgatgactttgctcagcttcctcttgagatgcaatgggccatcgttaaccaggccagagcatacgcaagagcgatgaaggcgaccctcttcttctcgagcgcgacgcacaacatcaacgtgaacaagatcttcaagttcatcacggccaagctcttcaacctcccgtggacggtggagcgcaacctcaccatcggcgagcccatcatagacttctgacgaccccttcctctaactagtaactcggcagcacacgcacgacgacccttggtatatatcatgggttgacagggtcgtgtctttcgatcctcttgccctgtgcgagccgccggagccatgaagtgaccgagcatgcccgtcgtcctcttcctcctggtggccggctgcagcaggcaagatgccctttgtaaatatagccataggtgacggtcccgcgtgcgtgcggccgtgcgggagcgtcgtcaaatgggaagaaaaccgcgaggtgtgactgtgatgtaacaccccgtctgtaacattcgccagagtatataggaaatccatgttaatataccctccattccaactgacaaaggcatgcgctggcgcctgncggcttnctnccggtgcagaacctcttctttctgctcacccnacgnagctgcgtgcttgcatgcgtcttgaggcgtgcaagcagttcaggttcctccgttcctgtagttggttatttgtacatctgtgagttatttgcacgacgagtcaatttatgctaccccgtcacaactcncaagct

SEQ ID NO: 37515 - protein, 395 aa, Zea mays subsp. mays
  peptide (1)..(395): Ceres Seq. ID no. 13498412
  misc_feature (105)..(395): NCBI GI NO: 33146727 NR Description: putative Septum-promoting GTP-binding protein 1
  misc_feature (127)..(395): NCBI GI NO: 15239761 NR Description: SGP1 monomeric G-protein (emb|CAB54517.1)
  misc_feature (133)..(395): NCBI GI NO: 30686351 NR Description: SGP1 monomeric G-protein -related
  misc_feature (133)..(395): NCBI GI NO: 18403119 NR Description: SGP1 monomeric G-protein -related
  misc_feature (201)..(395): NCBI GI NO: 2408103 NR Description: sid3 [Schizosaccharomyces pombe]
  misc_feature (201)..(395): NCBI GI NO: 19114197 NR Description: sid3 protein; gtpase; inducer of septum formation
  misc_feature (202)..(393): NCBI GI NO: 38105787 NR Description: hypothetical protein MG04862.4
  misc_feature (133)..(341): NCBI GI NO: 30686347 NR Description: SGP1 monomeric G-protein -related
  misc_feature (210)..(395): NCBI GI NO: 28396142 NR Description: Tem-1-like protein [Giardia intestinalis]
  misc_feature (210)..(395): NCBI GI NO: 29250300 NR Description: GLP_111_18072_18662 [Giardia lamblia ATCC 50803]
  misc_feature (44)..(44): Xaa is any aa, unknown or other
  misc_feature (50)..(50): Xaa is any aa, unknown or other
  misc_feature (58)..(58): Xaa is any aa, unknown or other
KKRRGATTDDPYFGTPVPRLYAAPARSLLRITFPSYSLSLSLSXSLSLLXLSLSRPLXGLLLYPPHKPRPSAVCTATAVHGRRARRDDDDDDRAAMTTTTTAAAAVAQLCAGPRRRKQAAGARLDLRWARLLRLAVVTRVLRLARDQLLACSSCGGGTAARRRYRRLGPPTSASAGPVLSPVDRDDDCAADAEAAAPRDAADDEDNVVSLKVSLLGDCQIGKTSFMVKYVGDDGEEQNGLQMTGLNLMDKTMPVRGARIAYSIWDVAGDHQSVDHVPIACKDAVAILYMFDLTSRCTLNNIVDWYGRARKWNKTAIPILIGTKFDDFAQLPLEMQWAIVNQARAYARAMKATLFFSSATHNINVNKIFKFITAKLFNLPWTVERNLTIGEPIIDF

SEQ ID NO: 37516 - protein, 300 aa, Zea mays subsp. mays
  peptide (1)..(300): Ceres Seq. ID no. 13498413
  misc_feature (10)..(300): NCBI GI NO: 33146727 NR Description: putative Septum-promoting GTP-binding protein 1
  misc_feature (32)..(300): NCBI GI NO: 15239761 NR Description: SGP1 monomeric G-protein (emb|CAB54517.1)
  misc_feature (38)..(300): NCBI GI NO: 30686351 NR Description: SGP1 monomeric G-protein -related
  misc_feature (38)..(300): NCBI GI NO: 18403119 NR Description: SGP1 monomeric G-protein -related
  misc_feature (106)..(300): NCBI GI NO: 2408103 NR Description: sid3 [Schizosaccharomyces pombe]
  misc_feature (106)..(300): NCBI GI NO: 19114197 NR Description: sid3 protein; gtpase; inducer of septum formation
  misc_feature (107)..(298): NCBI GI NO: 38105787 NR Description: hypothetical protein MG04862.4
  misc_feature (38)..(246): NCBI GI NO: 30686347 NR Description: SGP1 monomeric G-protein -related
  misc_feature (115)..(300): NCBI GI NO: 28396142 NR Description: Tem-1-like protein [Giardia intestinalis]
  misc_feature (115)..(300): NCBI GI NO: 29250300 NR Description: GLP_111_18072_18662 [Giardia lamblia ATCC 50803]
MTTTTTAAAAVAQLCAGPRRRKQAAGARLDLRWARLLRLAVVTRVLRLARDQLLACSSCGGGTAARRRYRRLGPPTSASAGPVLSPVDRDDDCAADAEAAAPRDAADDEDNVVSLKVSLLGDCQIGKTSFMVKYVGDDGEEQNGLQMTGLNLMDKTMPVRGARIAYSIWDVAGDHQSVDHVPIACKDAVAILYMFDLTSRCTLNNIVDWYGRARKWNKTAIPILIGTKFDDFAQLPLEMQWAIVNQARAYARAMKATLFFSSATHNINVNKIFKFITAKLFNLPWTVERNLTIGEPIIDF

SEQ ID NO: 37517 - protein, 227 aa, Zea mays subsp. mays
  peptide (1)..(227): Ceres Seq. ID no. 13498414
  misc_feature (86)..(227): NCBI GI NO: 19923466 NR Description: splicing coactivator subunit SRm300
  misc_feature (72)..(227): NCBI GI NO: 22956890 NR Description: hypothetical protein [Rhodobacter sphaeroides]
  misc_feature (55)..(206): NCBI GI NO: 73648 NR Description: immediate-early protein IE180 - suid herpesvirus 1
  misc_feature (44)..(44): Xaa is any aa, unknown or other
  misc_feature (45)..(45): Xaa is any aa, unknown or other
  misc_feature (50)..(50): Xaa is any aa, unknown or other
  misc_feature (58)..(58): Xaa is any aa, unknown or other
  misc_feature (59)..(59): Xaa is any aa, unknown or other
KKASRSHDRRPLFWHARPPLIRRAGEVAAPNHLPFLFPLSLSLXXSLSTXSLSLPPAXXPPPLPAPQTKALRCLHGDGGAWAAGAPGRRRRRPRRHDHHHHGRGRGRAALRRATAAQAGSRGSARPALGAPAPPRRRHQGAPPRARPAARLLLLRGRHRRPPPVPPPRPAHQRQRRSRAVTRRQGRRLRRGRRGRGPSRRGRRRRQRCQPQGQPARRLPDWQDQLHG

SEQ ID NO: 37518 - DNA, 1789 bp, Zea mays subsp. mays
  misc_feature (1)..(1789): Ceres Seq. ID no. 12364617
gcacgagaccattacctagaacatcctaatcgaaaatcgccacccaaaagccaccgcgatcccgtgcttccttctcgcacctgcggatctactctccgcacctgcggatctaccccccggcgaaacaagcgccccgacgcctcagggaatgcggagcgatgaggcggcgctcaggcactgacgtcgccggtcagcgcgagctgcgcggcgaccgaacctgccatcgcaagcacgtcgaggacgggtagactcgtccatccttccttcctcctgttagtcgtcgtagggtagtttgcactttgcagatagctagctagtagttaggggatcaggcatgggtgagggcgaggcggaggtgaagggcggggtgctgcagggccgctacgagctcggccgcgtgctgggtcacggcaacttcgggcgcgtccacgcggcgcgggacctgcgcaccgggcgggccgtggcggtgaaggtgctcgacaaggacaagatgctgcgcacgggcatgatggagcagatcaagcgcgagatcgccgtcatgaagcgcgtgtcccaccccaacatcgtggagctccacgaggtgatggccacgcgctccaagatctacctcgcgctggagctcgtccgcggaggggagctcttcgcgcggatcgtgcgcgccgggcgcgtcaaggaggacgtggcgcggcgctacttccggcagctcatacacgccgtggacttctgccacgcgcggggcgtgtaccaccgcgacctgaagctcgagaacctcctcctggacgacgcggggaacctcaaggtcgtcgactttggcctcagcgcgctggccgaccacgcgcgcagcgacgggctgctgcacacgctctgcggcacgcccgggtacgtcgcgccggaggtgttccggaacaagggctacgacggcgccaaggctgacatctggtcgtgcggcgtcatcctctacgtcctcctcgcagggtcgctgccgttcccggacgacaacgttgccgccatgttccggaagatgagccgcggcgactaccggtgcccgccgtggctgtccacggaggcgcgcaggctcatccccaagctgctcgaccccgaccccgacacccgcatcaccatcgcccagctcgtcgagacgccgtggttcaacaagccgtccgtctcgaggtccgtcagagccgccgccggcgcaaccgagccgccggccgagcctgcctcctccgcaaaggacggcggcgacaaggacgagccaccggagacgatgaacgcgttccacctgatctccctctccgcggggttcgacctctcaccgctgttcgacgtggaaggcggtccggcgagggggccccgggagggcggcatgcggttcgcgacgcgggagcccgcgagcggcgtcgtctcccgtctcgaggaggtggccgcccgcggcggcgggcggatgcgggtgaccaagagcggcgcccgcggcgttcggctcgagggcgcggagcgcgggggccgcaagggccggctagccgtggcggccgacatcttctgcgtggcgccgtcggtgctcgtcgtcgacgtgaagaaggacggcggcgactccctcgagtaccgctccttctgcagcgaggagctccggccggcgctcaaagacatcgtctgggcggccgacccccagcccgccgtcgtgtgacgcccgtgctgccgcctgcccgctcattgtttctggatcgtagtggtgccatagtttagtcagtgtcagttccatttccaaagtgattgcgtcactgttctcgattcg

SEQ ID NO: 37519 - protein, 448 aa, Zea mays subsp. mays
  peptide (1)..(448): Ceres Seq. ID no. 12364618
  misc_feature (17)..(272): Pfam Name: Pfam Description:  Protein kinase domain
  misc_feature (11)..(443): NCBI GI NO: 15235768 NR Description:
  misc_feature (1)..(443): NCBI GI NO: 21954717 NR Description: SOS2-like protein kinase [Glycine max]
  misc_feature (11)..(441): NCBI GI NO: 17224924 NR Description: CBL-interacting protein kinase [Brassica napus]
  misc_feature (5)..(439): NCBI GI NO: 4884974 NR Description: putative serine/threonine protein kinase
  misc_feature (7)..(439): NCBI GI NO: 34903780 NR Description: unnamed protein product
  misc_feature (9)..(440): NCBI GI NO: 23428550 NR Description: Serine/threonine Kinase [Persea americana]
  misc_feature (6)..(448): NCBI GI NO: 33146431 NR Description: putative Serine/threonine Kinase
  misc_feature (12)..(439): NCBI GI NO: 34907870 NR Description: putative serine/threonine protein kinase
  misc_feature (7)..(439): NCBI GI NO: 9280636 NR Description: CBL-interacting protein kinase 2
  misc_feature (7)..(439): NCBI GI NO: 15240687 NR Description: serine threonine protein kinase-like protein
MGEGEAEVKGGVLQGRYELGRVLGHGNFGRVHAARDLRTGRAVAVKVLDKDKMLRTGMMEQIKREIAVMKRVSHPNIVELHEVMATRSKIYLALELVRGGELFARIVRAGRVKEDVARRYFRQLIHAVDFCHARGVYHRDLKLENLLLDDAGNLKVVDFGLSALADHARSDGLLHTLCGTPGYVAPEVFRNKGYDGAKADIWSCGVILYVLLAGSLPFPDDNVAAMFRKMSRGDYRCPPWLSTEARRLIPKLLDPDPDTRITIAQLVETPWFNKPSVSRSVRAAAGATEPPAEPASSAKDGGDKDEPPETMNAFHLISLSAGFDLSPLFDVEGGPARGPREGGMRFATREPASGVVSRLEEVAARGGGRMRVTKSGARGVRLEGAERGGRKGRLAVAADIFCVAPSVLVVDVKKDGGDSLEYRSFCSEELRPALKDIVWAADPQPAVV

SEQ ID NO: 37520 - protein, 396 aa, Zea mays subsp. mays
  peptide (1)..(396): Ceres Seq. ID no. 12364619
  misc_feature (1)..(220): Pfam Name: Pfam Description:  Protein kinase domain
  misc_feature (1)..(391): NCBI GI NO: 15235768 NR Description:
  misc_feature (1)..(391): NCBI GI NO: 21954717 NR Description: SOS2-like protein kinase [Glycine max]
  misc_feature (1)..(389): NCBI GI NO: 17224924 NR Description: CBL-interacting protein kinase [Brassica napus]
  misc_feature (1)..(387): NCBI GI NO: 4884974 NR Description: putative serine/threonine protein kinase
  misc_feature (1)..(387): NCBI GI NO: 34903780 NR Description: unnamed protein product
  misc_feature (1)..(388): NCBI GI NO: 23428550 NR Description: Serine/threonine Kinase [Persea americana]
  misc_feature (1)..(396): NCBI GI NO: 33146431 NR Description: putative Serine/threonine Kinase
  misc_feature (1)..(387): NCBI GI NO: 34907870 NR Description: putative serine/threonine protein kinase
  misc_feature (1)..(387): NCBI GI NO: 9280636 NR Description: CBL-interacting protein kinase 2
  misc_feature (1)..(387): NCBI GI NO: 15240687 NR Description: serine threonine protein kinase-like protein
MLRTGMMEQIKREIAVMKRVSHPNIVELHEVMATRSKIYLALELVRGGELFARIVRAGRVKEDVARRYFRQLIHAVDFCHARGVYHRDLKLENLLLDDAGNLKVVDFGLSALADHARSDGLLHTLCGTPGYVAPEVFRNKGYDGAKADIWSCGVILYVLLAGSLPFPDDNVAAMFRKMSRGDYRCPPWLSTEARRLIPKLLDPDPDTRITIAQLVETPWFNKPSVSRSVRAAAGATEPPAEPASSAKDGGDKDEPPETMNAFHLISLSAGFDLSPLFDVEGGPARGPREGGMRFATREPASGVVSRLEEVAARGGGRMRVTKSGARGVRLEGAERGGRKGRLAVAADIFCVAPSVLVVDVKKDGGDSLEYRSFCSEELRPALKDIVWAADPQPAVV

SEQ ID NO: 37521 - protein, 391 aa, Zea mays subsp. mays
  peptide (1)..(391): Ceres Seq. ID no. 12364620
  misc_feature (1)..(215): Pfam Name: Pfam Description:  Protein kinase domain
  misc_feature (1)..(386): NCBI GI NO: 15235768 NR Description:
  misc_feature (1)..(386): NCBI GI NO: 21954717 NR Description: SOS2-like protein kinase [Glycine max]
  misc_feature (1)..(384): NCBI GI NO: 17224924 NR Description: CBL-interacting protein kinase [Brassica napus]
  misc_feature (1)..(382): NCBI GI NO: 4884974 NR Description: putative serine/threonine protein kinase
  misc_feature (1)..(382): NCBI GI NO: 34903780 NR Description: unnamed protein product
  misc_feature (1)..(383): NCBI GI NO: 23428550 NR Description: Serine/threonine Kinase [Persea americana]
  misc_feature (1)..(391): NCBI GI NO: 33146431 NR Description: putative Serine/threonine Kinase
  misc_feature (1)..(382): NCBI GI NO: 34907870 NR Description: putative serine/threonine protein kinase
  misc_feature (1)..(382): NCBI GI NO: 9280636 NR Description: CBL-interacting protein kinase 2
  misc_feature (1)..(382): NCBI GI NO: 15240687 NR Description: serine threonine protein kinase-like protein
MMEQIKREIAVMKRVSHPNIVELHEVMATRSKIYLALELVRGGELFARIVRAGRVKEDVARRYFRQLIHAVDFCHARGVYHRDLKLENLLLDDAGNLKVVDFGLSALADHARSDGLLHTLCGTPGYVAPEVFRNKGYDGAKADIWSCGVILYVLLAGSLPFPDDNVAAMFRKMSRGDYRCPPWLSTEARRLIPKLLDPDPDTRITIAQLVETPWFNKPSVSRSVRAAAGATEPPAEPASSAKDGGDKDEPPETMNAFHLISLSAGFDLSPLFDVEGGPARGPREGGMRFATREPASGVVSRLEEVAARGGGRMRVTKSGARGVRLEGAERGGRKGRLAVAADIFCVAPSVLVVDVKKDGGDSLEYRSFCSEELRPALKDIVWAADPQPAVV

SEQ ID NO: 37522 - DNA, 1201 bp, Zea mays subsp. mays
  misc_feature (1)..(1201): Ceres Seq. ID no. 12407124
  misc_feature (973)..(973): n is a, c, t, g, unknown, or other
  misc_feature (684)..(684): n is a, c, t, g, unknown, or other
acgaattccccattcccttcccccatcgcatcgagagccaggccagccagccacctctgctaggtctccatggccgccgcgctcaggtccccggcctcggccaaggtctcgagccccgccgccgcctccacgtgcgccaggcgtccagagtcgcggtgggcgggttccggcagcatccgcggagccgtgtcggccccgtggccgtgcgggcgtcgctgttctcgcccaagcccgcggcggccaaggacgcgcggccgaccaaggtgcaggagctgtacgtgtacgagatgaacgagcgggaccgcgagagccccgcgtacctgcgcctcagcgccaagcagacggagaacgcgctgggcgacctggtccccttcacaaacaaggtccgtcgtcgttgtgttccttgctttgctttttgcttttgcttttgcttttgccttgatcggtgcctccgcttagccgctcttcctccccacccacccatgcacccaggtttacaacggcagcctggacaagcggctgggcatcaccgccggcatctgcgtgctcatccagcacgtccccgaccgcaacggcgaccggtacgaggccatctacagcttctacttcggcgactacggccacatctcggtgcagggcgcgtacctgacctacgaggagtcgtacctggccgtcacgggcggntccggcgtacttcgagggcgcctacggccaggtcaagctccaccagatcgtcttccccttcaagatcttctacaccttctacctccggggcatcccggacctgcccagggacctgctctgcacgcccgtcccgccctcccccaccgtcgagcccacgcccgccgccagggccgccgagccgcacgcctgcgtcaacaactacaccaactgactgatcaactccagcccaggaaccatctctgcctgccatgcctgtccctcactcgatttgtatgtttgtatggcttangtccttcgattcgtacgttcgtgcgtggtagcaccaataaacatgcgatcgattgagttgtgtgtgcttctccattcattcacttgctctttctgcagctcgtgatcgagttgtgtgtgctccattcccaaattatgtatgatcgattagtagcgttaggggttaaccagtagccgctgtgtacttgtgtcacccttggacaaacaatgagatatttctttgtcgtcg

SEQ ID NO: 37523 - protein, 298 aa, Zea mays subsp. mays
  peptide (1)..(298): Ceres Seq. ID no. 12407125
  misc_feature (231)..(298): Pfam Name: Pfam Description:  Equine herpesvirus glycoprotein gp2
  misc_feature (26)..(128): NCBI GI NO: 21727906 NR Description: allene oxide cyclase
  misc_feature (46)..(128): NCBI GI NO: 40643247 NR Description: allene oxide cyclase [Hordeum vulgare]
  misc_feature (70)..(128): NCBI GI NO: 40644132 NR Description: allene oxide cyclase [Medicago truncatula]
  misc_feature (44)..(128): NCBI GI NO: 39980760 NR Description: allene oxide cyclase [Zea mays]
  misc_feature (56)..(128): NCBI GI NO: 1362093 NR Description: hypothetical protein
  misc_feature (56)..(128): NCBI GI NO: 8977961 NR Description: allene oxide cyclase [Lycopersicon esculentum]
  misc_feature (62)..(128): NCBI GI NO: 40644130 NR Description: allene oxide cyclase [Nicotiana tabacum]
  misc_feature (83)..(128): NCBI GI NO: 16416376 NR Description: mangrin [Bruguiera sexangula]
  misc_feature (58)..(128): NCBI GI NO: 23956574 NR Description: allene oxide cyclase [Solanum tuberosum]
  misc_feature (59)..(128): NCBI GI NO: 15230874 NR Description: hypothetical protein; protein id: At3g25760.1
  misc_feature (228)..(228): Xaa is any aa, unknown or other
EFPIPFPHRIESQASQPPLLGLHGRRAQVPGLGQGLEPRRRLHVRQASRVAVGGFRQHPRSRVGPVAVRASLFSPKPAAAKDARPTKVQELYVYEMNERDRESPAYLRLSAKQTENALGDLVPFTNKVRRRCVPCFAFCFCFCFCLDRCLRLAALPPHPPMHPGLQRQPGQAAGHHRRHLRAHPARPRPQRRPVRGHLQLLLRRLRPHLGAGRVPDLRGVVPGRHGRXRRTSRAPTARSSSTRSSSPSRSSTPSTSGASRTCPGTCSARPSRPPPPSSPRPPPGPPSRTPASTTTPTD

SEQ ID NO: 37524 - protein, 203 aa, Zea mays subsp. mays
  peptide (1)..(203): Ceres Seq. ID no. 12407126
  misc_feature (136)..(203): Pfam Name: Pfam Description:  Equine herpesvirus glycoprotein gp2
  misc_feature (1)..(33): NCBI GI NO: 21727906 NR Description: allene oxide cyclase
  misc_feature (1)..(33): NCBI GI NO: 40643247 NR Description: allene oxide cyclase [Hordeum vulgare]
  misc_feature (1)..(33): NCBI GI NO: 40644132 NR Description: allene oxide cyclase [Medicago truncatula]
  misc_feature (1)..(33): NCBI GI NO: 39980760 NR Description: allene oxide cyclase [Zea mays]
  misc_feature (1)..(33): NCBI GI NO: 1362093 NR Description: hypothetical protein
  misc_feature (1)..(33): NCBI GI NO: 8977961 NR Description: allene oxide cyclase [Lycopersicon esculentum]
  misc_feature (1)..(33): NCBI GI NO: 40644130 NR Description: allene oxide cyclase [Nicotiana tabacum]
  misc_feature (1)..(33): NCBI GI NO: 16416376 NR Description: mangrin [Bruguiera sexangula]
  misc_feature (1)..(33): NCBI GI NO: 23956574 NR Description: allene oxide cyclase [Solanum tuberosum]
  misc_feature (1)..(33): NCBI GI NO: 15230874 NR Description: hypothetical protein; protein id: At3g25760.1
  misc_feature (133)..(133): Xaa is any aa, unknown or other
MNERDRESPAYLRLSAKQTENALGDLVPFTNKVRRRCVPCFAFCFCFCFCLDRCLRLAALPPHPPMHPGLQRQPGQAAGHHRRHLRAHPARPRPQRRPVRGHLQLLLRRLRPHLGAGRVPDLRGVVPGRHGRXRRTSRAPTARSSSTRSSSPSRSSTPSTSGASRTCPGTCSARPSRPPPPSSPRPPPGPPSRTPASTTTPTD

SEQ ID NO: 37525 - DNA, 983 bp, Zea mays subsp. mays
  misc_feature (1)..(983): Ceres Seq. ID no. 12350640
accagagagccacagcaccagcggcaggcacccaaagcccaggaccgccaatggccgaccgcgtgtaccccgccgccaagccgaacccgcctccaggcgcggcgggcaacagcaacggcgcgcaggcgtcgtcgttccctgcgcccaagtcgcagatgtaccagcggcccatctaccgtccgcaggcccccgcgaagcggcagcgcgggcggtcgtgccggtgcagcttgtgctgctgcttctgctgggcgctggtggtggtgatcctgctggcgttcgtggccgcggtgtgcggcggcgtcttctacctgctgtaccggccgcagcggccgtcgttcagcgtgtcgtcagtgcggctggcgtcgctgaacctgacgtcgtcggcgacggcgcccgtgctgagcgacgccatcacgctgaccgtgacggcgcggaacccgaacaagaagatggtgtacctgtacgacgacctgaccctgctggtggccacggccgccaacgccgtgccgctggggagcgccaccgtgcccgggttcgcgcacgcggccggcaacaccaccgtgctgaccgccaccgtctccgccagcgcggtgggcgtggaccccagcggcgccagctccgacatcaagcggtccggcggcgggtcgttctccgtggtggtggacgcggacaccagcgccggcgtccgggtgggcgggcttaagacgaagaagatcggcatccaggtgcactgcgagggcatcaagctgacggcaccgcctccgccaccgccggcgcccaagagggccaaggggaagaacagcaccgccgcgctcgcgcctgctccggcgccgtccgccgccgacgcgacgccggcgaagacggccacggtgagcacggcggcgcactcgtgcaaggttagggtccgcgtcaagatctggaagtggactttctaggtacgggcagcgggaggataggacacacctttaggggctgcagcgcgc

SEQ ID NO: 37526 - protein, 310 aa, Zea mays subsp. mays
  peptide (1)..(310): Ceres Seq. ID no. 12350641
  misc_feature (15)..(310): NCBI GI NO: 34903552 NR Description: P0001B06.28
  misc_feature (19)..(252): NCBI GI NO: 11762174 NR Description: At1g17620 [Arabidopsis thaliana]
  misc_feature (19)..(252): NCBI GI NO: 18394509 NR Description: expressed protein; protein id: At1g17620
  misc_feature (2)..(301): NCBI GI NO: 34914304 NR Description: B1151A10.19
  misc_feature (15)..(263): NCBI GI NO: 21536796 NR Description: unknown [Arabidopsis thaliana]
  misc_feature (15)..(263): NCBI GI NO: 15239804 NR Description: putative protein; protein id: At5g11890
  misc_feature (17)..(252): NCBI GI NO: 18401317 NR Description: expressed protein; protein id: At2g27080
  misc_feature (17)..(249): NCBI GI NO: 25408980 NR Description: hypothetical protein At2g46300
  misc_feature (17)..(249): NCBI GI NO: 30690312 NR Description: expressed protein [Arabidopsis thaliana]
  misc_feature (17)..(249): NCBI GI NO: 26449684 NR Description: unknown protein [Arabidopsis thaliana]
QRATAPAAGTQSPGPPMADRVYPAAKPNPPPGAAGNSNGAQASSFPAPKSQMYQRPIYRPQAPAKRQRGRSCRCSLCCCFCWALVVVILLAFVAAVCGGVFYLLYRPQRPSFSVSSVRLASLNLTSSATAPVLSDAITLTVTARNPNKKMVYLYDDLTLLVATAANAVPLGSATVPGFAHAAGNTTVLTATVSASAVGVDPSGASSDIKRSGGGSFSVVVDADTSAGVRVGGLKTKKIGIQVHCEGIKLTAPPPPPPAPKRAKGKNSTAALAPAPAPSAADATPAKTATVSTAAHSCKVRVRVKIWKWTF

SEQ ID NO: 37527 - protein, 294 aa, Zea mays subsp. mays
  peptide (1)..(294): Ceres Seq. ID no. 12350642
  misc_feature (1)..(294): NCBI GI NO: 34903552 NR Description: P0001B06.28
  misc_feature (3)..(236): NCBI GI NO: 11762174 NR Description: At1g17620 [Arabidopsis thaliana]
  misc_feature (3)..(236): NCBI GI NO: 18394509 NR Description: expressed protein; protein id: At1g17620
  misc_feature (1)..(285): NCBI GI NO: 34914304 NR Description: B1151A10.19
  misc_feature (1)..(247): NCBI GI NO: 21536796 NR Description: unknown [Arabidopsis thaliana]
  misc_feature (1)..(247): NCBI GI NO: 15239804 NR Description: putative protein; protein id: At5g11890
  misc_feature (1)..(236): NCBI GI NO: 18401317 NR Description: expressed protein; protein id: At2g27080
  misc_feature (1)..(233): NCBI GI NO: 25408980 NR Description: hypothetical protein At2g46300
  misc_feature (1)..(233): NCBI GI NO: 30690312 NR Description: expressed protein [Arabidopsis thaliana]
  misc_feature (1)..(233): NCBI GI NO: 26449684 NR Description: unknown protein [Arabidopsis thaliana]
MADRVYPAAKPNPPPGAAGNSNGAQASSFPAPKSQMYQRPIYRPQAPAKRQRGRSCRCSLCCCFCWALVVVILLAFVAAVCGGVFYLLYRPQRPSFSVSSVRLASLNLTSSATAPVLSDAITLTVTARNPNKKMVYLYDDLTLLVATAANAVPLGSATVPGFAHAAGNTTVLTATVSASAVGVDPSGASSDIKRSGGGSFSVVVDADTSAGVRVGGLKTKKIGIQVHCEGIKLTAPPPPPPAPKRAKGKNSTAALAPAPAPSAADATPAKTATVSTAAHSCKVRVRVKIWKWTF

SEQ ID NO: 37528 - protein, 259 aa, Zea mays subsp. mays
  peptide (1)..(259): Ceres Seq. ID no. 12350643
  misc_feature (1)..(259): NCBI GI NO: 34903552 NR Description: P0001B06.28
  misc_feature (1)..(201): NCBI GI NO: 11762174 NR Description: At1g17620 [Arabidopsis thaliana]
  misc_feature (1)..(201): NCBI GI NO: 18394509 NR Description: expressed protein; protein id: At1g17620
  misc_feature (1)..(250): NCBI GI NO: 34914304 NR Description: B1151A10.19
  misc_feature (1)..(212): NCBI GI NO: 21536796 NR Description: unknown [Arabidopsis thaliana]
  misc_feature (1)..(212): NCBI GI NO: 15239804 NR Description: putative protein; protein id: At5g11890
  misc_feature (1)..(201): NCBI GI NO: 18401317 NR Description: expressed protein; protein id: At2g27080
  misc_feature (1)..(198): NCBI GI NO: 25408980 NR Description: hypothetical protein At2g46300
  misc_feature (1)..(198): NCBI GI NO: 30690312 NR Description: expressed protein [Arabidopsis thaliana]
  misc_feature (1)..(198): NCBI GI NO: 26449684 NR Description: unknown protein [Arabidopsis thaliana]
MYQRPIYRPQAPAKRQRGRSCRCSLCCCFCWALVVVILLAFVAAVCGGVFYLLYRPQRPSFSVSSVRLASLNLTSSATAPVLSDAITLTVTARNPNKKMVYLYDDLTLLVATAANAVPLGSATVPGFAHAAGNTTVLTATVSASAVGVDPSGASSDIKRSGGGSFSVVVDADTSAGVRVGGLKTKKIGIQVHCEGIKLTAPPPPPPAPKRAKGKNSTAALAPAPAPSAADATPAKTATVSTAAHSCKVRVRVKIWKWTF

SEQ ID NO: 37529 - DNA, 1084 bp, Zea mays subsp. mays
  misc_feature (1)..(1084): Ceres Seq. ID no. 12382191
ggaagaagcttcgaaccccttctggccatctctcgtcctcctttcaattcttgagctttgtgcttccatctcctctcctctgttctcttctttgtctctgcgtgcctgttcttgtcgtctcgctcgatcgtaagtgcaacggaataagaatggcgtcgccgtcagcgtcaggagagaagaagactacgatcctggtggcgaggaagggccggctgcggcagcgctacgacggcgagtaccgcctggtggccgggtgcgtgccgtaccgcgtggacgcggacggccagacgcagctgctcatggtgtccacgcccaacagggacgacctcgtcttccccaagggcgggtgggaggacgacgaggacgtgcacgaggcggcgtgccgcgaagcgctggaggaggccggcgtcaggggcgccatcaaccgaagtgcgctcgggatgtgggtgttcaggagcaagagcagtccggtgagcagcgacagcccccggggcgcctgcaagggctacatcttcgcgctggaggtggcggaggagctggagcagtggccggagcaggacacccacggcaggcagtgggtctccccggcggacgcgtaccgcctctgccgctacgactggatgcgcgaggcgctgtcggcactgctcgaccgcctcacggaggagcccgagccccccaagtcccccgccgcggacggcctcggcgagcacgcaggcgtgtgcatgatggtcaaggcgaccacagccgctgcggatcgagcggtggcgctctgctagtggcatcattctgaacatgtgcaaatcctcatcatctgggtcgtcaggctcggctgttcgttcgaacttggtgtggttggtcggtgaatgcagtgtatggaaacttgtctcgtcaatccagggcttgtaaatgatgtcggttacgccacgtgttaaatcaaatggctacaactgtccgtagtgcgtagctgagagtttccttgtcaaatctattgaggtttccactgtttgatcctcgcttcgtgtgctaaccttctcgacttctttcaactgtccccccctatatacaatatcttagttttgttttt

SEQ ID NO: 37530 - protein, 257 aa, Zea mays subsp. mays
  peptide (1)..(257): Ceres Seq. ID no. 12382192
  misc_feature (79)..(215): Pfam Name: Pfam Description:  NUDIX domain
  misc_feature (64)..(221): NCBI GI NO: 15231598 NR Description: MutT-like protein; protein id: At3g26690.1
  misc_feature (62)..(221): NCBI GI NO: 18391450 NR Description: expressed protein; protein id: At1g12880
  misc_feature (62)..(221): NCBI GI NO: 25518008 NR Description: F13K23.14 protein - Arabidopsis thaliana
  misc_feature (64)..(211): NCBI GI NO: 18399682 NR Description: expressed protein; protein id: At3g12600.1
  misc_feature (64)..(212): NCBI GI NO: 38175436 NR Description: MutT-like protein
  misc_feature (51)..(166): NCBI GI NO: 38605803 NR Description: OSJNBb0014D23.5
  misc_feature (139)..(257): NCBI GI NO: 38605803 NR Description: OSJNBb0014D23.5
  misc_feature (64)..(212): NCBI GI NO: 34900054 NR Description: MutT-like protein~contains ESTsAU085960
  misc_feature (59)..(216): NCBI GI NO: 15221055 NR Description: unknown protein; protein id: At1g18300.1
  misc_feature (53)..(217): NCBI GI NO: 22330598 NR Description: unknown protein; protein id: At1g73540
KKLRTPSGHLSSSFQFLSFVLPSPLLCSLLCLCVPVLVVSLDRKCNGIRMASPSASGEKKTTILVARKGRLRQRYDGEYRLVAGCVPYRVDADGQTQLLMVSTPNRDDLVFPKGGWEDDEDVHEAACREALEEAGVRGAINRSALGMWVFRSKSSPVSSDSPRGACKGYIFALEVAEELEQWPEQDTHGRQWVSPADAYRLCRYDWMREALSALLDRLTEEPEPPKSPAADGLGEHAGVCMMVKATTAAADRAVALC

SEQ ID NO: 37531 - protein, 208 aa, Zea mays subsp. mays
  peptide (1)..(208): Ceres Seq. ID no. 12382193
  misc_feature (30)..(166): Pfam Name: Pfam Description:  NUDIX domain
  misc_feature (15)..(172): NCBI GI NO: 15231598 NR Description: MutT-like protein; protein id: At3g26690.1
  misc_feature (13)..(172): NCBI GI NO: 18391450 NR Description: expressed protein; protein id: At1g12880
  misc_feature (13)..(172): NCBI GI NO: 25518008 NR Description: F13K23.14 protein - Arabidopsis thaliana
  misc_feature (15)..(162): NCBI GI NO: 18399682 NR Description: expressed protein; protein id: At3g12600.1
  misc_feature (15)..(163): NCBI GI NO: 38175436 NR Description: MutT-like protein
  misc_feature (2)..(117): NCBI GI NO: 38605803 NR Description: OSJNBb0014D23.5
  misc_feature (90)..(208): NCBI GI NO: 38605803 NR Description: OSJNBb0014D23.5
  misc_feature (15)..(163): NCBI GI NO: 34900054 NR Description: MutT-like protein~contains ESTsAU085960
  misc_feature (10)..(167): NCBI GI NO: 15221055 NR Description: unknown protein; protein id: At1g18300.1
  misc_feature (4)..(168): NCBI GI NO: 22330598 NR Description: unknown protein; protein id: At1g73540
MASPSASGEKKTTILVARKGRLRQRYDGEYRLVAGCVPYRVDADGQTQLLMVSTPNRDDLVFPKGGWEDDEDVHEAACREALEEAGVRGAINRSALGMWVFRSKSSPVSSDSPRGACKGYIFALEVAEELEQWPEQDTHGRQWVSPADAYRLCRYDWMREALSALLDRLTEEPEPPKSPAADGLGEHAGVCMMVKATTAAADRAVALC

SEQ ID NO: 37532 - protein, 158 aa, Zea mays subsp. mays
  peptide (1)..(158): Ceres Seq. ID no. 12382194
  misc_feature (1)..(116): Pfam Name: Pfam Description:  NUDIX domain
  misc_feature (1)..(122): NCBI GI NO: 15231598 NR Description: MutT-like protein; protein id: At3g26690.1
  misc_feature (1)..(122): NCBI GI NO: 18391450 NR Description: expressed protein; protein id: At1g12880
  misc_feature (1)..(122): NCBI GI NO: 25518008 NR Description: F13K23.14 protein - Arabidopsis thaliana
  misc_feature (1)..(112): NCBI GI NO: 18399682 NR Description: expressed protein; protein id: At3g12600.1
  misc_feature (1)..(113): NCBI GI NO: 38175436 NR Description: MutT-like protein
  misc_feature (1)..(67): NCBI GI NO: 38605803 NR Description: OSJNBb0014D23.5
  misc_feature (40)..(158): NCBI GI NO: 38605803 NR Description: OSJNBb0014D23.5
  misc_feature (1)..(113): NCBI GI NO: 34900054 NR Description: MutT-like protein~contains ESTsAU085960
  misc_feature (1)..(117): NCBI GI NO: 15221055 NR Description: unknown protein; protein id: At1g18300.1
  misc_feature (1)..(118): NCBI GI NO: 22330598 NR Description: unknown protein; protein id: At1g73540
MVSTPNRDDLVFPKGGWEDDEDVHEAACREALEEAGVRGAINRSALGMWVFRSKSSPVSSDSPRGACKGYIFALEVAEELEQWPEQDTHGRQWVSPADAYRLCRYDWMREALSALLDRLTEEPEPPKSPAADGLGEHAGVCMMVKATTAAADRAVALC

SEQ ID NO: 37533 - DNA, 1199 bp, Zea mays subsp. mays
  misc_feature (1)..(1199): Ceres Seq. ID no. 12386722
gcacgagaccattacctagaacatcctaatcgaaaacttcccgttccccaattcgaaatcgagtcgggtactcgggtcggtcttgccgtgcgtgcgtggctgcgcgaaccagcccacgctcccactccccgcccgccaccgccgggtccctctagggttttgccgcgatgtcgctccggccgagcgagcgggagcagatgcggaagggcaactacaagcagacggtggacgccgaggagagccgccgccgccgcgagggccagatggtcgacatccgcaaggccaagcgagaggaaagcctccagaagaagcgccgcgatgggttccccgccgccggcgccgtgccgccgatgggccactccaccgcactccagcagaagctcgatggcttgccggcgatggtacaggccgttcactccaacgaccccactgtgcagcttgaggccaccacgcagttcaggaagctgctctccatagagcgtagtcccccaattgaagaggtgatcagcacaggagtcgtgccccgattcattgagttccttacacgtgaggaccatccacaactccagtttgaggctgcatgggcgctcaccaacattgcatcaggcacatcagagaacactaaggtggtggttgagagtggtgctgtgcccatctttgttaagctcctcaactccaatagcgaggatgttcgtgaacaggctgtatgggctttaggtaatgttgctggtgactccccaaagtgccgtgatctggtgctaggccatggtgggctattccccttgctgcaacagcttaatgagcatgctaagctctcgatgctgaggaatgccacatggacactatcaaacttctgccgtgggaagccacaaccgaactttgatcaggtcaaaccagcattgccagcacttcagcaacttatccactctcaggatgaggaggtcctaactgatgcctgttgggctctatcatacctatctgatgggactaatgacaaaatccaagctgttattgaatctggcgtgttccctcgccttgtggaacttctgatgcatccttcagcctctgtactgattccagctctgcgcacggtgggtaacatcgtaactggggacgacatgcagactcagtgtgtcattgacaatcaagcacttccatgccttttgaacctactgaccaccacaccaaaacccgcatcc

SEQ ID NO: 37534 - protein, 344 aa, Zea mays subsp. mays
  peptide (1)..(344): Ceres Seq. ID no. 12386723
  misc_feature (4)..(96): Pfam Name: Pfam Description:  Importin beta binding domain
  misc_feature (1)..(341): NCBI GI NO: 6682927 NR Description: importin alpha 1b
  misc_feature (1)..(341): NCBI GI NO: 34897636 NR Description: putative impotin alpha 1b [Oryza sativa]
  misc_feature (1)..(341): NCBI GI NO: 13752562 NR Description: importin alpha 2 [Capsicum annuum]
  misc_feature (1)..(341): NCBI GI NO: 13605661 NR Description: AT3g06720/F3E22_14 [Arabidopsis thaliana]
  misc_feature (1)..(341): NCBI GI NO: 18414597 NR Description: Expressed protein; protein id: At4g16143.1
  misc_feature (1)..(341): NCBI GI NO: 25314870 NR Description: probable nuclear transport factor importin alpha
  misc_feature (1)..(341): NCBI GI NO: 4191744 NR Description: importin alpha homolog [Arabidopsis thaliana]
  misc_feature (1)..(341): NCBI GI NO: 15230778 NR Description: importin alpha; protein id: At3g06720
  misc_feature (1)..(341): NCBI GI NO: 25314876 NR Description: probable nuclear transport factor importin alpha-like protein
  misc_feature (1)..(341): NCBI GI NO: 15809794 NR Description: AT3g06720/F3E22_14 [Arabidopsis thaliana]
MSLRPSEREQMRKGNYKQTVDAEESRRRREGQMVDIRKAKREESLQKKRRDGFPAAGAVPPMGHSTALQQKLDGLPAMVQAVHSNDPTVQLEATTQFRKLLSIERSPPIEEVISTGVVPRFIEFLTREDHPQLQFEAAWALTNIASGTSENTKVVVESGAVPIFVKLLNSNSEDVREQAVWALGNVAGDSPKCRDLVLGHGGLFPLLQQLNEHAKLSMLRNATWTLSNFCRGKPQPNFDQVKPALPALQQLIHSQDEEVLTDACWALSYLSDGTNDKIQAVIESGVFPRLVELLMHPSASVLIPALRTVGNIVTGDDMQTQCVIDNQALPCLLNLLTTTPKPAS

SEQ ID NO: 37535 - protein, 334 aa, Zea mays subsp. mays
  peptide (1)..(334): Ceres Seq. ID no. 12386724
  misc_feature (1)..(86): Pfam Name: Pfam Description:  Importin beta binding domain
  misc_feature (1)..(331): NCBI GI NO: 6682927 NR Description: importin alpha 1b
  misc_feature (1)..(331): NCBI GI NO: 34897636 NR Description: putative impotin alpha 1b [Oryza sativa]
  misc_feature (1)..(331): NCBI GI NO: 13752562 NR Description: importin alpha 2 [Capsicum annuum]
  misc_feature (1)..(331): NCBI GI NO: 13605661 NR Description: AT3g06720/F3E22_14 [Arabidopsis thaliana]
  misc_feature (1)..(331): NCBI GI NO: 18414597 NR Description: Expressed protein; protein id: At4g16143.1
  misc_feature (1)..(331): NCBI GI NO: 25314870 NR Description: probable nuclear transport factor importin alpha
  misc_feature (1)..(331): NCBI GI NO: 4191744 NR Description: importin alpha homolog [Arabidopsis thaliana]
  misc_feature (1)..(331): NCBI GI NO: 15230778 NR Description: importin alpha; protein id: At3g06720
  misc_feature (1)..(331): NCBI GI NO: 25314876 NR Description: probable nuclear transport factor importin alpha-like protein
  misc_feature (1)..(331): NCBI GI NO: 15809794 NR Description: AT3g06720/F3E22_14 [Arabidopsis thaliana]
MRKGNYKQTVDAEESRRRREGQMVDIRKAKREESLQKKRRDGFPAAGAVPPMGHSTALQQKLDGLPAMVQAVHSNDPTVQLEATTQFRKLLSIERSPPIEEVISTGVVPRFIEFLTREDHPQLQFEAAWALTNIASGTSENTKVVVESGAVPIFVKLLNSNSEDVREQAVWALGNVAGDSPKCRDLVLGHGGLFPLLQQLNEHAKLSMLRNATWTLSNFCRGKPQPNFDQVKPALPALQQLIHSQDEEVLTDACWALSYLSDGTNDKIQAVIESGVFPRLVELLMHPSASVLIPALRTVGNIVTGDDMQTQCVIDNQALPCLLNLLTTTPKPAS

SEQ ID NO: 37536 - protein, 312 aa, Zea mays subsp. mays
  peptide (1)..(312): Ceres Seq. ID no. 12386725
  misc_feature (1)..(64): Pfam Name: Pfam Description:  Importin beta binding domain
  misc_feature (1)..(309): NCBI GI NO: 6682927 NR Description: importin alpha 1b
  misc_feature (1)..(309): NCBI GI NO: 34897636 NR Description: putative impotin alpha 1b [Oryza sativa]
  misc_feature (1)..(309): NCBI GI NO: 13752562 NR Description: importin alpha 2 [Capsicum annuum]
  misc_feature (1)..(309): NCBI GI NO: 13605661 NR Description: AT3g06720/F3E22_14 [Arabidopsis thaliana]
  misc_feature (1)..(309): NCBI GI NO: 18414597 NR Description: Expressed protein; protein id: At4g16143.1
  misc_feature (1)..(309): NCBI GI NO: 25314870 NR Description: probable nuclear transport factor importin alpha
  misc_feature (1)..(309): NCBI GI NO: 4191744 NR Description: importin alpha homolog [Arabidopsis thaliana]
  misc_feature (1)..(309): NCBI GI NO: 15230778 NR Description: importin alpha; protein id: At3g06720
  misc_feature (1)..(309): NCBI GI NO: 25314876 NR Description: probable nuclear transport factor importin alpha-like protein
  misc_feature (1)..(309): NCBI GI NO: 15809794 NR Description: AT3g06720/F3E22_14 [Arabidopsis thaliana]
MVDIRKAKREESLQKKRRDGFPAAGAVPPMGHSTALQQKLDGLPAMVQAVHSNDPTVQLEATTQFRKLLSIERSPPIEEVISTGVVPRFIEFLTREDHPQLQFEAAWALTNIASGTSENTKVVVESGAVPIFVKLLNSNSEDVREQAVWALGNVAGDSPKCRDLVLGHGGLFPLLQQLNEHAKLSMLRNATWTLSNFCRGKPQPNFDQVKPALPALQQLIHSQDEEVLTDACWALSYLSDGTNDKIQAVIESGVFPRLVELLMHPSASVLIPALRTVGNIVTGDDMQTQCVIDNQALPCLLNLLTTTPKPAS

SEQ ID NO: 37537 - DNA, 1258 bp, Zea mays subsp. mays
  misc_feature (1)..(1258): Ceres Seq. ID no. 12382152
gcacgagaccattacctagaacatcctaatcgaaaaatagaactagagccagctccttgttgcccatggccatgacgagagcactggccatggtggccatgttggccactgctgccttgttcttcatgtccgctcgcgcacagcagtgcggtatgcaggccggcggcgcgctctgccccgactgcctctgctgcagccagtggggctattgcggctccactcccgactactgtaccggcggctgccagagccagtgcatcggcagcggctgcggcggcggcggcggtggtacccctgctactcccccgagcggcccggtgtctgaaatcatctccgagtccctgttcaacgagatgctgctgcaccgcaacgacgtggcgtgcccggccaccggcttctacacctacgacgcgttcatcgcggccgcgaacgcgttcccgggcttcggcaccacgggcggcgccgacacgcagaagcgcgagctggcggcgttcctggcgcagacgtcgcacgagaccacgggcgggtgggacacggcgcccgacgggccctacacctgggcctactgcttcaaggaggaggtcggcggcgtgtgggggccggactactgccagcccagcccccagtggccgtgcgccgacggccagaagtactacggccgcgggcccatccagctatcctggaactacaactacgggcccgccggggaggccatcggccaggaccttctgggcaacccaggtctggttgccgccgactccactgtctccttcgagacggcgctctggtactggatgacggccgcagccgcccaagccgtcctgccacgacgtcatcacgggccagtgggcgccctcgcccgacgacgtggccgcagggaggctgccggggtatggcgtcctcaccaacatcatcaacggcggcctcgagtgcggccacggcgccgacgctcgtgttgccagccggatcggcttctacaaacgctactgcgacatgtttggtctcagctacggcgacaacttggactgctacgaccagagccccttcggaaacacaatcttaagcaccaccaataataccacctcatatcacgttgacgcctaataagtaacaagagctacctgttactacaactgcaagacacagacatcgtgtagtgcacatgtgcgtcaaatctctaaactttgtacacccagaataaaactctgtaatctgaaactttgcacacccagaataaaagttttcgatttcaaactcc

SEQ ID NO: 37538 - protein, 336 aa, Zea mays subsp. mays
  peptide (1)..(336): Ceres Seq. ID no. 12382153
  misc_feature (25)..(64): Pfam Name: Pfam Description:  Chitin recognition protein
  misc_feature (5)..(245): NCBI GI NO: 31126701 NR Description: putative endochitinase
  misc_feature (5)..(275): NCBI GI NO: 7435363 NR Description: chitinase (EC 3.2.1.14) - rice
  misc_feature (5)..(245): NCBI GI NO: 500617 NR Description: endochitinase
  misc_feature (5)..(275): NCBI GI NO: 481478 NR Description: chitinase (EC 3.2.1.14) - wheat
  misc_feature (22)..(275): NCBI GI NO: 383024 NR Description: chitinase
  misc_feature (26)..(275): NCBI GI NO: 20202 NR Description: chitinase [Oryza sativa (japonica cultivar-group)]
  misc_feature (5)..(275): NCBI GI NO: 38112709 NR Description: class I chitinase [Triticum aestivum]
  misc_feature (5)..(275): NCBI GI NO: 18146829 NR Description: chitinase 3 [Triticum aestivum]
  misc_feature (5)..(275): NCBI GI NO: 12407647 NR Description: 31
  misc_feature (5)..(245): NCBI GI NO: 116317 NR Description: BASIC ENDOCHITINASE 2 PRECURSOR
MAMTRALAMVAMLATAALFFMSARAQQCGMQAGGALCPDCLCCSQWGYCGSTPDYCTGGCQSQCIGSGCGGGGGGTPATPPSGPVSEIISESLFNEMLLHRNDVACPATGFYTYDAFIAAANAFPGFGTTGGADTQKRELAAFLAQTSHETTGGWDTAPDGPYTWAYCFKEEVGGVWGPDYCQPSPQWPCADGQKYYGRGPIQLSWNYNYGPAGEAIGQDLLGNPGLVAADSTVSFETALWYWMTAAAAQAVLPRRHHGPVGALARRRGRREAAGVWRPHQHHQRRPRVRPRRRRSCCQPDRLLQTLLRHVWSQLRRQLGLLRPEPLRKHNLKHHQ

SEQ ID NO: 37539 - protein, 334 aa, Zea mays subsp. mays
  peptide (1)..(334): Ceres Seq. ID no. 12382154
  misc_feature (23)..(62): Pfam Name: Pfam Description:  Chitin recognition protein
  misc_feature (3)..(243): NCBI GI NO: 31126701 NR Description: putative endochitinase
  misc_feature (3)..(273): NCBI GI NO: 7435363 NR Description: chitinase (EC 3.2.1.14) - rice
  misc_feature (3)..(243): NCBI GI NO: 500617 NR Description: endochitinase
  misc_feature (3)..(273): NCBI GI NO: 481478 NR Description: chitinase (EC 3.2.1.14) - wheat
  misc_feature (20)..(273): NCBI GI NO: 383024 NR Description: chitinase
  misc_feature (24)..(273): NCBI GI NO: 20202 NR Description: chitinase [Oryza sativa (japonica cultivar-group)]
  misc_feature (3)..(273): NCBI GI NO: 38112709 NR Description: class I chitinase [Triticum aestivum]
  misc_feature (3)..(273): NCBI GI NO: 18146829 NR Description: chitinase 3 [Triticum aestivum]
  misc_feature (3)..(273): NCBI GI NO: 12407647 NR Description: 31
  misc_feature (3)..(243): NCBI GI NO: 116317 NR Description: BASIC ENDOCHITINASE 2 PRECURSOR
MTRALAMVAMLATAALFFMSARAQQCGMQAGGALCPDCLCCSQWGYCGSTPDYCTGGCQSQCIGSGCGGGGGGTPATPPSGPVSEIISESLFNEMLLHRNDVACPATGFYTYDAFIAAANAFPGFGTTGGADTQKRELAAFLAQTSHETTGGWDTAPDGPYTWAYCFKEEVGGVWGPDYCQPSPQWPCADGQKYYGRGPIQLSWNYNYGPAGEAIGQDLLGNPGLVAADSTVSFETALWYWMTAAAAQAVLPRRHHGPVGALARRRGRREAAGVWRPHQHHQRRPRVRPRRRRSCCQPDRLLQTLLRHVWSQLRRQLGLLRPEPLRKHNLKHHQ

SEQ ID NO: 37540 - protein, 328 aa, Zea mays subsp. mays
  peptide (1)..(328): Ceres Seq. ID no. 12382155
  misc_feature (17)..(56): Pfam Name: Pfam Description:  Chitin recognition protein
  misc_feature (1)..(237): NCBI GI NO: 31126701 NR Description: putative endochitinase
  misc_feature (1)..(267): NCBI GI NO: 7435363 NR Description: chitinase (EC 3.2.1.14) - rice
  misc_feature (1)..(237): NCBI GI NO: 500617 NR Description: endochitinase
  misc_feature (1)..(267): NCBI GI NO: 481478 NR Description: chitinase (EC 3.2.1.14) - wheat
  misc_feature (14)..(267): NCBI GI NO: 383024 NR Description: chitinase
  misc_feature (18)..(267): NCBI GI NO: 20202 NR Description: chitinase [Oryza sativa (japonica cultivar-group)]
  misc_feature (1)..(267): NCBI GI NO: 38112709 NR Description: class I chitinase [Triticum aestivum]
  misc_feature (1)..(267): NCBI GI NO: 18146829 NR Description: chitinase 3 [Triticum aestivum]
  misc_feature (1)..(267): NCBI GI NO: 12407647 NR Description: 31
  misc_feature (1)..(237): NCBI GI NO: 116317 NR Description: BASIC ENDOCHITINASE 2 PRECURSOR
MVAMLATAALFFMSARAQQCGMQAGGALCPDCLCCSQWGYCGSTPDYCTGGCQSQCIGSGCGGGGGGTPATPPSGPVSEIISESLFNEMLLHRNDVACPATGFYTYDAFIAAANAFPGFGTTGGADTQKRELAAFLAQTSHETTGGWDTAPDGPYTWAYCFKEEVGGVWGPDYCQPSPQWPCADGQKYYGRGPIQLSWNYNYGPAGEAIGQDLLGNPGLVAADSTVSFETALWYWMTAAAAQAVLPRRHHGPVGALARRRGRREAAGVWRPHQHHQRRPRVRPRRRRSCCQPDRLLQTLLRHVWSQLRRQLGLLRPEPLRKHNLKHHQ

SEQ ID NO: 37541 - DNA, 1340 bp, Zea mays subsp. mays
  misc_feature (1)..(1340): Ceres Seq. ID no. 12373073
atagatcgatcacacagcctgcaggcacagacaagagttaggctgttctacctgatcatatgaccctccagcaattctctcatccacacacaaactgaagcaagaattattgcttatctatatcctgtctgtcctttcctctatttcccccctcccctttctatttccattgtgcagcttgttattagtagatagcagtggatcgatgtgtgatggaggaaacaagctagctagctagctaccagctgaagcagcagggagaagaaggatagagagagagagagagagaaaacatcttcttcatccatagtctcggcctttcttcaccaggtcgtctgcagatctgtctcctgtgaccttccagaggccaagctaggccaggaaggaaaaatggcgtccccgtcgagcaccagcaacaactcggccttctcccctgtggcggcgtcggccgggacgacgatgcctggtgccggggcgccgtgcgcggcgtgcaagttcctgcggcgcaagtgcctgccggggtgcgtgttcgcgccctacttcccgccggaggagccgcagaagttcgccaacgtgcacaaggtgttcggcgccagcaacgtgaccaagctgctgaacgagctgctgccgcaccagcgggaggacgccgtgagctcgctcgcctacgaggccgaggcgcgcgtcaaggaccccgtctacggctgcgtcggcgccatctccgtgctgcagcgccaggtccaccgcctccagaaggagctggacgccgcgcacgccgagctcctccgctacgcctgcggcgacgtcgccgccggcatccccaccgcgctccccgtcgtcagcgccgcccccaggctctccacggcgccaatgacgacgacgagccccggccagttcgccgccggcatgtacggcagcggcaggaggcttggggtcgtcgacggactagcagcgccaccgctgcctccgtcgggcggcggcggcggctgctacttcatgcggaaccaccacaacaacgtcgtcattagtagctccccaggcgctgacgtggcgcccgtcctgccttacgcttccgtggctaattgggcggtgaatgccatcagcgcgtcgacgaccaccacctccggatcagagagcattgggttggatcacaaggaagagggagacagcagcatgtgaagtgaagggaagcgctgcgctgccgtgaatggtaaggcgctgtttgtttctctctgagtaattttaattctgcacggcggccatgcccatgcatgatgtatagctactgtatgtgctagctagtttgtgtgttttaattatatacatatatagctgttcttatc

SEQ ID NO: 37542 - protein, 261 aa, Zea mays subsp. mays
  peptide (1)..(261): Ceres Seq. ID no. 12373074
  misc_feature (30)..(130): Pfam Name: Pfam Description:  Protein of unknown function DUF260
  misc_feature (1)..(261): NCBI GI NO: 34896184 NR Description: contains ESTs C98868
  misc_feature (29)..(143): NCBI GI NO: 15242624 NR Description: putative protein; protein id: At5g63090
  misc_feature (29)..(134): NCBI GI NO: 9294470 NR Description: gb|AAB60912
  misc_feature (29)..(134): NCBI GI NO: 18405472 NR Description: expressed protein; protein id: At3g27650
  misc_feature (29)..(134): NCBI GI NO: 29427827 NR Description: LOB domain protein 25
  misc_feature (29)..(134): NCBI GI NO: 21618134 NR Description: unknown [Arabidopsis thaliana]
  misc_feature (3)..(220): NCBI GI NO: 34907508 NR Description: B1099D03.24
  misc_feature (29)..(140): NCBI GI NO: 15218746 NR Description: unknown protein; protein id: At1g65620
  misc_feature (24)..(164): NCBI GI NO: 15240110 NR Description: putative protein; protein id: At5g66870.1
  misc_feature (27)..(171): NCBI GI NO: 15227870 NR Description: hypothetical protein; protein id: At2g23660.1
MASPSSTSNNSAFSPVAASAGTTMPGAGAPCAACKFLRRKCLPGCVFAPYFPPEEPQKFANVHKVFGASNVTKLLNELLPHQREDAVSSLAYEAEARVKDPVYGCVGAISVLQRQVHRLQKELDAAHAELLRYACGDVAAGIPTALPVVSAAPRLSTAPMTTTSPGQFAAGMYGSGRRLGVVDGLAAPPLPPSGGGGGCYFMRNHHNNVVISSSPGADVAPVLPYASVANWAVNAISASTTTTSGSESIGLDHKEEGDSSM

SEQ ID NO: 37543 - protein, 238 aa, Zea mays subsp. mays
  peptide (1)..(238): Ceres Seq. ID no. 12373075
  misc_feature (7)..(107): Pfam Name: Pfam Description:  Protein of unknown function DUF260
  misc_feature (1)..(238): NCBI GI NO: 34896184 NR Description: contains ESTs C98868
  misc_feature (6)..(120): NCBI GI NO: 15242624 NR Description: putative protein; protein id: At5g63090
  misc_feature (6)..(111): NCBI GI NO: 9294470 NR Description: gb|AAB60912
  misc_feature (6)..(111): NCBI GI NO: 29427827 NR Description: LOB domain protein 25
  misc_feature (6)..(111): NCBI GI NO: 18405472 NR Description: expressed protein; protein id: At3g27650
  misc_feature (6)..(111): NCBI GI NO: 21618134 NR Description: unknown [Arabidopsis thaliana]
  misc_feature (1)..(197): NCBI GI NO: 34907508 NR Description: B1099D03.24
  misc_feature (6)..(117): NCBI GI NO: 15218746 NR Description: unknown protein; protein id: At1g65620
  misc_feature (1)..(141): NCBI GI NO: 15240110 NR Description: putative protein; protein id: At5g66870.1
  misc_feature (4)..(148): NCBI GI NO: 15227870 NR Description: hypothetical protein; protein id: At2g23660.1
MPGAGAPCAACKFLRRKCLPGCVFAPYFPPEEPQKFANVHKVFGASNVTKLLNELLPHQREDAVSSLAYEAEARVKDPVYGCVGAISVLQRQVHRLQKELDAAHAELLRYACGDVAAGIPTALPVVSAAPRLSTAPMTTTSPGQFAAGMYGSGRRLGVVDGLAAPPLPPSGGGGGCYFMRNHHNNVVISSSPGADVAPVLPYASVANWAVNAISASTTTTSGSESIGLDHKEEGDSSM

SEQ ID NO: 37544 - DNA, 1870 bp, Zea mays subsp. mays
  misc_feature (1)..(1870): Ceres Seq. ID no. 12406420
acgctctcgcgagtcgcgacgacatcctccgcggagcttgcgcgggtacggcacggagatggccgcggccgggccgacgacgtccccggccacggcgggcgccgtggaggagctcacgcggctgtaccgggagctgccgccgcgcccggccgtggaggaggtggaggcggcggcggcggtgctggcgtcggcggccgcggaggaggaggcgcgcctcgccggagatcgacagggaggaggcgctggcgcgcgggggcgcgccgcccgagctcctcgacgtgctgtgggaggcccggcgcagctccgtgcgcctccgcgcgctgcagcagcgcaaggaggccgcgcacgtcctcgagctcgagaggcggttcaggctcttcgacgacctcatccagcgggcgtcgcgtcttctgtcccccggcggtggtgccggggccaggagcggcacaggtggtgccgcggtggaccacgacgaggtcgtcgaggtcgacgccacccggaacacggagctggacgccgcgccagccgagattggtcgcgggagcaagggcggcttgggactggaacccaagtccgtctcgtcgctgcgtcgtgctgcttcggcaggtactgacacagaaaagctgggccttatccaagtggcaagccttatagagtcatcggcaaagaaggggactacagagctcaatctccggggtaagctggtggaccaagttgaatggctccctgtctcgcttgggaagttacaggatgtgactgagcttgatctatctgagaataggatcatggcactcccatcaacaattggtagccttagatacttgacaaagctcgacctccactcaaaccagctgatcaatctgcctgataccttcggggaactttccagcctgattgatcttgacttgcgtgcaaaccagctaaagtctcttcctacatcatttggaaatctcacgagcctcgccaatcttgacctgagctcgaatctgttgaaggtccttcctgattgtttaggaaagttgaaaaacttgagaaggttaattgctgagacgaatgagcttgaggagctaccctatactattggatcgtgcacctctctcgtggagcttagactggattttaatcagctcaaagccctcccagaagccattgggaagttggaaaacctggaaatcctgacgttacactacaatagaatcaaaggcctgcctacaacaattggccatcttaccaggttgagggagctggatgtcagtttcaacgaagttgagactatacctgagaacatttgctttgcagccagccttgtgaagttgaatgtcagcaggaactttgccgacttaagagccctgccaaaatcaataggggaacttgagatgctagaggagctggacatcagtatcaaccagatacgagtgcttccagactcttttgggcatctctcaaagctacgtgtgtttcatgctgatgaaactccactggaagtaccgcccaaagaagttgtaaagctaggggctcaggagctggttaattatatgaagaatatggttgctgcaagggaagtgagccagaatcaaacagataagaggagcttctggacctggctccgctcactgtttggttgttacaaaaagaatcaaggattgggaccagttccagcctagctgaaccatatcgtccgcatgtattgtcatgaattattcagttttgctccatctctcaagtcagcgacgaaatgaggcatgactactattattatttcaactttatgtttgtgtatacaatggataaatattgtagcgctttcttgtacataagattaggttatgtgtaagttcatctgtacgaaacactatcatgttaatccatg

SEQ ID NO: 37545 - protein, 553 aa, Zea mays subsp. mays
  peptide (1)..(553): Ceres Seq. ID no. 12406421
  misc_feature (18)..(75): Pfam Name: Pfam Description:  TT viral orf 1
  misc_feature (68)..(551): NCBI GI NO: 37537048 NR Description: putative leucine-rich repeat protein
  misc_feature (87)..(532): NCBI GI NO: 20148766 NR Description: PSR9 [Brassica nigra]
  misc_feature (75)..(541): NCBI GI NO: 15227838 NR Description: unknown protein; protein id: At2g17440.1
  misc_feature (184)..(532): NCBI GI NO: 15237011 NR Description: putative protein; protein id: At4g35470
  misc_feature (79)..(147): NCBI GI NO: 15237011 NR Description: putative protein; protein id: At4g35470
  misc_feature (249)..(512): NCBI GI NO: 22330985 NR Description: hypothetical protein; protein id: At3g11330
  misc_feature (149)..(529): NCBI GI NO: 15239256 NR Description: putative protein; protein id: At5g05850.1
  misc_feature (241)..(525): NCBI GI NO: 24216020 NR Description: Leucine-rich repeat containing protein
  misc_feature (169)..(503): NCBI GI NO: 24215150 NR Description: putative outermembrane protein
  misc_feature (200)..(512): NCBI GI NO: 12321872 NR Description: hypothetical protein; 91861-89496
ALASRDDILRGACAGTARRWPRPGRRRPRPRRAPWRSSRGCTGSCRRARPWRRWRRRRRCWRRRPRRRRRASPEIDREEALARGGAPPELLDVLWEARRSSVRLRALQQRKEAAHVLELERRFRLFDDLIQRASRLLSPGGGAGARSGTGGAAVDHDEVVEVDATRNTELDAAPAEIGRGSKGGLGLEPKSVSSLRRAASAGTDTEKLGLIQVASLIESSAKKGTTELNLRGKLVDQVEWLPVSLGKLQDVTELDLSENRIMALPSTIGSLRYLTKLDLHSNQLINLPDTFGELSSLIDLDLRANQLKSLPTSFGNLTSLANLDLSSNLLKVLPDCLGKLKNLRRLIAETNELEELPYTIGSCTSLVELRLDFNQLKALPEAIGKLENLEILTLHYNRIKGLPTTIGHLTRLRELDVSFNEVETIPENICFAASLVKLNVSRNFADLRALPKSIGELEMLEELDISINQIRVLPDSFGHLSKLRVFHADETPLEVPPKEVVKLGAQELVNYMKNMVAAREVSQNQTDKRSFWTWLRSLFGCYKKNQGLGPVPA

SEQ ID NO: 37546 - protein, 292 aa, Zea mays subsp. mays
  peptide (1)..(292): Ceres Seq. ID no. 12406422
  misc_feature (1)..(290): NCBI GI NO: 37537048 NR Description: putative leucine-rich repeat protein
  misc_feature (1)..(271): NCBI GI NO: 20148766 NR Description: PSR9 [Brassica nigra]
  misc_feature (1)..(280): NCBI GI NO: 15227838 NR Description: unknown protein; protein id: At2g17440.1
  misc_feature (1)..(271): NCBI GI NO: 15237011 NR Description: putative protein; protein id: At4g35470
  misc_feature (1)..(251): NCBI GI NO: 22330985 NR Description: hypothetical protein; protein id: At3g11330
  misc_feature (1)..(268): NCBI GI NO: 15239256 NR Description: putative protein; protein id: At5g05850.1
  misc_feature (1)..(264): NCBI GI NO: 24216020 NR Description: Leucine-rich repeat containing protein
  misc_feature (1)..(242): NCBI GI NO: 24215150 NR Description: putative outermembrane protein
  misc_feature (1)..(251): NCBI GI NO: 12321872 NR Description: hypothetical protein; 91861-89496
  misc_feature (1)..(264): NCBI GI NO: 24215664 NR Description: Leucine-rich repeat containing protein
MALPSTIGSLRYLTKLDLHSNQLINLPDTFGELSSLIDLDLRANQLKSLPTSFGNLTSLANLDLSSNLLKVLPDCLGKLKNLRRLIAETNELEELPYTIGSCTSLVELRLDFNQLKALPEAIGKLENLEILTLHYNRIKGLPTTIGHLTRLRELDVSFNEVETIPENICFAASLVKLNVSRNFADLRALPKSIGELEMLEELDISINQIRVLPDSFGHLSKLRVFHADETPLEVPPKEVVKLGAQELVNYMKNMVAAREVSQNQTDKRSFWTWLRSLFGCYKKNQGLGPVPA

SEQ ID NO: 37547 - DNA, 1200 bp, Zea mays subsp. mays
  misc_feature (1)..(1200): Ceres Seq. ID no. 12357037
acgacgaccacatctccccgctgggacctggtgctcggcggcgtgcgccccactacccaaccaactgaaccatgcacaagagcactgcacgacgcccgcacggcaccgaccccgcaccaagccaacggaaaccgagcacccgcacccgcccggggtggaattgggaactgaggaaaaaaaaaacacccacacccacacccgcgtccgcgtgctctctctgccccatccgcgcgcccctcctcctccaccgcccgtcccactcccgccgccgccgccgcccggccgtctgctggcgatggcgtaccgggcggacgacgactacgactacctcttcaaggtggtgctcatcggcgactccggcgtcggcaagtcgaacctgctctcgcgcttcacgcgcaacgagttcagcctcggagtccaagtccaccatcggcgtcgagttcgccacccgcagcatccacgtcgaggacaaggtcgtcaaggcccagatctgggacaccgccggccaggaaagataccgcgctatcacgagcgcgtactaccgcggagcggtaggggcgctggtcgtgtacgacgtcacgcggcacgtcaccttcgagaacgtggagcggtggatgagggagctgagggaccacacggacgccaacatcgtcatgatgctggtagggaacaaggcggacctgcgccacctcagggccgtcccgaccgaggacgccaaggccttcgccgagcgccagaacgccttcttcatggagacgtcggccctggaggcgatgaacgtggaggacgccttcaccgaggtgctcgcgcagatctaccgcgtcgtcagcaagaaggcgctcgacatcggcgacgaccccgccgcgcctcccaggggccataccatcaacgtcggcggcaaggacgacgtgtccgcggtcaagaagtctgcctgctgctcgtcttagcttgggaggacaggatagagcgtgtacttgggtttggttgttgatacttcagcactagagggcacatgacgttattgcagtcatggtcctcgatctgtattcattcgtttccaggtgtctcgttgattttgccatttgatacattgattcattcaggacttgggcctttctggtatagtgtagggacaccttgttccttttatttcttgtacctgcatactgtcgcttctcttatcaaactagctgcattact

SEQ ID NO: 37548 - protein, 329 aa, Zea mays subsp. mays
  peptide (1)..(329): Ceres Seq. ID no. 12357038
  misc_feature (100)..(137): NCBI GI NO: 15239462 NR Description: GTP-binding protein, putative
  misc_feature (100)..(137): NCBI GI NO: 7438432 NR Description: GTP-binding protein - garden pea
  misc_feature (100)..(137): NCBI GI NO: 15232477 NR Description: Ras family GTP-binding protein, putative
  misc_feature (97)..(137): NCBI GI NO: 3024504 NR Description: RAS-RELATED PROTEIN RAB11B
  misc_feature (100)..(136): NCBI GI NO: 15218719 NR Description: GTP-binding protein, putative
  misc_feature (108)..(137): NCBI GI NO: 7438389 NR Description: GTP-binding protein, ras-like
  misc_feature (100)..(137): NCBI GI NO: 1370156 NR Description: RAB11H [Lotus japonicus]
  misc_feature (100)..(137): NCBI GI NO: 15233873 NR Description: membrane-bound small GTP-binding - like protein
  misc_feature (98)..(137): NCBI GI NO: 34910940 NR Description: putative GTP-binding protein
  misc_feature (100)..(136): NCBI GI NO: 10764861 NR Description: F1K23.21 [Arabidopsis thaliana]
RRPHLPAGTWCSAACAPLPNQLNHAQEHCTTPARHRPRTKPTETEHPHPPGVELGTEEKKNTHTHTRVRVLSLPHPRAPPPPPPVPLPPPPPPGRLLAMAYRADDDYDYLFKVVLIGDSGVGKSNLLSRFTRNEFSLGVQVHHRRRVRHPQHPRRGQGRQGPDLGHRRPGKIPRYHERVLPRSGRGAGRVRRHAARHLRERGAVDEGAEGPHGRQHRHDAGREQGGPAPPQGRPDRGRQGLRRAPERLLHGDVGPGGDERGGRLHRGARADLPRRQQEGARHRRRPRRASQGPYHQRRRQGRRVRGQEVCLLLVLAWEDRIERVLGFGC

SEQ ID NO: 37549 - protein, 291 aa, Zea mays subsp. mays
  peptide (1)..(291): Ceres Seq. ID no. 12357039
  misc_feature (100)..(250): Pfam Name: Pfam Description:  Ras family
  misc_feature (100)..(291): NCBI GI NO: 15239462 NR Description: GTP-binding protein, putative
  misc_feature (107)..(291): NCBI GI NO: 7438432 NR Description: GTP-binding protein - garden pea
  misc_feature (100)..(291): NCBI GI NO: 15232477 NR Description: Ras family GTP-binding protein, putative
  misc_feature (100)..(291): NCBI GI NO: 3024504 NR Description: RAS-RELATED PROTEIN RAB11B
  misc_feature (100)..(291): NCBI GI NO: 15218719 NR Description: GTP-binding protein, putative
  misc_feature (107)..(291): NCBI GI NO: 7438389 NR Description: GTP-binding protein, ras-like
  misc_feature (107)..(291): NCBI GI NO: 1370156 NR Description: RAB11H [Lotus japonicus]
  misc_feature (100)..(290): NCBI GI NO: 15233873 NR Description: membrane-bound small GTP-binding - like protein
  misc_feature (100)..(291): NCBI GI NO: 34910940 NR Description: putative GTP-binding protein
  misc_feature (100)..(291): NCBI GI NO: 10764861 NR Description: F1K23.21 [Arabidopsis thaliana]
MHKSTARRPHGTDPAPSQRKPSTRTRPGWNWELRKKKTPTPTPASACSLCPIRAPLLLHRPSHSRRRRRPAVCWRWRTGRTTTTTTSSRWCSSATPASASRTCSRASRATSSASESKSTIGVEFATRSIHVEDKVVKAQIWDTAGQERYRAITSAYYRGAVGALVVYDVTRHVTFENVERWMRELRDHTDANIVMMLVGNKADLRHLRAVPTEDAKAFAERQNAFFMETSALEAMNVEDAFTEVLAQIYRVVSKKALDIGDDPAAPPRGHTINVGGKDDVSAVKKSACCSS

SEQ ID NO: 37550 - protein, 231 aa, Zea mays subsp. mays
  peptide (1)..(231): Ceres Seq. ID no. 12357040
  misc_feature (2)..(39): NCBI GI NO: 15239462 NR Description: GTP-binding protein, putative
  misc_feature (2)..(39): NCBI GI NO: 7438432 NR Description: GTP-binding protein - garden pea
  misc_feature (2)..(39): NCBI GI NO: 15232477 NR Description: Ras family GTP-binding protein, putative
  misc_feature (1)..(39): NCBI GI NO: 3024504 NR Description: RAS-RELATED PROTEIN RAB11B
  misc_feature (2)..(38): NCBI GI NO: 15218719 NR Description: GTP-binding protein, putative
  misc_feature (10)..(39): NCBI GI NO: 7438389 NR Description: GTP-binding protein, ras-like
  misc_feature (2)..(39): NCBI GI NO: 1370156 NR Description: RAB11H [Lotus japonicus]
  misc_feature (2)..(39): NCBI GI NO: 15233873 NR Description: membrane-bound small GTP-binding - like protein
  misc_feature (1)..(39): NCBI GI NO: 34910940 NR Description: putative GTP-binding protein
  misc_feature (2)..(38): NCBI GI NO: 10764861 NR Description: F1K23.21 [Arabidopsis thaliana]
MAYRADDDYDYLFKVVLIGDSGVGKSNLLSRFTRNEFSLGVQVHHRRRVRHPQHPRRGQGRQGPDLGHRRPGKIPRYHERVLPRSGRGAGRVRRHAARHLRERGAVDEGAEGPHGRQHRHDAGREQGGPAPPQGRPDRGRQGLRRAPERLLHGDVGPGGDERGGRLHRGARADLPRRQQEGARHRRRPRRASQGPYHQRRRQGRRVRGQEVCLLLVLAWEDRIERVLGFGC

SEQ ID NO: 37551 - DNA, 1086 bp, Zea mays subsp. mays
  misc_feature (1)..(1086): Ceres Seq. ID no. 12350847
  misc_feature (978)..(978): n is a, c, t, g, unknown, or other
  misc_feature (977)..(977): n is a, c, t, g, unknown, or other
  misc_feature (979)..(979): n is a, c, t, g, unknown, or other
  misc_feature (968)..(968): n is a, c, t, g, unknown, or other
  misc_feature (976)..(976): n is a, c, t, g, unknown, or other
atcacctcagtcctcacactgacatttcactctcggctgctggagtgtcggccgctgccatctgcctgccgctcactcccacgcgccgcaatgtgccactccccactcggcgccgccaccaccaccgcgggggcgctagcgctcctcttcctcctgccgctagcctcggccgccgccgccggcggcggcaccgcggcgaaggcgacgcccaacatcacggcgctcatgtccaagggcgggtgcaaggcgttcgcgtcgctgctggacaagtcccccgacgctctgtcggcgttcgagtcggcggtgagcggcggcgtgacggcgttctgcccgacggacgaggccgtgcgcgggttcatgcccagctaccggaacctgagcgcggacggcaaggcgtcgctgctgctgtttccacgcggtgcccgtgtactacacgctgcggggcctgaaatccagcaacgggcccatgaacacgctggccaccgacggcgccgccagcaactacaacctgacggtgcagaacgcgggcgaccaggtgacgctgcggacgccggcggccgacgcgccggcccgcgtgcgctccaccgtctacgacagggaccccgtcgccatctacgccgtggacgcggtgctggagcccgtggagctgttcgaccccgtggcggacgcgccgacccctgcgcccgcgccggcgccggcgctggcgcctaggtccgccaagcggacgcggcaccagcggcggcgcggagcggacgcgcctggcccggccgccgccgacgcctcgccggccgaccagaggaaggactacaagaagaacgcggcggccccgtgccgcacgcggtggctcgcgaccgccgccgccgctatcgccgtggccgccgccttggctgcttagggcggggtggtttaaagattgctcggccacccagctgttgtctttggatggagacgccatgcctttttggttnttggtcannnncggttgcttattacttcatcgattactgccgttgttagtatgaagtatgaacaaggtcgatatgtgacctggtggtgtacatcaaaactcaaatcttgttgattcgt

SEQ ID NO: 37552 - protein, 236 aa, Zea mays subsp. mays
  peptide (1)..(236): Ceres Seq. ID no. 12350848
  misc_feature (72)..(137): Pfam Name: Pfam Description:  Fasciclin domain
  misc_feature (51)..(137): NCBI GI NO: 15240570 NR Description: fasciclin-like arabinogalactan-protein
  misc_feature (46)..(137): NCBI GI NO: 38424037 NR Description: putative fasciclin-like arabinogalactan-protein
  misc_feature (56)..(137): NCBI GI NO: 29836529 NR Description: putative pollen surface protein
  misc_feature (56)..(137): NCBI GI NO: 29836525 NR Description: putative pollen surface protein
  misc_feature (56)..(137): NCBI GI NO: 29836527 NR Description: putative pollen surface protein
  misc_feature (56)..(137): NCBI GI NO: 29836533 NR Description: putative pollen surface protein
  misc_feature (56)..(137): NCBI GI NO: 29836531 NR Description: putative pollen surface protein
  misc_feature (46)..(137): NCBI GI NO: 13377778 NR Description: fasciclin-like arabinogalactan-protein 2
  misc_feature (46)..(137): NCBI GI NO: 21593810 NR Description: putative pollen surface protein
  misc_feature (46)..(137): NCBI GI NO: 15235459 NR Description: fasciclin-like arabinogalactan-protein
ITSVLTLTFHSRLLECRPLPSACRSLPRAAMCHSPLGAATTTAGALALLFLLPLASAAAAGGGTAAKATPNITALMSKGGCKAFASLLDKSPDALSAFESAVSGGVTAFCPTDEAVRGFMPSYRNLSADGKASLLLFPRGARVLHAAGPEIQQRAHEHAGHRRRRQQLQPDGAERGRPGDAADAGGRRAGPRALHRLRQGPRRHLRRGRGAGARGAVRPRGGRADPCARAGAGAGA

SEQ ID NO: 37553 - protein, 206 aa, Zea mays subsp. mays
  peptide (1)..(206): Ceres Seq. ID no. 12350849
  misc_feature (42)..(107): Pfam Name: Pfam Description:  Fasciclin domain
  misc_feature (21)..(107): NCBI GI NO: 15240570 NR Description: fasciclin-like arabinogalactan-protein
  misc_feature (16)..(107): NCBI GI NO: 38424037 NR Description: putative fasciclin-like arabinogalactan-protein
  misc_feature (26)..(107): NCBI GI NO: 29836529 NR Description: putative pollen surface protein
  misc_feature (26)..(107): NCBI GI NO: 29836525 NR Description: putative pollen surface protein
  misc_feature (26)..(107): NCBI GI NO: 29836527 NR Description: putative pollen surface protein
  misc_feature (26)..(107): NCBI GI NO: 29836533 NR Description: putative pollen surface protein
  misc_feature (26)..(107): NCBI GI NO: 29836531 NR Description: putative pollen surface protein
  misc_feature (16)..(107): NCBI GI NO: 13377778 NR Description: fasciclin-like arabinogalactan-protein 2
  misc_feature (16)..(107): NCBI GI NO: 21593810 NR Description: putative pollen surface protein
  misc_feature (16)..(107): NCBI GI NO: 15235459 NR Description: fasciclin-like arabinogalactan-protein
MCHSPLGAATTTAGALALLFLLPLASAAAAGGGTAAKATPNITALMSKGGCKAFASLLDKSPDALSAFESAVSGGVTAFCPTDEAVRGFMPSYRNLSADGKASLLLFPRGARVLHAAGPEIQQRAHEHAGHRRRRQQLQPDGAERGRPGDAADAGGRRAGPRALHRLRQGPRRHLRRGRGAGARGAVRPRGGRADPCARAGAGAGA

SEQ ID NO: 37554 - protein, 161 aa, Zea mays subsp. mays
  peptide (1)..(161): Ceres Seq. ID no. 12350850
  misc_feature (1)..(62): Pfam Name: Pfam Description:  Fasciclin domain
  misc_feature (1)..(62): NCBI GI NO: 15240570 NR Description: fasciclin-like arabinogalactan-protein
  misc_feature (1)..(62): NCBI GI NO: 38424037 NR Description: putative fasciclin-like arabinogalactan-protein
  misc_feature (1)..(62): NCBI GI NO: 29836529 NR Description: putative pollen surface protein
  misc_feature (1)..(62): NCBI GI NO: 29836525 NR Description: putative pollen surface protein
  misc_feature (1)..(62): NCBI GI NO: 29836527 NR Description: putative pollen surface protein
  misc_feature (1)..(62): NCBI GI NO: 29836533 NR Description: putative pollen surface protein
  misc_feature (1)..(62): NCBI GI NO: 29836531 NR Description: putative pollen surface protein
  misc_feature (1)..(62): NCBI GI NO: 13377778 NR Description: fasciclin-like arabinogalactan-protein 2
  misc_feature (1)..(62): NCBI GI NO: 21593810 NR Description: putative pollen surface protein
  misc_feature (1)..(62): NCBI GI NO: 15235459 NR Description: fasciclin-like arabinogalactan-protein
MSKGGCKAFASLLDKSPDALSAFESAVSGGVTAFCPTDEAVRGFMPSYRNLSADGKASLLLFPRGARVLHAAGPEIQQRAHEHAGHRRRRQQLQPDGAERGRPGDAADAGGRRAGPRALHRLRQGPRRHLRRGRGAGARGAVRPRGGRADPCARAGAGAGA

SEQ ID NO: 37555 - DNA, 1243 bp, Zea mays subsp. mays
  misc_feature (1)..(1243): Ceres Seq. ID no. 13491142
gtccacagcagagtagagtagcacacgcactcgcctcttgtgtctttctttgtgagctgtggtgtggtggtcgagacacacacagcagcagcaacaacaacatacatacatgcacgctagcctcgcctcctacgccgcggcagctatgccggcgctggacctccgccccgagatagcgcacgcgcaccagcccgtcatgtcgccctctcaccacggctgggacggcaatggcgccacagccgtgcccacaccgatgcccaagaggctggacgggaaggtggccattgtgacgggcggcgcgcgcgggatcggcgaggccatcgtgcggctgttcgccaagcacggggcccgggtggtgatcgcggacatcgacgacgccgcgggggaggcgctggcgtcggcgctgggcccgcaggtcagcttcgtgcgctgcgacgtgtccgtggaggacgacgtccggcgcgccgtggactgggcgctgtcgcgccacggcggccgcctcgacgtctactgcaacaacgccggggtgctgggccgccagacgcgcgccgccaggagcatcctgtccttcgacgcggccgagttcgaccgcgtgctccgcgtcaacgcgctgggcgccgcgctcgggatgaagcacgcggcgcgcgccatggcgccgcgccgcgcggggagcatcgtctccgtcgccagcgtcgcggccgtgctgggcggcctcggcccgcacgcctacaccgcctccaagcacgccatcgtcgggctcaccaagaacgccgcctgcgagctgcgcgcgcacggggtccgggtcaactgcgtctcgcccttcggcgtcgccacgcccatgctcatcaacgcctggcgccagggccacgacgacgccaccgccgacgccgaccgagacctcgacctcgacctcgacgtcaccgtgcccagcgaccaggaggtggagaagatggaggaggtggtcaggggcctggccacgctcaagggccccacgctcaggcccagggacatcgccgaggcggtgctcttcctggccagcgacgaggccaggtatatatcgggccacaaccttgtcgtggacggcggcgtcaccacatccaggaacctcatcggcttgtgaatcaatgtcaatccgttccaaatatcccattcccatggctaggctaattagagaaggagagagagaaaactgctattagttgtacttgaagtgatcgattttcatttggttgattgattcatc

SEQ ID NO: 37556 - protein, 336 aa, Zea mays subsp. mays
  peptide (1)..(336): Ceres Seq. ID no. 13491143
  misc_feature (1)..(336): NCBI GI NO: 1717794 NR Description: SEX DETERMINATION PROTEIN TASSELSEED 2
  misc_feature (1)..(336): NCBI GI NO: 1877480 NR Description: short-chain alcohol dehydrogenase
  misc_feature (19)..(314): NCBI GI NO: 15192969 NR Description: alcohol dehydrogenase [Zea mays subsp. mays]
  misc_feature (19)..(314): NCBI GI NO: 15192953 NR Description: alcohol dehydrogenase [Zea mays subsp. mays]
  misc_feature (19)..(314): NCBI GI NO: 15192935 NR Description: alcohol dehydrogenase [Zea mays subsp. mays]
  misc_feature (19)..(314): NCBI GI NO: 15192927 NR Description: alcohol dehydrogenase [Zea mays subsp. mays]
  misc_feature (19)..(314): NCBI GI NO: 15192925 NR Description: alcohol dehydrogenase [Zea mays subsp. mays]
  misc_feature (19)..(314): NCBI GI NO: 15192931 NR Description: alcohol dehydrogenase [Zea mays subsp. mays]
  misc_feature (19)..(314): NCBI GI NO: 15192933 NR Description: alcohol dehydrogenase [Zea mays subsp. mays]
  misc_feature (19)..(314): NCBI GI NO: 15192945 NR Description: alcohol dehydrogenase [Zea mays subsp. mays]
MHASLASYAAAAMPALDLRPEIAHAHQPVMSPSHHGWDGNGATAVPTPMPKRLDGKVAIVTGGARGIGEAIVRLFAKHGARVVIADIDDAAGEALASALGPQVSFVRCDVSVEDDVRRAVDWALSRHGGRLDVYCNNAGVLGRQTRAARSILSFDAAEFDRVLRVNALGAALGMKHAARAMAPRRAGSIVSVASVAAVLGGLGPHAYTASKHAIVGLTKNAACELRAHGVRVNCVSPFGVATPMLINAWRQGHDDATADADRDLDLDLDVTVPSDQEVEKMEEVVRGLATLKGPTLRPRDIAEAVLFLASDEARYISGHNLVVDGGVTTSRNLIGL

SEQ ID NO: 37557 - protein, 324 aa, Zea mays subsp. mays
  peptide (1)..(324): Ceres Seq. ID no. 13491144
  misc_feature (1)..(324): NCBI GI NO: 1717794 NR Description: SEX DETERMINATION PROTEIN TASSELSEED 2
  misc_feature (1)..(324): NCBI GI NO: 1877480 NR Description: short-chain alcohol dehydrogenase
  misc_feature (7)..(302): NCBI GI NO: 15192969 NR Description: alcohol dehydrogenase [Zea mays subsp. mays]
  misc_feature (7)..(302): NCBI GI NO: 15192953 NR Description: alcohol dehydrogenase [Zea mays subsp. mays]
  misc_feature (7)..(302): NCBI GI NO: 15192935 NR Description: alcohol dehydrogenase [Zea mays subsp. mays]
  misc_feature (7)..(302): NCBI GI NO: 15192927 NR Description: alcohol dehydrogenase [Zea mays subsp. mays]
  misc_feature (7)..(302): NCBI GI NO: 15192925 NR Description: alcohol dehydrogenase [Zea mays subsp. mays]
  misc_feature (7)..(302): NCBI GI NO: 15192931 NR Description: alcohol dehydrogenase [Zea mays subsp. mays]
  misc_feature (7)..(302): NCBI GI NO: 15192933 NR Description: alcohol dehydrogenase [Zea mays subsp. mays]
  misc_feature (7)..(302): NCBI GI NO: 15192945 NR Description: alcohol dehydrogenase [Zea mays subsp. mays]
MPALDLRPEIAHAHQPVMSPSHHGWDGNGATAVPTPMPKRLDGKVAIVTGGARGIGEAIVRLFAKHGARVVIADIDDAAGEALASALGPQVSFVRCDVSVEDDVRRAVDWALSRHGGRLDVYCNNAGVLGRQTRAARSILSFDAAEFDRVLRVNALGAALGMKHAARAMAPRRAGSIVSVASVAAVLGGLGPHAYTASKHAIVGLTKNAACELRAHGVRVNCVSPFGVATPMLINAWRQGHDDATADADRDLDLDLDVTVPSDQEVEKMEEVVRGLATLKGPTLRPRDIAEAVLFLASDEARYISGHNLVVDGGVTTSRNLIGL

SEQ ID NO: 37558 - protein, 307 aa, Zea mays subsp. mays
  peptide (1)..(307): Ceres Seq. ID no. 13491145
  misc_feature (1)..(307): NCBI GI NO: 1717794 NR Description: SEX DETERMINATION PROTEIN TASSELSEED 2
  misc_feature (1)..(307): NCBI GI NO: 1877480 NR Description: short-chain alcohol dehydrogenase
  misc_feature (1)..(285): NCBI GI NO: 15192969 NR Description: alcohol dehydrogenase [Zea mays subsp. mays]
  misc_feature (1)..(285): NCBI GI NO: 15192953 NR Description: alcohol dehydrogenase [Zea mays subsp. mays]
  misc_feature (1)..(285): NCBI GI NO: 15192935 NR Description: alcohol dehydrogenase [Zea mays subsp. mays]
  misc_feature (1)..(285): NCBI GI NO: 15192927 NR Description: alcohol dehydrogenase [Zea mays subsp. mays]
  misc_feature (1)..(285): NCBI GI NO: 15192925 NR Description: alcohol dehydrogenase [Zea mays subsp. mays]
  misc_feature (1)..(285): NCBI GI NO: 15192931 NR Description: alcohol dehydrogenase [Zea mays subsp. mays]
  misc_feature (1)..(285): NCBI GI NO: 15192933 NR Description: alcohol dehydrogenase [Zea mays subsp. mays]
  misc_feature (1)..(285): NCBI GI NO: 15192945 NR Description: alcohol dehydrogenase [Zea mays subsp. mays]
MSPSHHGWDGNGATAVPTPMPKRLDGKVAIVTGGARGIGEAIVRLFAKHGARVVIADIDDAAGEALASALGPQVSFVRCDVSVEDDVRRAVDWALSRHGGRLDVYCNNAGVLGRQTRAARSILSFDAAEFDRVLRVNALGAALGMKHAARAMAPRRAGSIVSVASVAAVLGGLGPHAYTASKHAIVGLTKNAACELRAHGVRVNCVSPFGVATPMLINAWRQGHDDATADADRDLDLDLDVTVPSDQEVEKMEEVVRGLATLKGPTLRPRDIAEAVLFLASDEARYISGHNLVVDGGVTTSRNLIGL

SEQ ID NO: 37559 - DNA, 1226 bp, Zea mays subsp. mays
  misc_feature (1)..(1226): Ceres Seq. ID no. 12407532
ctctacccgccgccacattcatcagtagaaaccacctatcctgcctgctctacctacctccgctccccagccatgacggtgctggacgccgagtcgcggttccatgtcctggcggtggacgacagcatcatcgacaggaagctcatcgagatgctgctcaagagctcgtcttaccaagtgaccacggtggagtccgggaacaaggcgctggagctgctggggctgagggacaacggcgcggaggacgcgtcgccgccgtcatcctcctcctcatcttcgtcgtcgtcctcccctgaccatcaggagatcgacgtgagtctcatcatcactgactactgcatgcccggcatgacaggatacgatctgctcaagcgagtgaaggggtcctcatcgctcaaggacattccggtggtgatcatgtcgtctgagaacgtgcctgcccggatcagcaggtgcttgcaggatggcgcggaggagttcttcctgaagcccgtgaagccggccgacatgaagaagctcaagtcacacctgctgaagcggaagcagcccaagcagaagaacaagcctcaggcgcaggcggtggagtctcctgagcagcagctggacccgcatccgcagccggtgcacgagctggagctggaggaagccgcggcagatcgcaacggcgtgaacaagaggaaggcagcggccatggaggaggggctgaccgtggtggtgacggcgccggagagcaccaagccgaggaggctgtctacgagcagcctgactgtggagacctgatcaaccgtggctacggctacgcacattaatctagcagtggatgcaagccccagtcccagcctcgccgccaagaaacacaaagtcgtgcctgctgcttttggttctgggagctaacggagggaagtgacaaacaattaaattatatgtagcggctgctgcttcggcctgcaaattttgttgcgctaacggtcatggacatggacatggacaccatcccttgtgttcgttaatcgttcggaaggggaaaagaagaagaagctgtagatataaaaaaaaggacaggcggctaattgttaatttccgcatggcttaattctggcaacgacatgctggctcaatcaaaaacctgtgacggacagacggatggatcaactgatgatgatgttgttttggctcggttcttcttccttgtacactgagtattcagatgaacatgttgtaatctg

SEQ ID NO: 37560 - protein, 259 aa, Zea mays subsp. mays
  peptide (1)..(259): Ceres Seq. ID no. 12407533
  misc_feature (34)..(182): Pfam Name: Pfam Description:  Response regulator receiver domain
  misc_feature (25)..(259): NCBI GI NO: 12060384 NR Description: response regulator 4 [Zea mays]
  misc_feature (25)..(259): NCBI GI NO: 12060386 NR Description: response regulator 5 [Zea mays]
  misc_feature (25)..(259): NCBI GI NO: 34906626 NR Description: putative response regulator
  misc_feature (27)..(253): NCBI GI NO: 15227325 NR Description: putative two-component response regulator 3protein
  misc_feature (30)..(214): NCBI GI NO: 15230202 NR Description: responce reactor 4; protein id: At3g57040
  misc_feature (7)..(233): NCBI GI NO: 12060388 NR Description: response regulator 6 [Zea mays]
  misc_feature (24)..(173): NCBI GI NO: 33330868 NR Description: type-A response regulator [Catharanthus roseus]
  misc_feature (104)..(177): NCBI GI NO: 11358972 NR Description: repsonse regulator ZmRR2 [imported] - maize
  misc_feature (28)..(75): NCBI GI NO: 11358972 NR Description: repsonse regulator ZmRR2 [imported] - maize
  misc_feature (35)..(207): NCBI GI NO: 15218550 NR Description: putative response regulator 3
LYPPPHSSVETTYPACSTYLRSPAMTVLDAESRFHVLAVDDSIIDRKLIEMLLKSSSYQVTTVESGNKALELLGLRDNGAEDASPPSSSSSSSSSSSPDHQEIDVSLIITDYCMPGMTGYDLLKRVKGSSSLKDIPVVIMSSENVPARISRCLQDGAEEFFLKPVKPADMKKLKSHLLKRKQPKQKNKPQAQAVESPEQQLDPHPQPVHELELEEAAADRNGVNKRKAAAMEEGLTVVVTAPESTKPRRLSTSSLTVET

SEQ ID NO: 37561 - protein, 235 aa, Zea mays subsp. mays
  peptide (1)..(235): Ceres Seq. ID no. 12407534
  misc_feature (10)..(158): Pfam Name: Pfam Description:  Response regulator receiver domain
  misc_feature (1)..(235): NCBI GI NO: 12060384 NR Description: response regulator 4 [Zea mays]
  misc_feature (1)..(235): NCBI GI NO: 12060386 NR Description: response regulator 5 [Zea mays]
  misc_feature (1)..(235): NCBI GI NO: 34906626 NR Description: putative response regulator
  misc_feature (3)..(229): NCBI GI NO: 15227325 NR Description: putative two-component response regulator 3protein
  misc_feature (6)..(190): NCBI GI NO: 15230202 NR Description: responce reactor 4; protein id: At3g57040
  misc_feature (1)..(209): NCBI GI NO: 12060388 NR Description: response regulator 6 [Zea mays]
  misc_feature (1)..(149): NCBI GI NO: 33330868 NR Description: type-A response regulator [Catharanthus roseus]
  misc_feature (80)..(153): NCBI GI NO: 11358972 NR Description: repsonse regulator ZmRR2 [imported] - maize
  misc_feature (4)..(51): NCBI GI NO: 11358972 NR Description: repsonse regulator ZmRR2 [imported] - maize
  misc_feature (11)..(183): NCBI GI NO: 15218550 NR Description: putative response regulator 3
MTVLDAESRFHVLAVDDSIIDRKLIEMLLKSSSYQVTTVESGNKALELLGLRDNGAEDASPPSSSSSSSSSSSPDHQEIDVSLIITDYCMPGMTGYDLLKRVKGSSSLKDIPVVIMSSENVPARISRCLQDGAEEFFLKPVKPADMKKLKSHLLKRKQPKQKNKPQAQAVESPEQQLDPHPQPVHELELEEAAADRNGVNKRKAAAMEEGLTVVVTAPESTKPRRLSTSSLTVET

SEQ ID NO: 37562 - protein, 209 aa, Zea mays subsp. mays
  peptide (1)..(209): Ceres Seq. ID no. 12407535
  misc_feature (1)..(132): Pfam Name: Pfam Description:  Response regulator receiver domain
  misc_feature (1)..(209): NCBI GI NO: 12060384 NR Description: response regulator 4 [Zea mays]
  misc_feature (1)..(209): NCBI GI NO: 12060386 NR Description: response regulator 5 [Zea mays]
  misc_feature (1)..(209): NCBI GI NO: 34906626 NR Description: putative response regulator
  misc_feature (1)..(203): NCBI GI NO: 15227325 NR Description: putative two-component response regulator 3protein
  misc_feature (1)..(164): NCBI GI NO: 15230202 NR Description: responce reactor 4; protein id: At3g57040
  misc_feature (1)..(183): NCBI GI NO: 12060388 NR Description: response regulator 6 [Zea mays]
  misc_feature (1)..(123): NCBI GI NO: 33330868 NR Description: type-A response regulator [Catharanthus roseus]
  misc_feature (54)..(127): NCBI GI NO: 11358972 NR Description: repsonse regulator ZmRR2 [imported] - maize
  misc_feature (1)..(25): NCBI GI NO: 11358972 NR Description: repsonse regulator ZmRR2 [imported] - maize
  misc_feature (1)..(157): NCBI GI NO: 15218550 NR Description: putative response regulator 3
MLLKSSSYQVTTVESGNKALELLGLRDNGAEDASPPSSSSSSSSSSSPDHQEIDVSLIITDYCMPGMTGYDLLKRVKGSSSLKDIPVVIMSSENVPARISRCLQDGAEEFFLKPVKPADMKKLKSHLLKRKQPKQKNKPQAQAVESPEQQLDPHPQPVHELELEEAAADRNGVNKRKAAAMEEGLTVVVTAPESTKPRRLSTSSLTVET

SEQ ID NO: 37563 - DNA, 1178 bp, Zea mays subsp. mays
  misc_feature (1)..(1178): Ceres Seq. ID no. 12391353
aacctggttcaaacacctcgcttcactagaggaataatctagcagcttctgttgcctccaaattgtccggagaaaggagttgaagcagtgtgagagggccctgagacgatggcgaacctgttcctcaagcaggcaaagcagtacgtggcgacgcggccggtctacccgccggagctcttcgacttcatcgcctccaagacccctcgccgcgacatggcctgggatgtcggcaccggcaacggccaggccgcagcgtcgctggcgaagctgtacaagcacgtggtgggcacggacacgagcgcgcagcagctcgcctacgcgacgcgcctcagcaacacccgctacgtgcacaccccagcggacctgcccctggaggggatccacgccaccgtggccccgccggcctccgtcgacctcgtcaccgtcgcgcaggccttccactggctcgacctcccgcgcttctacgcgcaggcccgctccgtgctgcgccccggccacggcgtgctcgccgccctggtgctacaccgagccacgcgtcgacgccgccgtcgacgccgtgttctggcgcctgtaccacgggtcccagggatactgggcgcccaaccgccggatggtcgacgacgagtaccggagcgccgacttcccgttcgacccggtcgaaggggagaaccacacgggcccgttccagttctccacgcaccgccggatggacctcgatgactacctcatgtatatcacgtcctggtccgcctaccagactgcccaggataacggcgtcgagctgctcgatgcgcccaccgtccaggagttcgcggcggcgtggggcggcgatgccaaggaggtgaagaccgtcacgtaccccatcttcctcaggattggcaaggtcaggtcggagtgagctgcacggaaaaatgaaacttgacaaactatggatacactacggacgcgccgacgattgatgatcgatcatctaggaatcgatgcttataacctttttgaataatgttttattcgattgcagatgtttgttcttcacaattgtatttcaaattctaatgcatgcactattctgttcgactttttttttctctgtgtcttcctgatagtgtaaatttcaatatctatactgtgatgacaaaatatccacaataacccatgtgactgaaatctttggtttt

SEQ ID NO: 37564 - protein, 224 aa, Zea mays subsp. mays
  peptide (1)..(224): Ceres Seq. ID no. 12391354
  misc_feature (1)..(95): Pfam Name: Pfam Description:  Equine herpesvirus glycoprotein gp2
  misc_feature (98)..(224): NCBI GI NO: 15227331 NR Description: putative embryo-abundant protein
  misc_feature (98)..(223): NCBI GI NO: 20339366 NR Description: embryo-abundant protein EMB [Pisum sativum]
  misc_feature (99)..(221): NCBI GI NO: 7484460 NR Description: embryonic abundant protein EMB34 - white spruce
  misc_feature (129)..(224): NCBI GI NO: 34912212 NR Description: P0415C01.8
  misc_feature (98)..(222): NCBI GI NO: 15238280 NR Description: embryonic abundant protein -like
  misc_feature (98)..(221): NCBI GI NO: 15233061 NR Description: putative protein; protein id: At3g61210.1
  misc_feature (98)..(221): NCBI GI NO: 15235684 NR Description: putative protein; protein id: At4g22530.1
  misc_feature (98)..(224): NCBI GI NO: 21594033 NR Description: embryonic abundant protein-like
  misc_feature (98)..(224): NCBI GI NO: 15232436 NR Description: embryonic abundant protein -like
  misc_feature (98)..(220): NCBI GI NO: 34910604 NR Description: putative embryonic abundant protein-like
MSAPATARPQRRWRSCTSTWWARTRARSSSPTRRASATPATCTPQRTCPWRGSTPPWPRRPPSTSSPSRRPSTGSTSRASTRRPAPCCAPATACSPPWCYTEPRVDAAVDAVFWRLYHGSQGYWAPNRRMVDDEYRSADFPFDPVEGENHTGPFQFSTHRRMDLDDYLMYITSWSAYQTAQDNGVELLDAPTVQEFAAAWGGDAKEVKTVTYPIFLRIGKVRSE

SEQ ID NO: 37565 - protein, 203 aa, Zea mays subsp. mays
  peptide (1)..(203): Ceres Seq. ID no. 12391355
  misc_feature (1)..(135): NCBI GI NO: 15227331 NR Description: putative embryo-abundant protein
  misc_feature (1)..(135): NCBI GI NO: 20339366 NR Description: embryo-abundant protein EMB [Pisum sativum]
  misc_feature (7)..(136): NCBI GI NO: 7484460 NR Description: embryonic abundant protein EMB34 - white spruce
  misc_feature (1)..(134): NCBI GI NO: 34912212 NR Description: P0415C01.8
  misc_feature (1)..(134): NCBI GI NO: 15238280 NR Description: embryonic abundant protein -like
  misc_feature (1)..(137): NCBI GI NO: 15233061 NR Description: putative protein; protein id: At3g61210.1
  misc_feature (1)..(134): NCBI GI NO: 15235684 NR Description: putative protein; protein id: At4g22530.1
  misc_feature (1)..(137): NCBI GI NO: 21594033 NR Description: embryonic abundant protein-like
  misc_feature (1)..(137): NCBI GI NO: 15232436 NR Description: embryonic abundant protein -like
  misc_feature (1)..(134): NCBI GI NO: 34910604 NR Description: putative embryonic abundant protein-like
MANLFLKQAKQYVATRPVYPPELFDFIASKTPRRDMAWDVGTGNGQAAASLAKLYKHVVGTDTSAQQLAYATRLSNTRYVHTPADLPLEGIHATVAPPASVDLVTVAQAFHWLDLPRFYAQARSVLRPGHGVLAALVLHRATRRRRRRRRVLAPVPRVPGILGAQPPDGRRRVPERRLPVRPGRRGEPHGPVPVLHAPPDGPR

SEQ ID NO: 37566 - protein, 168 aa, Zea mays subsp. mays
  peptide (1)..(168): Ceres Seq. ID no. 12391356
  misc_feature (1)..(100): NCBI GI NO: 15227331 NR Description: putative embryo-abundant protein
  misc_feature (1)..(100): NCBI GI NO: 20339366 NR Description: embryo-abundant protein EMB [Pisum sativum]
  misc_feature (1)..(101): NCBI GI NO: 7484460 NR Description: embryonic abundant protein EMB34 - white spruce
  misc_feature (1)..(99): NCBI GI NO: 34912212 NR Description: P0415C01.8
  misc_feature (1)..(99): NCBI GI NO: 15238280 NR Description: embryonic abundant protein -like
  misc_feature (1)..(102): NCBI GI NO: 15233061 NR Description: putative protein; protein id: At3g61210.1
  misc_feature (1)..(99): NCBI GI NO: 15235684 NR Description: putative protein; protein id: At4g22530.1
  misc_feature (1)..(102): NCBI GI NO: 21594033 NR Description: embryonic abundant protein-like
  misc_feature (1)..(102): NCBI GI NO: 15232436 NR Description: embryonic abundant protein -like
  misc_feature (1)..(99): NCBI GI NO: 34910604 NR Description: putative embryonic abundant protein-like
MAWDVGTGNGQAAASLAKLYKHVVGTDTSAQQLAYATRLSNTRYVHTPADLPLEGIHATVAPPASVDLVTVAQAFHWLDLPRFYAQARSVLRPGHGVLAALVLHRATRRRRRRRRVLAPVPRVPGILGAQPPDGRRRVPERRLPVRPGRRGEPHGPVPVLHAPPDGPR

SEQ ID NO: 37567 - DNA, 1648 bp, Zea mays subsp. mays
  misc_feature (1)..(1648): Ceres Seq. ID no. 12360034
aagactgcagcaggagcggagcgggcggagaggttccgggttttcggggtggggtttgggagatgcctcccgtgaagaagtccaagaaggggaagcgaaatccaaggatggcaagctcaagattgtcagggcgcggggcgcgccgccggcgctgccgccggagctccgcgccctcgacaccgagtggtggtacgctttcctgaacaagcaagtcgagctagagcatgctgtgcctccagatgagggggaagcattcaggcacttcttcaggacttcaaggaagacttttgactacatctgctccattgttagggaagatctgatctcaaggccaccgtctggactgatcaacattgaggggaggctgctcagtgtggagaagcaagtggcaattgccatgaggaggcttgcgtccggtgattcccaggtgtcagtagggactgcttttggtgtgggccagtctactgtttcacaagtgacatggagatttatcgagtcgatggaagatagggctaggtatcatctggcatggccaagtcaagagagacttgagcagatcaaagctgtgctggaggatgcttatggcctgccgaattgttgtggtggtgttgatgccacccacgtaatcatgacacttcctgctgttgagtcatctgcagattggtgtgatcatgcaaagaactacagtatgttcctgcaagggattgttgatgatcagatgaggtttattgatattgttactggttggcctggcagcatgacattctcacgcctgatgaaatgctctgggtttttcaagctctgtgaagctggggaacgtttgaatggctctgtcaaagtttcagcagagggtgcagagatcagggaatacattgctggtgactcatgttatcctctactcccatggcttatgactccattcgaaggaaaacatctgcctgccccattgcaaaactttaatgcccgccaaaaagctgcaaggctgcttggaacaaatgcgttggcgcggctgaagggatcctggaggatcttacacaaagtcatgtggaggcctgacaagaacaagctgccaagtataattcttgtttgctgtctgcttcacaatatactcatagactgccatgatgaattgcttccaagtgttcaacttcccgaacatcatgatactggctataatcgagaaaactgcgagcaggtggatcctaatggcaaagtgatgagagaaaacattacagcacatctccaacactgtgaagcttccaagtttctctgcaactgagctaagttagcttgttgttttgctgggattttgatgatgcatcattattccttttaccttatgcaatttcccttagtttctgttattgtagtgagactttctgattgcaattcagtaaagattctctagaaatggcatggttcagtactatagaaaatagctagttggaaaattacaaggactagccctcatgcttgggtttatgttcttcaggataatgccagtcctcatcatgctgagtgccatgaagttgcataatgtaacaaaattcatgaatgatctggtatcttatttttttgaattatttgatatcttaagttaggttggtttataaggtcccagtttatatgatgtgacctttattgttgg

SEQ ID NO: 37568 - protein, 425 aa, Zea mays subsp. mays
  peptide (1)..(425): Ceres Seq. ID no. 12360035
  misc_feature (28)..(415): NCBI GI NO: 25553597 NR Description: OJ1656_E11.28
  misc_feature (32)..(414): NCBI GI NO: 18412695 NR Description: putative protein; protein id: At3g63270
  misc_feature (158)..(418): NCBI GI NO: 11357482 NR Description: hypothetical protein F16M2
  misc_feature (32)..(159): NCBI GI NO: 11357482 NR Description: hypothetical protein F16M2
  misc_feature (61)..(414): NCBI GI NO: 15233248 NR Description: putative protein; protein id: At3g55350
  misc_feature (43)..(420): NCBI GI NO: 34908114 NR Description: P0031D11.14
  misc_feature (83)..(416): NCBI GI NO: 15239835 NR Description: putative protein; protein id: At5g12010
  misc_feature (79)..(416): NCBI GI NO: 21902022 NR Description: B1097D05.23
  misc_feature (78)..(416): NCBI GI NO: 7452044 NR Description: hypothetical protein F27B13
  misc_feature (78)..(416): NCBI GI NO: 21592524 NR Description: unknown [Arabidopsis thaliana]
RLQQERSGRRGSGFSGWGLGDASREEVQEGEAKSKDGKLKIVRARGAPPALPPELRALDTEWWYAFLNKQVELEHAVPPDEGEAFRHFFRTSRKTFDYICSIVREDLISRPPSGLINIEGRLLSVEKQVAIAMRRLASGDSQVSVGTAFGVGQSTVSQVTWRFIESMEDRARYHLAWPSQERLEQIKAVLEDAYGLPNCCGGVDATHVIMTLPAVESSADWCDHAKNYSMFLQGIVDDQMRFIDIVTGWPGSMTFSRLMKCSGFFKLCEAGERLNGSVKVSAEGAEIREYIAGDSCYPLLPWLMTPFEGKHLPAPLQNFNARQKAARLLGTNALARLKGSWRILHKVMWRPDKNKLPSIILVCCLLHNILIDCHDELLPSVQLPEHHDTGYNRENCEQVDPNGKVMRENITAHLQHCEASKFLCN

SEQ ID NO: 37569 - protein, 293 aa, Zea mays subsp. mays
  peptide (1)..(293): Ceres Seq. ID no. 12360036
  misc_feature (1)..(283): NCBI GI NO: 25553597 NR Description: OJ1656_E11.28
  misc_feature (1)..(282): NCBI GI NO: 18412695 NR Description: putative protein; protein id: At3g63270
  misc_feature (26)..(286): NCBI GI NO: 11357482 NR Description: hypothetical protein F16M2
  misc_feature (1)..(27): NCBI GI NO: 11357482 NR Description: hypothetical protein F16M2
  misc_feature (1)..(282): NCBI GI NO: 15233248 NR Description: putative protein; protein id: At3g55350
  misc_feature (1)..(288): NCBI GI NO: 34908114 NR Description: P0031D11.14
  misc_feature (1)..(284): NCBI GI NO: 15239835 NR Description: putative protein; protein id: At5g12010
  misc_feature (1)..(284): NCBI GI NO: 21902022 NR Description: B1097D05.23
  misc_feature (1)..(284): NCBI GI NO: 7452044 NR Description: hypothetical protein F27B13
  misc_feature (1)..(284): NCBI GI NO: 21592524 NR Description: unknown [Arabidopsis thaliana]
MRRLASGDSQVSVGTAFGVGQSTVSQVTWRFIESMEDRARYHLAWPSQERLEQIKAVLEDAYGLPNCCGGVDATHVIMTLPAVESSADWCDHAKNYSMFLQGIVDDQMRFIDIVTGWPGSMTFSRLMKCSGFFKLCEAGERLNGSVKVSAEGAEIREYIAGDSCYPLLPWLMTPFEGKHLPAPLQNFNARQKAARLLGTNALARLKGSWRILHKVMWRPDKNKLPSIILVCCLLHNILIDCHDELLPSVQLPEHHDTGYNRENCEQVDPNGKVMRENITAHLQHCEASKFLCN

SEQ ID NO: 37570 - protein, 259 aa, Zea mays subsp. mays
  peptide (1)..(259): Ceres Seq. ID no. 12360037
  misc_feature (1)..(249): NCBI GI NO: 25553597 NR Description: OJ1656_E11.28
  misc_feature (1)..(248): NCBI GI NO: 18412695 NR Description: putative protein; protein id: At3g63270
  misc_feature (1)..(252): NCBI GI NO: 11357482 NR Description: hypothetical protein F16M2
  misc_feature (1)..(248): NCBI GI NO: 15233248 NR Description: putative protein; protein id: At3g55350
  misc_feature (1)..(254): NCBI GI NO: 34908114 NR Description: P0031D11.14
  misc_feature (1)..(250): NCBI GI NO: 15239835 NR Description: putative protein; protein id: At5g12010
  misc_feature (1)..(250): NCBI GI NO: 21902022 NR Description: B1097D05.23
  misc_feature (1)..(250): NCBI GI NO: 7452044 NR Description: hypothetical protein F27B13
  misc_feature (1)..(250): NCBI GI NO: 21592524 NR Description: unknown [Arabidopsis thaliana]
  misc_feature (1)..(250): NCBI GI NO: 30688449 NR Description: expressed protein [Arabidopsis thaliana]
MEDRARYHLAWPSQERLEQIKAVLEDAYGLPNCCGGVDATHVIMTLPAVESSADWCDHAKNYSMFLQGIVDDQMRFIDIVTGWPGSMTFSRLMKCSGFFKLCEAGERLNGSVKVSAEGAEIREYIAGDSCYPLLPWLMTPFEGKHLPAPLQNFNARQKAARLLGTNALARLKGSWRILHKVMWRPDKNKLPSIILVCCLLHNILIDCHDELLPSVQLPEHHDTGYNRENCEQVDPNGKVMRENITAHLQHCEASKFLCN

SEQ ID NO: 37571 - DNA, 1423 bp, Zea mays subsp. mays; identical to SEQ ID NO: 31351
  misc_feature (1)..(1423): Ceres Seq. ID no. 13570861

SEQ ID NO: 37572 - protein, 371 aa, Zea mays subsp. mays; identical to SEQ ID NO: 31352
  peptide (1)..(371): Ceres Seq. ID no. 13570862
  misc_feature (10)..(345): Pfam Name: Pfam Description:  NADH:flavin oxidoreductase / NADH oxidase family
  misc_feature (1)..(369): NCBI GI NO: 15223138 NR Description: 12-oxophytodienoate reductase (OPR1)
  misc_feature (10)..(369): NCBI GI NO: 7449901 NR Description: probable 12-oxophytodienoate reductase (EC1
  misc_feature (1)..(369): NCBI GI NO: 21593388 NR Description: 12-oxophytodienoate reductase (OPR1)
  misc_feature (8)..(369): NCBI GI NO: 15223140 NR Description: 12-oxophytodienoate reductase (OPR2)
  misc_feature (1)..(369): NCBI GI NO: 4894182 NR Description: 12-oxophytodienoate reductase
  misc_feature (8)..(369): NCBI GI NO: 26450549 NR Description: putative 12-oxophytodienoate reductase OPR2
  misc_feature (1)..(369): NCBI GI NO: 2765083 NR Description: 12-oxophytodienoate reductase
  misc_feature (1)..(369): NCBI GI NO: 14277800 NR Description: Chain A
  misc_feature (1)..(370): NCBI GI NO: 13516922 NR Description: 12-oxophytodienoic acid 10, 11-reductase
  misc_feature (10)..(370): NCBI GI NO: 7449902 NR Description: probable 12-oxophytodienoate reductase (EC1

SEQ ID NO: 37573 - protein, 355 aa, Zea mays subsp. mays; identical to SEQ ID NO: 31353
  peptide (1)..(355): Ceres Seq. ID no. 13570863
  misc_feature (1)..(329): Pfam Name: Pfam Description:  NADH:flavin oxidoreductase / NADH oxidase family
  misc_feature (1)..(353): NCBI GI NO: 15223138 NR Description: 12-oxophytodienoate reductase (OPR1)
  misc_feature (1)..(353): NCBI GI NO: 7449901 NR Description: probable 12-oxophytodienoate reductase (EC1
  misc_feature (1)..(353): NCBI GI NO: 21593388 NR Description: 12-oxophytodienoate reductase (OPR1)
  misc_feature (1)..(353): NCBI GI NO: 15223140 NR Description: 12-oxophytodienoate reductase (OPR2)
  misc_feature (1)..(353): NCBI GI NO: 4894182 NR Description: 12-oxophytodienoate reductase
  misc_feature (1)..(353): NCBI GI NO: 26450549 NR Description: putative 12-oxophytodienoate reductase OPR2
  misc_feature (1)..(353): NCBI GI NO: 2765083 NR Description: 12-oxophytodienoate reductase
  misc_feature (1)..(353): NCBI GI NO: 14277800 NR Description: Chain A
  misc_feature (1)..(354): NCBI GI NO: 13516922 NR Description: 12-oxophytodienoic acid 10, 11-reductase
  misc_feature (1)..(354): NCBI GI NO: 7449902 NR Description: probable 12-oxophytodienoate reductase (EC1

SEQ ID NO: 37574 - DNA, 1444 bp, Zea mays subsp. mays
  misc_feature (1)..(1444): Ceres Seq. ID no. 12390163
gcaattaaccctcactaaagggaacaaaagctggagctccaccgcggtggcggccgctctagaactagtggatcccccgggctgcaggaattcgcacgagaccattacctagaacatcctaatcgaaaacatatgaatagaaaagaacccctttgcgcaaggcaaacccccacccagctcacctcggcgatggcatcggcggcggccgtggagtgggaggcggcggcgcggaaggtgctggtggcgcgcaagccctggcttcgggctacctacggcctgcccaacctgcctccccgtgctcctctacctccgcatggcgcaggttcccttcgacatccacgtcgacacctccttccccgatgccgatcacataccatatgttgaatttggggattgcgtggctttcaacaacgagaaaggaggcgtaattgagtatctcaaggatgagaaaattgttgacttgaactcaaatcacccaaatatttcatccaccactgtgctagacacgaaggccatggtttcgtcctggcttgctaatgctttgctgtatgaactctgggtggttagtgatggaagcattgcaaatgatatctacttctctgatctcccttggcccattggaaagatactccattggaataaaactagacatgtgaagcagctacttggtataacaaagctcaatgctgcagaaaaagaagaggagatataccagaaggcaagtgctgcatatgagtcattgtctttcagattaggggatcaagtctttctatttgataatagccctacagatgttgatgctcttttccttggacatgttctttttgttctcagtgcgttgcctgatacatctgtgctgaggggcactttgcagaagcatgacaacttggtgagctttgctgagcatcacaaggtccagttgctggaagcctcatcatcatcatcatcagggttaggatcatcacctagcccatcatcatccacccccaggagaagaccatctgctgaccacagttataagccaaaacccagagccaagaaggaaacggacggaggaggaaaagaaattcaggcgaagagcaaagtatttcctggccacacaactcgttgcagttcttgtgttcctttcgctgatgggtggggttgatagttccgagctagacgacgaagatggcttggattatgatgattagatcctccctgtgctgttacacttgattagttccaaggacaaactgcctggttggttcggggtgctgtgagaatttgttccaacactggaaaatgtgttacgcttgattttagctaggaattcactgagttggtcacccatcggcagtttcataagctacttcggctgtaaacatacttgtctctgaaggttttttttttttgggcttcagtgaaccaaacttgtaagcaaattcgaattttggagttttgg

SEQ ID NO: 37575 - protein, 277 aa, Zea mays subsp. mays
  peptide (1)..(277): Ceres Seq. ID no. 12390164
  misc_feature (1)..(259): NCBI GI NO: 18398935 NR Description: expressed protein; protein id: At2g19080
  misc_feature (1)..(202): NCBI GI NO: 39581681 NR Description: Hypothetical protein CBG00033
  misc_feature (1)..(202): NCBI GI NO: 17556801 NR Description: Putative cytoplasmic protein of ancient origin
  misc_feature (1)..(17): NCBI GI NO: 34898420 NR Description: Similar to Arabidopsis thaliana chromosome II BACT20K24 genomic sequence
  misc_feature (1)..(195): NCBI GI NO: 23271051 NR Description: Unknown (protein for MGC:29603) [Homo sapiens]
  misc_feature (1)..(195): NCBI GI NO: 5729937 NR Description: metaxin 2 [Homo sapiens]
  misc_feature (1)..(202): NCBI GI NO: 630753 NR Description: ZC97.1 protein - Caenorhabditis elegans
  misc_feature (1)..(195): NCBI GI NO: 34855231 NR Description: similar to metaxin 2 [Rattus norvegicus]
  misc_feature (1)..(198): NCBI GI NO: 7305291 NR Description: metaxin 1; metaxin [Mus musculus]
  misc_feature (1)..(198): NCBI GI NO: 18606009 NR Description: metaxin [Mus musculus]
MAQVPFDIHVDTSFPDADHIPYVEFGDCVAFNNEKGGVIEYLKDEKIVDLNSNHPNISSTTVLDTKAMVSSWLANALLYELWVVSDGSIANDIYFSDLPWPIGKILHWNKTRHVKQLLGITKLNAAEKEEEIYQKASAAYESLSFRLGDQVFLFDNSPTDVDALFLGHVLFVLSALPDTSVLRGTLQKHDNLVSFAEHHKVQLLEASSSSSSGLGSSPSPSSSTPRRRPSADHSYKPKPRAKKETDGGGKEIQAKSKVFPGHTTRCSSCVPFADGWG

SEQ ID NO: 37576 - protein, 210 aa, Zea mays subsp. mays
  peptide (1)..(210): Ceres Seq. ID no. 12390165
  misc_feature (1)..(192): NCBI GI NO: 18398935 NR Description: expressed protein; protein id: At2g19080
  misc_feature (1)..(135): NCBI GI NO: 39581681 NR Description: Hypothetical protein CBG00033
  misc_feature (1)..(135): NCBI GI NO: 17556801 NR Description: Putative cytoplasmic protein of ancient origin
  misc_feature (1)..(128): NCBI GI NO: 23271051 NR Description: Unknown (protein for MGC:29603) [Homo sapiens]
  misc_feature (1)..(128): NCBI GI NO: 5729937 NR Description: metaxin 2 [Homo sapiens]
  misc_feature (1)..(135): NCBI GI NO: 630753 NR Description: ZC97.1 protein - Caenorhabditis elegans
  misc_feature (1)..(128): NCBI GI NO: 34855231 NR Description: similar to metaxin 2 [Rattus norvegicus]
  misc_feature (1)..(131): NCBI GI NO: 7305291 NR Description: metaxin 1; metaxin [Mus musculus]
  misc_feature (1)..(131): NCBI GI NO: 18606009 NR Description: metaxin [Mus musculus]
  misc_feature (1)..(196): NCBI GI NO: 24308336 NR Description: hypothetical protein MGC2817 [Homo sapiens]
MVSSWLANALLYELWVVSDGSIANDIYFSDLPWPIGKILHWNKTRHVKQLLGITKLNAAEKEEEIYQKASAAYESLSFRLGDQVFLFDNSPTDVDALFLGHVLFVLSALPDTSVLRGTLQKHDNLVSFAEHHKVQLLEASSSSSSGLGSSPSPSSSTPRRRPSADHSYKPKPRAKKETDGGGKEIQAKSKVFPGHTTRCSSCVPFADGWG

SEQ ID NO: 37577 - DNA, 1721 bp, Zea mays subsp. mays; identical to SEQ ID NO: 30728
  misc_feature (1)..(1721): Ceres Seq. ID no. 12362091

SEQ ID NO: 37578 - protein, 206 aa, Zea mays subsp. mays; identical to SEQ ID NO: 30729
  peptide (1)..(206): Ceres Seq. ID no. 12362092
  misc_feature (1)..(39): NCBI GI NO: 11994159 NR Description: gb|AAD20688
  misc_feature (168)..(196): NCBI GI NO: 11994159 NR Description: gb|AAD20688
  misc_feature (1)..(39): NCBI GI NO: 15231653 NR Description: hypothetical protein; protein id: At3g26932.1
  misc_feature (168)..(196): NCBI GI NO: 15231653 NR Description: hypothetical protein; protein id: At3g26932.1
  misc_feature (1)..(199): NCBI GI NO: 37535422 NR Description: putative extensin
  misc_feature (1)..(186): NCBI GI NO: 30693732 NR Description: expressed protein [Arabidopsis thaliana]
  misc_feature (1)..(169): NCBI GI NO: 18401724 NR Description: expressed protein; protein id: At2g28380
  misc_feature (1)..(43): NCBI GI NO: 40788412 NR Description: hypothetical protein
  misc_feature (1)..(186): NCBI GI NO: 9759153 NR Description: gb|AAD20688
  misc_feature (1)..(12): NCBI GI NO: 9229939 NR Description: dsRNA-binding protein ODB1

SEQ ID NO: 37579 - protein, 197 aa, Zea mays subsp. mays; identical to SEQ ID NO: 30730
  peptide (1)..(197): Ceres Seq. ID no. 12362093
  misc_feature (1)..(30): NCBI GI NO: 11994159 NR Description: gb|AAD20688
  misc_feature (159)..(187): NCBI GI NO: 11994159 NR Description: gb|AAD20688
  misc_feature (1)..(30): NCBI GI NO: 15231653 NR Description: hypothetical protein; protein id: At3g26932.1
  misc_feature (159)..(187): NCBI GI NO: 15231653 NR Description: hypothetical protein; protein id: At3g26932.1
  misc_feature (1)..(190): NCBI GI NO: 37535422 NR Description: putative extensin
  misc_feature (1)..(177): NCBI GI NO: 30693732 NR Description: expressed protein [Arabidopsis thaliana]
  misc_feature (1)..(160): NCBI GI NO: 18401724 NR Description: expressed protein; protein id: At2g28380
  misc_feature (1)..(34): NCBI GI NO: 40788412 NR Description: hypothetical protein
  misc_feature (1)..(177): NCBI GI NO: 9759153 NR Description: gb|AAD20688
  misc_feature (1)..(13): NCBI GI NO: 15231653 NR Description: hypothetical protein; protein id: At3g26932.1

SEQ ID NO: 37580 - protein, 142 aa, Zea mays subsp. mays; identical to SEQ ID NO: 30731
  peptide (1)..(142): Ceres Seq. ID no. 12362094
  misc_feature (1)..(142): NCBI GI NO: 40788412 NR Description: hypothetical protein
  misc_feature (1)..(47): NCBI GI NO: 40788412 NR Description: hypothetical protein

SEQ ID NO: 37581 - DNA, 856 bp, Zea mays subsp. mays
  misc_feature (1)..(856): Ceres Seq. ID no. 12355354
aatggttccatttcttatgtcacgtccaaattggaaattccatcacgcctcgccctcgccctcgccctcgccgtccccgaccagaatcgtcacttcgtccggctccggcgatctcctccaccgccgttgtcagcggtccggccgagatggggagcacttcctctatgctcatccaatacgatatcgaggaggtccaggaccattgtaaccacgcattctcgcagcaggagatcgtgtcgctgtaccaccgcttctgtcagctcgaccgcaacggaggtggcttcgtctccgctgacgagttcatgtcggtacctgagttcgccgtaaatcccctctcccagaggctcctgaggatgctggatggtctcaacttcaaggagtttgtagcatttttgtcggcttttagcccccgcacaagcctacaggaaaagattgaatttattttcagggtttatgatactgactgcaacgggaaggttgcttttgatgacatcttaagcatcttgcgagatctgacaggttcatttatgacagagcaacagagacagaaagtcttgactcatgtgttagaagaagctgggtacacaaaaaattcacatttcacactcccagactttatgaagattattggcaattctgagctcaagatggaggttgaagttcctattgactaaaaaccaaataagtatcatctagttgtatcgtgatgtgttgccgagagccccagacctgtatgttcatttgtgttgaattaagtctatggtgtatttatatccttgtaaatcaaatcatgatcatagatgtaattaaggaaacaaatgtacctgttatttggaggattagttgacttgcgctg

SEQ ID NO: 37582 - protein, 223 aa, Zea mays subsp. mays
  peptide (1)..(223): Ceres Seq. ID no. 12355355
  misc_feature (79)..(107): Pfam Name: Pfam Description:  EF hand
  misc_feature (49)..(223): NCBI GI NO: 16550928 NR Description: calcineurin-like protein [Eucalyptus grandis]
  misc_feature (49)..(223): NCBI GI NO: 18401887 NR Description: expressed protein; protein id: At3g18430
  misc_feature (49)..(223): NCBI GI NO: 21592761 NR Description: calcineurin-like protein [Arabidopsis thaliana]
  misc_feature (49)..(220): NCBI GI NO: 1168750 NR Description: Calcineurin B subunit
  misc_feature (49)..(213): NCBI GI NO: 13445166 NR Description: calcineurin B [Dictyostelium discoideum]
  misc_feature (122)..(220): NCBI GI NO: 17566934 NR Description: Calcium binding protein P22 like family member
  misc_feature (49)..(136): NCBI GI NO: 17566934 NR Description: Calcium binding protein P22 like family member
  misc_feature (122)..(220): NCBI GI NO: 39593284 NR Description: Hypothetical protein CBG09544
  misc_feature (49)..(136): NCBI GI NO: 39593284 NR Description: Hypothetical protein CBG09544
  misc_feature (72)..(218): NCBI GI NO: 3929338 NR Description: Calcineurin B subunit
WFHFLCHVQIGNSITPRPRPRPRRPRPESSLRPAPAISSTAVVSGPAEMGSTSSMLIQYDIEEVQDHCNHAFSQQEIVSLYHRFCQLDRNGGGFVSADEFMSVPEFAVNPLSQRLLRMLDGLNFKEFVAFLSAFSPRTSLQEKIEFIFRVYDTDCNGKVAFDDILSILRDLTGSFMTEQQRQKVLTHVLEEAGYTKNSHFTLPDFMKIIGNSELKMEVEVPID

SEQ ID NO: 37583 - protein, 175 aa, Zea mays subsp. mays
  peptide (1)..(175): Ceres Seq. ID no. 12355356
  misc_feature (31)..(59): Pfam Name: Pfam Description:  EF hand
  misc_feature (1)..(175): NCBI GI NO: 16550928 NR Description: calcineurin-like protein [Eucalyptus grandis]
  misc_feature (1)..(175): NCBI GI NO: 18401887 NR Description: expressed protein; protein id: At3g18430
  misc_feature (1)..(175): NCBI GI NO: 21592761 NR Description: calcineurin-like protein [Arabidopsis thaliana]
  misc_feature (1)..(172): NCBI GI NO: 1168750 NR Description: Calcineurin B subunit
  misc_feature (1)..(165): NCBI GI NO: 13445166 NR Description: calcineurin B [Dictyostelium discoideum]
  misc_feature (74)..(172): NCBI GI NO: 17566934 NR Description: Calcium binding protein P22 like family member
  misc_feature (1)..(88): NCBI GI NO: 17566934 NR Description: Calcium binding protein P22 like family member
  misc_feature (74)..(172): NCBI GI NO: 39593284 NR Description: Hypothetical protein CBG09544
  misc_feature (1)..(88): NCBI GI NO: 39593284 NR Description: Hypothetical protein CBG09544
  misc_feature (24)..(170): NCBI GI NO: 3929338 NR Description: Calcineurin B subunit
MGSTSSMLIQYDIEEVQDHCNHAFSQQEIVSLYHRFCQLDRNGGGFVSADEFMSVPEFAVNPLSQRLLRMLDGLNFKEFVAFLSAFSPRTSLQEKIEFIFRVYDTDCNGKVAFDDILSILRDLTGSFMTEQQRQKVLTHVLEEAGYTKNSHFTLPDFMKIIGNSELKMEVEVPID

SEQ ID NO: 37584 - protein, 169 aa, Zea mays subsp. mays
  peptide (1)..(169): Ceres Seq. ID no. 12355357
  misc_feature (25)..(53): Pfam Name: Pfam Description:  EF hand
  misc_feature (1)..(169): NCBI GI NO: 16550928 NR Description: calcineurin-like protein [Eucalyptus grandis]
  misc_feature (1)..(169): NCBI GI NO: 18401887 NR Description: expressed protein; protein id: At3g18430
  misc_feature (1)..(169): NCBI GI NO: 21592761 NR Description: calcineurin-like protein [Arabidopsis thaliana]
  misc_feature (1)..(166): NCBI GI NO: 1168750 NR Description: Calcineurin B subunit
  misc_feature (1)..(159): NCBI GI NO: 13445166 NR Description: calcineurin B [Dictyostelium discoideum]
  misc_feature (68)..(166): NCBI GI NO: 17566934 NR Description: Calcium binding protein P22 like family member
  misc_feature (1)..(82): NCBI GI NO: 17566934 NR Description: Calcium binding protein P22 like family member
  misc_feature (68)..(166): NCBI GI NO: 39593284 NR Description: Hypothetical protein CBG09544
  misc_feature (1)..(82): NCBI GI NO: 39593284 NR Description: Hypothetical protein CBG09544
  misc_feature (18)..(164): NCBI GI NO: 3929338 NR Description: Calcineurin B subunit
MLIQYDIEEVQDHCNHAFSQQEIVSLYHRFCQLDRNGGGFVSADEFMSVPEFAVNPLSQRLLRMLDGLNFKEFVAFLSAFSPRTSLQEKIEFIFRVYDTDCNGKVAFDDILSILRDLTGSFMTEQQRQKVLTHVLEEAGYTKNSHFTLPDFMKIIGNSELKMEVEVPID

SEQ ID NO: 37585 - DNA, 777 bp, Zea mays subsp. mays
  misc_feature (1)..(777): Ceres Seq. ID no. 12360038
aaaacgcaaccgcagccgcagccacagcacagcacaacacgtcggcatgtatccgcccaaggccagcgatccggccgccggggcggcgccggtgactggcttccccgtcggcgggcctgccgcctcctcccagtggtcatccggcctgttggactgcttcgacgactgcggcctctgctgcctgacgtgctggtgcccgtgcatcacgttcgggcgcgtggcggagatcgtggaccgcggcgcgacgtcgtgcggcacggcgggggcgctgtacgcggtgctggcctacttcacgggctgccagtggatctactcgtgcacgtaccgcgccaagatgcgcgcccagctcggcctccccgagaccccctgctgcgactgcctcgtccacttctgctgcgagccgtgcgcgctctgccagcagtacaaggagctcaaggcccgcggcttcgaccccgacctcggctgggaacgcaacgccactatcactatgctgcctccgtccgcacaggggatggggcgctgaccgctgaccggccggccagcctctgcgtaaataaataattaatgcttatatatgtatgtacgtgtttctttcagccggaacaaaatctctatatatatgtcgtgtcaagatcagcatcgggccgtacgttcgtttttgtactgtgttccttgtgtcctccgttccgaataaacaataatatatatatatatatatatatatatatatgacatgtaatatttatatattgcttgcattggtggtgcaccaccttt

SEQ ID NO: 37586 - protein, 186 aa, Zea mays subsp. mays
  peptide (1)..(186): Ceres Seq. ID no. 12360039
  misc_feature (104)..(159): NCBI GI NO: 34897272 NR Description: hypothetical protein
  misc_feature (104)..(186): NCBI GI NO: 31249752 NR Description: hypothetical protein
KTQPQPQPQHSTTRRHVSAQGQRSGRRGGAGDWLPRRRACRLLPVVIRPVGLLRRLRPLLPDVLVPVHHVRARGGDRGPRRDVVRHGGGAVRGAGLLHGLPVDLLVHVPRQDARPARPPRDPLLRLPRPLLLRAVRALPAVQGAQGPRLRPRPRLGTQRHYHYAASVRTGDGALTADRPASLCVNK

SEQ ID NO: 37587 - protein, 173 aa, Zea mays subsp. mays
  peptide (1)..(173): Ceres Seq. ID no. 12360040
  misc_feature (41)..(145): Pfam Name: Pfam Description:  Protein of unknown function, DUF614
  misc_feature (28)..(173): NCBI GI NO: 34897274 NR Description: hypothetical protein
  misc_feature (28)..(173): NCBI GI NO: 34897270 NR Description: hypothetical protein
  misc_feature (39)..(173): NCBI GI NO: 34897268 NR Description: unknown protein
  misc_feature (24)..(104): NCBI GI NO: 34897272 NR Description: hypothetical protein
  misc_feature (39)..(158): NCBI GI NO: 15223920 NR Description: unknown protein; protein id: At1g14870
  misc_feature (16)..(104): NCBI GI NO: 31249752 NR Description: hypothetical protein
  misc_feature (35)..(168): NCBI GI NO: 15221456 NR Description: hypothetical protein; protein id: At1g68610.1
  misc_feature (16)..(173): NCBI GI NO: 27414005 NR Description: fw2.2 [Lycopersicon pimpinellifolium]
  misc_feature (44)..(171): NCBI GI NO: 15229654 NR Description: hypothetical protein; protein id: At3g18470
  misc_feature (16)..(173): NCBI GI NO: 8272626 NR Description: ORFX [Lycopersicon esculentum]
KRNRSRSHSTAQHVGMYPPKASDPAAGAAPVTGFPVGGPAASSQWSSGLLDCFDDCGLCCLTCWCPCITFGRVAEIVDRGATSCGTAGALYAVLAYFTGCQWIYSCTYRAKMRAQLGLPETPCCDCLVHFCCEPCALCQQYKELKARGFDPDLGWERNATITMLPPSAQGMGR

SEQ ID NO: 37588 - protein, 158 aa, Zea mays subsp. mays
  peptide (1)..(158): Ceres Seq. ID no. 12360041
  misc_feature (26)..(130): Pfam Name: Pfam Description:  Protein of unknown function, DUF614
  misc_feature (13)..(158): NCBI GI NO: 34897274 NR Description: hypothetical protein
  misc_feature (13)..(158): NCBI GI NO: 34897270 NR Description: hypothetical protein
  misc_feature (24)..(158): NCBI GI NO: 34897268 NR Description: unknown protein
  misc_feature (9)..(89): NCBI GI NO: 34897272 NR Description: hypothetical protein
  misc_feature (24)..(143): NCBI GI NO: 15223920 NR Description: unknown protein; protein id: At1g14870
  misc_feature (1)..(89): NCBI GI NO: 31249752 NR Description: hypothetical protein
  misc_feature (20)..(153): NCBI GI NO: 15221456 NR Description: hypothetical protein; protein id: At1g68610.1
  misc_feature (1)..(158): NCBI GI NO: 27414005 NR Description: fw2.2 [Lycopersicon pimpinellifolium]
  misc_feature (29)..(156): NCBI GI NO: 15229654 NR Description: hypothetical protein; protein id: At3g18470
  misc_feature (1)..(158): NCBI GI NO: 8272626 NR Description: ORFX [Lycopersicon esculentum]
MYPPKASDPAAGAAPVTGFPVGGPAASSQWSSGLLDCFDDCGLCCLTCWCPCITFGRVAEIVDRGATSCGTAGALYAVLAYFTGCQWIYSCTYRAKMRAQLGLPETPCCDCLVHFCCEPCALCQQYKELKARGFDPDLGWERNATITMLPPSAQGMGR

SEQ ID NO: 37589 - DNA, 936 bp, Zea mays subsp. mays
  misc_feature (1)..(936): Ceres Seq. ID no. 12408110
atctaaaaaacacctagcggaaaaagaaaaggaaaaaagtcgcccctccgttgggacctaattcacgcgtttcagggctcctcccatttcgtcggcttcgtttgtcgtcgtcgtaagctgcagctagtgtggactggagatccaccactccaccagtccggtccatctgctggacctcgattggtttcttcttacctaggaacatccggggatgtcgactcctgcgaggaagaggctgatgagggatttcaagcggttgatgcaggaccctccggccggcataagtggcgccccgcaggataacaacataatgctgtggaatgctgtcatatttggacctgatgataccccgtgggatggaggtacgtttaagctgactctccagtttaatgaagaatatccaaacaaaccaccaactgtgcgatttgtttctaggatgttccatcctaacatttatgctgatggaagcatatgcttagatatcctgcagaatcagtggagtccgatatatgatgtagctgcgatactcacgtcaatccagtcattgttgtgcgatccaaacccgaattcgcccgctaactctgaagccgcccgcatgttcagcgagaacaagcgagagtacaaccgcaaagttcgggaggtcgtggagcagagctggacggcggactgatgatgccctgtgttgcgtcgcgctgtgctgcgcagctgctcactgcgccccgcgtccgtccattccataccaaaaaaagaaaatggcaaagccgaactcagctgttgctgctttcgttgccctgtgtcaagacgactgcttctctatgaacattttaccttcctgtgctgtatctggaatacaaacttaattatctctagcactgtggcaacatcttatcttatatgaaatttcctccgggaaaacgagaatgatttgcttgggtg

SEQ ID NO: 37590 - protein, 152 aa, Zea mays subsp. mays
  peptide (1)..(152): Ceres Seq. ID no. 12408111
  misc_feature (1)..(152): NCBI GI NO: 8118527 NR Description: ubiquitin conjugating protein [Avicennia marina]
  misc_feature (1)..(152): NCBI GI NO: 13516451 NR Description: ubiquitin-conjugating enzyme (E2)
  misc_feature (1)..(152): NCBI GI NO: 33146810 NR Description: OsRad6 [Oryza sativa (japonica cultivar-group)]
  misc_feature (1)..(152): NCBI GI NO: 464980 NR Description: Ubiquitin-conjugating enzyme E2-17 kDa
  misc_feature (1)..(152): NCBI GI NO: 18395424 NR Description: E2, ubiquitin-conjugating enzyme 2
  misc_feature (1)..(152): NCBI GI NO: 13516453 NR Description: ubiquitin-conjugating enzyme (E2)
  misc_feature (1)..(152): NCBI GI NO: 136640 NR Description: Ubiquitin-conjugating enzyme E2-17 kDa
  misc_feature (1)..(152): NCBI GI NO: 18844990 NR Description: Rad6 [Oryza sativa (japonica cultivar-group)]
  misc_feature (1)..(152): NCBI GI NO: 18394114 NR Description: E2, ubiquitin-conjugating enzyme 1
  misc_feature (1)..(149): NCBI GI NO: 18424601 NR Description: E2, ubiquitin-conjugating enzyme 3
MSTPARKRLMRDFKRLMQDPPAGISGAPQDNNIMLWNAVIFGPDDTPWDGGTFKLTLQFNEEYPNKPPTVRFVSRMFHPNIYADGSICLDILQNQWSPIYDVAAILTSIQSLLCDPNPNSPANSEAARMFSENKREYNRKVREVVEQSWTAD

SEQ ID NO: 37591 - protein, 143 aa, Zea mays subsp. mays
  peptide (1)..(143): Ceres Seq. ID no. 12408112
  misc_feature (1)..(143): NCBI GI NO: 8118527 NR Description: ubiquitin conjugating protein [Avicennia marina]
  misc_feature (1)..(143): NCBI GI NO: 13516451 NR Description: ubiquitin-conjugating enzyme (E2)
  misc_feature (1)..(143): NCBI GI NO: 33146810 NR Description: OsRad6 [Oryza sativa (japonica cultivar-group)]
  misc_feature (1)..(143): NCBI GI NO: 464980 NR Description: Ubiquitin-conjugating enzyme E2-17 kDa
  misc_feature (1)..(143): NCBI GI NO: 13516453 NR Description: ubiquitin-conjugating enzyme (E2)
  misc_feature (1)..(143): NCBI GI NO: 18395424 NR Description: E2, ubiquitin-conjugating enzyme 2
  misc_feature (1)..(143): NCBI GI NO: 136640 NR Description: Ubiquitin-conjugating enzyme E2-17 kDa
  misc_feature (1)..(143): NCBI GI NO: 18844990 NR Description: Rad6 [Oryza sativa (japonica cultivar-group)]
  misc_feature (1)..(143): NCBI GI NO: 18394114 NR Description: E2, ubiquitin-conjugating enzyme 1
  misc_feature (1)..(140): NCBI GI NO: 18424601 NR Description: E2, ubiquitin-conjugating enzyme 3
MRDFKRLMQDPPAGISGAPQDNNIMLWNAVIFGPDDTPWDGGTFKLTLQFNEEYPNKPPTVRFVSRMFHPNIYADGSICLDILQNQWSPIYDVAAILTSIQSLLCDPNPNSPANSEAARMFSENKREYNRKVREVVEQSWTAD

SEQ ID NO: 37592 - protein, 136 aa, Zea mays subsp. mays
  peptide (1)..(136): Ceres Seq. ID no. 12408113
  misc_feature (1)..(136): NCBI GI NO: 8118527 NR Description: ubiquitin conjugating protein [Avicennia marina]
  misc_feature (1)..(136): NCBI GI NO: 13516451 NR Description: ubiquitin-conjugating enzyme (E2)
  misc_feature (1)..(136): NCBI GI NO: 33146810 NR Description: OsRad6 [Oryza sativa (japonica cultivar-group)]
  misc_feature (1)..(136): NCBI GI NO: 464980 NR Description: Ubiquitin-conjugating enzyme E2-17 kDa
  misc_feature (1)..(136): NCBI GI NO: 13516453 NR Description: ubiquitin-conjugating enzyme (E2)
  misc_feature (1)..(136): NCBI GI NO: 18395424 NR Description: E2, ubiquitin-conjugating enzyme 2
  misc_feature (1)..(136): NCBI GI NO: 136640 NR Description: Ubiquitin-conjugating enzyme E2-17 kDa
  misc_feature (1)..(136): NCBI GI NO: 18844990 NR Description: Rad6 [Oryza sativa (japonica cultivar-group)]
  misc_feature (1)..(136): NCBI GI NO: 18394114 NR Description: E2, ubiquitin-conjugating enzyme 1
  misc_feature (1)..(133): NCBI GI NO: 18424601 NR Description: E2, ubiquitin-conjugating enzyme 3
MQDPPAGISGAPQDNNIMLWNAVIFGPDDTPWDGGTFKLTLQFNEEYPNKPPTVRFVSRMFHPNIYADGSICLDILQNQWSPIYDVAAILTSIQSLLCDPNPNSPANSEAARMFSENKREYNRKVREVVEQSWTAD

SEQ ID NO: 37593 - DNA, 1129 bp, Zea mays subsp. mays
  misc_feature (1)..(1129): Ceres Seq. ID no. 12366033
gcacgagaccattacctagaacatcctaatcgaaaaacaccgatcctcccagctgcatctgcattgcattgcatgcacaggtcgcgcccaccatcagtagcggtcgccgccatgcagagactcgtgcgcgtcctcgtggtgctgggcgtggccgccgcggcgtcggcgcaaggcccgacggcggcgccaacgacgcccacgcccacgccggcaacccccgcggcgcccgcgcccacgacggcgtccagcaacatcacgggcgtgctggccaaggccgggcagttcaacaccttcatccggctgctcaagtccacgggcgtggcgtcgcagatcgacaaccaggtcgccaacggcgggaacggggtcacggtgttcgcgcccacggacaacgcgttccagtcgctgccctcgggcacgctcaactcgctgtcggaccaggacaagaacgcgctggtgcagtaccacgtggtgtccgccgccatccccatgtcgcagttcgacaccgtcagcaacccgctccgcacgcaggccggcagcgcctcgccgggggagttcccactcaacgtcacctcctccgagggccagcaggtcaacgtcaccacgggcgtcgtcaccgccaccgtcgacaactccctctactcgggcgacagcctcgtcgtctaccaggtcaacaaggtgctgctccccatgaagctcttcggcgccgcggatgcgcccgcgcccgcgccgctcgcgccggccaagaagaagggcaagacgccggcggccgtcgctcgactcgcccgacgcggcggaggcgtccccggacgccacgaccacgtcgctcgcgcccgcgaggctgacggcggggtggcctcgccacggctcttgcgctcgccgtcgtgtggtgggggctgtagtcacggcgaggagtgtctcgtgaggtctctccggtggccgtgacatctatacattttttttttcgttcgcgggtcttgtttgtcttttcgtttttactttattgcccatttttggatgaattgttcttccctgtcattcaaattgctaggagtatgtcatgtcatgtaacgtccttgtcccatttttatgtaattttaactaaataaatatgagttgtgtatatttcagt

SEQ ID NO: 37594 - protein, 313 aa, Zea mays subsp. mays
  peptide (1)..(313): Ceres Seq. ID no. 12366034
  misc_feature (82)..(229): Pfam Name: Pfam Description:  Fasciclin domain
  misc_feature (50)..(284): NCBI GI NO: 34896012 NR Description: EST D25138
  misc_feature (75)..(243): NCBI GI NO: 15242651 NR Description: fasciclin-like arabinogalactan-protein
  misc_feature (75)..(243): NCBI GI NO: 21553523 NR Description: arabinogalactan protein-like
  misc_feature (64)..(258): NCBI GI NO: 30841338 NR Description: arabinogalactan protein [Gossypium hirsutum]
  misc_feature (60)..(252): NCBI GI NO: 21553590 NR Description: arabinogalactan protein-like
  misc_feature (64)..(252): NCBI GI NO: 15239344 NR Description: fasciclin-like arabinogalactan-protein
  misc_feature (64)..(252): NCBI GI NO: 15294288 NR Description: AT5g60490/muf9_140 [Arabidopsis thaliana]
  misc_feature (47)..(258): NCBI GI NO: 2129473 NR Description: arabinogalactan-like protein - loblolly pine
  misc_feature (38)..(285): NCBI GI NO: 34910950 NR Description: putative arabinogalactan-like protein
  misc_feature (63)..(267): NCBI GI NO: 5919185 NR Description: arabinogalactan protein Pop14A9
ARDHYLEHPNRKTPILPAASALHCMHRSRPPSVAVAAMQRLVRVLVVLGVAAAASAQGPTAAPTTPTPTPATPAAPAPTTASSNITGVLAKAGQFNTFIRLLKSTGVASQIDNQVANGGNGVTVFAPTDNAFQSLPSGTLNSLSDQDKNALVQYHVVSAAIPMSQFDTVSNPLRTQAGSASPGEFPLNVTSSEGQQVNVTTGVVTATVDNSLYSGDSLVVYQVNKVLLPMKLFGAADAPAPAPLAPAKKKGKTPAAVARLARRGGGVPGRHDHVARAREADGGVASPRLLRSPSCGGGCSHGEECLVRSLRWP

SEQ ID NO: 37595 - protein, 289 aa, Zea mays subsp. mays
  peptide (1)..(289): Ceres Seq. ID no. 12366035
  misc_feature (58)..(205): Pfam Name: Pfam Description:  Fasciclin domain
  misc_feature (26)..(260): NCBI GI NO: 34896012 NR Description: EST D25138
  misc_feature (51)..(219): NCBI GI NO: 15242651 NR Description: fasciclin-like arabinogalactan-protein
  misc_feature (51)..(219): NCBI GI NO: 21553523 NR Description: arabinogalactan protein-like
  misc_feature (40)..(234): NCBI GI NO: 30841338 NR Description: arabinogalactan protein [Gossypium hirsutum]
  misc_feature (36)..(228): NCBI GI NO: 21553590 NR Description: arabinogalactan protein-like
  misc_feature (40)..(228): NCBI GI NO: 15239344 NR Description: fasciclin-like arabinogalactan-protein
  misc_feature (40)..(228): NCBI GI NO: 15294288 NR Description: AT5g60490/muf9_140 [Arabidopsis thaliana]
  misc_feature (23)..(234): NCBI GI NO: 2129473 NR Description: arabinogalactan-like protein - loblolly pine
  misc_feature (14)..(261): NCBI GI NO: 34910950 NR Description: putative arabinogalactan-like protein
  misc_feature (39)..(243): NCBI GI NO: 5919185 NR Description: arabinogalactan protein Pop14A9
MHRSRPPSVAVAAMQRLVRVLVVLGVAAAASAQGPTAAPTTPTPTPATPAAPAPTTASSNITGVLAKAGQFNTFIRLLKSTGVASQIDNQVANGGNGVTVFAPTDNAFQSLPSGTLNSLSDQDKNALVQYHVVSAAIPMSQFDTVSNPLRTQAGSASPGEFPLNVTSSEGQQVNVTTGVVTATVDNSLYSGDSLVVYQVNKVLLPMKLFGAADAPAPAPLAPAKKKGKTPAAVARLARRGGGVPGRHDHVARAREADGGVASPRLLRSPSCGGGCSHGEECLVRSLRWP

SEQ ID NO: 37596 - protein, 276 aa, Zea mays subsp. mays
  peptide (1)..(276): Ceres Seq. ID no. 12366036
  misc_feature (45)..(192): Pfam Name: Pfam Description:  Fasciclin domain
  misc_feature (13)..(247): NCBI GI NO: 34896012 NR Description: EST D25138
  misc_feature (38)..(206): NCBI GI NO: 15242651 NR Description: fasciclin-like arabinogalactan-protein
  misc_feature (38)..(206): NCBI GI NO: 21553523 NR Description: arabinogalactan protein-like
  misc_feature (27)..(221): NCBI GI NO: 30841338 NR Description: arabinogalactan protein [Gossypium hirsutum]
  misc_feature (23)..(215): NCBI GI NO: 21553590 NR Description: arabinogalactan protein-like
  misc_feature (27)..(215): NCBI GI NO: 15239344 NR Description: fasciclin-like arabinogalactan-protein
  misc_feature (27)..(215): NCBI GI NO: 15294288 NR Description: AT5g60490/muf9_140 [Arabidopsis thaliana]
  misc_feature (10)..(221): NCBI GI NO: 2129473 NR Description: arabinogalactan-like protein - loblolly pine
  misc_feature (1)..(248): NCBI GI NO: 34910950 NR Description: putative arabinogalactan-like protein
  misc_feature (26)..(230): NCBI GI NO: 5919185 NR Description: arabinogalactan protein Pop14A9
MQRLVRVLVVLGVAAAASAQGPTAAPTTPTPTPATPAAPAPTTASSNITGVLAKAGQFNTFIRLLKSTGVASQIDNQVANGGNGVTVFAPTDNAFQSLPSGTLNSLSDQDKNALVQYHVVSAAIPMSQFDTVSNPLRTQAGSASPGEFPLNVTSSEGQQVNVTTGVVTATVDNSLYSGDSLVVYQVNKVLLPMKLFGAADAPAPAPLAPAKKKGKTPAAVARLARRGGGVPGRHDHVARAREADGGVASPRLLRSPSCGGGCSHGEECLVRSLRWP

SEQ ID NO: 37597 - DNA, 1452 bp, Zea mays subsp. mays
  misc_feature (1)..(1452): Ceres Seq. ID no. 12406744
tccccgcgcgcccgcgcgcgagctcgttcgtgcgcggccgccggcgttggcgacgacgaccgaggagccatggcggccaagggcggcgccacgccgtcccccggcggcacggggcccgcggcggggaacggccgcctcttcacggtggggctagtcacggcctggtactcctccaacatcggcgtgctcctgctcaacaagtacctcctcagcaactacggcttcaagtaccccatcttcctcaccatgtgccacatgtccgcctgcgccctgctctcctacgccgccatcgcctggctgcgcgtcgtgcccatgcagctcgtgcgctcccgcgtccagctcgccaagatcgccgcgctcagcctcgtcttctgcggctccgtcgtctccgggaacgtctcgctgcgctacctccccgtgtccttcaaccaggccgtcggcgccaccacgcccttctttaccgccgtcttcgcgtacatcatgaccgtcaagcgcgagtcgtggatcacctacctcaccctcgtgcccgtcgttactggagtcatcatcgccagcggcggcgagcctagctttcatctgtttggattcatcatgtgcataggagcaactgcagcaagggcgttgaagacagtactgcaaggaattcttctgtcttctgatggggagaagcttaattctatgaatctgttattgtacatggctccaattgctgttattttcttgcttcctgcaactatctttatggaggataatgttgttggcatcacaattcagcttgcaaagaaggatttcacgattgtttggttgctactgttcaattcttgcttgtcatattttgtcaatttgaccaatttcttggtgaccaaacatactagcgcactgactctacaggttctcggaaatgcaaagggtgccgtggcagtcgtcatctcaatcatgatattcaggaatcctgtgtccataacaggaatgctcggttacactctcacagtttttggcgtcattctttacagtgaatccaaaaagcgcagcaacaagccgtgaccaccctagaagacagtaaatacggccatcatttctttgtcctgccagcgcctagagctaatatatgatgagaaactacaccggtggcgatcacaacaaacccaatgccgtaccgcctcagcaattggacatcaagggtagaagtccaataatacctgtagtattaaattggcatgtacgaggcattttttttaatggcattgatggatagaatacatatattttttgtgttagagaagtgtggctcagactgccagcattggttagtacgtttagctcttgggatattgcctcttctattcatcggctactgtaacttctattttcttttgttctgaagactacctgtaccagactttgatccaggttccagggcctaattaatatattgacactgaatttaagctt

SEQ ID NO: 37598 - protein, 347 aa, Zea mays subsp. mays
  peptide (1)..(347): Ceres Seq. ID no. 12406745
  misc_feature (62)..(185): Pfam Name: Pfam Description:  Integral membrane protein DUF6
  misc_feature (24)..(347): NCBI GI NO: 27476065 NR Description: Putative phosphate/phosphoenolpyruvate translocatorprotein
  misc_feature (41)..(346): NCBI GI NO: 9759107 NR Description: phosphate/phosphoenolpyruvate translocator protein-like
  misc_feature (41)..(346): NCBI GI NO: 30681126 NR Description: phosphate translocator-related
  misc_feature (46)..(343): NCBI GI NO: 15237644 NR Description: phosphate/phosphoenolpyruvate translocator
  misc_feature (46)..(343): NCBI GI NO: 17064798 NR Description: phosphate/phosphoenolpyruvate translocator-like
  misc_feature (46)..(343): NCBI GI NO: 15228248 NR Description: unknown protein; protein id: At3g10290.1
  misc_feature (46)..(344): NCBI GI NO: 15221371 NR Description: hypothetical protein; protein id: At1g12500.1
  misc_feature (188)..(344): NCBI GI NO: 15229717 NR Description: integral membrane protein, putative
  misc_feature (41)..(296): NCBI GI NO: 15229717 NR Description: integral membrane protein, putative
  misc_feature (35)..(337): NCBI GI NO: 38567832 NR Description: OSJNBb0020J19.10
SPRARARARSCAAAGVGDDDRGAMAAKGGATPSPGGTGPAAGNGRLFTVGLVTAWYSSNIGVLLLNKYLLSNYGFKYPIFLTMCHMSACALLSYAAIAWLRVVPMQLVRSRVQLAKIAALSLVFCGSVVSGNVSLRYLPVSFNQAVGATTPFFTAVFAYIMTVKRESWITYLTLVPVVTGVIIASGGEPSFHLFGFIMCIGATAARALKTVLQGILLSSDGEKLNSMNLLLYMAPIAVIFLLPATIFMEDNVVGITIQLAKKDFTIVWLLLFNSCLSYFVNLTNFLVTKHTSALTLQVLGNAKGAVAVVISIMIFRNPVSITGMLGYTLTVFGVILYSESKKRSNKP

SEQ ID NO: 37599 - protein, 324 aa, Zea mays subsp. mays
  peptide (1)..(324): Ceres Seq. ID no. 12406746
  misc_feature (39)..(162): Pfam Name: Pfam Description:  Integral membrane protein DUF6
  misc_feature (1)..(324): NCBI GI NO: 27476065 NR Description: Putative phosphate/phosphoenolpyruvate translocatorprotein
  misc_feature (18)..(323): NCBI GI NO: 9759107 NR Description: phosphate/phosphoenolpyruvate translocator protein-like
  misc_feature (18)..(323): NCBI GI NO: 30681126 NR Description: phosphate translocator-related
  misc_feature (23)..(320): NCBI GI NO: 15237644 NR Description: phosphate/phosphoenolpyruvate translocator
  misc_feature (23)..(320): NCBI GI NO: 17064798 NR Description: phosphate/phosphoenolpyruvate translocator-like
  misc_feature (23)..(320): NCBI GI NO: 15228248 NR Description: unknown protein; protein id: At3g10290.1
  misc_feature (23)..(321): NCBI GI NO: 15221371 NR Description: hypothetical protein; protein id: At1g12500.1
  misc_feature (165)..(321): NCBI GI NO: 15229717 NR Description: integral membrane protein, putative
  misc_feature (18)..(273): NCBI GI NO: 15229717 NR Description: integral membrane protein, putative
  misc_feature (12)..(314): NCBI GI NO: 38567832 NR Description: OSJNBb0020J19.10
MAAKGGATPSPGGTGPAAGNGRLFTVGLVTAWYSSNIGVLLLNKYLLSNYGFKYPIFLTMCHMSACALLSYAAIAWLRVVPMQLVRSRVQLAKIAALSLVFCGSVVSGNVSLRYLPVSFNQAVGATTPFFTAVFAYIMTVKRESWITYLTLVPVVTGVIIASGGEPSFHLFGFIMCIGATAARALKTVLQGILLSSDGEKLNSMNLLLYMAPIAVIFLLPATIFMEDNVVGITIQLAKKDFTIVWLLLFNSCLSYFVNLTNFLVTKHTSALTLQVLGNAKGAVAVVISIMIFRNPVSITGMLGYTLTVFGVILYSESKKRSNKP

SEQ ID NO: 37600 - protein, 265 aa, Zea mays subsp. mays
  peptide (1)..(265): Ceres Seq. ID no. 12406747
  misc_feature (1)..(103): Pfam Name: Pfam Description:  Integral membrane protein DUF6
  misc_feature (1)..(265): NCBI GI NO: 27476065 NR Description: Putative phosphate/phosphoenolpyruvate translocatorprotein
  misc_feature (1)..(264): NCBI GI NO: 9759107 NR Description: phosphate/phosphoenolpyruvate translocator protein-like
  misc_feature (1)..(264): NCBI GI NO: 30681126 NR Description: phosphate translocator-related
  misc_feature (1)..(261): NCBI GI NO: 15237644 NR Description: phosphate/phosphoenolpyruvate translocator
  misc_feature (1)..(261): NCBI GI NO: 17064798 NR Description: phosphate/phosphoenolpyruvate translocator-like
  misc_feature (1)..(261): NCBI GI NO: 15228248 NR Description: unknown protein; protein id: At3g10290.1
  misc_feature (1)..(262): NCBI GI NO: 15221371 NR Description: hypothetical protein; protein id: At1g12500.1
  misc_feature (106)..(262): NCBI GI NO: 15229717 NR Description: integral membrane protein, putative
  misc_feature (1)..(214): NCBI GI NO: 15229717 NR Description: integral membrane protein, putative
  misc_feature (1)..(255): NCBI GI NO: 38567832 NR Description: OSJNBb0020J19.10
MCHMSACALLSYAAIAWLRVVPMQLVRSRVQLAKIAALSLVFCGSVVSGNVSLRYLPVSFNQAVGATTPFFTAVFAYIMTVKRESWITYLTLVPVVTGVIIASGGEPSFHLFGFIMCIGATAARALKTVLQGILLSSDGEKLNSMNLLLYMAPIAVIFLLPATIFMEDNVVGITIQLAKKDFTIVWLLLFNSCLSYFVNLTNFLVTKHTSALTLQVLGNAKGAVAVVISIMIFRNPVSITGMLGYTLTVFGVILYSESKKRSNKP

SEQ ID NO: 37601 - DNA, 1745 bp, Zea mays subsp. mays
  misc_feature (1)..(1745): Ceres Seq. ID no. 12369474
gcacgagaccattacctagaacatcctaatcgaaaaattccattccctgcgctagcccggcgcccgctcgccctgcctgccactcccgccgcgtgctgcctaccagcaggccaggccaggcacccctgccctgtccgccaccagcacaaccgcgtgcgccggtccggtcggtgcatgccaggatggagaccccttcgtcgacgtgcgacgagggctccgagctcgacgcgcgctcgcactccgactacgccgacttcgacgacctggacctcccgccgcggggccgccaccgccgggaaccgtcctccgacgcgtcctccgagtgcagcggggagcccgggagcccgtacgcctcctcgccgtacccgcgctggccggtgtgcacgcttcctgcgagggtgccgccgccggccgcgccgctgctcaagaggctcggcacgacgcggcgcggcgcccgtgtcggcgcgtgtgacgggaaggccggcgacggcgagctgcagctgatcaaggagaggttctccaagcttctcttgggcgaggacatgtcggggagcggcaagggggtctcgacctccgtggccatctccaacgccatcaccaacctctacgcgactgtctttgggagctgccacaggctgaagcccctgccgccggagaagaagtccatgtggcggcgggagatggactgcctcctctccgtctgcgactacatcgttgagttcttcccttccaaggagatcttgcccgacggcagcatacgagaggtgatggcgacccgaccgcgatccgacatctacgtcaacctccccgccctcgagaagctggacgacatgttgctcgagattctgtacagctttcagaagactgaattctggtacgtcaatgacaaagggcagaaagacgattccgtcgcgacgccgtgccgtccggtgagccaccgcggcgaggagaagtggtggctgcccgtgccgtgcgtcgccaagcccgggctgacggagacggcgcggcgagacctgcagcagaagcgcgactgcgcgagccagatccacaaggcggccatggccatcaacaatgccgttcttgcggagatacggatccccgacctgtacaaggaagcactacccaagtgcgggcgtgccagcgtgggggatctgatctatcggcacatgtcgttcccgggcaagttctcgccggagtacctgctggactgcctggagatctcgtcggagcacgaggccctggaggcggcggaccgcgtggaggccgcgatgcacgtgtggcggctgaaggcgagccagaggtcaccctggatcgcggtcaaggacctgatggagtccgacaagaacgtgatgctggcgagacgcgccgaggacgtgctgctctgcctcaagcagcggttccccggcctctcgcagaccacgctcgacgccagcaagatccagtacaacaaggatgttgggcaagcaatactagagagctattcgagggtgctggagagcctagcgtacaacatcgtaacatgtgtagatgacgttctcttcgcagatgaagccgccagaaagatagcatgagtgatcatttgttcatccttcctgcctgatccgggaaaccaaaaaataaggggtccatgtccatgatccatccacagaatgtacattatgccataacttgtagcagtagtaccatctaccaatggatgatagcacgagcagttaactcatctaggcagccatgtcttggttttc

SEQ ID NO: 37602 - protein, 462 aa, Zea mays subsp. mays
  peptide (1)..(462): Ceres Seq. ID no. 12369475
  misc_feature (6)..(460): Pfam Name: DUF315 Pfam Description: Domain of unknown function
  misc_feature (1)..(461): NCBI GI NO: 38345761 NR Description: OSJNBa0065O17.14
  misc_feature (1)..(460): NCBI GI NO: 37536670 NR Description: hypothetical protein
  misc_feature (42)..(460): NCBI GI NO: 33146611 NR Description: hypothetical protein
  misc_feature (42)..(460): NCBI GI NO: 34901740 NR Description: P0434A03.36
  misc_feature (104)..(459): NCBI GI NO: 15236138 NR Description: putative protein; protein id: At4g00460.1
  misc_feature (104)..(459): NCBI GI NO: 15223455 NR Description: hypothetical protein; protein id: At1g01700.1
  misc_feature (206)..(459): NCBI GI NO: 25349309 NR Description: hypothetical protein T1N6.8 - Arabidopsis thaliana
  misc_feature (104)..(221): NCBI GI NO: 25349309 NR Description: hypothetical protein T1N6.8 - Arabidopsis thaliana
  misc_feature (34)..(459): NCBI GI NO: 34908302 NR Description: P0005H10.23
  misc_feature (104)..(459): NCBI GI NO: 15241663 NR Description: putative protein; protein id: At5g02010.1
METPSSTCDEGSELDARSHSDYADFDDLDLPPRGRHRREPSSDASSECSGEPGSPYASSPYPRWPVCTLPARVPPPAAPLLKRLGTTRRGARVGACDGKAGDGELQLIKERFSKLLLGEDMSGSGKGVSTSVAISNAITNLYATVFGSCHRLKPLPPEKKSMWRREMDCLLSVCDYIVEFFPSKEILPDGSIREVMATRPRSDIYVNLPALEKLDDMLLEILYSFQKTEFWYVNDKGQKDDSVATPCRPVSHRGEEKWWLPVPCVAKPGLTETARRDLQQKRDCASQIHKAAMAINNAVLAEIRIPDLYKEALPKCGRASVGDLIYRHMSFPGKFSPEYLLDCLEISSEHEALEAADRVEAAMHVWRLKASQRSPWIAVKDLMESDKNVMLARRAEDVLLCLKQRFPGLSQTTLDASKIQYNKDVGQAILESYSRVLESLAYNIVTCVDDVLFADEAARKIA

SEQ ID NO: 37603 - protein, 342 aa, Zea mays subsp. mays
  peptide (1)..(342): Ceres Seq. ID no. 12369476
  misc_feature (1)..(340): Pfam Name: DUF315 Pfam Description: Domain of unknown function
  misc_feature (1)..(341): NCBI GI NO: 38345761 NR Description: OSJNBa0065O17.14
  misc_feature (1)..(340): NCBI GI NO: 37536670 NR Description: hypothetical protein
  misc_feature (1)..(340): NCBI GI NO: 33146611 NR Description: hypothetical protein
  misc_feature (1)..(340): NCBI GI NO: 34901740 NR Description: P0434A03.36
  misc_feature (1)..(339): NCBI GI NO: 15236138 NR Description: putative protein; protein id: At4g00460.1
  misc_feature (1)..(339): NCBI GI NO: 15223455 NR Description: hypothetical protein; protein id: At1g01700.1
  misc_feature (86)..(339): NCBI GI NO: 25349309 NR Description: hypothetical protein T1N6.8 - Arabidopsis thaliana
  misc_feature (1)..(101): NCBI GI NO: 25349309 NR Description: hypothetical protein T1N6.8 - Arabidopsis thaliana
  misc_feature (1)..(339): NCBI GI NO: 34908302 NR Description: P0005H10.23
  misc_feature (1)..(339): NCBI GI NO: 15241663 NR Description: putative protein; protein id: At5g02010.1
MSGSGKGVSTSVAISNAITNLYATVFGSCHRLKPLPPEKKSMWRREMDCLLSVCDYIVEFFPSKEILPDGSIREVMATRPRSDIYVNLPALEKLDDMLLEILYSFQKTEFWYVNDKGQKDDSVATPCRPVSHRGEEKWWLPVPCVAKPGLTETARRDLQQKRDCASQIHKAAMAINNAVLAEIRIPDLYKEALPKCGRASVGDLIYRHMSFPGKFSPEYLLDCLEISSEHEALEAADRVEAAMHVWRLKASQRSPWIAVKDLMESDKNVMLARRAEDVLLCLKQRFPGLSQTTLDASKIQYNKDVGQAILESYSRVLESLAYNIVTCVDDVLFADEAARKIA

SEQ ID NO: 37604 - protein, 301 aa, Zea mays subsp. mays
  peptide (1)..(301): Ceres Seq. ID no. 12369477
  misc_feature (1)..(299): Pfam Name: DUF315 Pfam Description: Domain of unknown function
  misc_feature (1)..(300): NCBI GI NO: 38345761 NR Description: OSJNBa0065O17.14
  misc_feature (1)..(299): NCBI GI NO: 37536670 NR Description: hypothetical protein
  misc_feature (1)..(299): NCBI GI NO: 33146611 NR Description: hypothetical protein
  misc_feature (1)..(299): NCBI GI NO: 34901740 NR Description: P0434A03.36
  misc_feature (1)..(298): NCBI GI NO: 15236138 NR Description: putative protein; protein id: At4g00460.1
  misc_feature (1)..(298): NCBI GI NO: 15223455 NR Description: hypothetical protein; protein id: At1g01700.1
  misc_feature (45)..(298): NCBI GI NO: 25349309 NR Description: hypothetical protein T1N6.8 - Arabidopsis thaliana
  misc_feature (1)..(60): NCBI GI NO: 25349309 NR Description: hypothetical protein T1N6.8 - Arabidopsis thaliana
  misc_feature (1)..(298): NCBI GI NO: 34908302 NR Description: P0005H10.23
  misc_feature (1)..(298): NCBI GI NO: 15241663 NR Description: putative protein; protein id: At5g02010.1
MWRREMDCLLSVCDYIVEFFPSKEILPDGSIREVMATRPRSDIYVNLPALEKLDDMLLEILYSFQKTEFWYVNDKGQKDDSVATPCRPVSHRGEEKWWLPVPCVAKPGLTETARRDLQQKRDCASQIHKAAMAINNAVLAEIRIPDLYKEALPKCGRASVGDLIYRHMSFPGKFSPEYLLDCLEISSEHEALEAADRVEAAMHVWRLKASQRSPWIAVKDLMESDKNVMLARRAEDVLLCLKQRFPGLSQTTLDASKIQYNKDVGQAILESYSRVLESLAYNIVTCVDDVLFADEAARKIA

SEQ ID NO: 37605 - DNA, 1623 bp, Zea mays subsp. mays
  misc_feature (1)..(1623): Ceres Seq. ID no. 12362233
aagctcaccgctcactcacaagcacgctgcgaaacacagacgcagagacccgcgcacagatcgaagcggaggatgaaggtggaggtggtggagacgacgctggtgccgccgagcgaggcgacgccgcggcacgcgctgtggctgtccaacctggacctggcggtgcccaagacccacaccccgctcgtctactactacccgaggcccgccggcgccggcgccggggaggagggaaagggagagggagaagggtcgttcttcgacccggcgcgcctgcgggaggcgctgtccagggcgctggtgcccttctacccgctggcggggcggctggcggccggcccgggcggccggctcgagatcgactgcaccggcgagggcgcgctgttctgcgtcgcgcgggccgacttcaccggcgacgagatgttcgccgacttcgagccctcccccgaggcgcgccgcctgctcgtgccattcgccgcgtccggcgacccgccctgcgtgctcgccatggtccaggtgaccttcctcaagtgcggcggcgtggccgtgggcacgggcatgcaccacgtgacgatggacggcgccggcgcgatccagttcatccgggcgtggacggcgctggcgcgcggggaggcccccgcgtggacgccgtcgcacgaccggacgctcctgcgcgcgcgctccccgccgcacgtccccgcctgcgagcacccggtctactccccggcctacctcaacggggcgccgcggcccttcgtgacgcgcgtctacgccgtgccgcccaagctgctggcgggcatccggtcgcgctgcgcgccgggcgcgtccacgtactgcgcggtgacggcgcacctgtggcgcgccatgtgcgtcgcccggggcctcccggcgggcagcgacacgcggctgcgcgtcccggccaacgtccggcagcgcctgcgcccgccgctcccggcgtcctacttcggcaacgccatcgtgcgggacctggtcaccgtgcgggtggccgacgtgctgtcgcagccgctgggcttcgtggcggagcggatcaagcgcgcggtggcccgcgtcgacgacgcccgcgtgcgctccgtcgtcgactacctggagcttgagtcggacaagggcaaccaggcggcgcgcggccagttcatgcccgagtccgacctgtgggtcgtcagcttgctcggcatgcccatccacgacgccgacttcggctggggccgccccgggttcgtggcccccgcgcagatgttcggcagcggcacggcgtacgtcacgcagggacgcgacaaggacgaccccatcaacgtgctcttcgcgctcgagccagagtacctgaacaccttcgagaaggccttctacggggagtgaccgtgacgcgaccacgaccagccatggcgaggagtccgatgacgatggaatgggactgtgatgccattgtgatgccatgccgttgtggcatctcccgtggtgtgcactgtaataccatatcatattgcatgtttcggaatgcaagtcaatgcttactgggtgtgtgataaggtgcttcattccagctttgtactagtgtcaccaagcacgtaaataattgaatgagaaactggaacgtgcacggctggg

SEQ ID NO: 37606 - protein, 457 aa, Zea mays subsp. mays
  peptide (1)..(457): Ceres Seq. ID no. 12362234
  misc_feature (26)..(455): Pfam Name: Pfam Description:  Transferase family
  misc_feature (25)..(455): NCBI GI NO: 38345030 NR Description: OSJNBa0029H02.14
  misc_feature (21)..(455): NCBI GI NO: 6469032 NR Description: N-hydroxycinnamoyl/benzoyltransferase
  misc_feature (25)..(455): NCBI GI NO: 27475616 NR Description: hydroxycinnamoyl transferase [Nicotiana tabacum]
  misc_feature (21)..(455): NCBI GI NO: 40644899 NR Description: hydroxycinnamoyl CoA quinate transferase
  misc_feature (21)..(455): NCBI GI NO: 40644084 NR Description: hydroxycinnamoyl CoA quinate transferase
  misc_feature (25)..(455): NCBI GI NO: 15239747 NR Description: anthranilate N-benzoyltransferase
  misc_feature (25)..(455): NCBI GI NO: 21536883 NR Description: anthranilate N-benzoyltransferase
  misc_feature (25)..(455): NCBI GI NO: 32400293 NR Description: hydroxyanthranilate hydroxycinnamoyltransferase 2
  misc_feature (25)..(455): NCBI GI NO: 32400291 NR Description: hydroxyanthranilate hydroxycinnamoyltransferase 1
  misc_feature (25)..(455): NCBI GI NO: 32400295 NR Description: hydroxyanthranilate hydroxycinnamoyltransferase 3
KLTAHSQARCETQTQRPAHRSKRRMKVEVVETTLVPPSEATPRHALWLSNLDLAVPKTHTPLVYYYPRPAGAGAGEEGKGEGEGSFFDPARLREALSRALVPFYPLAGRLAAGPGGRLEIDCTGEGALFCVARADFTGDEMFADFEPSPEARRLLVPFAASGDPPCVLAMVQVTFLKCGGVAVGTGMHHVTMDGAGAIQFIRAWTALARGEAPAWTPSHDRTLLRARSPPHVPACEHPVYSPAYLNGAPRPFVTRVYAVPPKLLAGIRSRCAPGASTYCAVTAHLWRAMCVARGLPAGSDTRLRVPANVRQRLRPPLPASYFGNAIVRDLVTVRVADVLSQPLGFVAERIKRAVARVDDARVRSVVDYLELESDKGNQAARGQFMPESDLWVVSLLGMPIHDADFGWGRPGFVAPAQMFGSGTAYVTQGRDKDDPINVLFALEPEYLNTFEKAFYGE

SEQ ID NO: 37607 - protein, 433 aa, Zea mays subsp. mays
  peptide (1)..(433): Ceres Seq. ID no. 12362235
  misc_feature (2)..(431): Pfam Name: Pfam Description:  Transferase family
  misc_feature (1)..(431): NCBI GI NO: 38345030 NR Description: OSJNBa0029H02.14
  misc_feature (1)..(431): NCBI GI NO: 6469032 NR Description: N-hydroxycinnamoyl/benzoyltransferase
  misc_feature (1)..(431): NCBI GI NO: 27475616 NR Description: hydroxycinnamoyl transferase [Nicotiana tabacum]
  misc_feature (1)..(431): NCBI GI NO: 40644899 NR Description: hydroxycinnamoyl CoA quinate transferase
  misc_feature (1)..(431): NCBI GI NO: 40644084 NR Description: hydroxycinnamoyl CoA quinate transferase
  misc_feature (1)..(431): NCBI GI NO: 15239747 NR Description: anthranilate N-benzoyltransferase
  misc_feature (1)..(431): NCBI GI NO: 21536883 NR Description: anthranilate N-benzoyltransferase
  misc_feature (1)..(431): NCBI GI NO: 32400293 NR Description: hydroxyanthranilate hydroxycinnamoyltransferase 2
  misc_feature (1)..(431): NCBI GI NO: 32400291 NR Description: hydroxyanthranilate hydroxycinnamoyltransferase 1
  misc_feature (1)..(431): NCBI GI NO: 32400295 NR Description: hydroxyanthranilate hydroxycinnamoyltransferase 3
MKVEVVETTLVPPSEATPRHALWLSNLDLAVPKTHTPLVYYYPRPAGAGAGEEGKGEGEGSFFDPARLREALSRALVPFYPLAGRLAAGPGGRLEIDCTGEGALFCVARADFTGDEMFADFEPSPEARRLLVPFAASGDPPCVLAMVQVTFLKCGGVAVGTGMHHVTMDGAGAIQFIRAWTALARGEAPAWTPSHDRTLLRARSPPHVPACEHPVYSPAYLNGAPRPFVTRVYAVPPKLLAGIRSRCAPGASTYCAVTAHLWRAMCVARGLPAGSDTRLRVPANVRQRLRPPLPASYFGNAIVRDLVTVRVADVLSQPLGFVAERIKRAVARVDDARVRSVVDYLELESDKGNQAARGQFMPESDLWVVSLLGMPIHDADFGWGRPGFVAPAQMFGSGTAYVTQGRDKDDPINVLFALEPEYLNTFEKAFYGE

SEQ ID NO: 37608 - protein, 370 aa, Zea mays subsp. mays
  peptide (1)..(370): Ceres Seq. ID no. 12362236
  misc_feature (310)..(370): Pfam Name: Pfam Description:  Cupin
  misc_feature (46)..(370): NCBI GI NO: 23018055 NR Description: hypothetical protein [Thermobifida fusca]
  misc_feature (30)..(370): NCBI GI NO: 79833 NR Description: hypothetical 119
  misc_feature (27)..(370): NCBI GI NO: 79833 NR Description: hypothetical 119
AHRSLTSTLRNTDAETRAQIEAEDEGGGGGDDAGAAERGDAAARAVAVQPGPGGAQDPHPARLLLPEARRRRRRGGGKGRGRRVVLRPGAPAGGAVQGAGALLPAGGAAGGRPGRPARDRLHRRGRAVLRRAGRLHRRRDVRRLRALPRGAPPARAIRRVRRPALRARHGPGDLPQVRRRGRGHGHAPRDDGRRRRDPVHPGVDGAGARGGPRVDAVARPDAPARALPAARPRLRAPGLLPGLPQRGAAALRDARLRRAAQAAGGHPVALRAGRVHVLRGDGAPVARHVRRPGPPGGQRHAAARPGQRPAAPAPAAPGVLLRQRHRAGPGHRAGGRRAVAAAGLRGGADQARGGPRRRRPRALRRRLPGA

SEQ ID NO: 37609 - DNA, 1140 bp, Zea mays subsp. mays; identical to SEQ ID NO: 26494
  misc_feature (1)..(1140): Ceres Seq. ID no. 12386869

SEQ ID NO: 37610 - protein, 274 aa, Zea mays subsp. mays; identical to SEQ ID NO: 26495
  peptide (1)..(274): Ceres Seq. ID no. 12386870
  misc_feature (92)..(270): Pfam Name: phosphoriboisomerase A Pfam Description: Ribose 5-phosphate isomerase A
  misc_feature (1)..(274): NCBI GI NO: 34393835 NR Description: putative ribose-5-phosphate isomerase
  misc_feature (31)..(274): NCBI GI NO: 34393836 NR Description: putative ribose-5-phosphate isomerase
  misc_feature (29)..(274): NCBI GI NO: 18654317 NR Description: ribose-5-phosphate isomerase [Spinacia oleracea]
  misc_feature (1)..(274): NCBI GI NO: 21594002 NR Description: putative ribose 5-phosphate isomerase
  misc_feature (1)..(274): NCBI GI NO: 15229349 NR Description: putative ribose 5-phosphate isomerase
  misc_feature (26)..(274): NCBI GI NO: 15226223 NR Description: putative ribose 5-phosphate isomerase
  misc_feature (26)..(274): NCBI GI NO: 21592672 NR Description: putative ribose 5-phosphate isomerase
  misc_feature (26)..(274): NCBI GI NO: 15223936 NR Description: putative ribose 5-phosphate isomerase
  misc_feature (26)..(274): NCBI GI NO: 13430836 NR Description: putative ribose 5-phosphate isomerase
  misc_feature (34)..(268): NCBI GI NO: 38347196 NR Description: OSJNBa0023J03.8

SEQ ID NO: 37611 - protein, 212 aa, Zea mays subsp. mays; identical to SEQ ID NO: 26496
  peptide (1)..(212): Ceres Seq. ID no. 12386871
  misc_feature (30)..(208): Pfam Name: phosphoriboisomerase A Pfam Description: Ribose 5-phosphate isomerase A
  misc_feature (1)..(212): NCBI GI NO: 34393835 NR Description: putative ribose-5-phosphate isomerase
  misc_feature (1)..(212): NCBI GI NO: 34393836 NR Description: putative ribose-5-phosphate isomerase
  misc_feature (1)..(212): NCBI GI NO: 18654317 NR Description: ribose-5-phosphate isomerase [Spinacia oleracea]
  misc_feature (1)..(212): NCBI GI NO: 21594002 NR Description: putative ribose 5-phosphate isomerase
  misc_feature (1)..(212): NCBI GI NO: 15229349 NR Description: putative ribose 5-phosphate isomerase
  misc_feature (1)..(212): NCBI GI NO: 15226223 NR Description: putative ribose 5-phosphate isomerase
  misc_feature (1)..(212): NCBI GI NO: 21592672 NR Description: putative ribose 5-phosphate isomerase
  misc_feature (1)..(212): NCBI GI NO: 15223936 NR Description: putative ribose 5-phosphate isomerase
  misc_feature (1)..(212): NCBI GI NO: 13430836 NR Description: putative ribose 5-phosphate isomerase
  misc_feature (1)..(206): NCBI GI NO: 38347196 NR Description: OSJNBa0023J03.8

SEQ ID NO: 37612 - protein, 178 aa, Zea mays subsp. mays; identical to SEQ ID NO: 26497
  peptide (1)..(178): Ceres Seq. ID no. 12386872

SEQ ID NO: 37613 - DNA, 1370 bp, Zea mays subsp. mays
  misc_feature (1)..(1370): Ceres Seq. ID no. 12372818
atattgtaatgaacactcccttacgtgcagtgccgcgagctgacctccacgaggaccgaaacaattatcgccagattggccgcttcacctcgacagccacgccaccaccactgcgggtctgcggcagtcggcacatggagctcctgcgggacagcatctccatggtgtccctggctgtcctggtgaccgcggtgtgcgcgcgcgccgcgtcctcgtggctccgccccggtctccctcgcctggcgtcgttgctcccgatggtcgcctttcttgccgcggctcccctggctttctcctctgcaatcatccggggacttgcaggcttcttcctcgggtggctcggcgtgttcaaggtcgtcctcctggccgtcggccgcggcccgcttgaccccgccctccccgttctcccgttcgtcttcaccacagcgcttcccgttaagctcagatgcagcagcaccggcgctgcagcagcgtgcagggccaaatcggtctccctcgtctcgtgcgcggtcaaggtcgcggtcatagccgccatcctccatgtgtaccagtacacggaccagctgcatctctacactcgcctcgctctgtacagcgtccacatctactgcttcttggacttcctcctcccgtgcatcgcggcggctggcggcgccctcggcatggatatggagccgcagttcgacaagccgtacctggcgtcgtccctacgcgacttctggggccggcggtggaacctcgtggtgtcggacatcctccggccgtctgtctacggccccgtgcgcgcgcgcgccgggaaggcaccggccgtcctggccacgttcctcgtgtccgggctgatgcacgaggtcatgatttactacctcaccctgcgatcacccaccggtgagatgacggccttcttcctgctccatggcgtctgctgtattgccgaggagtcgtgcgcgcggcggtggatgcagtggggttggaggccgccgccgcgacccgtggctacgctgctcgtggtggtgttcgtggccggcaccgcattctggctcttcttcccgcaaatttgcagggaaggaatggaggagttactgctcgaggagtgggcagcggtaggggcgttcttcaacgacgccgcccgaaagctgctccagatgttcacgtgaagacttgaaagtcggcagtcggcaccagcagactcgttccaatcctctagagataattagtagctatggttttagctgtgttcacagagctaacaacaatagcaatagctatttgagaaacatatagtgtgtttggtttgagaaacgaagtggtgtatctctttctcacttttcacttttttatttggtttgtgaattttatttggtttgtgaaat

SEQ ID NO: 37614 - protein, 383 aa, Zea mays subsp. mays
  peptide (1)..(383): Ceres Seq. ID no. 12372819
  misc_feature (94)..(353): Pfam Name: Pfam Description:  MBOAT family
  misc_feature (45)..(378): NCBI GI NO: 38347115 NR Description: OSJNBa0009K15.12
  misc_feature (50)..(373): NCBI GI NO: 38345254 NR Description: OSJNBb0011N17.15
  misc_feature (48)..(374): NCBI GI NO: 38345253 NR Description: OSJNBb0011N17.14
  misc_feature (66)..(377): NCBI GI NO: 28812087 NR Description: putative wax synthase protein
  misc_feature (57)..(382): NCBI GI NO: 27728714 NR Description: wax synthase isoform 1 [Vitis vinifera]
  misc_feature (57)..(382): NCBI GI NO: 27728716 NR Description: wax synthase isoform 2 [Vitis vinifera]
  misc_feature (48)..(382): NCBI GI NO: 34911838 NR Description: wax synthase-like protein
  misc_feature (46)..(363): NCBI GI NO: 15240497 NR Description: wax synthase-like protein; protein id: At5g55350.1
  misc_feature (46)..(363): NCBI GI NO: 15240496 NR Description: putative protein; protein id: At5g55340
  misc_feature (46)..(363): NCBI GI NO: 15240500 NR Description: wax synthase-like protein; protein id: At5g55380
IVMNTPLRAVPRADLHEDRNNYRQIGRFTSTATPPPLRVCGSRHMELLRDSISMVSLAVLVTAVCARAASSWLRPGLPRLASLLPMVAFLAAAPLAFSSAIIRGLAGFFLGWLGVFKVVLLAVGRGPLDPALPVLPFVFTTALPVKLRCSSTGAAAACRAKSVSLVSCAVKVAVIAAILHVYQYTDQLHLYTRLALYSVHIYCFLDFLLPCIAAAGGALGMDMEPQFDKPYLASSLRDFWGRRWNLVVSDILRPSVYGPVRARAGKAPAVLATFLVSGLMHEVMIYYLTLRSPTGEMTAFFLLHGVCCIAEESCARRWMQWGWRPPPRPVATLLVVVFVAGTAFWLFFPQICREGMEELLLEEWAAVGAFFNDAARKLLQMFT

SEQ ID NO: 37615 - protein, 381 aa, Zea mays subsp. mays
  peptide (1)..(381): Ceres Seq. ID no. 12372820
  misc_feature (92)..(351): Pfam Name: Pfam Description:  MBOAT family
  misc_feature (43)..(376): NCBI GI NO: 38347115 NR Description: OSJNBa0009K15.12
  misc_feature (48)..(371): NCBI GI NO: 38345254 NR Description: OSJNBb0011N17.15
  misc_feature (46)..(372): NCBI GI NO: 38345253 NR Description: OSJNBb0011N17.14
  misc_feature (64)..(375): NCBI GI NO: 28812087 NR Description: putative wax synthase protein
  misc_feature (55)..(380): NCBI GI NO: 27728714 NR Description: wax synthase isoform 1 [Vitis vinifera]
  misc_feature (55)..(380): NCBI GI NO: 27728716 NR Description: wax synthase isoform 2 [Vitis vinifera]
  misc_feature (46)..(380): NCBI GI NO: 34911838 NR Description: wax synthase-like protein
  misc_feature (44)..(361): NCBI GI NO: 15240497 NR Description: wax synthase-like protein; protein id: At5g55350.1
  misc_feature (44)..(361): NCBI GI NO: 15240496 NR Description: putative protein; protein id: At5g55340
  misc_feature (44)..(361): NCBI GI NO: 15240500 NR Description: wax synthase-like protein; protein id: At5g55380
MNTPLRAVPRADLHEDRNNYRQIGRFTSTATPPPLRVCGSRHMELLRDSISMVSLAVLVTAVCARAASSWLRPGLPRLASLLPMVAFLAAAPLAFSSAIIRGLAGFFLGWLGVFKVVLLAVGRGPLDPALPVLPFVFTTALPVKLRCSSTGAAAACRAKSVSLVSCAVKVAVIAAILHVYQYTDQLHLYTRLALYSVHIYCFLDFLLPCIAAAGGALGMDMEPQFDKPYLASSLRDFWGRRWNLVVSDILRPSVYGPVRARAGKAPAVLATFLVSGLMHEVMIYYLTLRSPTGEMTAFFLLHGVCCIAEESCARRWMQWGWRPPPRPVATLLVVVFVAGTAFWLFFPQICREGMEELLLEEWAAVGAFFNDAARKLLQMFT

SEQ ID NO: 37616 - protein, 339 aa, Zea mays subsp. mays
  peptide (1)..(339): Ceres Seq. ID no. 12372821
  misc_feature (50)..(309): Pfam Name: Pfam Description:  MBOAT family
  misc_feature (1)..(334): NCBI GI NO: 38347115 NR Description: OSJNBa0009K15.12
  misc_feature (6)..(329): NCBI GI NO: 38345254 NR Description: OSJNBb0011N17.15
  misc_feature (4)..(330): NCBI GI NO: 38345253 NR Description: OSJNBb0011N17.14
  misc_feature (22)..(333): NCBI GI NO: 28812087 NR Description: putative wax synthase protein
  misc_feature (13)..(338): NCBI GI NO: 27728714 NR Description: wax synthase isoform 1 [Vitis vinifera]
  misc_feature (13)..(338): NCBI GI NO: 27728716 NR Description: wax synthase isoform 2 [Vitis vinifera]
  misc_feature (4)..(338): NCBI GI NO: 34911838 NR Description: wax synthase-like protein
  misc_feature (2)..(319): NCBI GI NO: 15240497 NR Description: wax synthase-like protein; protein id: At5g55350.1
  misc_feature (2)..(319): NCBI GI NO: 15240496 NR Description: putative protein; protein id: At5g55340
  misc_feature (2)..(319): NCBI GI NO: 15240500 NR Description: wax synthase-like protein; protein id: At5g55380
MELLRDSISMVSLAVLVTAVCARAASSWLRPGLPRLASLLPMVAFLAAAPLAFSSAIIRGLAGFFLGWLGVFKVVLLAVGRGPLDPALPVLPFVFTTALPVKLRCSSTGAAAACRAKSVSLVSCAVKVAVIAAILHVYQYTDQLHLYTRLALYSVHIYCFLDFLLPCIAAAGGALGMDMEPQFDKPYLASSLRDFWGRRWNLVVSDILRPSVYGPVRARAGKAPAVLATFLVSGLMHEVMIYYLTLRSPTGEMTAFFLLHGVCCIAEESCARRWMQWGWRPPPRPVATLLVVVFVAGTAFWLFFPQICREGMEELLLEEWAAVGAFFNDAARKLLQMFT

SEQ ID NO: 37617 - DNA, 1237 bp, Zea mays subsp. mays
  misc_feature (1)..(1237): Ceres Seq. ID no. 12353106
accatttcacaccctcttgcctccccgtgactacctcgctgtcccctctcagtgtccaagcgacgacaccacgccgccgagatgtggatctcagattccgcctttgtggagccctcatcttcctccccatccgcctctgcctccccgccgccgagcccgccaccagcacgccttctccgccaacgcaaccgccgccgacgccgcaacagccggaaacagggcagtgccagcgccgtcgacggcgtcgccgaccccgaggcggaggacgtgtggcgtggggcgcagtgggaggcggcgtggccggcgaggcgggactcgaaacccgtcgtgctcgcgggcggagacgacgcggtggggcggtccaggagcctcacggacgacgacctcgaggagctcaagggatgcgccgacctgggcttcggcttcaactacgacgagatccccgagctccggagcaccctgccggcgctcgagctgtgctactccatgagccagcgcctccagctggacgacgagaagccgccgcagcagcacgagggcgccgcaccagatgccgccacgccgtcgccgcctgtcaccaactggaagatctccagccccggtgacagccctgacgaggtgaaggcgcggctcaagtactgggcgcaggcggtggcgtgcaccgtccgcctttgcagctgaacggcgccgatccatgcgcgccattcttcgccgtctggaagcacacaccataccggtatgccggccgccaccacacaagaaaccggatgaccagacctaatcgcgaacacgttgctgctgctgtaaagtgatccaggtgcaccgtttcagctgcgacggcgggcgttggcagctgccatgattgcagctgcagagtttggtggagcatcgttggtagtcgtgtagcagcacacataggggctgggtaaatgggttggttgcccaaccgacatgctgtgctctctgttccagctgagcaacctgcctttgcctgatgaaccaaccatccgagtgtgcagcagccatctccagcggaaataaactattgtaattgtactgctagcagtagtgatcaaaataatgtgcagagtaattagtactgcaagcaaatcggggaatcattgtgaatacataaatctgtggatctcattactatactgttatcttaatcattagctggtgtacctgctacctactgcagctgtttggtaataatggtgcagatgctttccttctc

SEQ ID NO: 37618 - protein, 200 aa, Zea mays subsp. mays
  peptide (1)..(200): Ceres Seq. ID no. 12353107
HFTPSCLPVTTSLSPLSVQATTPRRRDVDLRFRLCGALIFLPIRLCLPAAEPATSTPSPPTQPPPTPQQPETGQCQRRRRRRRPRGGGRVAWGAVGGGVAGEAGLETRRARGRRRRGGAVQEPHGRRPRGAQGMRRPGLRLQLRRDPRAPEHPAGARAVLLHEPAPPAGRREAAAAARGRRTRCRHAVAACHQLEDLQPR

SEQ ID NO: 37619 - protein, 199 aa, Zea mays subsp. mays
  peptide (1)..(199): Ceres Seq. ID no. 12353108
  misc_feature (89)..(199): NCBI GI NO: 30684991 NR Description: expressed protein [Arabidopsis thaliana]
  misc_feature (89)..(199): NCBI GI NO: 25406874 NR Description: hypothetical protein
  misc_feature (82)..(199): NCBI GI NO: 30689349 NR Description: expressed protein [Arabidopsis thaliana]
  misc_feature (82)..(196): NCBI GI NO: 25408860 NR Description: hypothetical protein At2g43340
  misc_feature (89)..(192): NCBI GI NO: 15221309 NR Description: unknown protein; protein id: At1g05870.1
  misc_feature (89)..(175): NCBI GI NO: 25408168 NR Description: hypothetical protein At2g31560
  misc_feature (86)..(184): NCBI GI NO: 34907664 NR Description: P0506A10.18
  misc_feature (97)..(195): NCBI GI NO: 15228829 NR Description: hypothetical protein; protein id: At3g22690.1
  misc_feature (70)..(195): NCBI GI NO: 15229330 NR Description: hypothetical protein; protein id: At3g04700.1
  misc_feature (136)..(199): NCBI GI NO: 26451183 NR Description: unknown protein [Arabidopsis thaliana]
MWISDSAFVEPSSSSPSASASPPPSPPPARLLRQRNRRRRRNSRKQGSASAVDGVADPEAEDVWRGAQWEAAWPARRDSKPVVLAGGDDAVGRSRSLTDDDLEELKGCADLGFGFNYDEIPELRSTLPALELCYSMSQRLQLDDEKPPQQHEGAAPDAATPSPPVTNWKISSPGDSPDEVKARLKYWAQAVACTVRLCS

SEQ ID NO: 37620 - protein, 162 aa, Zea mays subsp. mays
  peptide (1)..(162): Ceres Seq. ID no. 12353109
  misc_feature (55)..(162): Pfam Name: Pfam Description:  Herpesvirus alkaline exonuclease
PFHTLLPPRDYLAVPSQCPSDDTTPPRCGSQIPPLWSPHLPPHPPLPPRRRARHQHAFSANATAADAATAGNRAVPAPSTASPTPRRRTCGVGRSGRRRGRRGGTRNPSCSRAETTRWGGPGASRTTTSRSSRDAPTWASASTTTRSPSSGAPCRRSSCATP

SEQ ID NO: 37621 - DNA, 1449 bp, Zea mays subsp. mays
  misc_feature (1)..(1449): Ceres Seq. ID no. 12367750
gcacgagaccattacctagaacatcctaatcgaaaactccacgccgcgcccgcggagctcgacgcccaccggcgctgcccgtcggagccggggggacgcgccggcgccggagctggcgggagcggagctggcggccatcttccgggtgatggcggacctcctcagcgacccagcgtggccgcagctccatccgcggccctgcaccgacacgccgtggccgggcctgcaatgcgagctcgtgcccgacgacgcgcgcgtgctccgcatcacccgcctccacctgggtctcgacgtcgccaccccgccctgcaggcccgaggccagactagaccccgcctcgctgcgcggactaccgcacctccggacgctctccatcttcagctgctttggcgccgcccaagcctccgttgagctgccgcccgcgctgttcacgtcgtcgtcctcgctcgagcagatcgtgctcaagtccaaccccggcctcaccggcctcataccggcgacgttgggcagcctgcggagcctgcgcgtgctcagcctctcgcagaacggcttccgcggcgggatccccagggagctcggcggcctcgccgcgctgcagcagctcgacctcagctacaacaacatcaccggcgagatccccgaggagattggtgcgatgtcgagtctgacgatccttgacctgagctggaacagcatcggcggcggcgtgccggcgacgctgggcaagctccagaggatgcagaaggcggacctgagctacaaccgcctcgccggccgcgtgccgccggaggcggggtcgctgcgggagctggtgttcctggacctgagccacaacagcctcgcgggcccgctgccgagctcgctggccggcctgtccaggctgcagtacctgctgctgcaggacaaccccctcggcacggcggtgccggcggtggtcgggtcgctgcggcggctgcaggtgctgggcctgtccgggtgcaacctgacggggcccatcccgcgcggcgcgttcgcggcgctggccagcctcacggcgctgtcgctggaccggaaccggctggacgggccgatcccggcgagcctggccgcgctgccccaactgggccagctcaacctcagccagaaccggctggccggggagatcgcgctgccgggggagtttgtcgcgcggctcggcaggcgcctcgacgtccggggcaacgacgagctgtgcatcggcaggggcctacagggtagcggctatctgggagcgcccccgtgcgtggacagccacaacggcgacggatcgccggaaatatcaggtgctgctgcggcggccgtcggcctattcgacgggtcggcgtgtcatctttttgtgtcgtgtctggcgttcgtgttccagttgtgatgtgacatgtaactccggtcgctttctccgcccgactgctgcgacgcgagttttttcctgcc

SEQ ID NO: 37622 - protein, 412 aa, Zea mays subsp. mays
  peptide (1)..(412): Ceres Seq. ID no. 12367751
  misc_feature (1)..(388): NCBI GI NO: 34910824 NR Description: putative Hcr2-0B
  misc_feature (1)..(356): NCBI GI NO: 15228004 NR Description: leucine rich repeat protein family
  misc_feature (1)..(393): NCBI GI NO: 34912808 NR Description: P0501G01.13
  misc_feature (1)..(403): NCBI GI NO: 34894182 NR Description: P0439B06.12
  misc_feature (1)..(354): NCBI GI NO: 7487680 NR Description: hypothetical protein T5F17
  misc_feature (1)..(354): NCBI GI NO: 15236148 NR Description: leucine rich repeat protein family
  misc_feature (1)..(358): NCBI GI NO: 15220050 NR Description: leucine rich repeat protein family
  misc_feature (1)..(358): NCBI GI NO: 26452151 NR Description: GPI-anchored protein [Arabidopsis thaliana]
  misc_feature (1)..(355): NCBI GI NO: 15222215 NR Description: leucine rich repeat protein family
  misc_feature (1)..(355): NCBI GI NO: 15230865 NR Description: leucine rich repeat protein family
MADLLSDPAWPQLHPRPCTDTPWPGLQCELVPDDARVLRITRLHLGLDVATPPCRPEARLDPASLRGLPHLRTLSIFSCFGAAQASVELPPALFTSSSSLEQIVLKSNPGLTGLIPATLGSLRSLRVLSLSQNGFRGGIPRELGGLAALQQLDLSYNNITGEIPEEIGAMSSLTILDLSWNSIGGGVPATLGKLQRMQKADLSYNRLAGRVPPEAGSLRELVFLDLSHNSLAGPLPSSLAGLSRLQYLLLQDNPLGTAVPAVVGSLRRLQVLGLSGCNLTGPIPRGAFAALASLTALSLDRNRLDGPIPASLAALPQLGQLNLSQNRLAGEIALPGEFVARLGRRLDVRGNDELCIGRGLQGSGYLGAPPCVDSHNGDGSPEISGAAAAAVGLFDGSACHLFVSCLAFVFQL

SEQ ID NO: 37623 - protein, 243 aa, Zea mays subsp. mays
  peptide (1)..(243): Ceres Seq. ID no. 12367752
  misc_feature (1)..(219): NCBI GI NO: 34910824 NR Description: putative Hcr2-0B
  misc_feature (1)..(187): NCBI GI NO: 15228004 NR Description: leucine rich repeat protein family
  misc_feature (1)..(224): NCBI GI NO: 34912808 NR Description: P0501G01.13
  misc_feature (1)..(234): NCBI GI NO: 34894182 NR Description: P0439B06.12
  misc_feature (1)..(185): NCBI GI NO: 7487680 NR Description: hypothetical protein T5F17
  misc_feature (1)..(185): NCBI GI NO: 15236148 NR Description: leucine rich repeat protein family
  misc_feature (1)..(189): NCBI GI NO: 15220050 NR Description: leucine rich repeat protein family
  misc_feature (1)..(189): NCBI GI NO: 26452151 NR Description: GPI-anchored protein [Arabidopsis thaliana]
  misc_feature (1)..(186): NCBI GI NO: 15222215 NR Description: leucine rich repeat protein family
  misc_feature (1)..(186): NCBI GI NO: 15230865 NR Description: leucine rich repeat protein family
MSSLTILDLSWNSIGGGVPATLGKLQRMQKADLSYNRLAGRVPPEAGSLRELVFLDLSHNSLAGPLPSSLAGLSRLQYLLLQDNPLGTAVPAVVGSLRRLQVLGLSGCNLTGPIPRGAFAALASLTALSLDRNRLDGPIPASLAALPQLGQLNLSQNRLAGEIALPGEFVARLGRRLDVRGNDELCIGRGLQGSGYLGAPPCVDSHNGDGSPEISGAAAAAVGLFDGSACHLFVSCLAFVFQL

SEQ ID NO: 37624 - protein, 216 aa, Zea mays subsp. mays
  peptide (1)..(216): Ceres Seq. ID no. 12367753
  misc_feature (1)..(192): NCBI GI NO: 34910824 NR Description: putative Hcr2-0B
  misc_feature (1)..(160): NCBI GI NO: 15228004 NR Description: leucine rich repeat protein family
  misc_feature (1)..(197): NCBI GI NO: 34912808 NR Description: P0501G01.13
  misc_feature (1)..(207): NCBI GI NO: 34894182 NR Description: P0439B06.12
  misc_feature (1)..(158): NCBI GI NO: 7487680 NR Description: hypothetical protein T5F17
  misc_feature (1)..(158): NCBI GI NO: 15236148 NR Description: leucine rich repeat protein family
  misc_feature (1)..(162): NCBI GI NO: 15220050 NR Description: leucine rich repeat protein family
  misc_feature (1)..(162): NCBI GI NO: 26452151 NR Description: GPI-anchored protein [Arabidopsis thaliana]
  misc_feature (1)..(159): NCBI GI NO: 15222215 NR Description: leucine rich repeat protein family
  misc_feature (1)..(159): NCBI GI NO: 15230865 NR Description: leucine rich repeat protein family
MQKADLSYNRLAGRVPPEAGSLRELVFLDLSHNSLAGPLPSSLAGLSRLQYLLLQDNPLGTAVPAVVGSLRRLQVLGLSGCNLTGPIPRGAFAALASLTALSLDRNRLDGPIPASLAALPQLGQLNLSQNRLAGEIALPGEFVARLGRRLDVRGNDELCIGRGLQGSGYLGAPPCVDSHNGDGSPEISGAAAAAVGLFDGSACHLFVSCLAFVFQL

SEQ ID NO: 37625 - DNA, 1462 bp, Zea mays subsp. mays
  misc_feature (1)..(1462): Ceres Seq. ID no. 12354475
gtgggtctccgtcgtcgtctctctcctcccggccgccggcgcgatgaggcggttgctcggccacctacacccccatgcccagagcctcttcgcttccctgcctcgcaaaccgtccatcgccaccaagctccccttcctcctctcccgccgcctcctttccgatgccgcctcgcctcctgccccctcgctgccgcctcctcccccgccctctgccgacgtcacgaacacagagttgaagaagaggttggagacttactatggggtggatgaagaggctgaattaccatctgtcgctaaggctgttcttgagcggaatctcacgggtgcccatagtgagactgatgatgaccttattgaggagctgcgtagtaagccactccctgaagtccatgaccgggactttgagtctgattttgaggagatgcatgatactgatgaggagctgaatgacctgtacaatacaagggagtatgttgagaagaagatcaagagtgatgagttctttaacatggatgacacaaagtgggatgccatgatcaaggaggccacagacaagggtcacttaactaacatgaaggagtgcgaggaaatcctcgaggacatgctctactgggacaagctacttcctgatgagatcaagcaaaaggtggagaccaaatttaatgagttgggagacatgtgtgagaggggagagatggaacctgagcaagcatatgagatgttcaaagaatttgaggataagatggtcgctgagtgcactgaattaattgaatcaaagatgccaactgacgctgatgaactgactgaatcaggaggtaagaaagttgagttagatgatctacctggcgagggacctgttctaaggtgggaatcacggattgtatttgttcctagtggagatgcatatcatcccaaaaacagaaaagtcaagctcagtgtgactgtgaaggaattgggactttcacgacatgctttccgtcggttgcgtgaggttgttggaaagaggtataattctgggaaagatgagctcacaataatcagtgaaaggtttgaacaccgggaagagaacagaaaagactgcttgaggacactgtatactctaataaaagacgcaatgaaagctgacaaacttgttgaggatgccaggaattcttatgttaaaggaagacttaaggctaatccacaatttatggagcgattgaagaggaagacagataagttgatggcagctgcataaggtgttacagagctccttgttttaacagctcctctctttccctcatcaacatggtgattattctgtattttcaattttattgttggctgtcgcacggggagaataatatgttgtatgcacttagctttgccttctttaatgtcttggcttcttttgtagggtcattcttagtcataaatatatgttgagcatctcgaataacaatgtcaacacacatccccagct

SEQ ID NO: 37626 - protein, 411 aa, Zea mays subsp. mays
  peptide (1)..(411): Ceres Seq. ID no. 12354476
  misc_feature (40)..(403): NCBI GI NO: 18401816 NR Description: expressed protein; protein id: At3g18240
  misc_feature (72)..(403): NCBI GI NO: 7485722 NR Description: hypothetical protein F18E5
  misc_feature (72)..(403): NCBI GI NO: 18415698 NR Description: putative protein; protein id: At4g21460
WVSVVVSLLPAAGAMRRLLGHLHPHAQSLFASLPRKPSIATKLPFLLSRRLLSDAASPPAPSLPPPPPPSADVTNTELKKRLETYYGVDEEAELPSVAKAVLERNLTGAHSETDDDLIEELRSKPLPEVHDRDFESDFEEMHDTDEELNDLYNTREYVEKKIKSDEFFNMDDTKWDAMIKEATDKGHLTNMKECEEILEDMLYWDKLLPDEIKQKVETKFNELGDMCERGEMEPEQAYEMFKEFEDKMVAECTELIESKMPTDADELTESGGKKVELDDLPGEGPVLRWESRIVFVPSGDAYHPKNRKVKLSVTVKELGLSRHAFRRLREVVGKRYNSGKDELTIISERFEHREENRKDCLRTLYTLIKDAMKADKLVEDARNSYVKGRLKANPQFMERLKRKTDKLMAAA

SEQ ID NO: 37627 - protein, 397 aa, Zea mays subsp. mays
  peptide (1)..(397): Ceres Seq. ID no. 12354477
  misc_feature (26)..(389): NCBI GI NO: 18401816 NR Description: expressed protein; protein id: At3g18240
  misc_feature (58)..(389): NCBI GI NO: 7485722 NR Description: hypothetical protein F18E5
  misc_feature (58)..(389): NCBI GI NO: 18415698 NR Description: putative protein; protein id: At4g21460
MRRLLGHLHPHAQSLFASLPRKPSIATKLPFLLSRRLLSDAASPPAPSLPPPPPPSADVTNTELKKRLETYYGVDEEAELPSVAKAVLERNLTGAHSETDDDLIEELRSKPLPEVHDRDFESDFEEMHDTDEELNDLYNTREYVEKKIKSDEFFNMDDTKWDAMIKEATDKGHLTNMKECEEILEDMLYWDKLLPDEIKQKVETKFNELGDMCERGEMEPEQAYEMFKEFEDKMVAECTELIESKMPTDADELTESGGKKVELDDLPGEGPVLRWESRIVFVPSGDAYHPKNRKVKLSVTVKELGLSRHAFRRLREVVGKRYNSGKDELTIISERFEHREENRKDCLRTLYTLIKDAMKADKLVEDARNSYVKGRLKANPQFMERLKRKTDKLMAAA

SEQ ID NO: 37628 - protein, 271 aa, Zea mays subsp. mays
  peptide (1)..(271): Ceres Seq. ID no. 12354478
  misc_feature (1)..(263): NCBI GI NO: 18401816 NR Description: expressed protein; protein id: At3g18240
  misc_feature (1)..(263): NCBI GI NO: 7485722 NR Description: hypothetical protein F18E5
  misc_feature (1)..(263): NCBI GI NO: 18415698 NR Description: putative protein; protein id: At4g21460
MHDTDEELNDLYNTREYVEKKIKSDEFFNMDDTKWDAMIKEATDKGHLTNMKECEEILEDMLYWDKLLPDEIKQKVETKFNELGDMCERGEMEPEQAYEMFKEFEDKMVAECTELIESKMPTDADELTESGGKKVELDDLPGEGPVLRWESRIVFVPSGDAYHPKNRKVKLSVTVKELGLSRHAFRRLREVVGKRYNSGKDELTIISERFEHREENRKDCLRTLYTLIKDAMKADKLVEDARNSYVKGRLKANPQFMERLKRKTDKLMAAA

SEQ ID NO: 37629 - DNA, 1738 bp, Zea mays subsp. mays
  misc_feature (1)..(1738): Ceres Seq. ID no. 12412461
taatcgaaaaaggcagcctctcgctgtgtcagttccgctttgtaactgtagaaggagagtgagctcatcatcaagtcgagacgatgggccgcaccgaggcggcggacggcgccgagtccggcgggctgggggtgggggagacggtgcgcgagctgcgggaggcgtacgagggcggcaggacgcggagcctagcgtggcggcaggcgcagctgcggggcctcctccggctcctcgaggagaaggaggtggaggcgttccaggcgctccacaaggacctcggcaagcaccacgccgaggcgtacagggacgaggtcggggtgctcatcaagtccgccaacggcgcgctgcagcagctcggcaaatggatggccccggagaaggtgcgggtcccgctgatcgcttggccggcgaccgcgcaggtggtgccggagccgctcggggtcgtcctcgtcttctcctgctggaacgtccccttgggcctgtcgctggagccgctgatcggggcgatagcggccgggaacgcggtggctctgaagccgtccgagctctcgccgtgcaccgccaggttcctgggcgacaacatcgggaggtacatggactcctcggcggtgaaggtcgtccagggcggccccgacgtcggagtgcagctcatggagcaccgctgggacaaggtcctcttcaccgggagcccccgcatcgcgcgcgccgtgatggccgcggcgtccaggcacctgacgcccgtcgcgctggagctgggcggcaagtgcccctgcatcttcgacgccatgggcagcgcccgggacctgcagatctcggttaaccgcatgatcgcgggcaagtggtcgtcctgcgccggacaggcctgcatcgccatcgactacgtgctcgtcgaggagcgcttcgcgcccatcctgatcaaggtgctcaagtcgacgctgaagaggttcttcccggaagcggaccacatggcacggatcgtgaacgagcgccacttcgagaggctgagtaaccttctcaaagacaggtccgtggcgccgtccgtcctgcacggcggctccatggacagcaagaacttgtacattgagcccacgatactgctgaacccgccgctggactccgcgatcatgaccgaggagatattcgggcccctgctcccgatcatcacggtcaagaacatcgaggacagcatcgccttcgtgaaggccatgccgaagcctctcgccatctacgcgttcacccgggacgccgccctgcggcggcgaatcgtggacgagacgtcgtccgggagcgtcaccttcaacgacgcggtagtgcagtacgcgatagacgggctcccgttcggcggcgtcggccagagcgggttcgggcagtaccatgggaagtactcgttcgagatgttcagccacaagaaggcggtcatgaagcggggctacctcgtggagctgacactcaggtacccgccgtgggacgagagcaaagtcaccctcatgcgctacctctaccgcttcaactacttcgccttcgtcctctctttcctcggggctcaggcgatgaacttcactccagcatcaacgcaaggatcgcacagggattgggcccaatataggcgatgaactggcattgacagtggatggaggaacaagccaatatagacaatatgcagtagatgtcttgtttgtgaggaacatgtgtcatgccgcacttcaaaaccagtaatatgctaacctgcatcctatct

SEQ ID NO: 37630 - protein, 509 aa, Zea mays subsp. mays
  peptide (1)..(509): Ceres Seq. ID no. 12412462
  misc_feature (1)..(486): NCBI GI NO: 33317836 NR Description: aldehyde dehydrogenase
  misc_feature (17)..(485): NCBI GI NO: 4973431 NR Description: putative aldehyde dehydrogenase OS-ALDH
  misc_feature (258)..(486): NCBI GI NO: 15234364 NR Description: aldehyde dehydrogenase like protein
  misc_feature (17)..(231): NCBI GI NO: 15234364 NR Description: aldehyde dehydrogenase like protein
  misc_feature (1)..(486): NCBI GI NO: 18418408 NR Description: putative aldehyde dehydrogenase
  misc_feature (21)..(486): NCBI GI NO: 17065876 NR Description: aldehyde dehydrogenase [Arabidopsis thaliana]
  misc_feature (13)..(486): NCBI GI NO: 15219358 NR Description: aldehyde dehydrogenase, putative
  misc_feature (13)..(486): NCBI GI NO: 21536879 NR Description: aldehyde dehydrogenase, putative
  misc_feature (24)..(486): NCBI GI NO: 17065918 NR Description: aldehyde dehydrogenase
  misc_feature (21)..(476): NCBI GI NO: 26341802 NR Description: unnamed protein product [Mus musculus]
MGRTEAADGAESGGLGVGETVRELREAYEGGRTRSLAWRQAQLRGLLRLLEEKEVEAFQALHKDLGKHHAEAYRDEVGVLIKSANGALQQLGKWMAPEKVRVPLIAWPATAQVVPEPLGVVLVFSCWNVPLGLSLEPLIGAIAAGNAVALKPSELSPCTARFLGDNIGRYMDSSAVKVVQGGPDVGVQLMEHRWDKVLFTGSPRIARAVMAAASRHLTPVALELGGKCPCIFDAMGSARDLQISVNRMIAGKWSSCAGQACIAIDYVLVEERFAPILIKVLKSTLKRFFPEADHMARIVNERHFERLSNLLKDRSVAPSVLHGGSMDSKNLYIEPTILLNPPLDSAIMTEEIFGPLLPIITVKNIEDSIAFVKAMPKPLAIYAFTRDAALRRRIVDETSSGSVTFNDAVVQYAIDGLPFGGVGQSGFGQYHGKYSFEMFSHKKAVMKRGYLVELTLRYPPWDESKVTLMRYLYRFNYFAFVLSFLGAQAMNFTPASTQGSHRDWAQYRR

SEQ ID NO: 37631 - protein, 415 aa, Zea mays subsp. mays
  peptide (1)..(415): Ceres Seq. ID no. 12412463
  misc_feature (1)..(392): NCBI GI NO: 33317836 NR Description: aldehyde dehydrogenase
  misc_feature (1)..(391): NCBI GI NO: 4973431 NR Description: putative aldehyde dehydrogenase OS-ALDH
  misc_feature (164)..(392): NCBI GI NO: 15234364 NR Description: aldehyde dehydrogenase like protein
  misc_feature (1)..(137): NCBI GI NO: 15234364 NR Description: aldehyde dehydrogenase like protein
  misc_feature (1)..(392): NCBI GI NO: 18418408 NR Description: putative aldehyde dehydrogenase
  misc_feature (1)..(392): NCBI GI NO: 17065876 NR Description: aldehyde dehydrogenase [Arabidopsis thaliana]
  misc_feature (1)..(392): NCBI GI NO: 15219358 NR Description: aldehyde dehydrogenase, putative
  misc_feature (1)..(392): NCBI GI NO: 21536879 NR Description: aldehyde dehydrogenase, putative
  misc_feature (1)..(392): NCBI GI NO: 17065918 NR Description: aldehyde dehydrogenase
  misc_feature (1)..(382): NCBI GI NO: 26341802 NR Description: unnamed protein product [Mus musculus]
MAPEKVRVPLIAWPATAQVVPEPLGVVLVFSCWNVPLGLSLEPLIGAIAAGNAVALKPSELSPCTARFLGDNIGRYMDSSAVKVVQGGPDVGVQLMEHRWDKVLFTGSPRIARAVMAAASRHLTPVALELGGKCPCIFDAMGSARDLQISVNRMIAGKWSSCAGQACIAIDYVLVEERFAPILIKVLKSTLKRFFPEADHMARIVNERHFERLSNLLKDRSVAPSVLHGGSMDSKNLYIEPTILLNPPLDSAIMTEEIFGPLLPIITVKNIEDSIAFVKAMPKPLAIYAFTRDAALRRRIVDETSSGSVTFNDAVVQYAIDGLPFGGVGQSGFGQYHGKYSFEMFSHKKAVMKRGYLVELTLRYPPWDESKVTLMRYLYRFNYFAFVLSFLGAQAMNFTPASTQGSHRDWAQYRR

SEQ ID NO: 37632 - protein, 339 aa, Zea mays subsp. mays
  peptide (1)..(339): Ceres Seq. ID no. 12412464
  misc_feature (1)..(316): NCBI GI NO: 33317836 NR Description: aldehyde dehydrogenase
  misc_feature (1)..(315): NCBI GI NO: 4973431 NR Description: putative aldehyde dehydrogenase OS-ALDH
  misc_feature (88)..(316): NCBI GI NO: 15234364 NR Description: aldehyde dehydrogenase like protein
  misc_feature (1)..(61): NCBI GI NO: 15234364 NR Description: aldehyde dehydrogenase like protein
  misc_feature (1)..(316): NCBI GI NO: 18418408 NR Description: putative aldehyde dehydrogenase
  misc_feature (1)..(316): NCBI GI NO: 17065876 NR Description: aldehyde dehydrogenase [Arabidopsis thaliana]
  misc_feature (1)..(316): NCBI GI NO: 15219358 NR Description: aldehyde dehydrogenase, putative
  misc_feature (1)..(316): NCBI GI NO: 21536879 NR Description: aldehyde dehydrogenase, putative
  misc_feature (1)..(316): NCBI GI NO: 17065918 NR Description: aldehyde dehydrogenase
  misc_feature (1)..(306): NCBI GI NO: 26341802 NR Description: unnamed protein product [Mus musculus]
MDSSAVKVVQGGPDVGVQLMEHRWDKVLFTGSPRIARAVMAAASRHLTPVALELGGKCPCIFDAMGSARDLQISVNRMIAGKWSSCAGQACIAIDYVLVEERFAPILIKVLKSTLKRFFPEADHMARIVNERHFERLSNLLKDRSVAPSVLHGGSMDSKNLYIEPTILLNPPLDSAIMTEEIFGPLLPIITVKNIEDSIAFVKAMPKPLAIYAFTRDAALRRRIVDETSSGSVTFNDAVVQYAIDGLPFGGVGQSGFGQYHGKYSFEMFSHKKAVMKRGYLVELTLRYPPWDESKVTLMRYLYRFNYFAFVLSFLGAQAMNFTPASTQGSHRDWAQYRR

SEQ ID NO: 37633 - DNA, 1808 bp, Zea mays subsp. mays
  misc_feature (1)..(1808): Ceres Seq. ID no. 12406575
gcacgagaccattacctagaacatcctaatcgaaaaacgcgcactgtctctctcgtatcactctccattctacctctctcttccccaatccaggccagccaaccctagcgcaccggcgatggcgtcggacccggcccctgacgacgcggccgcggccgtgaatgggcacggcaacgacaacggacacggtaacggcccgtccccgtcgaagcgcccccgggcggtgatctcggaagccgagatccgcgtcgagttcgcacaccacgacgcagccgtggcgcgcgtcaacaacggcagcttcggctgctgcccggcctcggtcctcgccgcgcaggcccactggcagcgcctcttcctcgcgcagcccgacgccttctacttccacgttctccagcagggccttctccgctcgcgcgccgccgtcgccgaggtggtgggcgctggcgacgtctccgaggtctccctcgtcgataacgccaccacggccgccgccatcgtcctgcagcacgcagcctggagcttcgccgagggtcacttcgcgcgcggggatgcggtgctgatgctccactacgcctatggtgcggtcaagaagtccatccacgcgtacgtcgcgcgtgcgggggccaccgtcgtcgaggtgcccctcccattccccgtcgcgtccgccgacgcaatcattgccgagttccgtgctgcgctcgcggtcgccaaggaaggagggcgtagggtcaggctcgcagtcatcgaccacattacctccatgcccagtgtcgtcatcccagtcaaggagctcgtcgccatctgtcgagaagagggcgttgacaaggtatttgttgacgctgcccactctattgggcaggtgcctgtggacgtgcgcgacattggagccgatttctatacaagcaaccttcataagtggttcttttgcccccctgctgtggcctttttgcatactcgcaaggatgacccgatagcctcccaactccatcaccctgttgtttcccatgagtatgggaatgggctgcctatggagagcggatggattggaacacgggattacagtgcccagcttgttgtgtccgaggctatagattttgtgaatcgatttgagggtggaattgaggctatacgaaaccggaatcatgagaaagttattgagatgggtaggatgcttgctgaggcatgggggacttttcttggctcacctccggaactgtgtggtagcatggttatggtggggatgcctggttgccttggtgttgagagtgatgatgatgcaatgagagtgaggacaatgttgagaaaggatttccaggtggaggtgccggtatactacaactcaagaagggtggaaggacaggagatgacaaaggataaaaatggtgatccagtgacagggtatgtgaggatctcacaccaggtttacaatgtcacagaggactatgagagactgagggatgttgtcaataaacttgtttctgaagggttcaccagcagcaagttgcggccttctgagaagcaagaagcttaggtgtaatgaccttccagccaggtagcatccacctgaaggcgctgtggccgactacttaggtgtggaccggatcagcgcagccagtacggcttcgtgatcgtgacgttgaagaatgtagtgtaccgccaggaactgacatgtgttgtatttggcgttcagtgtaagtaacaataatgccctggcatgttgtcttctctcacattttgggagctgctgtaacctcagaataatctggaatataaggatatttacagctgctgtagattgattgctgggc

SEQ ID NO: 37634 - protein, 470 aa, Zea mays subsp. mays
  peptide (1)..(470): Ceres Seq. ID no. 12406576
  misc_feature (64)..(445): Pfam Name: Pfam Description:  Aminotransferase class-V
  misc_feature (1)..(469): NCBI GI NO: 34894318 NR Description: unnamed protein product
  misc_feature (1)..(467): NCBI GI NO: 34894322 NR Description: unnamed protein product
  misc_feature (31)..(462): NCBI GI NO: 30690360 NR Description: expressed protein [Arabidopsis thaliana]
  misc_feature (17)..(462): NCBI GI NO: 15228693 NR Description: putative protein; protein id: At3g62130
  misc_feature (37)..(445): NCBI GI NO: 21230669 NR Description: isopenicillin N epimerase
  misc_feature (50)..(451): NCBI GI NO: 17548917 NR Description: PUTATIVE ISOPENICILLIN N EPIMERASE PROTEIN
  misc_feature (56)..(278): NCBI GI NO: 40738451 NR Description: hypothetical protein AN6227.2
  misc_feature (46)..(376): NCBI GI NO: 25463395 NR Description: hypothetical protein
  misc_feature (50)..(455): NCBI GI NO: 116093 NR Description: Isopenicillin N epimerase
  misc_feature (99)..(282): NCBI GI NO: 27376391 NR Description: blr1280 [Bradyrhizobium japonicum]
MASDPAPDDAAAAVNGHGNDNGHGNGPSPSKRPRAVISEAEIRVEFAHHDAAVARVNNGSFGCCPASVLAAQAHWQRLFLAQPDAFYFHVLQQGLLRSRAAVAEVVGAGDVSEVSLVDNATTAAAIVLQHAAWSFAEGHFARGDAVLMLHYAYGAVKKSIHAYVARAGATVVEVPLPFPVASADAIIAEFRAALAVAKEGGRRVRLAVIDHITSMPSVVIPVKELVAICREEGVDKVFVDAAHSIGQVPVDVRDIGADFYTSNLHKWFFCPPAVAFLHTRKDDPIASQLHHPVVSHEYGNGLPMESGWIGTRDYSAQLVVSEAIDFVNRFEGGIEAIRNRNHEKVIEMGRMLAEAWGTFLGSPPELCGSMVMVGMPGCLGVESDDDAMRVRTMLRKDFQVEVPVYYNSRRVEGQEMTKDKNGDPVTGYVRISHQVYNVTEDYERLRDVVNKLVSEGFTSSKLRPSEKQEA

SEQ ID NO: 37635 - protein, 323 aa, Zea mays subsp. mays
  peptide (1)..(323): Ceres Seq. ID no. 12406577
  misc_feature (1)..(298): Pfam Name: Pfam Description:  Aminotransferase class-V
  misc_feature (1)..(322): NCBI GI NO: 34894318 NR Description: unnamed protein product
  misc_feature (1)..(320): NCBI GI NO: 34894322 NR Description: unnamed protein product
  misc_feature (1)..(315): NCBI GI NO: 30690360 NR Description: expressed protein [Arabidopsis thaliana]
  misc_feature (1)..(315): NCBI GI NO: 15228693 NR Description: putative protein; protein id: At3g62130
  misc_feature (1)..(298): NCBI GI NO: 21230669 NR Description: isopenicillin N epimerase
  misc_feature (1)..(304): NCBI GI NO: 17548917 NR Description: PUTATIVE ISOPENICILLIN N EPIMERASE PROTEIN
  misc_feature (1)..(131): NCBI GI NO: 40738451 NR Description: hypothetical protein AN6227.2
  misc_feature (1)..(229): NCBI GI NO: 25463395 NR Description: hypothetical protein
  misc_feature (1)..(308): NCBI GI NO: 116093 NR Description: Isopenicillin N epimerase
  misc_feature (1)..(135): NCBI GI NO: 27376391 NR Description: blr1280 [Bradyrhizobium japonicum]
MLHYAYGAVKKSIHAYVARAGATVVEVPLPFPVASADAIIAEFRAALAVAKEGGRRVRLAVIDHITSMPSVVIPVKELVAICREEGVDKVFVDAAHSIGQVPVDVRDIGADFYTSNLHKWFFCPPAVAFLHTRKDDPIASQLHHPVVSHEYGNGLPMESGWIGTRDYSAQLVVSEAIDFVNRFEGGIEAIRNRNHEKVIEMGRMLAEAWGTFLGSPPELCGSMVMVGMPGCLGVESDDDAMRVRTMLRKDFQVEVPVYYNSRRVEGQEMTKDKNGDPVTGYVRISHQVYNVTEDYERLRDVVNKLVSEGFTSSKLRPSEKQEA

SEQ ID NO: 37636 - protein, 256 aa, Zea mays subsp. mays
  peptide (1)..(256): Ceres Seq. ID no. 12406578
  misc_feature (1)..(231): Pfam Name: Pfam Description:  Aminotransferase class-V
  misc_feature (1)..(255): NCBI GI NO: 34894318 NR Description: unnamed protein product
  misc_feature (1)..(253): NCBI GI NO: 34894322 NR Description: unnamed protein product
  misc_feature (1)..(248): NCBI GI NO: 30690360 NR Description: expressed protein [Arabidopsis thaliana]
  misc_feature (1)..(248): NCBI GI NO: 15228693 NR Description: putative protein; protein id: At3g62130
  misc_feature (1)..(231): NCBI GI NO: 21230669 NR Description: isopenicillin N epimerase
  misc_feature (1)..(237): NCBI GI NO: 17548917 NR Description: PUTATIVE ISOPENICILLIN N EPIMERASE PROTEIN
  misc_feature (1)..(64): NCBI GI NO: 40738451 NR Description: hypothetical protein AN6227.2
  misc_feature (1)..(162): NCBI GI NO: 25463395 NR Description: hypothetical protein
  misc_feature (1)..(241): NCBI GI NO: 116093 NR Description: Isopenicillin N epimerase
  misc_feature (1)..(68): NCBI GI NO: 27376391 NR Description: blr1280 [Bradyrhizobium japonicum]
MPSVVIPVKELVAICREEGVDKVFVDAAHSIGQVPVDVRDIGADFYTSNLHKWFFCPPAVAFLHTRKDDPIASQLHHPVVSHEYGNGLPMESGWIGTRDYSAQLVVSEAIDFVNRFEGGIEAIRNRNHEKVIEMGRMLAEAWGTFLGSPPELCGSMVMVGMPGCLGVESDDDAMRVRTMLRKDFQVEVPVYYNSRRVEGQEMTKDKNGDPVTGYVRISHQVYNVTEDYERLRDVVNKLVSEGFTSSKLRPSEKQEA

SEQ ID NO: 37637 - DNA, 1550 bp, Zea mays subsp. mays
  misc_feature (1)..(1550): Ceres Seq. ID no. 12386804
  misc_feature (997)..(997): n is a, c, t, g, unknown, or other
  misc_feature (908)..(908): n is a, c, t, g, unknown, or other
ctgaggcctgagctgcctccatatttgcattcttcaccctcgcttcacgtcaccaccattgccatccaagaacaaattaagcgggacactggaaacaaagagagacatgggccttcgcggcggagctcttgccctgcttctgctcctgttcgtccacggaggccagcgagcagcagaggccggcggggacgcgttcgtgagggtccagggcacccgcttcgtgcaggacggcaagccgttcttcgccaacgggttcaacgcctactggctcatgacattcggcgccgaccccgcgcggaggggcaaggtcacctcggcgctcagccaggccgccggcgccggcctctccgtggccaggacgtgggcgttcagcgacggcggcggcggcggcggcagcgcgctgcagtactctcccggccgctacaacgagaacaccttccaggggctggatttcgtgctgtctgaggcaaggaagcatgggattaagatgattctgagcctcgtgaacaattacgacagctttggagggaggaagcagtacgtgcagtgggcgagggagcgggggcagaccattggatctgacgatgagttcttcactaacccctttgtaaagggcatctacaagaaccatatcaaggccgttctgacgagggtgaacacgatcaccggcgtggcatacaaggacgacccgacgatcatggcgtgggagctgatgaacgagccgcgttgccagtccgacgtgtcgggccacgccatccagtcgtggatcacggagatggcggcgcacgtgaagtccatcgacgggaaccacctgctggaggccggcctggagggcttctacggcgcgtcgtcggcccgcaggtccgcgaacccgtcgggggtaccaggtggggcaccgacttcatcgncaacaaccgggcgcccgggatcgacttcgccaccgtgcactcgtacccggaccagtggctgggcggcctggacgcgcaggcgcagctgnggttcctgggcgcctggctcgacgcccacatcgccgacgcgcgggcggtgctgcgcaagccgctgctggtggccgagttcggcgagtcgcgccacgacccgggctacagcggcggccaacgcgacgcggtgttcggcacggtgtacgccagggtctacgactcggcgcgcgccggaggccccgcggcgggcgcgctcttctggcagctcctggcggaggggatggactcctacggggacggctacgaggtcgtcctcccgcaggcgccgtccaccgccggagtcatcgccacgcagagccggaggctgcagggcctcgccagggcgttcgtgcgcgcgcgcaaggcccaccaggggaaggcgggcaagggcgctaagggtggcggcaactgaaagtggggtgaaacgtgtgtggcgagatcaagaagagtgtgtgtgtgtatgcgtcgatgtctcctcgagatgatttgaagattcatccgggagccaagagttacttctacatactatctagcgttgtcctccatgttttattatttagaggacttgcgttt

SEQ ID NO: 37638 - protein, 451 aa, Zea mays subsp. mays
  peptide (1)..(451): Ceres Seq. ID no. 12386805
  misc_feature (35)..(258): Pfam Name: glycosyl hydrolase family 5 Pfam Description: Cellulase
  misc_feature (8)..(258): NCBI GI NO: 34912090 NR Description: putative mannan endo-1,4-beta-mannosidase
  misc_feature (19)..(258): NCBI GI NO: 15239973 NR Description: glycosyl hydrolase family 5/cellulase
  misc_feature (7)..(256): NCBI GI NO: 10178872 NR Description: (1-4)-beta-mannan endohydrolase [Coffea arabica]
  misc_feature (28)..(262): NCBI GI NO: 29786430 NR Description: endo-beta-1,4-mannanase [Lactuca sativa]
  misc_feature (11)..(257): NCBI GI NO: 15529113 NR Description: endo-beta-mannanase [Lycopersicon esculentum]
  misc_feature (11)..(257): NCBI GI NO: 21307619 NR Description: mannan endo-1,4-beta-mannosidase
  misc_feature (11)..(257): NCBI GI NO: 22382040 NR Description: inactive endo-beta-mannanase
  misc_feature (30)..(256): NCBI GI NO: 23477717 NR Description: endo-beta-mannanase [Daucus carota]
  misc_feature (10)..(256): NCBI GI NO: 10129675 NR Description: (1-4)-beta-mannan endohydrolase [Coffea arabica]
  misc_feature (25)..(256): NCBI GI NO: 37544517 NR Description: mannan endo-1,4-beta-mannosidase precursor
  misc_feature (268)..(268): Xaa is any aa, unknown or other
  misc_feature (297)..(297): Xaa is any aa, unknown or other
MGLRGGALALLLLLFVHGGQRAAEAGGDAFVRVQGTRFVQDGKPFFANGFNAYWLMTFGADPARRGKVTSALSQAAGAGLSVARTWAFSDGGGGGGSALQYSPGRYNENTFQGLDFVLSEARKHGIKMILSLVNNYDSFGGRKQYVQWARERGQTIGSDDEFFTNPFVKGIYKNHIKAVLTRVNTITGVAYKDDPTIMAWELMNEPRCQSDVSGHAIQSWITEMAAHVKSIDGNHLLEAGLEGFYGASSARRSANPSGVPGGAPTSSXTTGRPGSTSPPCTRTRTSGWAAWTRRRSXGSWAPGSTPTSPTRGRCCASRCWWPSSASRATTRATAAANATRCSARCTPGSTTRRAPEAPRRARSSGSSWRRGWTPTGTATRSSSRRRRPPPESSPRRAGGCRASPGRSCARARPTRGRRARALRVAATESGVKRVWRDQEECVCVCVDVSSR

SEQ ID NO: 37639 - protein, 396 aa, Zea mays subsp. mays
  peptide (1)..(396): Ceres Seq. ID no. 12386806
  misc_feature (1)..(203): Pfam Name: glycosyl hydrolase family 5 Pfam Description: Cellulase
  misc_feature (1)..(203): NCBI GI NO: 34912090 NR Description: putative mannan endo-1,4-beta-mannosidase
  misc_feature (1)..(203): NCBI GI NO: 15239973 NR Description: glycosyl hydrolase family 5/cellulase
  misc_feature (1)..(201): NCBI GI NO: 10178872 NR Description: (1-4)-beta-mannan endohydrolase [Coffea arabica]
  misc_feature (1)..(207): NCBI GI NO: 29786430 NR Description: endo-beta-1,4-mannanase [Lactuca sativa]
  misc_feature (1)..(202): NCBI GI NO: 15529113 NR Description: endo-beta-mannanase [Lycopersicon esculentum]
  misc_feature (1)..(202): NCBI GI NO: 21307619 NR Description: mannan endo-1,4-beta-mannosidase
  misc_feature (1)..(202): NCBI GI NO: 22382040 NR Description: inactive endo-beta-mannanase
  misc_feature (1)..(201): NCBI GI NO: 23477717 NR Description: endo-beta-mannanase [Daucus carota]
  misc_feature (1)..(201): NCBI GI NO: 10129675 NR Description: (1-4)-beta-mannan endohydrolase [Coffea arabica]
  misc_feature (1)..(201): NCBI GI NO: 37544517 NR Description: mannan endo-1,4-beta-mannosidase precursor
  misc_feature (213)..(213): Xaa is any aa, unknown or other
  misc_feature (242)..(242): Xaa is any aa, unknown or other
MTFGADPARRGKVTSALSQAAGAGLSVARTWAFSDGGGGGGSALQYSPGRYNENTFQGLDFVLSEARKHGIKMILSLVNNYDSFGGRKQYVQWARERGQTIGSDDEFFTNPFVKGIYKNHIKAVLTRVNTITGVAYKDDPTIMAWELMNEPRCQSDVSGHAIQSWITEMAAHVKSIDGNHLLEAGLEGFYGASSARRSANPSGVPGGAPTSSXTTGRPGSTSPPCTRTRTSGWAAWTRRRSXGSWAPGSTPTSPTRGRCCASRCWWPSSASRATTRATAAANATRCSARCTPGSTTRRAPEAPRRARSSGSSWRRGWTPTGTATRSSSRRRRPPPESSPRRAGGCRASPGRSCARARPTRGRRARALRVAATESGVKRVWRDQEECVCVCVDVSSR

SEQ ID NO: 37640 - protein, 324 aa, Zea mays subsp. mays
  peptide (1)..(324): Ceres Seq. ID no. 12386807
  misc_feature (1)..(131): Pfam Name: glycosyl hydrolase family 5 Pfam Description: Cellulase
  misc_feature (1)..(131): NCBI GI NO: 34912090 NR Description: putative mannan endo-1,4-beta-mannosidase
  misc_feature (1)..(131): NCBI GI NO: 15239973 NR Description: glycosyl hydrolase family 5/cellulase
  misc_feature (1)..(129): NCBI GI NO: 10178872 NR Description: (1-4)-beta-mannan endohydrolase [Coffea arabica]
  misc_feature (1)..(135): NCBI GI NO: 29786430 NR Description: endo-beta-1,4-mannanase [Lactuca sativa]
  misc_feature (1)..(130): NCBI GI NO: 15529113 NR Description: endo-beta-mannanase [Lycopersicon esculentum]
  misc_feature (1)..(130): NCBI GI NO: 21307619 NR Description: mannan endo-1,4-beta-mannosidase
  misc_feature (1)..(130): NCBI GI NO: 22382040 NR Description: inactive endo-beta-mannanase
  misc_feature (1)..(129): NCBI GI NO: 23477717 NR Description: endo-beta-mannanase [Daucus carota]
  misc_feature (1)..(129): NCBI GI NO: 10129675 NR Description: (1-4)-beta-mannan endohydrolase [Coffea arabica]
  misc_feature (1)..(129): NCBI GI NO: 37544517 NR Description: mannan endo-1,4-beta-mannosidase precursor
  misc_feature (141)..(141): Xaa is any aa, unknown or other
  misc_feature (170)..(170): Xaa is any aa, unknown or other
MILSLVNNYDSFGGRKQYVQWARERGQTIGSDDEFFTNPFVKGIYKNHIKAVLTRVNTITGVAYKDDPTIMAWELMNEPRCQSDVSGHAIQSWITEMAAHVKSIDGNHLLEAGLEGFYGASSARRSANPSGVPGGAPTSSXTTGRPGSTSPPCTRTRTSGWAAWTRRRSXGSWAPGSTPTSPTRGRCCASRCWWPSSASRATTRATAAANATRCSARCTPGSTTRRAPEAPRRARSSGSSWRRGWTPTGTATRSSSRRRRPPPESSPRRAGGCRASPGRSCARARPTRGRRARALRVAATESGVKRVWRDQEECVCVCVDVSSR

SEQ ID NO: 37641 - DNA, 967 bp, Zea mays subsp. mays
  misc_feature (1)..(967): Ceres Seq. ID no. 12357364
ctgacgagctgagcccacggacgagaggggagacgaggaggggcacaccacgcaggagaccggaggagagcgcgcgcgcggatccacctcgatgttggcaagaccatcagcaccgcctttggtgactgctcaaactcctgaagtcggcatcttcattacagctcgcaacgtctcgggtgcactggtcgccaagcttcctggtaacaaaaacaagtgtggaggaagatcgaatgtccggcagcggaacatccaacctgggaaaaggggctgtcgtcgggagtggcgggcgctctcagcagctgaccaagcgcaggcttctaccttggacgtagatgaggagtgcaaacgggtgctcactccattgggtttctccagcgaagacgccgagaagatgctgaagaaagcgtttggctggacccactcgccgtactggagcgaggagagggagaaggaggttccgaccgccgagacggtagctggagtgctggactacatcaggagcctggggctgtcggacgaagaccttggcaggctgctgaagaagttccccgaggttcttgggtgcgacctcgacggcgaggtgaggccgaatgtgggcaagctggacagtgactggggaataaacgggaagaccctgcggagccttctgctgaggaaccccaaggttctgggctacaatgttgactgcagaggggattgcatggcccagtgcacccgctgttgggttaggttctgatgatgattggttttgttcttcgtcgccacatcgttggtcaggaacttgggacttggttttgcttgctggccatttttctgtaagctagcacctgtcgaatgtagcacaatcgctagctgctggatattgggttggccactgttagttcttatgtacgtacaacagattcaagagctaaaccatgctgctgttgtctgtaaaagagttgcaataaatatggccagaattccc

SEQ ID NO: 37642 - protein, 214 aa, Zea mays subsp. mays
  peptide (1)..(214): Ceres Seq. ID no. 12357365
  misc_feature (132)..(198): Pfam Name: Pfam Description:  mTERF
  misc_feature (1)..(214): NCBI GI NO: 28376711 NR Description: unknown protein
  misc_feature (61)..(214): NCBI GI NO: 15810253 NR Description: unknown protein [Arabidopsis thaliana]
  misc_feature (61)..(214): NCBI GI NO: 25372638 NR Description: hypothetical protein AT4g09620
  misc_feature (61)..(214): NCBI GI NO: 30681137 NR Description: expressed protein [Arabidopsis thaliana]
MLARPSAPPLVTAQTPEVGIFITARNVSGALVAKLPGNKNKCGGRSNVRQRNIQPGKRGCRREWRALSAADQAQASTLDVDEECKRVLTPLGFSSEDAEKMLKKAFGWTHSPYWSEEREKEVPTAETVAGVLDYIRSLGLSDEDLGRLLKKFPEVLGCDLDGEVRPNVGKLDSDWGINGKTLRSLLLRNPKVLGYNVDCRGDCMAQCTRCWVRF

SEQ ID NO: 37643 - protein, 114 aa, Zea mays subsp. mays
  peptide (1)..(114): Ceres Seq. ID no. 12357366
  misc_feature (32)..(98): Pfam Name: Pfam Description:  mTERF
  misc_feature (1)..(114): NCBI GI NO: 28376711 NR Description: unknown protein
  misc_feature (1)..(114): NCBI GI NO: 15810253 NR Description: unknown protein [Arabidopsis thaliana]
  misc_feature (1)..(114): NCBI GI NO: 25372638 NR Description: hypothetical protein AT4g09620
  misc_feature (1)..(114): NCBI GI NO: 30681137 NR Description: expressed protein [Arabidopsis thaliana]
MLKKAFGWTHSPYWSEEREKEVPTAETVAGVLDYIRSLGLSDEDLGRLLKKFPEVLGCDLDGEVRPNVGKLDSDWGINGKTLRSLLLRNPKVLGYNVDCRGDCMAQCTRCWVRF

SEQ ID NO: 37644 - DNA, 1971 bp, Zea mays subsp. mays
  misc_feature (1)..(1971): Ceres Seq. ID no. 13501211
aagagacagagagggggagtggtccgaggtcaataggatataactccaggactcctctccatcagaatcagagacgagtcgagtgagggggcagaggccacaaaacagagagtacccaaacgatcgatctgtgcatctccccgtccgtcccgcaaccatctaattcagaagcagacatcaatggcgagcaacggctgcaacggcaacggcaacggcaacggcaacggcaaggcggctccggcgggtgtggtggtaccggagatcaagttcaccaagctcttcatcaacggcgagttcgtcgacgccgcctccggcaagacattcgataccagggacccacggaccggcgacgtgctggcccacgtagcagaggcagacaaagctgatgtggacctggcggtgaagtccgcccgggacgccttcgagcacggcaagtggccccgcatgtcaggctacgagcgcgggcggatcatgagcaagctggcggacctggtggagcagcacacggaggagctggcggcgctggacggtgccgacgccgggaagctgctgctgctgggcaagatcatcgacatccccgcggccacgcagatgctgcgctactacgccggcgccgccgacaagatccacggcgacgtcctgcgcgtctccggcaggtaccagggctacacgctcaaggagcctatcggcgtcgtgggcgtcatcatcccctggaacttccccaccatgatgttcttcctcaaggtcagcccggcgctcgccgcgggctgcaccgtcgtcgtcaagcccgccgagcagacgccgctttccgcgctctactacgcgcacctcgcaaagatggccggcgtccccgacggagtgatcaacgtcgtccccgggttcggccccaccgccggcgccgcgctcgcctcccacatggacgtcgacagcgtggccttcaccggctccacagaggtgggtcgcctcatcatggagtcggccgcgcggagcaacctcaagacggtctcgctggagctcggcggcaagtcgccgctcatcatcttcgacgacgccgacgtcgacatggccgttaacctgtcgaggcttgccgtcttcttcaacaagggagaggtttgcgtggcgggatcgcgcgtgtacgtgcaggaagggatctatgacgagttcgtcaagaaggccgtggaggccgcgcggagctggaaggttggagacccgttcgatgtcaccagcaacatgggccctcaggttgacaaggaccagtttgagagggtcctaaagtacattgagcatggcaagagcgagggagcgactctgctcaccggcggcaagcctgccgccgacaaagggtactacattgagcccaccatctttgtcgatgtcactgaggacatgaagatcgcgcaggaagagatcttcggccccgtcatgtccctcatgaagttcaagacggttgatgaggtgatcgagaaggccaactgcaccaggtacgggctcgccgccgggatcgtgaccaagagcctggacgtcgccaaccgggtgtcccggtcggtgcgcgccggcaccgtgtgggtgaactgctacttcgccttcgacccggacgcgcccttcggcgggtacaagatgagcggcttcggccgggaccaggggctggcagccatggacaagtacctgcaggtcaagagcgtcatcaccgcgctcccggactcgccatggtactgagttgagccagggaccgatggaaccccatcgatctcttcttgtgcagtgtacatgcgtcatgcgtgcgtgctcacacagctgggttgctgctttgtgcttgtgttcgtctctggtttgtggctcatgtgtgttagtctgcaccctatccttctgtacgtagctgccggacatgcaaatagtatgttaagtacaccatataaactcttgttttataaattcaagtttagcttggagccttcactcccttcagccttg

SEQ ID NO: 37645 - protein, 511 aa, Zea mays subsp. mays
  peptide (1)..(511): Ceres Seq. ID no. 13501212
  misc_feature (1)..(511): NCBI GI NO: 19850247 NR Description: cytosolic aldehyde dehydrogenase RF2D [Zea mays]
  misc_feature (46)..(511): NCBI GI NO: 19850245 NR Description: cytosolic aldehyde dehydrogenase RF2D [Zea mays]
  misc_feature (8)..(511): NCBI GI NO: 34912252 NR Description: putative cytosolic aldehyde dehydrogenase
  misc_feature (13)..(510): NCBI GI NO: 19850241 NR Description: cytosolic aldehyde dehydrogenase RF2C [Zea mays]
  misc_feature (13)..(510): NCBI GI NO: 19850243 NR Description: cytosolic aldehyde dehydrogenase RF2C [Zea mays]
  misc_feature (15)..(510): NCBI GI NO: 18404212 NR Description: aldehyde dehydrogenase (ALDH1a)
  misc_feature (28)..(510): NCBI GI NO: 7431451 NR Description: rf2 nuclear restorer protein - maize
  misc_feature (27)..(510): NCBI GI NO: 20530131 NR Description: mitochondrial aldehyde dehydrogenase
  misc_feature (28)..(510): NCBI GI NO: 14276718 NR Description: T-cytoplasm male sterility restorer factor 2
  misc_feature (1)..(510): NCBI GI NO: 20530127 NR Description: mitochondrial aldehyde dehydrogenase
MASNGCNGNGNGNGNGKAAPAGVVVPEIKFTKLFINGEFVDAASGKTFDTRDPRTGDVLAHVAEADKADVDLAVKSARDAFEHGKWPRMSGYERGRIMSKLADLVEQHTEELAALDGADAGKLLLLGKIIDIPAATQMLRYYAGAADKIHGDVLRVSGRYQGYTLKEPIGVVGVIIPWNFPTMMFFLKVSPALAAGCTVVVKPAEQTPLSALYYAHLAKMAGVPDGVINVVPGFGPTAGAALASHMDVDSVAFTGSTEVGRLIMESAARSNLKTVSLELGGKSPLIIFDDADVDMAVNLSRLAVFFNKGEVCVAGSRVYVQEGIYDEFVKKAVEAARSWKVGDPFDVTSNMGPQVDKDQFERVLKYIEHGKSEGATLLTGGKPAADKGYYIEPTIFVDVTEDMKIAQEEIFGPVMSLMKFKTVDEVIEKANCTRYGLAAGIVTKSLDVANRVSRSVRAGTVWVNCYFAFDPDAPFGGYKMSGFGRDQGLAAMDKYLQVKSVITALPDSPWY

SEQ ID NO: 37646 - protein, 423 aa, Zea mays subsp. mays
  peptide (1)..(423): Ceres Seq. ID no. 13501213
  misc_feature (1)..(423): NCBI GI NO: 19850247 NR Description: cytosolic aldehyde dehydrogenase RF2D [Zea mays]
  misc_feature (1)..(423): NCBI GI NO: 19850245 NR Description: cytosolic aldehyde dehydrogenase RF2D [Zea mays]
  misc_feature (1)..(423): NCBI GI NO: 34912252 NR Description: putative cytosolic aldehyde dehydrogenase
  misc_feature (1)..(422): NCBI GI NO: 19850241 NR Description: cytosolic aldehyde dehydrogenase RF2C [Zea mays]
  misc_feature (1)..(422): NCBI GI NO: 19850243 NR Description: cytosolic aldehyde dehydrogenase RF2C [Zea mays]
  misc_feature (1)..(422): NCBI GI NO: 18404212 NR Description: aldehyde dehydrogenase (ALDH1a)
  misc_feature (1)..(422): NCBI GI NO: 7431451 NR Description: rf2 nuclear restorer protein - maize
  misc_feature (1)..(422): NCBI GI NO: 20530131 NR Description: mitochondrial aldehyde dehydrogenase
  misc_feature (1)..(422): NCBI GI NO: 14276718 NR Description: T-cytoplasm male sterility restorer factor 2
  misc_feature (1)..(422): NCBI GI NO: 20530127 NR Description: mitochondrial aldehyde dehydrogenase
MSGYERGRIMSKLADLVEQHTEELAALDGADAGKLLLLGKIIDIPAATQMLRYYAGAADKIHGDVLRVSGRYQGYTLKEPIGVVGVIIPWNFPTMMFFLKVSPALAAGCTVVVKPAEQTPLSALYYAHLAKMAGVPDGVINVVPGFGPTAGAALASHMDVDSVAFTGSTEVGRLIMESAARSNLKTVSLELGGKSPLIIFDDADVDMAVNLSRLAVFFNKGEVCVAGSRVYVQEGIYDEFVKKAVEAARSWKVGDPFDVTSNMGPQVDKDQFERVLKYIEHGKSEGATLLTGGKPAADKGYYIEPTIFVDVTEDMKIAQEEIFGPVMSLMKFKTVDEVIEKANCTRYGLAAGIVTKSLDVANRVSRSVRAGTVWVNCYFAFDPDAPFGGYKMSGFGRDQGLAAMDKYLQVKSVITALPDSPWY

SEQ ID NO: 37647 - protein, 414 aa, Zea mays subsp. mays
  peptide (1)..(414): Ceres Seq. ID no. 13501214
  misc_feature (1)..(414): NCBI GI NO: 19850247 NR Description: cytosolic aldehyde dehydrogenase RF2D [Zea mays]
  misc_feature (1)..(414): NCBI GI NO: 19850245 NR Description: cytosolic aldehyde dehydrogenase RF2D [Zea mays]
  misc_feature (1)..(414): NCBI GI NO: 34912252 NR Description: putative cytosolic aldehyde dehydrogenase
  misc_feature (1)..(413): NCBI GI NO: 19850241 NR Description: cytosolic aldehyde dehydrogenase RF2C [Zea mays]
  misc_feature (1)..(413): NCBI GI NO: 19850243 NR Description: cytosolic aldehyde dehydrogenase RF2C [Zea mays]
  misc_feature (1)..(413): NCBI GI NO: 18404212 NR Description: aldehyde dehydrogenase (ALDH1a)
  misc_feature (1)..(413): NCBI GI NO: 7431451 NR Description: rf2 nuclear restorer protein - maize
  misc_feature (1)..(413): NCBI GI NO: 20530131 NR Description: mitochondrial aldehyde dehydrogenase
  misc_feature (1)..(413): NCBI GI NO: 14276718 NR Description: T-cytoplasm male sterility restorer factor 2
  misc_feature (1)..(413): NCBI GI NO: 20530127 NR Description: mitochondrial aldehyde dehydrogenase
MSKLADLVEQHTEELAALDGADAGKLLLLGKIIDIPAATQMLRYYAGAADKIHGDVLRVSGRYQGYTLKEPIGVVGVIIPWNFPTMMFFLKVSPALAAGCTVVVKPAEQTPLSALYYAHLAKMAGVPDGVINVVPGFGPTAGAALASHMDVDSVAFTGSTEVGRLIMESAARSNLKTVSLELGGKSPLIIFDDADVDMAVNLSRLAVFFNKGEVCVAGSRVYVQEGIYDEFVKKAVEAARSWKVGDPFDVTSNMGPQVDKDQFERVLKYIEHGKSEGATLLTGGKPAADKGYYIEPTIFVDVTEDMKIAQEEIFGPVMSLMKFKTVDEVIEKANCTRYGLAAGIVTKSLDVANRVSRSVRAGTVWVNCYFAFDPDAPFGGYKMSGFGRDQGLAAMDKYLQVKSVITALPDSPWY

SEQ ID NO: 37648 - DNA, 1294 bp, Zea mays subsp. mays
  misc_feature (1)..(1294): Ceres Seq. ID no. 13494804
gcgcaccgtccctcaccgccggcctctgctcctcttccgccgccgcaggatctcgtatcgccggagaccatgtaccgcgccgccgggagccacctccgctccctcaagcatcatggtgcttctaggcttgccagtacaagtgttgcgaagcagtcctcaggtggtctgttcagctggcttcttggtggaaaatcaagcgaactccctccccttgatgttccactcccaggcattagcattccctcacctctaccagattttgtagagccatctaagacaaaagtcactactcttccaaatggcgtcaagatcgcctcggagacatcatcgagcccagcagcatctgtgggtctgtacattgactgtggttccatttacgaaacacctgcttcatctggagtatcacatctgttggagagaatggccttcaagagcacagtgaatcggactcacttacggttagttcgtgaggtagaagccattggaggaaatgtctctgcatcagcttcccgtgaacaaatgagctatacctatgatgcattgaagagctatacaccagaaatggttgaagttctcattgacagtgtaaggaatccagcattcctcgattgggaggtcaaagagcagctccagaacataaaatctgaaatagctgatgcgtctgctaatcctcaaggtctacttctggaggcccttcattcggttggatattccggggcactggcaaaacctttgatggcttcagaatctgctgtaaaccggttggatgttagcagcttggaggaatttgttgctgaacattacactgctcccaggatggttcttgcagcatcaggagttgatcatgatgcgctgatttcagttgtagaaccacttctgtctgaccttccgtgcgtgaaacgtcctgaagagccaaaatctgtgtacgtgggaggagactatcgctgccaagcagattctccaaacacacacatcgcacttgcttttgagatgccaggtggttggaatcaagagaaaactgcaatggttgtgacagtgcttcagatgctcatgggaggaggagggtccttctctgctggtgggcctggaaagggaatgcattctcgattgtatctccgtgtcttgaccaacttccaacagattgaatcattctctgctttcaatagcgtctataacaattcgggcctttttggaatttatgcagtcactagcccagacttttcatcgaaggctgtggatttggcagcaggggaactcctggagattgcgacacctggaaaagttacacaagaac

SEQ ID NO: 37649 - protein, 431 aa, Zea mays subsp. mays
  peptide (1)..(431): Ceres Seq. ID no. 13494805
  misc_feature (254)..(430): Pfam Name: Pfam Description:  Peptidase M16 inactive domain
  misc_feature (25)..(430): NCBI GI NO: 34909352 NR Description: putative mitochondrial processing peptidase alphasubuunit
  misc_feature (24)..(428): NCBI GI NO: 2117355 NR Description: mitochondrial processing peptidase (EC 3
  misc_feature (24)..(430): NCBI GI NO: 266567 NR Description: Mitochondrial processing peptidase alpha subunit
  misc_feature (24)..(430): NCBI GI NO: 18401141 NR Description: mitochondrial processing peptidase alpha subunit -related
  misc_feature (24)..(430): NCBI GI NO: 14334534 NR Description: putative mitochondrial processing peptidase alpha subunit
  misc_feature (24)..(430): NCBI GI NO: 15218090 NR Description: mitochondrial processing peptidase alpha subunit -related
  misc_feature (24)..(430): NCBI GI NO: 21594004 NR Description: mitochondrial processing peptidase alpha subunit
  misc_feature (40)..(430): NCBI GI NO: 34906418 NR Description: putative mitochondrial processing peptidase(EC:3
  misc_feature (24)..(430): NCBI GI NO: 11993905 NR Description: mitochondrial processing peptidase alpha-chainprecursor
  misc_feature (24)..(430): NCBI GI NO: 15076515 NR Description: mitochondrial processing peptidase alpha subunit
AHRPSPPASAPLPPPQDLVSPETMYRAAGSHLRSLKHHGASRLASTSVAKQSSGGLFSWLLGGKSSELPPLDVPLPGISIPSPLPDFVEPSKTKVTTLPNGVKIASETSSSPAASVGLYIDCGSIYETPASSGVSHLLERMAFKSTVNRTHLRLVREVEAIGGNVSASASREQMSYTYDALKSYTPEMVEVLIDSVRNPAFLDWEVKEQLQNIKSEIADASANPQGLLLEALHSVGYSGALAKPLMASESAVNRLDVSSLEEFVAEHYTAPRMVLAASGVDHDALISVVEPLLSDLPCVKRPEEPKSVYVGGDYRCQADSPNTHIALAFEMPGGWNQEKTAMVVTVLQMLMGGGGSFSAGGPGKGMHSRLYLRVLTNFQQIESFSAFNSVYNNSGLFGIYAVTSPDFSSKAVDLAAGELLEIATPGKVTQE

SEQ ID NO: 37650 - protein, 408 aa, Zea mays subsp. mays
  peptide (1)..(408): Ceres Seq. ID no. 13494806
  misc_feature (231)..(407): Pfam Name: Pfam Description:  Peptidase M16 inactive domain
  misc_feature (2)..(407): NCBI GI NO: 34909352 NR Description: putative mitochondrial processing peptidase alphasubuunit
  misc_feature (1)..(405): NCBI GI NO: 2117355 NR Description: mitochondrial processing peptidase (EC 3
  misc_feature (1)..(407): NCBI GI NO: 266567 NR Description: Mitochondrial processing peptidase alpha subunit
  misc_feature (1)..(407): NCBI GI NO: 18401141 NR Description: mitochondrial processing peptidase alpha subunit -related
  misc_feature (1)..(407): NCBI GI NO: 14334534 NR Description: putative mitochondrial processing peptidase alpha subunit
  misc_feature (1)..(407): NCBI GI NO: 15218090 NR Description: mitochondrial processing peptidase alpha subunit -related
  misc_feature (1)..(407): NCBI GI NO: 21594004 NR Description: mitochondrial processing peptidase alpha subunit
  misc_feature (17)..(407): NCBI GI NO: 34906418 NR Description: putative mitochondrial processing peptidase(EC:3
  misc_feature (1)..(407): NCBI GI NO: 11993905 NR Description: mitochondrial processing peptidase alpha-chainprecursor
  misc_feature (1)..(407): NCBI GI NO: 15076515 NR Description: mitochondrial processing peptidase alpha subunit
MYRAAGSHLRSLKHHGASRLASTSVAKQSSGGLFSWLLGGKSSELPPLDVPLPGISIPSPLPDFVEPSKTKVTTLPNGVKIASETSSSPAASVGLYIDCGSIYETPASSGVSHLLERMAFKSTVNRTHLRLVREVEAIGGNVSASASREQMSYTYDALKSYTPEMVEVLIDSVRNPAFLDWEVKEQLQNIKSEIADASANPQGLLLEALHSVGYSGALAKPLMASESAVNRLDVSSLEEFVAEHYTAPRMVLAASGVDHDALISVVEPLLSDLPCVKRPEEPKSVYVGGDYRCQADSPNTHIALAFEMPGGWNQEKTAMVVTVLQMLMGGGGSFSAGGPGKGMHSRLYLRVLTNFQQIESFSAFNSVYNNSGLFGIYAVTSPDFSSKAVDLAAGELLEIATPGKVTQE

SEQ ID NO: 37651 - protein, 291 aa, Zea mays subsp. mays
  peptide (1)..(291): Ceres Seq. ID no. 13494807
  misc_feature (114)..(290): Pfam Name: Pfam Description:  Peptidase M16 inactive domain
  misc_feature (1)..(290): NCBI GI NO: 34909352 NR Description: putative mitochondrial processing peptidase alphasubuunit
  misc_feature (1)..(288): NCBI GI NO: 2117355 NR Description: mitochondrial processing peptidase (EC 3
  misc_feature (1)..(290): NCBI GI NO: 266567 NR Description: Mitochondrial processing peptidase alpha subunit
  misc_feature (1)..(290): NCBI GI NO: 18401141 NR Description: mitochondrial processing peptidase alpha subunit -related
  misc_feature (1)..(290): NCBI GI NO: 14334534 NR Description: putative mitochondrial processing peptidase alpha subunit
  misc_feature (1)..(290): NCBI GI NO: 15218090 NR Description: mitochondrial processing peptidase alpha subunit -related
  misc_feature (1)..(290): NCBI GI NO: 21594004 NR Description: mitochondrial processing peptidase alpha subunit
  misc_feature (1)..(290): NCBI GI NO: 34906418 NR Description: putative mitochondrial processing peptidase(EC:3
  misc_feature (1)..(290): NCBI GI NO: 11993905 NR Description: mitochondrial processing peptidase alpha-chainprecursor
  misc_feature (1)..(290): NCBI GI NO: 15076515 NR Description: mitochondrial processing peptidase alpha subunit
MAFKSTVNRTHLRLVREVEAIGGNVSASASREQMSYTYDALKSYTPEMVEVLIDSVRNPAFLDWEVKEQLQNIKSEIADASANPQGLLLEALHSVGYSGALAKPLMASESAVNRLDVSSLEEFVAEHYTAPRMVLAASGVDHDALISVVEPLLSDLPCVKRPEEPKSVYVGGDYRCQADSPNTHIALAFEMPGGWNQEKTAMVVTVLQMLMGGGGSFSAGGPGKGMHSRLYLRVLTNFQQIESFSAFNSVYNNSGLFGIYAVTSPDFSSKAVDLAAGELLEIATPGKVTQE

SEQ ID NO: 37652 - DNA, 1385 bp, Zea mays subsp. mays; identical to SEQ ID NO: 24078
  misc_feature (1)..(1385): Ceres Seq. ID no. 12348953

SEQ ID NO: 37653 - protein, 310 aa, Zea mays subsp. mays; identical to SEQ ID NO: 24079
  peptide (1)..(310): Ceres Seq. ID no. 12348954
  misc_feature (158)..(310): Pfam Name: Pfam Description:  3-oxo-5-alpha-steroid 4-dehydrogenase
  misc_feature (1)..(310): NCBI GI NO: 34895848 NR Description: putative glycoprotein
  misc_feature (1)..(310): NCBI GI NO: 15233250 NR Description: synaptic glycoprotein SC2-like protein
  misc_feature (1)..(310): NCBI GI NO: 25004880 NR Description: steroid 5-alpha reductase [Cicer arietinum]
  misc_feature (38)..(310): NCBI GI NO: 39590267 NR Description: Hypothetical protein CBG11196
  misc_feature (38)..(310): NCBI GI NO: 17531783 NR Description: Synaptic glycoprotein SC2 (35.1 kD)
  misc_feature (24)..(291): NCBI GI NO: 13111809 NR Description: Unknown (protein for IMAGE:2901253) [Homo sapiens]
  misc_feature (24)..(291): NCBI GI NO: 24475816 NR Description: glycoprotein, synaptic 2
  misc_feature (24)..(291): NCBI GI NO: 30585427 NR Description: Homo sapiens glycoprotein, synaptic 2
  misc_feature (24)..(310): NCBI GI NO: 33585860 NR Description: Glycoprotein, synaptic 2 [Xenopus laevis]
  misc_feature (20)..(291): NCBI GI NO: 31418870 NR Description: Unknown (protein for MGC:64025) [Danio rerio]

SEQ ID NO: 37654 - protein, 202 aa, Zea mays subsp. mays; identical to SEQ ID NO: 24080
  peptide (1)..(202): Ceres Seq. ID no. 12348955
  misc_feature (50)..(202): Pfam Name: Pfam Description:  3-oxo-5-alpha-steroid 4-dehydrogenase
  misc_feature (1)..(202): NCBI GI NO: 34895848 NR Description: putative glycoprotein
  misc_feature (1)..(202): NCBI GI NO: 15233250 NR Description: synaptic glycoprotein SC2-like protein
  misc_feature (1)..(202): NCBI GI NO: 25004880 NR Description: steroid 5-alpha reductase [Cicer arietinum]
  misc_feature (1)..(202): NCBI GI NO: 39590267 NR Description: Hypothetical protein CBG11196
  misc_feature (1)..(202): NCBI GI NO: 17531783 NR Description: Synaptic glycoprotein SC2 (35.1 kD)
  misc_feature (1)..(183): NCBI GI NO: 13111809 NR Description: Unknown (protein for IMAGE:2901253) [Homo sapiens]
  misc_feature (1)..(183): NCBI GI NO: 24475816 NR Description: glycoprotein, synaptic 2
  misc_feature (1)..(183): NCBI GI NO: 30585427 NR Description: Homo sapiens glycoprotein, synaptic 2
  misc_feature (1)..(202): NCBI GI NO: 33585860 NR Description: Glycoprotein, synaptic 2 [Xenopus laevis]
  misc_feature (1)..(183): NCBI GI NO: 31418870 NR Description: Unknown (protein for MGC:64025) [Danio rerio]

SEQ ID NO: 37655 - protein, 184 aa, Zea mays subsp. mays; identical to SEQ ID NO: 24081
  peptide (1)..(184): Ceres Seq. ID no. 12348956
  misc_feature (32)..(184): Pfam Name: Pfam Description:  3-oxo-5-alpha-steroid 4-dehydrogenase
  misc_feature (1)..(184): NCBI GI NO: 34895848 NR Description: putative glycoprotein
  misc_feature (1)..(184): NCBI GI NO: 15233250 NR Description: synaptic glycoprotein SC2-like protein
  misc_feature (1)..(184): NCBI GI NO: 25004880 NR Description: steroid 5-alpha reductase [Cicer arietinum]
  misc_feature (1)..(184): NCBI GI NO: 39590267 NR Description: Hypothetical protein CBG11196
  misc_feature (1)..(184): NCBI GI NO: 17531783 NR Description: Synaptic glycoprotein SC2 (35.1 kD)
  misc_feature (1)..(165): NCBI GI NO: 13111809 NR Description: Unknown (protein for IMAGE:2901253) [Homo sapiens]
  misc_feature (1)..(165): NCBI GI NO: 24475816 NR Description: glycoprotein, synaptic 2
  misc_feature (1)..(165): NCBI GI NO: 30585427 NR Description: Homo sapiens glycoprotein, synaptic 2
  misc_feature (1)..(184): NCBI GI NO: 33585860 NR Description: Glycoprotein, synaptic 2 [Xenopus laevis]
  misc_feature (1)..(165): NCBI GI NO: 31418870 NR Description: Unknown (protein for MGC:64025) [Danio rerio]

SEQ ID NO: 37656 - DNA, 1742 bp, Zea mays subsp. mays
  misc_feature (1)..(1742): Ceres Seq. ID no. 12356991
aagcgcccaaggcagcggagagagctagctccctcctcctcctcaggtagcgagcgagcgagcgagcgagctcctctgcccctctgcacacctggcctccccttctccgctgcaggaccgccgttgacgactgctccaccagtactgcgcgcgcccgcgctgcctacccttacctagccagagcgcggcgcgcgagagggagaacgaccaggaggggaggagatcgatcgatcgatcgatcgagatagatggctttcctcaacatggagcagcagacctgggccttcaccttcggtatcctaggtaacataatctcgctgatggtgttcctttcgccgctgccgacgttctaccgcgtgtaccgcaagaagtcgacggaggggttccagtcgaccccgtacgtggtgacgctgttcagctgcatgctgtggatcttctacgcgctgctcaagtccggcgccgagctgctggtgaccatcaacggcgtcgggtgcgtgatcgaggcggcgtacctggcgacgtacctggtgtacgcgcccaaggccgccagggcgctgacggccaagatgctgctgggctcaacgtcggcgtcttcggcctcgccgcgctcgccaccatggtggtctccagcgccggcctccgcgtgcgcgtgctcggatggatctgcgtcagcgtcgcgctcagcgtattcgccgcgccgctcagcatcatgcggcaggtggtccggaccaagagcgtggagttcatgcccttctcgctctccttcttcctggtgctgagcgccgtgatctggttcgcgtacggcgcgctgaagagggacgtgttcgtggcgttccccaacgtgctgggcttcgtcttcggcgtcgcgcagatggcgctgtacatggcgtacaggaacaaggagcccgcggcggcggcggcggcgatagcggtgacggtggatcaggaggcgaagctgccggagcacgccaaggaggtggtggtggccgaggccagggcgagctgcggtgccgaggtgcaccccatcgacatcgatatcgaagctacgccgacgccggtcgaggaggtgcacgagccgcaggtggtcgtggtcgtggtcgtcgacgtggagcctgtcacctgcgccggcgccgccgaggcagatgcgtccggcgttgccgacggcggcgtccctggacccatggcgccgccggagcagctggcgatcaagcccgacatggccatttccgtggaggcgtaggttggttaaagtgtgatagcagagtgagtcgatatcgatcagtagtaggtttgtcgagtcgcctgctgctgctgctacgcgacagcagcggccagatgtactgcctgcatgcatgcagtccctcccgttgactcgacccgtagagatgggatgggatggaagtagccgggcccttgggcgagtagcggcgccttgggttggcacccacgggccagccgtactggcctgtgtgatgaaccggcgagagaaagagatgagataatgtgcgagcgagagagaaggttgggttgtggtagactggtagttgaagaagacggctagctagctagatgctgctgggctctctatctgtctctagatctgtgtgtgtctgtgtaatcgaggattccctcaccttgcttgccgcctcccttttgtgtccttctagtctgatgattgttttcattccatccatgccggcgtcgcagtaataaaaaaaaaattggaatggacgggttcactg

SEQ ID NO: 37657 - protein, 237 aa, Zea mays subsp. mays
  peptide (1)..(237): Ceres Seq. ID no. 12356992
  misc_feature (1)..(215): NCBI GI NO: 29830954 NR Description: putative GntR-family transcriptional regulator
  misc_feature (73)..(186): NCBI GI NO: 9453857 NR Description: EBNA-1 [Cynomolgus Epstein-Barr Virus TsB-B6]
  misc_feature (73)..(186): NCBI GI NO: 9453859 NR Description: EBNA-1 [Cynomolgus Epstein-Barr Virus Si-IIA]
  misc_feature (69)..(151): NCBI GI NO: 15235002 NR Description: glycine-rich RNA-binding protein 8
  misc_feature (66)..(158): NCBI GI NO: 17544466 NR Description: U2 snRNP auxiliary factor (30.9 kD)
  misc_feature (72)..(195): NCBI GI NO: 11359643 NR Description: related to glycine-rich cell wall structural
MDLRQRRAQRIRRAAQHHAAGGPDQERGVHALLALLLPGAERRDLVRVRRAEEGRVRGVPQRAGLRLRRRADGAVHGVQEQGARGGGGGDSGDGGSGGEAAGARQGGGGGRGQGELRCRGAPHRHRYRSYADAGRGGARAAGGRGRGRRRGACHLRRRRRGRCVRRCRRRRPWTHGAAGAAGDQARHGHFRGGVGWLKCDSRVSRYRSVVGLSSRLLLLLRDSSGQMYCLHACSPSR

SEQ ID NO: 37658 - protein, 207 aa, Zea mays subsp. mays
  peptide (1)..(207): Ceres Seq. ID no. 12356993
  misc_feature (1)..(94): NCBI GI NO: 1619602 NR Description: MtN3 [Medicago truncatula]
  misc_feature (1)..(178): NCBI GI NO: 21593422 NR Description: senescence-associated protein (SAG29)
  misc_feature (1)..(101): NCBI GI NO: 14715258 NR Description: N3 like protein [Medicago truncatula]
  misc_feature (1)..(178): NCBI GI NO: 15240040 NR Description: senescence-associated protein
  misc_feature (1)..(116): NCBI GI NO: 15229019 NR Description: MTN3-like protein; protein id: At3g48740
  misc_feature (1)..(122): NCBI GI NO: 15237803 NR Description: MtN3-like protein; protein id: At5g23660
  misc_feature (1)..(96): NCBI GI NO: 11345413 NR Description: NEC1 [Petunia x hybrida]
  misc_feature (1)..(144): NCBI GI NO: 15241265 NR Description: MtN3-like protein; protein id: At5g50790
  misc_feature (1)..(99): NCBI GI NO: 21593109 NR Description: MtN3-like protein [Arabidopsis thaliana]
  misc_feature (1)..(99): NCBI GI NO: 15241278 NR Description: MtN3-like protein; protein id: At5g50800
MVVSSAGLRVRVLGWICVSVALSVFAAPLSIMRQVVRTKSVEFMPFSLSFFLVLSAVIWFAYGALKRDVFVAFPNVLGFVFGVAQMALYMAYRNKEPAAAAAAIAVTVDQEAKLPEHAKEVVVAEARASCGAEVHPIDIDIEATPTPVEEVHEPQVVVVVVVDVEPVTCAGAAEADASGVADGGVPGPMAPPEQLAIKPDMAISVEA

SEQ ID NO: 37659 - protein, 176 aa, Zea mays subsp. mays
  peptide (1)..(176): Ceres Seq. ID no. 12356994
  misc_feature (13)..(100): Pfam Name: Pfam Description:  MtN3/saliva family
  misc_feature (6)..(117): NCBI GI NO: 1619602 NR Description: MtN3 [Medicago truncatula]
  misc_feature (12)..(114): NCBI GI NO: 21593422 NR Description: senescence-associated protein (SAG29)
  misc_feature (6)..(109): NCBI GI NO: 14715258 NR Description: N3 like protein [Medicago truncatula]
  misc_feature (12)..(114): NCBI GI NO: 15240040 NR Description: senescence-associated protein
  misc_feature (1)..(109): NCBI GI NO: 15229019 NR Description: MTN3-like protein; protein id: At3g48740
  misc_feature (10)..(109): NCBI GI NO: 15237803 NR Description: MtN3-like protein; protein id: At5g23660
  misc_feature (12)..(109): NCBI GI NO: 11345413 NR Description: NEC1 [Petunia x hybrida]
  misc_feature (6)..(109): NCBI GI NO: 15241265 NR Description: MtN3-like protein; protein id: At5g50790
  misc_feature (11)..(108): NCBI GI NO: 21593109 NR Description: MtN3-like protein [Arabidopsis thaliana]
  misc_feature (11)..(108): NCBI GI NO: 15241278 NR Description: MtN3-like protein; protein id: At5g50800
MAFLNMEQQTWAFTFGILGNIISLMVFLSPLPTFYRVYRKKSTEGFQSTPYVVTLFSCMLWIFYALLKSGAELLVTINGVGCVIEAAYLATYLVYAPKAARALTAKMLLGSTSASSASPRSPPWWSPAPASACACSDGSASASRSAYSPRRSASCGRWSGPRAWSSCPSRSPSSWC

SEQ ID NO: 37660 - DNA, 1472 bp, Zea mays subsp. mays
  misc_feature (1)..(1472): Ceres Seq. ID no. 12405326
aatgcttcgaaaattgtgtcatcccacaccgtgttcacctcctcacacggtctagagtcaagtcaactcactctcctagtcttcgatccagatcccatcgggttggactgtgtacactcttaaaacttcatcagctcccgagcaatctcagcccgtacatcaggttcttggatctctcccgagctgggatccgtcaagttttctgctccagcggcgacaattcgtcaggaatggccaacaagccgagtcttctgagcactctgccgactaacccaccagcacagtttctgaaagatatcacggacggcttctctgaaactcaaatgcttggtgaaggtgcatttggaactgtttacaagggcattctgcaagatgggcagccaattgcggtgaagaagcttgcagagaatgcgccggtggcacctgagaagcagttcaagattggggttgggaacccttatggccatgcagcatccgaatatagtcaggatactcggctactgccgtgaaccgcaaaggaaagtgattgagcagagtggaagatacattattgtagacgtggttgagagcttactgtactatgaatacgttcctaatggaaaccttgaaaagtatatttccgatgcatcagcttctagacctgattggaagacatgcttcgagataatcaagggcatctgccagggcttacgttacctacataaggaaatggataggccaattgttcatttggatcttcatcctaccaacatattgttggatgagaacatggtgccgaaaatcacggatttcggcctgtccagactctttggtgaagaacaaaccagaataaacacaattaatgttgtgggaaagaaagggtacatggctccagaatatctatataggggtgaaatttcaacccggtcagatatatatagcttaggtctagtaatcatggagattataacaggcaagaacagttcttcaagcgacaaagatatgtctgcaagggactttgtagataaaggtgcgtgagacgtggacagatgagcacatagcatccaagcactcagcactagatgcagtcagcctccaggaagtaagaacatgcattgaaattgggctaaaatgtgtggatattgatcagaacaagagaccttctatagttgaaattgttgacaagctcaatggaaggcatgctcactgaatgatgaactcctgcatactatacatgcaagtgaaaattatgttgcggacccatggagatttgctctagatggaatcatggacaaaataattgtatgtgttaccgattatgtacttttgaataatgtgttcctcgtgttgtgtcactttttcaggagttccttgatttgtcattgtgtttttctttcttttgacacaaatctgcatgcataacctgttgaaaaattgtgtgcatactagttatttgttttttctcatgttatgtgaatactatttttttacct

SEQ ID NO: 37661 - protein, 202 aa, Zea mays subsp. mays
  peptide (1)..(202): Ceres Seq. ID no. 12405327
  misc_feature (17)..(199): NCBI GI NO: 38344521 NR Description: OSJNBa0016N04.14
  misc_feature (59)..(198): NCBI GI NO: 37532178 NR Description: putative receptor-like protein kinase
  misc_feature (14)..(199): NCBI GI NO: 21929729 NR Description: barley stem rust resistance protein
  misc_feature (14)..(199): NCBI GI NO: 21728344 NR Description: stem rust resistance protein Rpg1
  misc_feature (14)..(199): NCBI GI NO: 21929723 NR Description: barley stem rust resistance protein
  misc_feature (17)..(200): NCBI GI NO: 21929723 NR Description: barley stem rust resistance protein
  misc_feature (17)..(200): NCBI GI NO: 21929729 NR Description: barley stem rust resistance protein
  misc_feature (17)..(200): NCBI GI NO: 21728344 NR Description: stem rust resistance protein Rpg1
  misc_feature (20)..(191): NCBI GI NO: 4008010 NR Description: receptor-like protein kinase
  misc_feature (20)..(191): NCBI GI NO: 15220353 NR Description: serine/threonine kinase, putative
MRRWHLRSSSRLGLGTLMAMQHPNIVRILGYCREPQRKVIEQSGRYIIVDVVESLLYYEYVPNGNLEKYISDASASRPDWKTCFEIIKGICQGLRYLHKEMDRPIVHLDLHPTNILLDENMVPKITDFGLSRLFGEEQTRINTINVVGKKGYMAPEYLYRGEISTRSDIYSLGLVIMEIITGKNSSSSDKDMSARDFVDKGA

SEQ ID NO: 37662 - protein, 185 aa, Zea mays subsp. mays
  peptide (1)..(185): Ceres Seq. ID no. 12405328
  misc_feature (1)..(182): NCBI GI NO: 38344521 NR Description: OSJNBa0016N04.14
  misc_feature (42)..(181): NCBI GI NO: 37532178 NR Description: putative receptor-like protein kinase
  misc_feature (1)..(182): NCBI GI NO: 21929729 NR Description: barley stem rust resistance protein
  misc_feature (1)..(182): NCBI GI NO: 21728344 NR Description: stem rust resistance protein Rpg1
  misc_feature (1)..(182): NCBI GI NO: 21929723 NR Description: barley stem rust resistance protein
  misc_feature (1)..(183): NCBI GI NO: 21929723 NR Description: barley stem rust resistance protein
  misc_feature (1)..(183): NCBI GI NO: 21929729 NR Description: barley stem rust resistance protein
  misc_feature (1)..(183): NCBI GI NO: 21728344 NR Description: stem rust resistance protein Rpg1
  misc_feature (3)..(174): NCBI GI NO: 4008010 NR Description: receptor-like protein kinase
  misc_feature (3)..(174): NCBI GI NO: 15220353 NR Description: serine/threonine kinase, putative
MAMQHPNIVRILGYCREPQRKVIEQSGRYIIVDVVESLLYYEYVPNGNLEKYISDASASRPDWKTCFEIIKGICQGLRYLHKEMDRPIVHLDLHPTNILLDENMVPKITDFGLSRLFGEEQTRINTINVVGKKGYMAPEYLYRGEISTRSDIYSLGLVIMEIITGKNSSSSDKDMSARDFVDKGA

SEQ ID NO: 37663 - protein, 183 aa, Zea mays subsp. mays
  peptide (1)..(183): Ceres Seq. ID no. 12405329
  misc_feature (1)..(180): NCBI GI NO: 38344521 NR Description: OSJNBa0016N04.14
  misc_feature (40)..(179): NCBI GI NO: 37532178 NR Description: putative receptor-like protein kinase
  misc_feature (1)..(180): NCBI GI NO: 21929729 NR Description: barley stem rust resistance protein
  misc_feature (1)..(180): NCBI GI NO: 21728344 NR Description: stem rust resistance protein Rpg1
  misc_feature (1)..(180): NCBI GI NO: 21929723 NR Description: barley stem rust resistance protein
  misc_feature (1)..(181): NCBI GI NO: 21929723 NR Description: barley stem rust resistance protein
  misc_feature (1)..(181): NCBI GI NO: 21929729 NR Description: barley stem rust resistance protein
  misc_feature (1)..(181): NCBI GI NO: 21728344 NR Description: stem rust resistance protein Rpg1
  misc_feature (1)..(172): NCBI GI NO: 4008010 NR Description: receptor-like protein kinase
  misc_feature (1)..(172): NCBI GI NO: 15220353 NR Description: serine/threonine kinase, putative
MQHPNIVRILGYCREPQRKVIEQSGRYIIVDVVESLLYYEYVPNGNLEKYISDASASRPDWKTCFEIIKGICQGLRYLHKEMDRPIVHLDLHPTNILLDENMVPKITDFGLSRLFGEEQTRINTINVVGKKGYMAPEYLYRGEISTRSDIYSLGLVIMEIITGKNSSSSDKDMSARDFVDKGA

SEQ ID NO: 37664 - DNA, 764 bp, Zea mays subsp. mays
  misc_feature (1)..(764): Ceres Seq. ID no. 12406736
cttgcccggtctccgccttttcggagaccgcacccaatggccggctcaaccaaggtgctggccgccatcctgctcgtcgacctcgtcgccttcggcctcgccatcggcgcggtgcagagccgcccctcggcgaggctggagacggacgagaggcaggagtggacctactgcgtgtaccgcacggacgccgccacggcgctgggtggcgccgcgctcgcgctggtgttcgtgggacaggcggtggccgccgccgccagtcgctgcttctgctgcgggtccgtgctgcggcccggcggcgccagggcctgcgcgctcgtcctcttcatctcctcctgggtgacattcgtcatcgctgaggcgtgcttgctagctggtcttttgcaatccgcctaccacactggctaccggaaggtgtttttccagaacccgccggactgcgagacggtgcggaggggcacgttcggagccggcgctgcttttgcccttttcacctgcgtgctcacctcggcctactactactgcttctccaaggcgcggatctactaccaccgcccggaagccgccatcggcatgactccgttgtaaacagatttaccggtctctctgcagtaacagttttgatagcaactatatatgtctgttaggtttttgcatatattatgttgggctggtatgtgacagtttttcaggaccatgtatctgactgagttgaactcaatgaaatatgatggctgctggtgctggaccggctcatccttagttcc

SEQ ID NO: 37665 - protein, 194 aa, Zea mays subsp. mays
  peptide (1)..(194): Ceres Seq. ID no. 12406737
  misc_feature (13)..(193): NCBI GI NO: 22748411 NR Description: hypothetical protein
  misc_feature (16)..(185): NCBI GI NO: 18400781 NR Description: expressed protein; protein id: At3g15480
  misc_feature (19)..(179): NCBI GI NO: 34394069 NR Description: unknown protein
  misc_feature (16)..(185): NCBI GI NO: 18404242 NR Description: expressed protein; protein id: At1g52910
  misc_feature (16)..(191): NCBI GI NO: 38016521 NR Description: fiber protein Fb34 [Gossypium barbadense]
  misc_feature (16)..(178): NCBI GI NO: 18416991 NR Description: Expressed protein; protein id: At4g27435
  misc_feature (16)..(194): NCBI GI NO: 18407003 NR Description: Expressed protein; protein id: At1g61065
  misc_feature (16)..(194): NCBI GI NO: 21554630 NR Description: unknown [Arabidopsis thaliana]
  misc_feature (19)..(190): NCBI GI NO: 38344206 NR Description: OSJNBa0064G10.22
  misc_feature (16)..(178): NCBI GI NO: 18391509 NR Description: expressed protein; protein id: At1g13380
LARSPPFRRPHPMAGSTKVLAAILLVDLVAFGLAIGAVQSRPSARLETDERQEWTYCVYRTDAATALGGAALALVFVGQAVAAAASRCFCCGSVLRPGGARACALVLFISSWVTFVIAEACLLAGLLQSAYHTGYRKVFFQNPPDCETVRRGTFGAGAAFALFTCVLTSAYYYCFSKARIYYHRPEAAIGMTPL

SEQ ID NO: 37666 - protein, 182 aa, Zea mays subsp. mays
  peptide (1)..(182): Ceres Seq. ID no. 12406738
  misc_feature (1)..(181): NCBI GI NO: 22748411 NR Description: hypothetical protein
  misc_feature (4)..(173): NCBI GI NO: 18400781 NR Description: expressed protein; protein id: At3g15480
  misc_feature (7)..(167): NCBI GI NO: 34394069 NR Description: unknown protein
  misc_feature (4)..(173): NCBI GI NO: 18404242 NR Description: expressed protein; protein id: At1g52910
  misc_feature (4)..(179): NCBI GI NO: 38016521 NR Description: fiber protein Fb34 [Gossypium barbadense]
  misc_feature (4)..(166): NCBI GI NO: 18416991 NR Description: Expressed protein; protein id: At4g27435
  misc_feature (4)..(182): NCBI GI NO: 18407003 NR Description: Expressed protein; protein id: At1g61065
  misc_feature (4)..(182): NCBI GI NO: 21554630 NR Description: unknown [Arabidopsis thaliana]
  misc_feature (7)..(178): NCBI GI NO: 38344206 NR Description: OSJNBa0064G10.22
  misc_feature (4)..(166): NCBI GI NO: 18391509 NR Description: expressed protein; protein id: At1g13380
MAGSTKVLAAILLVDLVAFGLAIGAVQSRPSARLETDERQEWTYCVYRTDAATALGGAALALVFVGQAVAAAASRCFCCGSVLRPGGARACALVLFISSWVTFVIAEACLLAGLLQSAYHTGYRKVFFQNPPDCETVRRGTFGAGAAFALFTCVLTSAYYYCFSKARIYYHRPEAAIGMTPL

SEQ ID NO: 37667 - protein, 117 aa, Zea mays subsp. mays
  peptide (1)..(117): Ceres Seq. ID no. 12406739
CPVSAFSETAPNGRLNQGAGRHPARRPRRLRPRHRRGAEPPLGEAGDGREAGVDLLRVPHGRRHGAGWRRARAGVRGTGGGRRRQSLLLLRVRAAARRRQGLRARPLHLLLGDIRHR

SEQ ID NO: 37668 - DNA, 478 bp, Zea mays subsp. mays
  misc_feature (1)..(478): Ceres Seq. ID no. 12578891
atcccaaagagcaagagcacgcagtagtgcagcagcactgaagcactacttcctgcactcactgtgctagctgctcaaaccgtagtagtaacagtccatcaccayaccayaccaccaatggctcccaaggttgcgctcttccttgccctaagcctcctgttcgctgccaccgcgcatggctgcgaaccctactgttccggcccagtcgtcccaacaccaccagtcgtgccgactccgtcgtcgcatagccacgggcgctgcccgatcgacgcgctcaagctcaaggtgtgcgccaatgtgctgggcctcgtcaaggtcggcctaccgcaatacgagcaatgctgcccattgctggaggggctggtggaccttgacgccgcattgtgcctctgcaccgccatcaaggcaaacgtcctcggcatccacctcaacgtgccccttagcctcaacctcatcctcaacaactgcggcaagattt

SEQ ID NO: 37669 - protein, 120 aa, Zea mays subsp. mays
  peptide (1)..(120): Ceres Seq. ID no. 13580079
  misc_feature (48)..(119): Pfam Name: Pfam Description:  Protease inhibitor/seed storage/LTP family
  misc_feature (1)..(119): NCBI GI NO: 2226329 NR Description: physical impedance induced protein [Zea mays]
  misc_feature (1)..(119): NCBI GI NO: 399204 NR Description: CORTICAL CELL DELINEATING PROTEIN PRECURSOR
  misc_feature (4)..(119): NCBI GI NO: 37536704 NR Description: putative lipid transfer protein
  misc_feature (4)..(119): NCBI GI NO: 37536712 NR Description: putative lipid transfer protein
  misc_feature (6)..(119): NCBI GI NO: 39748092 NR Description: lipid transfer protein-like protein
  misc_feature (5)..(119): NCBI GI NO: 37536710 NR Description: putative lipid transfer protein
  misc_feature (1)..(119): NCBI GI NO: 37533212 NR Description: putative lipid transfer protein
  misc_feature (1)..(119): NCBI GI NO: 1084461 NR Description: root-specific protein RCc3 - rice
  misc_feature (1)..(119): NCBI GI NO: 37536718 NR Description: putative lipid transfer protein
  misc_feature (1)..(119): NCBI GI NO: 37536722 NR Description: putative lipid transfer protein
MAPKVALFLALSLLFAATAHGCEPYCSGPVVPTPPVVPTPSSHSHGRCPIDALKLKVCANVLGLVKVGLPQYEQCCPLLEGLVDLDAALCLCTAIKANVLGIHLNVPLSLNLILNNCGKI

SEQ ID NO: 37670 - protein, 101 aa, Zea mays subsp. mays
  peptide (1)..(101): Ceres Seq. ID no. 13580080
MAANPTVPAQSSQHHQSCRLRRRIATGAARSTRSSSRCAPMCWASSRSAYRNTSNAAHCWRGWWTLTPHCASAPPSRQTSSASTSTCPLASTSSSTTAARF

SEQ ID NO: 37671 - protein, 61 aa, Zea mays subsp. mays
  peptide (1)..(61): Ceres Seq. ID no. 13580081
MCWASSRSAYRNTSNAAHCWRGWWTLTPHCASAPPSRQTSSASTSTCPLASTSSSTTAARF

SEQ ID NO: 37672 - DNA, 1732 bp, Zea mays subsp. mays
  misc_feature (1)..(1732): Ceres Seq. ID no. 12566433
acgtactgctctcctagctagcttagctactaccagctccgatcctgtgctgccgccgccatggagaatccctacacgagcttcttcaacagccatccgcagcaccaccgctactactaccaccccgcgccgccagcgccggcgccagccgcctaccacccctccctgcctttcttcgctgcgcaccgccagccacctgctccgacggcgcccgccccgccctcgccaccgctccgggaagccctgccgctgctctccctggcccccacgcggcatgaggagcgggagcgccgcgcccggccaccggcaccagcgttggaggattctgaagagaaccgggacgagggagaagaagagcaggaggaggaggagggccccaccgcgagcagcaagagcaaccacggccagcaccagcgcctgggagtgggacgacagcgagggttcttcgccgacctgaacgccagcgcggcgggtgacgatgacgacccgatggacgtggaggctgcagccgacggctccggctccgcggcggcgggcgacgacgtgaccgtggcgctgcgcatcggtctgccgctgccgggacctgccgagctggtctcggacctctcctcttccggcggcgcccgcaggcaacagcaccagcacgacggcggcggcggcgaggaggaggaggaggatgaggagggtgacggggagaacggtggcggcggcgaggaggaaggaaccaccgcggcggcgccgctagggttcccgtcctcgccgattgggcggctcaacaaggggcagtactggatcccgacgccgtcgcagatcctcatcggcccgacgcagttctcctgccccgtctgcttcaagaccttcaaccgctacaacaacatgcagatgcacatgtggggtcacgggtcacagtaccgcaagggcccggagtcgctgcggggcatccagccgacggccatgctgcggctgccgtgctactgctgctcgccggggtgccgcaacaacatcgaccacccgcgcgccaagccgctcaaggacttccgcacgctgcagacgcactacaagcgcaagcacggcctcaagcccttcctctgccgccgctgcggcaaggccttcgccgtcaagggcgactggcgcacgcacgagaagaactgcggcaggctctggtactgcctctgcggctccgagttcaagcacaagcgctcgctcaaggaccacgcccgcgccttcggccgcggccacggcttcgtcggcggcggccctcctggcgccgggtgcggcgggggactcgacgacgacgatgacggcgctgtttccgacgtcgagcacgacggtgccgccacggcggccaggtcgatgtgaccgatccatgcagctgccatctatggatcgatcgagctctctatattcctagccggccggcaggtcaatattatatatacttattagtaggccgaccgactggtgcaagtgcaaaagaaaatctgttgtaccatatagtaacagattatcaagctgttctttcattttgcagctgctgtagcgctactgctatatagagtcggttctcttcgtctgctccgtcctagttaagtgcagcacacggctcatccctggcacgagaaataaatcacgggcatgcgtgtgtcaacagctagaatatgtgctcgattgatgcacagtgtgttagaatttattgtccattttctaataatattttttactgttgaagttc

SEQ ID NO: 37673 - protein, 432 aa, Zea mays subsp. mays
  peptide (1)..(432): Ceres Seq. ID no. 12566434
  misc_feature (258)..(280): Pfam Name: Pfam Description:  Zinc finger, C2H2 type
  misc_feature (159)..(421): NCBI GI NO: 28973719 NR Description: putative zinc finger protein
  misc_feature (161)..(421): NCBI GI NO: 15230370 NR Description: zinc finger - like protein; protein id:At3g57670
  misc_feature (1)..(104): NCBI GI NO: 15230370 NR Description: zinc finger - like protein; protein id:At3g57670
  misc_feature (1)..(74): NCBI GI NO: 28973719 NR Description: putative zinc finger protein
  misc_feature (207)..(421): NCBI GI NO: 15223781 NR Description: hypothetical protein; protein id: At1g51220.1
  misc_feature (1)..(76): NCBI GI NO: 15223781 NR Description: hypothetical protein; protein id: At1g51220.1
  misc_feature (161)..(421): NCBI GI NO: 30685975 NR Description: DNA-binding protein -related
  misc_feature (1)..(74): NCBI GI NO: 30685975 NR Description: DNA-binding protein -related
  misc_feature (161)..(421): NCBI GI NO: 9294415 NR Description: zinc finger-like protein [Arabidopsis thaliana]
  misc_feature (1)..(74): NCBI GI NO: 9294415 NR Description: zinc finger-like protein [Arabidopsis thaliana]
MENPYTSFFNSHPQHHRYYYHPAPPAPAPAAYHPSLPFFAAHRQPPAPTAPAPPSPPLREALPLLSLAPTRHEERERRARPPAPALEDSEENRDEGEEEQEEEEGPTASSKSNHGQHQRLGVGRQRGFFADLNASAAGDDDDPMDVEAAADGSGSAAAGDDVTVALRIGLPLPGPAELVSDLSSSGGARRQQHQHDGGGGEEEEEDEEGDGENGGGGEEEGTTAAAPLGFPSSPIGRLNKGQYWIPTPSQILIGPTQFSCPVCFKTFNRYNNMQMHMWGHGSQYRKGPESLRGIQPTAMLRLPCYCCSPGCRNNIDHPRAKPLKDFRTLQTHYKRKHGLKPFLCRRCGKAFAVKGDWRTHEKNCGRLWYCLCGSEFKHKRSLKDHARAFGRGHGFVGGGPPGAGCGGGLDDDDDGAVSDVEHDGAATAARSM

SEQ ID NO: 37674 - protein, 289 aa, Zea mays subsp. mays
  peptide (1)..(289): Ceres Seq. ID no. 12566435
  misc_feature (115)..(137): Pfam Name: Pfam Description:  Zinc finger, C2H2 type
  misc_feature (16)..(278): NCBI GI NO: 28973719 NR Description: putative zinc finger protein
  misc_feature (18)..(278): NCBI GI NO: 15230370 NR Description: zinc finger - like protein; protein id:At3g57670
  misc_feature (64)..(278): NCBI GI NO: 15223781 NR Description: hypothetical protein; protein id: At1g51220.1
  misc_feature (18)..(278): NCBI GI NO: 30685975 NR Description: DNA-binding protein -related
  misc_feature (18)..(278): NCBI GI NO: 9294415 NR Description: zinc finger-like protein [Arabidopsis thaliana]
  misc_feature (97)..(280): NCBI GI NO: 15222242 NR Description: zinc finger protein, putative
  misc_feature (10)..(250): NCBI GI NO: 34908460 NR Description: P0683F02.21
  misc_feature (100)..(251): NCBI GI NO: 18253283 NR Description: transparent testa 1 [Arabidopsis thaliana]
  misc_feature (100)..(251): NCBI GI NO: 30693123 NR Description: transparent testa 1 (TT1) protein
  misc_feature (99)..(250): NCBI GI NO: 15223175 NR Description: hypothetical protein; protein id: At1g08290
MDVEAAADGSGSAAAGDDVTVALRIGLPLPGPAELVSDLSSSGGARRQQHQHDGGGGEEEEEDEEGDGENGGGGEEEGTTAAAPLGFPSSPIGRLNKGQYWIPTPSQILIGPTQFSCPVCFKTFNRYNNMQMHMWGHGSQYRKGPESLRGIQPTAMLRLPCYCCSPGCRNNIDHPRAKPLKDFRTLQTHYKRKHGLKPFLCRRCGKAFAVKGDWRTHEKNCGRLWYCLCGSEFKHKRSLKDHARAFGRGHGFVGGGPPGAGCGGGLDDDDDGAVSDVEHDGAATAARSM

SEQ ID NO: 37675 - DNA, 1844 bp, Zea mays subsp. mays
  misc_feature (1)..(1844): Ceres Seq. ID no. 12381094
gcacgagaccatcacctagaacatcctaatcgaaaaaaaacgttagccttttccaatcagggagagagctcaaacatggcactcgaacccgtcgctctcctgctcacggtcctcgtcgccgcgccgctcacggtcctcctcctcctcctcttcctcgtcgccggcaacaagaggcccgctcgtgctgcttctcccacgccgcgccaccgcttgaggctgccgctgccgccgtcgccgcggggcctcccgctgctgggccacctgcacctgctgggctcgctgccgcaccgcgcgctggcgtctctggcgcgcgcgcacggccccgtgctgctgctccgcctgggccgcgtgcccaccgtggtcgtgtcctccgctgccgccgccgaggaggtgatgcgggcgcgggacctggcgttcgcgaaccggcccgcgagcgccatgggccgtgcgcctcctctacggccgcgacgtcgcgttcgcgccctacggcgagtactggcgccaggcgcgccgcgtctgcgtcgtccacctcctcagcgcgcgtcacgtcgggtccttccgccgtgtccgagagcaggaggccgccgcgctggtcgcacgcgtcgcccgggacagcgccggtggcgcggccgtcggcctcagcgatctcctcaccgagtacgccaacgccgtcgtgtcgcgcgccgcgttcggcgacgagagcgcgcgcgggctgttgggcgaattcgactccggccgtcggcagaggaaagtgctcaccgacttccagaagctcgtggggacgacgcccgtcggggagctgctgccgtggctgggctgggtggacgccgtcacggggctggaggggaagatcaggcggacgttcgaggcgctcgacgggttgctcgagaaggtgatcgatgaccaccggcggcggcctcgcagcggggaggagggcggtgaccgggacttcgtggacgtgttgctggacgtccacaacaaggaccaagagcacggcatccaactagagaccaacgaaatcaaggccatcatcttggacatgttcgcggcaggcacggacacgatagccacggcgatggaatgggccatggcggagctcgtcacccacccgcgtgccatgcggagagcccaggacgaggtccgcgcggcggcggccggctcaaccggcgtgaacgaggaccacgtcgcgcagctggactacctcaaggccgtgctgaaggagacgctccggttgcacgcgccgttgccactgctggtgccccgggagccggcggcggacaccgagatcctggggtaccacgtcccggcgcgcacgcgcgtgctggtcaacgcctgggctattggccgggaccccgcgacgtgggagcgcgccgaggaattcgtgccagagaggttcttgggcggcgccgccgcagctgacgtcggcttcaaggggcagcacttcgagctcctgccgttcggcggcggcaggaggatgtgccccggaatcgcgtttgcggagggaagcgccgagatggccctggcgagcctgctgtatcattttgactgggaggcggcgagccggggccagaacgggaaagggacgctgtcgctggacatgaccgagatgaacggattagccgtgcatatcaactccggtcttccgcttgtagccaagccgtggatccccttcaagaactaggagaagatattggagatatttggttttttactgcaaacaatgtgcttgattttaatgttattttagacatttttgctcttcttcgtccttctccctttttccctttttgtgtgtgtacgcttgtaaaaaaagacaaaatatcaaaataatctctactaccccg

SEQ ID NO: 37676 - protein, 300 aa, Zea mays subsp. mays
  peptide (1)..(300): Ceres Seq. ID no. 12381095
  misc_feature (31)..(147): NCBI GI NO: 34904242 NR Description: putative cytochrome P-450LXXIA1 (cyp71A1) family
  misc_feature (35)..(147): NCBI GI NO: 34904240 NR Description: putative cytochrome P-450LXXIA1 (cyp71A1) family
  misc_feature (35)..(142): NCBI GI NO: 34904238 NR Description: putative cytochrome P-450LXXIA1 (cyp71A1) family
  misc_feature (26)..(147): NCBI GI NO: 34904246 NR Description: putative cytochrome P-450LXXIA1 (cyp71A1) family
  misc_feature (35)..(149): NCBI GI NO: 25282608 NR Description: cytochrome P-450LXXIA1 [similarity] - avocado
  misc_feature (35)..(149): NCBI GI NO: 117188 NR Description: CYTOCHROME P450 71A1 (CYPLXXIA1) (ARP-2)
  misc_feature (35)..(143): NCBI GI NO: 3582021 NR Description: cytochrome P450 [Nepeta racemosa]
  misc_feature (76)..(149): NCBI GI NO: 5915814 NR Description: Cytochrome P450 71A6
  misc_feature (43)..(143): NCBI GI NO: 584863 NR Description: Cytochrome P450 71A4 (CYPLXXIA4) (P-450EG2)
  misc_feature (76)..(149): NCBI GI NO: 22331674 NR Description: similar to cytochrome p450 family
ARDHHLEHPNRKKTLAFSNQGESSNMALEPVALLLTVLVAAPLTVLLLLLFLVAGNKRPARAASPTPRHRLRLPLPPSPRGLPLLGHLHLLGSLPHRALASLARAHGPVLLLRLGRVPTVVVSSAAAAEEVMRARDLAFANRPASAMGRAPPLRPRRRVRALRRVLAPGAPRLRRPPPQRASRRVLPPCPRAGGRRAGRTRRPGQRRWRGRRPQRSPHRVRQRRRVARRVRRRERARAVGRIRLRPSAEESAHRLPEARGDDARRGAAAVAGLGGRRHGAGGEDQADVRGARRVAREGDR

SEQ ID NO: 37677 - protein, 275 aa, Zea mays subsp. mays
  peptide (1)..(275): Ceres Seq. ID no. 12381096
  misc_feature (6)..(122): NCBI GI NO: 34904242 NR Description: putative cytochrome P-450LXXIA1 (cyp71A1) family
  misc_feature (10)..(122): NCBI GI NO: 34904240 NR Description: putative cytochrome P-450LXXIA1 (cyp71A1) family
  misc_feature (10)..(117): NCBI GI NO: 34904238 NR Description: putative cytochrome P-450LXXIA1 (cyp71A1) family
  misc_feature (1)..(122): NCBI GI NO: 34904246 NR Description: putative cytochrome P-450LXXIA1 (cyp71A1) family
  misc_feature (10)..(124): NCBI GI NO: 25282608 NR Description: cytochrome P-450LXXIA1 [similarity] - avocado
  misc_feature (10)..(124): NCBI GI NO: 117188 NR Description: CYTOCHROME P450 71A1 (CYPLXXIA1) (ARP-2)
  misc_feature (10)..(118): NCBI GI NO: 3582021 NR Description: cytochrome P450 [Nepeta racemosa]
  misc_feature (51)..(124): NCBI GI NO: 5915814 NR Description: Cytochrome P450 71A6
  misc_feature (18)..(118): NCBI GI NO: 584863 NR Description: Cytochrome P450 71A4 (CYPLXXIA4) (P-450EG2)
  misc_feature (51)..(124): NCBI GI NO: 22331674 NR Description: similar to cytochrome p450 family
MALEPVALLLTVLVAAPLTVLLLLLFLVAGNKRPARAASPTPRHRLRLPLPPSPRGLPLLGHLHLLGSLPHRALASLARAHGPVLLLRLGRVPTVVVSSAAAAEEVMRARDLAFANRPASAMGRAPPLRPRRRVRALRRVLAPGAPRLRRPPPQRASRRVLPPCPRAGGRRAGRTRRPGQRRWRGRRPQRSPHRVRQRRRVARRVRRRERARAVGRIRLRPSAEESAHRLPEARGDDARRGAAAVAGLGGRRHGAGGEDQADVRGARRVAREGDR

SEQ ID NO: 37678 - protein, 213 aa, Zea mays subsp. mays
  peptide (1)..(213): Ceres Seq. ID no. 12381097
  misc_feature (1)..(205): NCBI GI NO: 34904242 NR Description: putative cytochrome P-450LXXIA1 (cyp71A1) family
  misc_feature (1)..(210): NCBI GI NO: 34904240 NR Description: putative cytochrome P-450LXXIA1 (cyp71A1) family
  misc_feature (1)..(208): NCBI GI NO: 34904238 NR Description: putative cytochrome P-450LXXIA1 (cyp71A1) family
  misc_feature (1)..(210): NCBI GI NO: 34904246 NR Description: putative cytochrome P-450LXXIA1 (cyp71A1) family
  misc_feature (1)..(206): NCBI GI NO: 25282608 NR Description: cytochrome P-450LXXIA1 [similarity] - avocado
  misc_feature (1)..(171): NCBI GI NO: 117188 NR Description: CYTOCHROME P450 71A1 (CYPLXXIA1) (ARP-2)
  misc_feature (1)..(207): NCBI GI NO: 3582021 NR Description: cytochrome P450 [Nepeta racemosa]
  misc_feature (1)..(207): NCBI GI NO: 5915814 NR Description: Cytochrome P450 71A6
  misc_feature (1)..(208): NCBI GI NO: 584863 NR Description: Cytochrome P450 71A4 (CYPLXXIA4) (P-450EG2)
  misc_feature (1)..(209): NCBI GI NO: 22331674 NR Description: similar to cytochrome p450 family
MFAAGTDTIATAMEWAMAELVTHPRAMRRAQDEVRAAAAGSTGVNEDHVAQLDYLKAVLKETLRLHAPLPLLVPREPAADTEILGYHVPARTRVLVNAWAIGRDPATWERAEEFVPERFLGGAAAADVGFKGQHFELLPFGGGRRMCPGIAFAEGSAEMALASLLYHFDWEAASRGQNGKGTLSLDMTEMNGLAVHINSGLPLVAKPWIPFKN

SEQ ID NO: 37679 - DNA, 1340 bp, Zea mays subsp. mays
  misc_feature (1)..(1340): Ceres Seq. ID no. 12363910
ggttccattactggtccctagcaggaagcaggatggagttggcgctcagcttgggggagaccatggcggatgccggaagggacctcatgctggggcttgggatgggggtcggggtgcggagggaggaggaagcgcagagagggaggagggacagggaggtgaggcgggagctggagttcacggcgaggagcgcccggtcgtcgccggagccggcggtgcgactcaccctcctgcacggcctcggcctcccgtggccgccgccgccgtcgtccgagaccaaccggcacctggaggcgtcggcgcgtggcttcgacgtgaaccgggcgccgtcgctgtccgcggccggtggcgccgcggaggaggacgaggagcaggacgaggcggcggcggcggcggcatcgtcgtcgcccaacaacagcgcgagctccttcccgacggacttctccgcgcaggggccaggtggcgcccggcgccgaccgcgcgtgctcccgcgccagcgacgaggacgacggcggctccgcgcgcaagaagctgcgcctctccaaggagcagtccgcgttcctggaggatagcttcaaggagcacgccacgctgaacccgaagcagaagctcgcgctggcgaagcagctcaacctccggccgcgccaggtggaggtgtggttccagaaccgcagagccaggacgaagctgaagcagacggaggtggactgcgagtacctcaagcgatgctgcgagacgctgacggaggagaaccggcggctgcagaaggagctatccgagctccgctcgctcaagacggtgcaccccttctacatgcacctcccggccaccaccctttccatgtgcccctcctgcgagcgcgtcgcctccaactccgcgccggcgcccgcgtcatcgccgtcccccgctactggcattgcggccccggcaccggagcagaggccctcgtcgttcgcggctctgttctcgtcccctctgaaccgcccgctggccgcccaggcgcaaccgcaaccgcaggcgccggccaactcgtgaggcgctctctactctatctccggcgacgcgaacggaggtggatctggctgtaaatacgatcacctttttttggcttcctttttcttttgttttcacttgatgcggttcttgagattttttttttgtggattgccgatgggttggtttaccggtttattagagcgcatcatctggccgtcggattggactgcggacggccgggtgcagaaaggaagtgctgcgatagagtttattaacctcagtagcatcgatcatgttttgttaccttgctatctatcttggcgtcaatataggccttgaaatcc

SEQ ID NO: 37680 - protein, 197 aa, Zea mays subsp. mays
  peptide (1)..(197): Ceres Seq. ID no. 12363911
VPLLVPSRKQDGVGAQLGGDHGGCRKGPHAGAWDGGRGAEGGGSAEREEGQGGEAGAGVHGEERPVVAGAGGATHPPARPRPPVAAAAVVRDQPAPGGVGAWLRREPGAVAVRGRWRRGGGRGAGRGGGGGGIVVAQQQRELLPDGLLRAGARWRPAPTARAPAPATRTTAAPRARSCASPRSSPRSWRIASRSTPR

SEQ ID NO: 37681 - protein, 189 aa, Zea mays subsp. mays
  peptide (1)..(189): Ceres Seq. ID no. 12363912
  misc_feature (96)..(157): NCBI GI NO: 22326632 NR Description: homeobox-leucine zipper protein HAT14
  misc_feature (96)..(157): NCBI GI NO: 29028870 NR Description: At5g06710 [Arabidopsis thaliana]
  misc_feature (114)..(157): NCBI GI NO: 12230908 NR Description: Homeobox-leucine zipper protein HAT14
FHYWSLAGSRMELALSLGETMADAGRDLMLGLGMGVGVRREEEAQRGRRDREVRRELEFTARSARSSPEPAVRLTLLHGLGLPWPPPPSSETNRHLEASARGFDVNRAPSLSAAGGAAEEDEEQDEAAAAAASSSPNNSASSFPTDFSAQGPGGARRRPRVLPRQRRGRRRLRAQEAAPLQGAVRVPGG

SEQ ID NO: 37682 - protein, 179 aa, Zea mays subsp. mays
  peptide (1)..(179): Ceres Seq. ID no. 12363913
  misc_feature (86)..(147): NCBI GI NO: 22326632 NR Description: homeobox-leucine zipper protein HAT14
  misc_feature (86)..(147): NCBI GI NO: 29028870 NR Description: At5g06710 [Arabidopsis thaliana]
  misc_feature (104)..(147): NCBI GI NO: 12230908 NR Description: Homeobox-leucine zipper protein HAT14
MELALSLGETMADAGRDLMLGLGMGVGVRREEEAQRGRRDREVRRELEFTARSARSSPEPAVRLTLLHGLGLPWPPPPSSETNRHLEASARGFDVNRAPSLSAAGGAAEEDEEQDEAAAAAASSSPNNSASSFPTDFSAQGPGGARRRPRVLPRQRRGRRRLRAQEAAPLQGAVRVPGG

SEQ ID NO: 37683 - DNA, 1452 bp, Zea mays subsp. mays
  misc_feature (1)..(1452): Ceres Seq. ID no. 12359603
  misc_feature (1441)..(1441): n is a, c, t, g, unknown, or other
aggcagccaggcacccaatcaacggacggccagccggcagccgtcgtagcgggagccgggagaatagtaaaggacaaatcagacgaggaggagcgtggagcggggacagcctgcgctgcgctgccttgctccggccggccggccccccaccttagcccttgtcccggttccctcctccaccattcaaatctcctggcttcgtttcagttcgatttgaagcggggcggcagaggaggcagggggattgggtccggggacgacatttggcggcatcaaccacacagcacaggcacagcgcagcaccatgacgatggagggggcggtttccgacaacaccaagggcctggcgctcgccgtcgcctccagcgccttcatcggcgccagcttcatcctcaagaagatcggcctcctgcgagcagccaagtgcggcgaccgcgcaggtggcggaggacacacttacctctccgagcctctatggtgggcgggaatgaccacaatgctgcttggggaggtcgcaaacttcattgcttacatatttgcgcccggctgtactcgtgactccacttggggcgttaagcataatcgtaagttcagtgttggcgcactttgtgctcaaggagcggcttgagaagctcggggtccttggctgtgtgtcgtgcatagtaggttcagttgttgttgtcatgcatgctcctgaagagcatatgcctaactctgtcaaggaaatctggaacctagctactcaaccagggtttctagcatatgtggtgacagcattgttacttgtgggagcgctagtactcttctttgaacctcgatacggtcagactaacatcctgatatatctgggtatctgctcttcaatgggatcgctaacggtcgttagcatcaaagccattggtgttgccataaagcttacgttggatggggtgaatcaggctgcttatccatacacatggctttttcttatggttgcaattgtttgtggggtttctcaaataaattacctgaacaaggcattggatacctttaatctggctattgtctctcctatatattatgtaatgtttactacccttacaatagtggcaagtggaattatgtttaaggactgggctggtcaaagcttaagtagtattgcttgtgaattatgcggcctgataaccatcctttctgggacaattttgttgcacacagcagaggagggagccaacaattctgcagctttgttgccttggcctttggataaagggtctatatcatggtgtatcaacttaagcagtgacaatcttctaaagaatgtcgaagaggactacttcacagctctgcaaagttcacctgccccagtataatgaagaaactgataaatatctaaaagggaacatgcaaatcaaggtgtaaatcttaacagtgccagaaacctggcagttttgggtgaggngattgtacctg

SEQ ID NO: 37684 - protein, 222 aa, Zea mays subsp. mays
  peptide (1)..(222): Ceres Seq. ID no. 12359604
  misc_feature (1)..(174): Pfam Name: DUF803 Pfam Description: Protein of unknown function
  misc_feature (1)..(174): NCBI GI NO: 30681265 NR Description: expressed protein [Arabidopsis thaliana]
  misc_feature (1)..(190): NCBI GI NO: 26449939 NR Description: unknown protein [Arabidopsis thaliana]
  misc_feature (1)..(189): NCBI GI NO: 18409942 NR Description: expressed protein; protein id: At1g71900
  misc_feature (1)..(174): NCBI GI NO: 25412015 NR Description: hypothetical protein At2g21120
  misc_feature (1)..(180): NCBI GI NO: 18414079 NR Description: expressed protein; protein id: At4g13800
  misc_feature (1)..(180): NCBI GI NO: 15229534 NR Description: unknown protein; protein id: At3g23870.1
  misc_feature (1)..(180): NCBI GI NO: 21593618 NR Description: unknown [Arabidopsis thaliana]
  misc_feature (1)..(174): NCBI GI NO: 25406128 NR Description: unknown protein F17M19.5
  misc_feature (1)..(189): NCBI GI NO: 20161440 NR Description: B1065E10.15
  misc_feature (1)..(182): NCBI GI NO: 18399280 NR Description: expressed protein; protein id: At1g34470
MHAPEEHMPNSVKEIWNLATQPGFLAYVVTALLLVGALVLFFEPRYGQTNILIYLGICSSMGSLTVVSIKAIGVAIKLTLDGVNQAAYPYTWLFLMVAIVCGVSQINYLNKALDTFNLAIVSPIYYVMFTTLTIVASGIMFKDWAGQSLSSIACELCGLITILSGTILLHTAEEGANNSAALLPWPLDKGSISWCINLSSDNLLKNVEEDYFTALQSSPAPV

SEQ ID NO: 37685 - protein, 215 aa, Zea mays subsp. mays
  peptide (1)..(215): Ceres Seq. ID no. 12359605
  misc_feature (1)..(167): Pfam Name: DUF803 Pfam Description: Protein of unknown function
  misc_feature (1)..(167): NCBI GI NO: 30681265 NR Description: expressed protein [Arabidopsis thaliana]
  misc_feature (1)..(183): NCBI GI NO: 26449939 NR Description: unknown protein [Arabidopsis thaliana]
  misc_feature (1)..(182): NCBI GI NO: 18409942 NR Description: expressed protein; protein id: At1g71900
  misc_feature (1)..(167): NCBI GI NO: 25412015 NR Description: hypothetical protein At2g21120
  misc_feature (1)..(173): NCBI GI NO: 18414079 NR Description: expressed protein; protein id: At4g13800
  misc_feature (1)..(173): NCBI GI NO: 15229534 NR Description: unknown protein; protein id: At3g23870.1
  misc_feature (1)..(173): NCBI GI NO: 21593618 NR Description: unknown [Arabidopsis thaliana]
  misc_feature (1)..(167): NCBI GI NO: 25406128 NR Description: unknown protein F17M19.5
  misc_feature (1)..(182): NCBI GI NO: 20161440 NR Description: B1065E10.15
  misc_feature (1)..(175): NCBI GI NO: 18399280 NR Description: expressed protein; protein id: At1g34470
MPNSVKEIWNLATQPGFLAYVVTALLLVGALVLFFEPRYGQTNILIYLGICSSMGSLTVVSIKAIGVAIKLTLDGVNQAAYPYTWLFLMVAIVCGVSQINYLNKALDTFNLAIVSPIYYVMFTTLTIVASGIMFKDWAGQSLSSIACELCGLITILSGTILLHTAEEGANNSAALLPWPLDKGSISWCINLSSDNLLKNVEEDYFTALQSSPAPV

SEQ ID NO: 37686 - protein, 185 aa, Zea mays subsp. mays
  peptide (1)..(185): Ceres Seq. ID no. 12359606
RQPGTQSTDGQPAAVVAGAGRIVKDKSDEEERGAGTACAALPCSGRPAPHLSPCPGSLLHHSNLLASFQFDLKRGGRGGRGIGSGDDIWRHQPHSTGTAQHHDDGGGGFRQHQGPGARRRLQRLHRRQLHPQEDRPPASSQVRRPRRWRRTHLPLRASMVGGNDHNAAWGGRKLHCLHICARLYS

SEQ ID NO: 37687 - DNA, 1466 bp, Zea mays subsp. mays
  misc_feature (1)..(1466): Ceres Seq. ID no. 12404987
aaggacagcctcctcgtcccgtcctcccgcgccgccgcgacgaatgggccccaccaccgccgcgccacgctcgcgccgggaactggcgccggaggcccatgtggcggagccggcggcgtgtccatcgacgtcaacggcctgaagcggcgtggcggcgggaggcgctcgtgggtgcgcgtggacgcggcgacgggcgccgcggaggccgtcgaggtcgccaagccggcgttgatgcggcggctggacctgcccgcgcgggacctccgcctcctcgaccccctcttcgtctacccgtccgccatcctaggccgcgagcgcgccgtcgtctgcaacctcgagcacctgcggtgcatcatcaccgccgatgaggcgctcgttctgcgcgaacccgacgccgctgggggcgccgcagcggaggaggccgtgcggaggtacgtcgacgagctgcagcgacgcctcgtcgaccgcgccgacgacctgcctttcgagttcatcgcgctggaggtcgcgctggaggccgcttgctctttcctagactcgcaggctattgaattagaggctgaagcttacccattactagatgagctgacagcaaaaattagtaccctcaatttggaacgagtccgacgcctaaagagcaagctggttgcattgacaaggagagtacagaagagatgagatagagcaactgatggatgacgatggtgatatggctgaaatgtatctcactgagaagaagataagaatggaagcatcaatgttagatgatgaggaccttcagggaattggcaatagtcataatgggtttggttcatctctatcggctccagtttcaccagtttcgacaacccctgcaactcggaggcttgagaaggaattcagttttgccagaagcaggcacagcagcttcaagagctcagatagcagccagtacaatatagaagaactggaaatgttgttggaggcctactttgttgttatcgattacaccctcagcaagttgacttcgctaaaggagtatattgatgacacagaagatttcatcaacatacaactggataacgtccggaaccagctgatccaattcgagctgctcctgaccaccgccacgttcgtggtggccatcttcggggtggtctcgggggttttcggcatgaacttcgaggtccctctgttctcggttccgcacgcgttcgagtggaccctcgccataactggggtctgcggcgccgtcgtattctgctgcttcatctggtacttcaagaagaggaggtttttccccttgtaggtgaaagcttctcttctctcgccctgtcaccagagtccagacagcagcgtacgtatgagactgggtacggcaattgtacatgctgcattgttctcgaaatgcgctgtctgttcacgtgagcttttctccctttttaagctcacgccgctgatcgtgtgtagcttcaccggtctgctgt

SEQ ID NO: 37688 - protein, 225 aa, Zea mays subsp. mays
  peptide (1)..(225): Ceres Seq. ID no. 12404988
  misc_feature (1)..(224): NCBI GI NO: 38345033 NR Description: OSJNBa0029H02.17
  misc_feature (5)..(153): NCBI GI NO: 18394312 NR Description: expressed protein; protein id: At1g16010
  misc_feature (158)..(224): NCBI GI NO: 18394312 NR Description: expressed protein; protein id: At1g16010
  misc_feature (33)..(153): NCBI GI NO: 21553824 NR Description: unknown [Arabidopsis thaliana]
  misc_feature (158)..(224): NCBI GI NO: 21553824 NR Description: unknown [Arabidopsis thaliana]
  misc_feature (33)..(153): NCBI GI NO: 18412911 NR Description: expressed protein; protein id: At1g80900
  misc_feature (115)..(224): NCBI GI NO: 18412911 NR Description: expressed protein; protein id: At1g80900
  misc_feature (45)..(224): NCBI GI NO: 15227679 NR Description: hypothetical protein; protein id: At2g03620
  misc_feature (45)..(224): NCBI GI NO: 25360882 NR Description: MRS2-5 [Arabidopsis thaliana]
  misc_feature (55)..(224): NCBI GI NO: 25360941 NR Description: MRS2-7 [Arabidopsis thaliana]
KDSLLVPSSRAAATNGPHHRRATLAPGTGAGGPCGGAGGVSIDVNGLKRRGGGRRSWVRVDAATGAAEAVEVAKPALMRRLDLPARDLRLLDPLFVYPSAILGRERAVVCNLEHLRCIITADEALVLREPDAAGGAAAEEAVRRYVDELQRRLVDRADDLPFEFIALEVALEAACSFLDSQAIELEAEAYPLLDELTAKISTLNLERVRRLKSKLVALTRRVQKR

SEQ ID NO: 37689 - protein, 198 aa, Zea mays subsp. mays
  peptide (1)..(198): Ceres Seq. ID no. 12404989
  misc_feature (1)..(198): NCBI GI NO: 38345033 NR Description: OSJNBa0029H02.17
  misc_feature (1)..(198): NCBI GI NO: 18394312 NR Description: expressed protein; protein id: At1g16010
  misc_feature (1)..(198): NCBI GI NO: 21553824 NR Description: unknown [Arabidopsis thaliana]
  misc_feature (1)..(198): NCBI GI NO: 18412911 NR Description: expressed protein; protein id: At1g80900
  misc_feature (1)..(198): NCBI GI NO: 15227679 NR Description: hypothetical protein; protein id: At2g03620
  misc_feature (1)..(198): NCBI GI NO: 25360882 NR Description: MRS2-5 [Arabidopsis thaliana]
  misc_feature (7)..(193): NCBI GI NO: 25360941 NR Description: MRS2-7 [Arabidopsis thaliana]
  misc_feature (7)..(189): NCBI GI NO: 30698045 NR Description: expressed protein [Arabidopsis thaliana]
  misc_feature (7)..(193): NCBI GI NO: 30682808 NR Description: expressed protein [Arabidopsis thaliana]
  misc_feature (7)..(156): NCBI GI NO: 30698047 NR Description: expressed protein [Arabidopsis thaliana]
MDDDGDMAEMYLTEKKIRMEASMLDDEDLQGIGNSHNGFGSSLSAPVSPVSTTPATRRLEKEFSFARSRHSSFKSSDSSQYNIEELEMLLEAYFVVIDYTLSKLTSLKEYIDDTEDFINIQLDNVRNQLIQFELLLTTATFVVAIFGVVSGVFGMNFEVPLFSVPHAFEWTLAITGVCGAVVFCCFIWYFKKRRFFPL

SEQ ID NO: 37690 - protein, 192 aa, Zea mays subsp. mays
  peptide (1)..(192): Ceres Seq. ID no. 12404990
  misc_feature (1)..(192): NCBI GI NO: 38345033 NR Description: OSJNBa0029H02.17
  misc_feature (1)..(192): NCBI GI NO: 18394312 NR Description: expressed protein; protein id: At1g16010
  misc_feature (1)..(192): NCBI GI NO: 21553824 NR Description: unknown [Arabidopsis thaliana]
  misc_feature (1)..(192): NCBI GI NO: 18412911 NR Description: expressed protein; protein id: At1g80900
  misc_feature (1)..(192): NCBI GI NO: 15227679 NR Description: hypothetical protein; protein id: At2g03620
  misc_feature (1)..(192): NCBI GI NO: 25360882 NR Description: MRS2-5 [Arabidopsis thaliana]
  misc_feature (1)..(187): NCBI GI NO: 25360941 NR Description: MRS2-7 [Arabidopsis thaliana]
  misc_feature (1)..(183): NCBI GI NO: 30698045 NR Description: expressed protein [Arabidopsis thaliana]
  misc_feature (1)..(187): NCBI GI NO: 30682808 NR Description: expressed protein [Arabidopsis thaliana]
  misc_feature (1)..(150): NCBI GI NO: 30698047 NR Description: expressed protein [Arabidopsis thaliana]
MAEMYLTEKKIRMEASMLDDEDLQGIGNSHNGFGSSLSAPVSPVSTTPATRRLEKEFSFARSRHSSFKSSDSSQYNIEELEMLLEAYFVVIDYTLSKLTSLKEYIDDTEDFINIQLDNVRNQLIQFELLLTTATFVVAIFGVVSGVFGMNFEVPLFSVPHAFEWTLAITGVCGAVVFCCFIWYFKKRRFFPL

SEQ ID NO: 37691 - DNA, 1421 bp, Zea mays subsp. mays
  misc_feature (1)..(1421): Ceres Seq. ID no. 12407513
  misc_feature (971)..(971): n is a, c, t, g, unknown, or other
acaaaccataaaccaagaagctgctgcgggacgttcaaatcaaacatctctaccctctccttccagcgaaatggcaagagcggcggctcctccgcctctgcaccggctgcccggtctggccttgctgtgccttgccgtggcagtttgcttctccggcggcgaaaacgccgcggcggcggcctggacgaggaagatagtcggcgttcacgagctcagggtgggggatttctccgtcaaggtcaccaactggggggcgactctcatgtccgtcatcctccccgactccaaagggaacttgggcgacgttgtgctcggctacgacaccgtcgctgaatacgtcaacggcaccgcctacttcggcggtctgatcggccgcgtggccaacagggtcgccggcgcgcggttcacgctggacgggaaagcctaccgcctctaccgcaacgacggcaacaactcgctccacggtggccaccgggggttcagcaaggtcgtatggacggtgaaggagcacgtcggcggcggtgactccccgtacatcacgctctactaccatagcttcgacggggagcaagggttccccggcgacctggacgtgtacgtgacgtaccgtctgtcgcgcccgtacgtgctgagcgtgcgcatgaacgccacggcgcggagcagggccaccccggtgaacctcgcgcaccacgcgtactggaacctcggcggccacggcagcgggcccgtcctcggcgaaacggtgcagctcttcgcgtcgcggtacacgccggtggacgccgcgctcgtgccgacgggcgcgctggcgcccgtggccggcacgccctacgacttccgcgcgccggcgcccgtgggggcgcgcctgggcggacctgcggccgcgccgtggcactggcggcgtcgcgggctacgacaccaactacgccgtggacggcgccgcgtcgccgtcgctgcggccggtggcgcgcgtntgggacggcgccacggggcgggccatggagctgtgggcggaccagcccggggtgcagttctacaccagcaacgggctcgctggcgtcaggggcaagggcggtagcgtgtaccggcggtacgccgcgctgtgcctcgagacgcaggggttccccgatgccgtcaaccacccgagcttcccgtcgcagatcgtgaggccgggcaaggtgtatagccatgacatgctctttaagttctccttcgcctagctacaagactactggtgcatgcggttcatgcgtacacctgcgcagtgctgtgtcaccttgatgtgtcttgattagactcctccgtctactctcaagaactttacatccccaaataacagcgtgctgcccggtacgagctagggttttatatgtatgcgcgggcgcggcttatgctcgataatttccgtctcattggttggccgt

SEQ ID NO: 37692 - protein, 357 aa, Zea mays subsp. mays
  peptide (1)..(357): Ceres Seq. ID no. 12407514
  misc_feature (67)..(288): Pfam Name: Pfam Description:  Aldose 1-epimerase
  misc_feature (152)..(288): NCBI GI NO: 38567883 NR Description: OSJNBa0036B21.18
  misc_feature (28)..(163): NCBI GI NO: 38567883 NR Description: OSJNBa0036B21.18
  misc_feature (39)..(288): NCBI GI NO: 38567884 NR Description: OSJNBa0036B21.19
  misc_feature (39)..(288): NCBI GI NO: 15824567 NR Description: non-cell-autonomous protein pathway2
  misc_feature (39)..(288): NCBI GI NO: 40882679 NR Description: putative aldose 1-epimerase
  misc_feature (41)..(288): NCBI GI NO: 15824565 NR Description: non-cell-autonomous protein pathway1
  misc_feature (57)..(288): NCBI GI NO: 7430313 NR Description: probable aldose 1-epimerase (EC 5
  misc_feature (66)..(284): NCBI GI NO: 15242223 NR Description: putative aldose 1-epimerase - like protein
  misc_feature (66)..(288): NCBI GI NO: 21537069 NR Description: aldose 1-epimerase-like protein
  misc_feature (66)..(288): NCBI GI NO: 15228261 NR Description: aldose 1-epimerase - like protein
  misc_feature (324)..(324): Xaa is any aa, unknown or other
QTINQEAAAGRSNQTSLPSPSSEMARAAAPPPLHRLPGLALLCLAVAVCFSGGENAAAAAWTRKIVGVHELRVGDFSVKVTNWGATLMSVILPDSKGNLGDVVLGYDTVAEYVNGTAYFGGLIGRVANRVAGARFTLDGKAYRLYRNDGNNSLHGGHRGFSKVVWTVKEHVGGGDSPYITLYYHSFDGEQGFPGDLDVYVTYRLSRPYVLSVRMNATARSRATPVNLAHHAYWNLGGHGSGPVLGETVQLFASRYTPVDAALVPTGALAPVAGTPYDFRAPAPVGARLGGPAAAPWHWRRRGLRHQLRRGRRRVAVAAAGGARXGRRHGAGHGAVGGPARGAVLHQQRARWRQGQGR

SEQ ID NO: 37693 - protein, 334 aa, Zea mays subsp. mays
  peptide (1)..(334): Ceres Seq. ID no. 12407515
  misc_feature (44)..(265): Pfam Name: Pfam Description:  Aldose 1-epimerase
  misc_feature (129)..(265): NCBI GI NO: 38567883 NR Description: OSJNBa0036B21.18
  misc_feature (5)..(140): NCBI GI NO: 38567883 NR Description: OSJNBa0036B21.18
  misc_feature (16)..(265): NCBI GI NO: 38567884 NR Description: OSJNBa0036B21.19
  misc_feature (16)..(265): NCBI GI NO: 15824567 NR Description: non-cell-autonomous protein pathway2
  misc_feature (16)..(265): NCBI GI NO: 40882679 NR Description: putative aldose 1-epimerase
  misc_feature (18)..(265): NCBI GI NO: 15824565 NR Description: non-cell-autonomous protein pathway1
  misc_feature (34)..(265): NCBI GI NO: 7430313 NR Description: probable aldose 1-epimerase (EC 5
  misc_feature (43)..(261): NCBI GI NO: 15242223 NR Description: putative aldose 1-epimerase - like protein
  misc_feature (43)..(265): NCBI GI NO: 21537069 NR Description: aldose 1-epimerase-like protein
  misc_feature (43)..(265): NCBI GI NO: 15228261 NR Description: aldose 1-epimerase - like protein
  misc_feature (301)..(301): Xaa is any aa, unknown or other
MARAAAPPPLHRLPGLALLCLAVAVCFSGGENAAAAAWTRKIVGVHELRVGDFSVKVTNWGATLMSVILPDSKGNLGDVVLGYDTVAEYVNGTAYFGGLIGRVANRVAGARFTLDGKAYRLYRNDGNNSLHGGHRGFSKVVWTVKEHVGGGDSPYITLYYHSFDGEQGFPGDLDVYVTYRLSRPYVLSVRMNATARSRATPVNLAHHAYWNLGGHGSGPVLGETVQLFASRYTPVDAALVPTGALAPVAGTPYDFRAPAPVGARLGGPAAAPWHWRRRGLRHQLRRGRRRVAVAAAGGARXGRRHGAGHGAVGGPARGAVLHQQRARWRQGQGR

SEQ ID NO: 37694 - protein, 270 aa, Zea mays subsp. mays
  peptide (1)..(270): Ceres Seq. ID no. 12407516
  misc_feature (1)..(201): Pfam Name: Pfam Description:  Aldose 1-epimerase
  misc_feature (65)..(201): NCBI GI NO: 38567883 NR Description: OSJNBa0036B21.18
  misc_feature (1)..(76): NCBI GI NO: 38567883 NR Description: OSJNBa0036B21.18
  misc_feature (1)..(201): NCBI GI NO: 38567884 NR Description: OSJNBa0036B21.19
  misc_feature (1)..(201): NCBI GI NO: 15824567 NR Description: non-cell-autonomous protein pathway2
  misc_feature (1)..(201): NCBI GI NO: 40882679 NR Description: putative aldose 1-epimerase
  misc_feature (1)..(201): NCBI GI NO: 15824565 NR Description: non-cell-autonomous protein pathway1
  misc_feature (1)..(201): NCBI GI NO: 7430313 NR Description: probable aldose 1-epimerase (EC 5
  misc_feature (1)..(197): NCBI GI NO: 15242223 NR Description: putative aldose 1-epimerase - like protein
  misc_feature (1)..(201): NCBI GI NO: 21537069 NR Description: aldose 1-epimerase-like protein
  misc_feature (1)..(201): NCBI GI NO: 15228261 NR Description: aldose 1-epimerase - like protein
  misc_feature (237)..(237): Xaa is any aa, unknown or other
MSVILPDSKGNLGDVVLGYDTVAEYVNGTAYFGGLIGRVANRVAGARFTLDGKAYRLYRNDGNNSLHGGHRGFSKVVWTVKEHVGGGDSPYITLYYHSFDGEQGFPGDLDVYVTYRLSRPYVLSVRMNATARSRATPVNLAHHAYWNLGGHGSGPVLGETVQLFASRYTPVDAALVPTGALAPVAGTPYDFRAPAPVGARLGGPAAAPWHWRRRGLRHQLRRGRRRVAVAAAGGARXGRRHGAGHGAVGGPARGAVLHQQRARWRQGQGR

SEQ ID NO: 37695 - DNA, 1067 bp, Zea mays subsp. mays
  misc_feature (1)..(1067): Ceres Seq. ID no. 12406572
actcccggcctcccctcccttgccgtccacttcttcctccaccacagtcatcagtggcgttatcctcttcgttctcgcctccctggttgttgttggctgggtgttggcgagctgggagtagagaccgagaagtggagcggccatgaagatccagtgcgacgcgtgcgagggcgcggctgccacggtggtgtgctgcgccgacgaggccgcgctgtgcgcgcgctgcgacgtcgagatccacgccgccaacaagctcgccagcaagcaccagcgcctcccgctcgaggcgctctccgccaagctcccgcgctgcgacgtctgccaggagaaagcggcgttcatcttctgcgtggaggaccgggcgctcttctgccaggactgcgacgagcccatccacgtcccgggcacgctctccgggaaccaccagcgctacctggccaccggcatccgcgtcggcctcgcctcggcttccgcctgcagcgacgcctgcgacgcccacgactccgaccaccacgccccgcccaaggccaccatcgagccaccgcacgccgccgtctccgccgcggtgcagcaggtgccctcgccgccgcagttcctgccgcagggctgggccgtcgacgagctcctgcagttctccgactacgagtccagcgacaagctgcacaaggagccgacgctcgggttcaaggagctggagtggttcgccgacatcgacctcttccacgagcaggcgcccaaagccagcaggacgttggcggaggtgccggagcttttcggataccaggcggcgaacgacgcggcgtactacaggccggccaaagccgccggcggcggcggcgccggggttcgccagagcaagaaggcccggatcgaggtcaccgacgacgaggactaccttatagtccctgatcttggttaaataagagagcgcaggagttttgtttcttctcctgatgtgtaccagagaagaattttactgtgtacaagctagtgtcatgtgttgtgcatctttgactgtagtgtcgctcaattctgaacatctattaagccacttttgttgctatgcc

SEQ ID NO: 37696 - protein, 302 aa, Zea mays subsp. mays
  peptide (1)..(302): Ceres Seq. ID no. 12406573
TPGLPSLAVHFFLHHSHQWRYPLRSRLPGCCWLGVGELGVETEKWSGHEDPVRRVRGRGCHGGVLRRRGRAVRALRRRDPRRQQARQQAPAPPARGALRQAPALRRLPGESGVHLLRGGPGALLPGLRRAHPRPGHALREPPALPGHRHPRRPRLGFRLQRRLRRPRLRPPRPAQGHHRATARRRLRRGAAGALAAAVPAAGLGRRRAPAVLRLRVQRQAAQGADARVQGAGVVRRHRPLPRAGAQSQQDVGGGAGAFRIPGGERRGVLQAGQSRRRRRRRGSPEQEGPDRGHRRRGLPYSP

SEQ ID NO: 37697 - protein, 258 aa, Zea mays subsp. mays
  peptide (1)..(258): Ceres Seq. ID no. 12406574
  misc_feature (52)..(99): Pfam Name: Pfam Description:  B-box zinc finger
  misc_feature (1)..(258): NCBI GI NO: 3618314 NR Description: zinc finger protein
  misc_feature (1)..(258): NCBI GI NO: 3618310 NR Description: zinc finger protein
  misc_feature (1)..(258): NCBI GI NO: 15221367 NR Description: salt-tolerance protein; protein id: At1g06040
  misc_feature (1)..(227): NCBI GI NO: 18402646 NR Description: salt tolerance-like protein; protein id:At2g31380
  misc_feature (1)..(227): NCBI GI NO: 25408150 NR Description: hypothetical protein At2g31380
  misc_feature (1)..(173): NCBI GI NO: 30679541 NR Description: salt-tolerance protein [Arabidopsis thaliana]
  misc_feature (1)..(108): NCBI GI NO: 17433085 NR Description: Zinc finger protein constans-like 7
  misc_feature (1)..(108): NCBI GI NO: 18412037 NR Description: CONSTANS B-box zinc finger family protein
  misc_feature (1)..(119): NCBI GI NO: 7489603 NR Description: zinc-finger protein R2931 [imported] - rice
  misc_feature (1)..(154): NCBI GI NO: 34903708 NR Description: putative zinc-finger protein
MKIQCDACEGAAATVVCCADEAALCARCDVEIHAANKLASKHQRLPLEALSAKLPRCDVCQEKAAFIFCVEDRALFCQDCDEPIHVPGTLSGNHQRYLATGIRVGLASASACSDACDAHDSDHHAPPKATIEPPHAAVSAAVQQVPSPPQFLPQGWAVDELLQFSDYESSDKLHKEPTLGFKELEWFADIDLFHEQAPKASRTLAEVPELFGYQAANDAAYYRPAKAAGGGGAGVRQSKKARIEVTDDEDYLIVPDLG

SEQ ID NO: 37698 - DNA, 2011 bp, Zea mays subsp. mays
  misc_feature (1)..(2011): Ceres Seq. ID no. 12358730
ctctttcgatagctggcgaaggcgcggcgcgcagggccagtagcaaccctcccatggcctacgctgcgcctcccatggcgtcgtccctcaccgcctcccacccccctctttccccgtcccacctcataacccatccgcatcgctgccctgcgcgccccaaccccaccaccggcctcctccgcctcaccccgtctcgccgccgcggtcgtccccccgtggccgtccgcctcgcaatatctgcctcgtccacctcagccccgcccccgtcggcggatcggtcggaggccgcgtcgtcgctggagagatacctctcggcgacggtgacgggagcggtgatgggaacgggggcggccccaccagcttcggccccgccgcgcgccccgccggcgatgaaggggggacggaagcagtatagcgcgttgggggctgtcacgctcgagaaggccaagctcgatctctcccagcgccgcaagaatatcatgcccgagttggcgacaggtggtggtggtggagatattggaaaaaggatcggtcatggtgggggtgatggtggtgatgatgatggtgacgatgatgactactttgatgattttgatgagggagaggaagaaggtgggcttttcaggaggcgaattgttgtacaagagctattcaatagggagttcgtagaagctgtgttgcaagaatggtacaagacgatgagtgatttgcctaccggtcttcgccaagcttgtgagatgggtttggtgagttctgcacagatggtacgttacttgtcaatatttgcaagacctacaaacgctaggtccttctcaagagctcttccaggctggctttccagaggtcttgttggaaggacacttgcagatccatcattcccacataaaatgtctttggagtttatagctaccattgcgtcatctatttggtgtgaaatgaatattcgcaaagagaggtttaaacaagaatgggatttggtgattgttaatgctttgactgcagcttgttgcaacttgatggttcttggacttttagcaccatgccgttcatatgcgagtacatctcgatttgacttccaaaatgcaattgagaaacttccgaacaacatatttgagaagagctatcctttgagagagtttgatctagcaaaacgaatcagtgcattcttttataaagctgctgagcttagtctggtcgggtttgtagctggctctgtgcaagggggtatgtcaatagtcttgtccgcaagaaaagaaaggaggttatcggtgactattccctctatcagcaccaatgctcttggttatggagctttcctaggactctatgctaacttgcgttatcaattgctatgtggagtagaccaatatatggtcaagcgcttcgatgttttgggtgtggcaatcttcttcagcacagcagcaagactgatgaatattcagattggtgaggcatcaaggaggacttggcttggcgaggaagctgatccacagtactcagatcgactgttgagagcatacaagagacctgtggaggttgacgcggaccaatcaaggtggtttatatccaaggatgcaattgtatctggccttggtcttctaggtatcaagcagggtggacctgaggcaacattttctaagtctcgtcgaaagagagtcatccgcaaaaaggtcacttcaggttgagtttagtggatttggatagcaatgctggaacaattttgcttctgttccactatgccagagggaggtctacccaaattatggtaaatgagaaaaaggtatcaagtcaaccagcacgtggtctgtcggcgaagggatcaaagggtttgttactgggaagggttagttaaaaggtgccaattactattttataatttaattgcagttatttaaggtaagaaaatatgttgttttcttgtattgctgtgaggcaaatagacacgcttagtggtagttttgtaagattgttaatgtactgactttacatgagaaatggattctgcattttt

SEQ ID NO: 37699 - protein, 560 aa, Zea mays subsp. mays
  peptide (1)..(560): Ceres Seq. ID no. 12358731
  misc_feature (2)..(141): Pfam Name: Pfam Description:  Glycoprotein GG/GX
  misc_feature (52)..(559): NCBI GI NO: 22327037 NR Description: putative protein; protein id: At5g24690
  misc_feature (215)..(559): NCBI GI NO: 9759209 NR Description: gb|AAD25674
  misc_feature (158)..(489): NCBI GI NO: 15242979 NR Description: putative protein; protein id: At5g22790
  misc_feature (162)..(478): NCBI GI NO: 34395170 NR Description: chloroplast lumen common protein family-likeprotein
  misc_feature (162)..(478): NCBI GI NO: 34900644 NR Description: hypothetical protein~similar to Arabidopsisthaliana chromosome5
  misc_feature (170)..(478): NCBI GI NO: 30687286 NR Description: expressed protein [Arabidopsis thaliana]
  misc_feature (282)..(478): NCBI GI NO: 6934300 NR Description: unknown [Euphorbia esula]
  misc_feature (217)..(456): NCBI GI NO: 22331818 NR Description: chloroplast lumen common protein family
  misc_feature (217)..(458): NCBI GI NO: 18405375 NR Description: chloroplast lumen common protein family
  misc_feature (170)..(417): NCBI GI NO: 30687283 NR Description: expressed protein [Arabidopsis thaliana]
LSIAGEGAARRASSNPPMAYAAPPMASSLTASHPPLSPSHLITHPHRCPARPNPTTGLLRLTPSRRRGRPPVAVRLAISASSTSAPPPSADRSEAASSLERYLSATVTGAVMGTGAAPPASAPPRAPPAMKGGRKQYSALGAVTLEKAKLDLSQRRKNIMPELATGGGGGDIGKRIGHGGGDGGDDDGDDDDYFDDFDEGEEEGGLFRRRIVVQELFNREFVEAVLQEWYKTMSDLPTGLRQACEMGLVSSAQMVRYLSIFARPTNARSFSRALPGWLSRGLVGRTLADPSFPHKMSLEFIATIASSIWCEMNIRKERFKQEWDLVIVNALTAACCNLMVLGLLAPCRSYASTSRFDFQNAIEKLPNNIFEKSYPLREFDLAKRISAFFYKAAELSLVGFVAGSVQGGMSIVLSARKERRLSVTIPSISTNALGYGAFLGLYANLRYQLLCGVDQYMVKRFDVLGVAIFFSTAARLMNIQIGEASRRTWLGEEADPQYSDRLLRAYKRPVEVDADQSRWFISKDAIVSGLGLLGIKQGGPEATFSKSRRKRVIRKKVTSG

SEQ ID NO: 37700 - protein, 543 aa, Zea mays subsp. mays
  peptide (1)..(543): Ceres Seq. ID no. 12358732
  misc_feature (1)..(124): Pfam Name: Pfam Description:  Glycoprotein GG/GX
  misc_feature (35)..(542): NCBI GI NO: 22327037 NR Description: putative protein; protein id: At5g24690
  misc_feature (198)..(542): NCBI GI NO: 9759209 NR Description: gb|AAD25674
  misc_feature (141)..(472): NCBI GI NO: 15242979 NR Description: putative protein; protein id: At5g22790
  misc_feature (145)..(461): NCBI GI NO: 34395170 NR Description: chloroplast lumen common protein family-likeprotein
  misc_feature (145)..(461): NCBI GI NO: 34900644 NR Description: hypothetical protein~similar to Arabidopsisthaliana chromosome5
  misc_feature (153)..(461): NCBI GI NO: 30687286 NR Description: expressed protein [Arabidopsis thaliana]
  misc_feature (265)..(461): NCBI GI NO: 6934300 NR Description: unknown [Euphorbia esula]
  misc_feature (200)..(439): NCBI GI NO: 22331818 NR Description: chloroplast lumen common protein family
  misc_feature (200)..(441): NCBI GI NO: 18405375 NR Description: chloroplast lumen common protein family
  misc_feature (153)..(400): NCBI GI NO: 30687283 NR Description: expressed protein [Arabidopsis thaliana]
MAYAAPPMASSLTASHPPLSPSHLITHPHRCPARPNPTTGLLRLTPSRRRGRPPVAVRLAISASSTSAPPPSADRSEAASSLERYLSATVTGAVMGTGAAPPASAPPRAPPAMKGGRKQYSALGAVTLEKAKLDLSQRRKNIMPELATGGGGGDIGKRIGHGGGDGGDDDGDDDDYFDDFDEGEEEGGLFRRRIVVQELFNREFVEAVLQEWYKTMSDLPTGLRQACEMGLVSSAQMVRYLSIFARPTNARSFSRALPGWLSRGLVGRTLADPSFPHKMSLEFIATIASSIWCEMNIRKERFKQEWDLVIVNALTAACCNLMVLGLLAPCRSYASTSRFDFQNAIEKLPNNIFEKSYPLREFDLAKRISAFFYKAAELSLVGFVAGSVQGGMSIVLSARKERRLSVTIPSISTNALGYGAFLGLYANLRYQLLCGVDQYMVKRFDVLGVAIFFSTAARLMNIQIGEASRRTWLGEEADPQYSDRLLRAYKRPVEVDADQSRWFISKDAIVSGLGLLGIKQGGPEATFSKSRRKRVIRKKVTSG

SEQ ID NO: 37701 - protein, 536 aa, Zea mays subsp. mays
  peptide (1)..(536): Ceres Seq. ID no. 12358733
  misc_feature (1)..(117): Pfam Name: Pfam Description:  Glycoprotein GG/GX
  misc_feature (28)..(535): NCBI GI NO: 22327037 NR Description: putative protein; protein id: At5g24690
  misc_feature (191)..(535): NCBI GI NO: 9759209 NR Description: gb|AAD25674
  misc_feature (134)..(465): NCBI GI NO: 15242979 NR Description: putative protein; protein id: At5g22790
  misc_feature (138)..(454): NCBI GI NO: 34395170 NR Description: chloroplast lumen common protein family-likeprotein
  misc_feature (138)..(454): NCBI GI NO: 34900644 NR Description: hypothetical protein~similar to Arabidopsisthaliana chromosome5
  misc_feature (146)..(454): NCBI GI NO: 30687286 NR Description: expressed protein [Arabidopsis thaliana]
  misc_feature (258)..(454): NCBI GI NO: 6934300 NR Description: unknown [Euphorbia esula]
  misc_feature (193)..(432): NCBI GI NO: 22331818 NR Description: chloroplast lumen common protein family
  misc_feature (193)..(434): NCBI GI NO: 18405375 NR Description: chloroplast lumen common protein family
  misc_feature (146)..(393): NCBI GI NO: 30687283 NR Description: expressed protein [Arabidopsis thaliana]
MASSLTASHPPLSPSHLITHPHRCPARPNPTTGLLRLTPSRRRGRPPVAVRLAISASSTSAPPPSADRSEAASSLERYLSATVTGAVMGTGAAPPASAPPRAPPAMKGGRKQYSALGAVTLEKAKLDLSQRRKNIMPELATGGGGGDIGKRIGHGGGDGGDDDGDDDDYFDDFDEGEEEGGLFRRRIVVQELFNREFVEAVLQEWYKTMSDLPTGLRQACEMGLVSSAQMVRYLSIFARPTNARSFSRALPGWLSRGLVGRTLADPSFPHKMSLEFIATIASSIWCEMNIRKERFKQEWDLVIVNALTAACCNLMVLGLLAPCRSYASTSRFDFQNAIEKLPNNIFEKSYPLREFDLAKRISAFFYKAAELSLVGFVAGSVQGGMSIVLSARKERRLSVTIPSISTNALGYGAFLGLYANLRYQLLCGVDQYMVKRFDVLGVAIFFSTAARLMNIQIGEASRRTWLGEEADPQYSDRLLRAYKRPVEVDADQSRWFISKDAIVSGLGLLGIKQGGPEATFSKSRRKRVIRKKVTSG

SEQ ID NO: 37702 - DNA, 1864 bp, Zea mays subsp. mays
  misc_feature (1)..(1864): Ceres Seq. ID no. 12407509
accaacccacacccgttccgtttctggcgcacagcacagtcacagtgctcggcatcttttccgctccgctctgacgctctcccactcccccacagtcccacgccctccagtcaaagcaagccgctgcttggccggccgggaaggctcggtcgcagcgccgaggaatggcggccaagccggtcaccgtcggcgacctcatccaccgcgtcgcctcttcctgcctctccaaccgcctgccgtgcaaccacaccttccgcgactccgtggacagcgactttgacgacgacgacgacgacgacgaccccttcgccgacgccgtctccagcagcgagaaatgccagcggtccccgcccgctgcggaggtcgaggaagaggaggaggaggacgagaagctcaagatctgggaggagagggagcaggagaaggagaggctggccgccgcgtccaagggcgccgagcgcgcccgcgacgcggacgcgctgatggcggaggtgttcgacgccgtctccggggtgcgccgcgcctacgccgcgctccaggacgcgcactgcccctgggaccccgacaagatgcggaccgcggacgcggccgtggtcgccgagctccgccacctcgcgcgcctccgcgaccgcttccgccgctccgcagccgtgggccacatcccgcgcccgaaaccgtccgcgccgccgctgcgcgaggccgtggcgccgtacgaggcggcgctcgacgacctccagcgccagctccagtccaggcaggccgaggtggacgcgctcaaagagaagctcgcggcggccaccagccgccgcaacgggcgccaccaccacgtcccgccctccaagcagaacggcggcgcgccgacggcggagctcttcaccacctgcgccgagcaagcccgcgcggcgacgcgggccttcgcggggcacctcgcgcacctgatgcgcgcggcggggctggagctcgcggcggccacccggtcgctcaccaagatcccggtgtcctccccgcagctggccaagcacgcgctggaggcgcacgccacgcgcgccctcctcggcggcttcgagcacgagtccttctacctggacggctccctctcgtcgctgctggaccccgccgcgttccggcgggagcggtacgcgcagttccgggacatgcgcgggatggagcccgcggagctgctgggcgtgctcccgacctgcgccttcggccgctacgccgccgccaagttcgcggcgctcctgccgccgcgcgtggaggaggccgtcctgggcgacgccgagcaccggagggtggtcaacgccggcgcccacccgcggacgcccttctacggggagttcctgcgcgcggccaaggccgtgtggatgctgcacctgctagccttcgcgctggagccgccgcccagccacttcgatgccggacgcggtgcggagttccaccaggagtacatggagagcgtgaccggcgcgccaccgcacggcggcgcgggcctggtcgtcgggttcgccgtcgcgcccgggttccggctggggaacggcgccgtcgtgcgcgcccgggtctacctggtgccgcgtggtggccgaccgtgacagacccatgcatggcgtgacagaccgcgtggtagcgttgcatagcgccgcggcccacggatcacctccgagagttgttggtgggtgccaatgcgcaccctgctggagcctggagctggacctgcggagtagctgctggctggctgcgttggtgaagaacagacaaaggctcatagctactgtactagtggctccgtagattttatttcattttacttctccttgttaatctcaaaaaaagtaataatcgccatgtgtaagaggactttgaattt

SEQ ID NO: 37703 - protein, 474 aa, Zea mays subsp. mays
  peptide (1)..(474): Ceres Seq. ID no. 12407510
  misc_feature (91)..(219): Pfam Name: DUF641 Pfam Description: Plant protein of unknown function
  misc_feature (32)..(474): NCBI GI NO: 34897362 NR Description: hypothetical protein [Oryza sativa]
  misc_feature (66)..(308): NCBI GI NO: 22327960 NR Description: putative protein; protein id: At5g58960
  misc_feature (268)..(470): NCBI GI NO: 22327960 NR Description: putative protein; protein id: At5g58960
  misc_feature (66)..(308): NCBI GI NO: 30697152 NR Description: expressed protein [Arabidopsis thaliana]
  misc_feature (268)..(470): NCBI GI NO: 30697152 NR Description: expressed protein [Arabidopsis thaliana]
  misc_feature (66)..(308): NCBI GI NO: 26452122 NR Description: unknown protein [Arabidopsis thaliana]
  misc_feature (268)..(470): NCBI GI NO: 26452122 NR Description: unknown protein [Arabidopsis thaliana]
  misc_feature (1)..(260): NCBI GI NO: 34897362 NR Description: hypothetical protein [Oryza sativa]
  misc_feature (102)..(467): NCBI GI NO: 37535904 NR Description: hypothetical protein
  misc_feature (66)..(467): NCBI GI NO: 8777470 NR Description: gb|AAB82637
MAAKPVTVGDLIHRVASSCLSNRLPCNHTFRDSVDSDFDDDDDDDDPFADAVSSSEKCQRSPPAAEVEEEEEEDEKLKIWEEREQEKERLAAASKGAERARDADALMAEVFDAVSGVRRAYAALQDAHCPWDPDKMRTADAAVVAELRHLARLRDRFRRSAAVGHIPRPKPSAPPLREAVAPYEAALDDLQRQLQSRQAEVDALKEKLAAATSRRNGRHHHVPPSKQNGGAPTAELFTTCAEQARAATRAFAGHLAHLMRAAGLELAAATRSLTKIPVSSPQLAKHALEAHATRALLGGFEHESFYLDGSLSSLLDPAAFRRERYAQFRDMRGMEPAELLGVLPTCAFGRYAAAKFAALLPPRVEEAVLGDAEHRRVVNAGAHPRTPFYGEFLRAAKAVWMLHLLAFALEPPPSHFDAGRGAEFHQEYMESVTGAPPHGGAGLVVGFAVAPGFRLGNGAVVRARVYLVPRGGRP

SEQ ID NO: 37704 - protein, 424 aa, Zea mays subsp. mays
  peptide (1)..(424): Ceres Seq. ID no. 12407511
  misc_feature (146)..(421): Pfam Name: Pfam Description:  Progesterone receptor
  misc_feature (1)..(410): NCBI GI NO: 79833 NR Description: hypothetical 119
  misc_feature (1)..(420): NCBI GI NO: 29247944 NR Description: GLP_26_54603_52153 [Giardia lamblia ATCC 50803]
  misc_feature (5)..(414): NCBI GI NO: 25989121 NR Description: putative PHA synthase [Streptomyces aureofaciens]
  misc_feature (1)..(404): NCBI GI NO: 23104656 NR Description: hypothetical protein [Azotobacter vinelandii]
  misc_feature (1)..(424): NCBI GI NO: 29247944 NR Description: GLP_26_54603_52153 [Giardia lamblia ATCC 50803]
  misc_feature (1)..(423): NCBI GI NO: 23106243 NR Description: hypothetical protein [Azotobacter vinelandii]
  misc_feature (1)..(358): NCBI GI NO: 25989119 NR Description: unknown [Streptomyces aureofaciens]
  misc_feature (1)..(316): NCBI GI NO: 23893582 NR Description: EBNA-LP protein [Human herpesvirus 4]
  misc_feature (1)..(246): NCBI GI NO: 23018055 NR Description: hypothetical protein [Thermobifida fusca]
  misc_feature (76)..(369): NCBI GI NO: 23012311 NR Description: hypothetical protein
MPAVPARCGGRGRGGGGREAQDLGGEGAGEGEAGRRVQGRRARPRRGRADGGGVRRRLRGAPRLRRAPGRALPLGPRQDADRGRGRGRRAPPPRAPPRPLPPLRSRGPHPAPETVRAAAARGRGAVRGGARRPPAPAPVQAGRGGRAQREARGGHQPPQRAPPPRPALQAERRRADGGALHHLRRASPRGDAGLRGAPRAPDARGGAGARGGHPVAHQDPGVLPAAGQARAGGARHARPPRRLRARVLLPGRLPLVAAGPRRVPAGAVRAVPGHARDGARGAAGRAPDLRLRPLRRRQVRGAPAAARGGGRPGRRRAPEGGQRRRPPADALLRGVPARGQGRVDAAPASLRAGAAAQPLRCRTRCGVPPGVHGERDRRATARRRGPGRRVRRRARVPAGERRRRARPGLPGAAWWPTVTDPCMA

SEQ ID NO: 37705 - protein, 368 aa, Zea mays subsp. mays
  peptide (1)..(368): Ceres Seq. ID no. 12407512
  misc_feature (1)..(113): Pfam Name: DUF641 Pfam Description: Plant protein of unknown function
  misc_feature (1)..(368): NCBI GI NO: 34897362 NR Description: hypothetical protein [Oryza sativa]
  misc_feature (1)..(202): NCBI GI NO: 22327960 NR Description: putative protein; protein id: At5g58960
  misc_feature (162)..(364): NCBI GI NO: 22327960 NR Description: putative protein; protein id: At5g58960
  misc_feature (1)..(202): NCBI GI NO: 30697152 NR Description: expressed protein [Arabidopsis thaliana]
  misc_feature (162)..(364): NCBI GI NO: 30697152 NR Description: expressed protein [Arabidopsis thaliana]
  misc_feature (1)..(202): NCBI GI NO: 26452122 NR Description: unknown protein [Arabidopsis thaliana]
  misc_feature (162)..(364): NCBI GI NO: 26452122 NR Description: unknown protein [Arabidopsis thaliana]
  misc_feature (1)..(154): NCBI GI NO: 34897362 NR Description: hypothetical protein [Oryza sativa]
  misc_feature (1)..(361): NCBI GI NO: 37535904 NR Description: hypothetical protein
  misc_feature (1)..(361): NCBI GI NO: 8777470 NR Description: gb|AAB82637
MAEVFDAVSGVRRAYAALQDAHCPWDPDKMRTADAAVVAELRHLARLRDRFRRSAAVGHIPRPKPSAPPLREAVAPYEAALDDLQRQLQSRQAEVDALKEKLAAATSRRNGRHHHVPPSKQNGGAPTAELFTTCAEQARAATRAFAGHLAHLMRAAGLELAAATRSLTKIPVSSPQLAKHALEAHATRALLGGFEHESFYLDGSLSSLLDPAAFRRERYAQFRDMRGMEPAELLGVLPTCAFGRYAAAKFAALLPPRVEEAVLGDAEHRRVVNAGAHPRTPFYGEFLRAAKAVWMLHLLAFALEPPPSHFDAGRGAEFHQEYMESVTGAPPHGGAGLVVGFAVAPGFRLGNGAVVRARVYLVPRGGRP

SEQ ID NO: 37706 - DNA, 1477 bp, Zea mays subsp. mays
  misc_feature (1)..(1477): Ceres Seq. ID no. 13498367
  misc_feature (154)..(154): n is a, c, t, g, unknown, or other
  misc_feature (255)..(255): n is a, c, t, g, unknown, or other
  misc_feature (254)..(254): n is a, c, t, g, unknown, or other
aatcgaaaaattttcgagctcaagctcaatcacttcggattggcggcgggcacgcgccggacgaaatggaagcggcaccatccgcccgcgccttctccccgtcctcgtctccctccgcgggggctagacccagccttcccctcgcgggcctggnctcgcgctcgcggcgcgcccgggtgctcgcggcgccgcccccgccccgcgccgtcgcctcctcccgcgcgccgctggtggtctccagcccgccaccgccnnaggactccggcacgcacaaccccgcgcacgccaaggtcgaccgctccggccgcttctgcagcccccgcgccgcacgggaactcgcgctgtgagtcccggcgtttccccagcttcagctcctacatacttcggtttctcttcttctgtgctgcgttggagttgggcttcggctgtggttctttgctgctggaggtgaaccgctacttccgcgtctcgtgtcgcaggatgatttcctacgccgcgtgtctggagggaaccgatgtcgtccggctcttcgatcgcaggatcagcgcaagacgagaacccgggtttgttttcaacaaggcatgcctattgagttacaaccatatgagctttggcgggggaccgctcgaggttggaacggaggaggaggctgagaagctggccagtcagaacgataaggattcagccaacgaagcagatgtactttcagctcctccaaaacttgtttacaacaactatgtattacggctgtccagggaacttttagtggctgttgccagtggatgggataagcatgtggttatcatcgacaaaataattccccaggcttggaaggatgaacctgtggcaaggattcttgagctctgcattctacatattgctatggctgagatgacatcaaaaggaacaccccacaaagttgtcattaatgaggcagtagatctggcaaagcgattttgtgatggtggtgcccctcgggtaatcaacggatgccttcgaacatttgtgaaggatcatgttgatgttgcaggcacgagccaggaagctaaatcaaaatcatgattttttgcaaatactcatacaacaaaatggtggctgaagtaaagaagtacggagaaaaccttgctgtcttgagttcaggcgaataccttctgtctccaaggtttagccttcaacctaagggaatctaaaaggtaaacatgatggactcatcaaggagccacaacacgttcattcttttagaatgttcggttattaggtgaagtatacagagctgtaaactggtgatgcacattcatgcttcatctaaaacaaccgaaggttatggcttctgatagcggatagcctactcgacgcagatcgttaaatgatcagatattaagatgaccaggagttgtgtaaaagcttgatgcacatgtaaaatgttatatatacttggcattggctcattgcaatgggagaaggatattctagtttc

SEQ ID NO: 37707 - protein, 353 aa, Zea mays subsp. mays
  peptide (1)..(353): Ceres Seq. ID no. 13498368
  misc_feature (161)..(330): NCBI GI NO: 18483231 NR Description: hypothetical protein M3E9.200 [Sorghum bicolor]
  misc_feature (161)..(352): NCBI GI NO: 7486786 NR Description: hypothetical protein M3E9
  misc_feature (161)..(352): NCBI GI NO: 18416739 NR Description: expressed protein [Arabidopsis thaliana]
  misc_feature (233)..(338): NCBI GI NO: 20807741 NR Description: Transcription termination factor
  misc_feature (52)..(52): Xaa is any aa, unknown or other
  misc_feature (85)..(85): Xaa is any aa, unknown or other
NRKIFELKLNHFGLAAGTRRTKWKRHHPPAPSPRPRLPPRGLDPAFPSRAWXRARGAPGCSRRRPRPAPSPPPARRWWSPARHRXRTPARTTPRTPRSTAPAASAAPAPHGNSRCESRRFPSFSSYILRFLFFCAALELGFGCGSLLLEVNRYFRVSCRRMISYAACLEGTDVVRLFDRRISARREPGFVFNKACLLSYNHMSFGGGPLEVGTEEEAEKLASQNDKDSANEADVLSAPPKLVYNNYVLRLSRELLVAVASGWDKHVVIIDKIIPQAWKDEPVARILELCILHIAMAEMTSKGTPHKVVINEAVDLAKRFCDGGAPRVINGCLRTFVKDHVDVAGTSQEAKSKS

SEQ ID NO: 37708 - protein, 193 aa, Zea mays subsp. mays
  peptide (1)..(193): Ceres Seq. ID no. 13498369
  misc_feature (1)..(170): NCBI GI NO: 18483231 NR Description: hypothetical protein M3E9.200 [Sorghum bicolor]
  misc_feature (1)..(192): NCBI GI NO: 7486786 NR Description: hypothetical protein M3E9
  misc_feature (1)..(192): NCBI GI NO: 18416739 NR Description: expressed protein [Arabidopsis thaliana]
  misc_feature (73)..(178): NCBI GI NO: 20807741 NR Description: Transcription termination factor
MISYAACLEGTDVVRLFDRRISARREPGFVFNKACLLSYNHMSFGGGPLEVGTEEEAEKLASQNDKDSANEADVLSAPPKLVYNNYVLRLSRELLVAVASGWDKHVVIIDKIIPQAWKDEPVARILELCILHIAMAEMTSKGTPHKVVINEAVDLAKRFCDGGAPRVINGCLRTFVKDHVDVAGTSQEAKSKS

SEQ ID NO: 37709 - DNA, 1989 bp, Zea mays subsp. mays
  misc_feature (1)..(1989): Ceres Seq. ID no. 12405971
gcacgagaccttacctagaacatcctaatcgaaaaggaaacatctcgtcgacccaaacccatccacccacaaggcggaatacacgatccagtccgatcctcgccccgcgcgctgctccaaaccctggcgatgtcgacggcggcggccgcgaagactccgatcaaggccctgggctccgcggccgcgggtgccatgactccgaccaaatctcagccccccgcggcggccaagacgccctgtacctctcgcgcgcggtcctcccacgcatccgagaattccaaccccaacatcccgggcacgccgcctcccccgcagtcgacgccgtccaagcccagcctgaactccccggcgggcgcgggagccaggtccgccaccgcgaagaaaaagccctccacgcccgcgcccgccgcgccaccgctggagcgggagcggcgattcctcgtggcgaagaagggcgcgcggcggaggcgcaacgtcgggaccatgggacgcggcgggggcggccgcgggggagagatcgacttcgacaagtgccgcgaggcccgctcgcgaggcgctacgcgcgtcgcagggggagttcttccgcaaggagctcgccgcatccacagccaccggagaggatcaattgggacaggaggaggaggggaagccgctggctgaagaggatgtgaaaggtggagcattcgaggagcggcaggaggaggagaccgacgcggagctggaggggagcagcaaggttagggcgatgaggacgaaggcgatggctaaggcgatgagcagcgttccgaatcctggctctggccgcgtcaagcacatggtgcaggccttcgagagcctgctcaacatctccggcgccacctccgacgctgaaagggccggtgagggctcatgggcgctgcccgggttgcagctatggaaggaggatgataagggtgatctggggttcccaccagtgtcggtgttctcttctgctgatttccagaatgcagggtctaatcgactctgctcgtcactagatggaaacaccgtcaggtcgagctgggacagcagaacatcgactggcgagtgcagcaggagaaattcatctgagtcactaaggagaagaacatcggctggcggggcgcagaagcaggagaaactcatctgagtcactaaggagcagctggaacaaaaagctcaaggtcaccagccagcatccattcaagttgaggacagagcaaaggggaaagtttaaggaacagcagttcgtccaaaaggtgcaagagatgcttgcagaggaagagaagaagcgtattcatattgcgcaaggattgccatggactaccgatgaacccgagtgcttgataaagcctgcagtcaaagaaagaactgagcctatagaccttgttttgcatagcgatgtgcgtgctcttgaacgtgcagaatttgatcagcatgttttggataggaacaagttcgctgagcaacaaagattagaatgggaaaggcaacaggaattagacgaacaagaaaggataaggcaactgaggagaaccgagctgattcctaaagctcagcccatgccatactttgaccgcccattcatccccaaaaggtccacaaaacctgctacagttcccatggaaccgaaattctacctcaggccagaaaagctatcctgttactatcgacagcaatgtatggagcttggaaagctgaatccacaacatcagtgccaacatccgctcgcaatcgagaaatgcagagcatcgacacacatgatcaaacaactgtttccatttcctggcatcgtcttattcattcttgattcgtcttcttccatgtgcgaagaaattgctatcaagcgtgtttttgtagctttgcttggatcgccttgcctccaagttctgttaatcgctggctctgtgcttcagatgcaatcccaccgaggtttgaaatttgtcgttcaagaaactgataaggaaattcaaggatgaattttctgtggtc

SEQ ID NO: 37710 - protein, 236 aa, Zea mays subsp. mays
  peptide (1)..(236): Ceres Seq. ID no. 12405972
  misc_feature (1)..(151): NCBI GI NO: 30685394 NR Description: expressed protein [Arabidopsis thaliana]
  misc_feature (1)..(151): NCBI GI NO: 11358122 NR Description: hypothetical protein T20K14_120 - Arabidopsisthaliana
  misc_feature (1)..(132): NCBI GI NO: 15232025 NR Description: hypothetical protein; protein id: At3g01015.1
  misc_feature (1)..(123): NCBI GI NO: 8926136 NR Description: targeting protein for Xklp2; TPX2 [Xenopus laevis]
MLAEEEKKRIHIAQGLPWTTDEPECLIKPAVKERTEPIDLVLHSDVRALERAEFDQHVLDRNKFAEQQRLEWERQQELDEQERIRQLRRTELIPKAQPMPYFDRPFIPKRSTKPATVPMEPKFYLRPEKLSCYYRQQCMELGKLNPQHQCQHPLAIEKCRASTHMIKQLFPFPGIVLFILDSSSSMCEEIAIKRVFVALLGSPCLQVLLIAGSVLQMQSHRGLKFVVQETDKEIQG

SEQ ID NO: 37711 - protein, 222 aa, Zea mays subsp. mays
  peptide (1)..(222): Ceres Seq. ID no. 12405973
TRPYLEHPNRKGNISSTQTHPPTRRNTRSSPILAPRAAPNPGDVDGGGREDSDQGPGLRGRGCHDSDQISAPRGGQDALYLSRAVLPRIREFQPQHPGHAASPAVDAVQAQPELPGGRGSQVRHREEKALHARARRATAGAGAAIPRGEEGRAAEAQRRDHGTRRGRPRGRDRLRQVPRGPLARRYARRRGSSSARSSPHPQPPERINWDRRRRGSRWLKRM

SEQ ID NO: 37712 - protein, 176 aa, Zea mays subsp. mays
  peptide (1)..(176): Ceres Seq. ID no. 12405974
MSTAAAAKTPIKALGSAAAGAMTPTKSQPPAAAKTPCTSRARSSHASENSNPNIPGTPPPPQSTPSKPSLNSPAGAGARSATAKKKPSTPAPAAPPLERERRFLVAKKGARRRRNVGTMGRGGGGRGGEIDFDKCREARSRGATRVAGGVLPQGARRIHSHRRGSIGTGGGGEAAG

SEQ ID NO: 37713 - DNA, 1396 bp, Zea mays subsp. mays
  misc_feature (1)..(1396): Ceres Seq. ID no. 12376528
caaacccacctcgcctcctagtcccccccttcgccttctctcccgagtcccatcggagcccggagctctctcgcctcccgcgaggctgtgtggtgaggcgcggacgagatgaacgagcaggggctcggtggtctcggcgggggccgcggggccgtgcaggggcacgggcgggaggcgatggcgctcttgcagcaccagcagcttcaacagcaacggcggcagctggaggaggaggatgaggtgcggcgccagatgttcggcggggtggcggcgttcccggcagcgctgggccacggccagcaggtggactacggggaggacgccggcgggctcggggacagcgacgcgggcgggtcggagcccgagccaccaccggagcggacgcgcggggggtccggcggcggcggcaagcggagccgcgctgccgaggtgcacaacctctccgagaagaggaggaagagcaagatcaacgagaagatgaaagcgctgcagagcctgatacccaactccaacaagaccgacaaggcatccatgcttgacgaggccattgagtatctgaagcaactgcagctccaagtgcagatgctgtctatgagaaatggtgtttacttgaaccctccatatttgtctggcacaattgagcctgcacaagcatcacaaatgtttgctgcagttggtgggggcaacattacagcgtcaagctctggggcagtgatgccaccagtaaaccaaagttcaggacttcaagtatttgatccattaaatcctccacgagaccaaccactgtcttttgtattaccaaatgtagacaaaaccattcaagaagctccctttcacttggaatcatcgcagttccaccctcgaccatttcgaatgcctgaatcttctgagatgatgcttccaggtgaggtagtggcaaagcaccagctaacttcaattcaaggaagagttagtatgccaggaattggtatgaaccccattaggcaagaatcatccactgtaaaagctgatcagtttgatggttgctcacataacaaagagtgactacaagatatggtgccacaaaatgcatgaaagttcaggacagcttaggaaatggcaaccgatgaggaccgaaggcaggatgacacagttcagtaacccagctgacagcctggcacgcaggcttcccctttattttcctctgttactgcaatagtaacttaaatttttaggcttcccctttattttcctctgttactgcaatagtaacttaattttttttaggcttcacctttcctttttgtttgaaaattagcagggcagtattaattaatagtacaaaaccatgtatcagcaagatttcaggggttgaaacttgaaatgccaatattcaccaagctttcgtttttttttc

SEQ ID NO: 37714 - protein, 311 aa, Zea mays subsp. mays
  peptide (1)..(311): Ceres Seq. ID no. 12376529
  misc_feature (105)..(154): Pfam Name: Pfam Description:  Helix-loop-helix DNA-binding domain
  misc_feature (81)..(311): NCBI GI NO: 15451582 NR Description: Putative SPATULA [Oryza sativa]
  misc_feature (77)..(185): NCBI GI NO: 18419937 NR Description: bHLH protein, SPATULA; protein id: At4g36930.1
  misc_feature (77)..(185): NCBI GI NO: 25407777 NR Description: hypothetical protein AT4g36930
  misc_feature (64)..(213): NCBI GI NO: 15217533 NR Description: putative phytochrome-associated protein 3
  misc_feature (64)..(213): NCBI GI NO: 4093153 NR Description: phytochrome-associated protein 3
  misc_feature (74)..(170): NCBI GI NO: 15240202 NR Description: putative protein; protein id: At5g67110
  misc_feature (74)..(170): NCBI GI NO: 21536863 NR Description: unknown [Arabidopsis thaliana]
  misc_feature (72)..(259): NCBI GI NO: 31043851 NR Description: BP-5 protein [Oryza sativa]
  misc_feature (36)..(225): NCBI GI NO: 34899612 NR Description: putative phytochrome interacting factor 4
  misc_feature (84)..(166): NCBI GI NO: 30680903 NR Description: (bHLH015) putative bHLH transcription factor
MNEQGLGGLGGGRGAVQGHGREAMALLQHQQLQQQRRQLEEEDEVRRQMFGGVAAFPAALGHGQQVDYGEDAGGLGDSDAGGSEPEPPPERTRGGSGGGGKRSRAAEVHNLSEKRRKSKINEKMKALQSLIPNSNKTDKASMLDEAIEYLKQLQLQVQMLSMRNGVYLNPPYLSGTIEPAQASQMFAAVGGGNITASSSGAVMPPVNQSSGLQVFDPLNPPRDQPLSFVLPNVDKTIQEAPFHLESSQFHPRPFRMPESSEMMLPGEVVAKHQLTSIQGRVSMPGIGMNPIRQESSTVKADQFDGCSHNKE

SEQ ID NO: 37715 - protein, 288 aa, Zea mays subsp. mays
  peptide (1)..(288): Ceres Seq. ID no. 12376530
  misc_feature (82)..(131): Pfam Name: Pfam Description:  Helix-loop-helix DNA-binding domain
  misc_feature (58)..(288): NCBI GI NO: 15451582 NR Description: Putative SPATULA [Oryza sativa]
  misc_feature (54)..(162): NCBI GI NO: 18419937 NR Description: bHLH protein, SPATULA; protein id: At4g36930.1
  misc_feature (54)..(162): NCBI GI NO: 25407777 NR Description: hypothetical protein AT4g36930
  misc_feature (41)..(190): NCBI GI NO: 15217533 NR Description: putative phytochrome-associated protein 3
  misc_feature (41)..(190): NCBI GI NO: 4093153 NR Description: phytochrome-associated protein 3
  misc_feature (51)..(147): NCBI GI NO: 15240202 NR Description: putative protein; protein id: At5g67110
  misc_feature (51)..(147): NCBI GI NO: 21536863 NR Description: unknown [Arabidopsis thaliana]
  misc_feature (49)..(236): NCBI GI NO: 31043851 NR Description: BP-5 protein [Oryza sativa]
  misc_feature (13)..(202): NCBI GI NO: 34899612 NR Description: putative phytochrome interacting factor 4
  misc_feature (61)..(143): NCBI GI NO: 30680903 NR Description: (bHLH015) putative bHLH transcription factor
MALLQHQQLQQQRRQLEEEDEVRRQMFGGVAAFPAALGHGQQVDYGEDAGGLGDSDAGGSEPEPPPERTRGGSGGGGKRSRAAEVHNLSEKRRKSKINEKMKALQSLIPNSNKTDKASMLDEAIEYLKQLQLQVQMLSMRNGVYLNPPYLSGTIEPAQASQMFAAVGGGNITASSSGAVMPPVNQSSGLQVFDPLNPPRDQPLSFVLPNVDKTIQEAPFHLESSQFHPRPFRMPESSEMMLPGEVVAKHQLTSIQGRVSMPGIGMNPIRQESSTVKADQFDGCSHNKE

SEQ ID NO: 37716 - protein, 263 aa, Zea mays subsp. mays
  peptide (1)..(263): Ceres Seq. ID no. 12376531
  misc_feature (57)..(106): Pfam Name: Pfam Description:  Helix-loop-helix DNA-binding domain
  misc_feature (33)..(263): NCBI GI NO: 15451582 NR Description: Putative SPATULA [Oryza sativa]
  misc_feature (29)..(137): NCBI GI NO: 18419937 NR Description: bHLH protein, SPATULA; protein id: At4g36930.1
  misc_feature (29)..(137): NCBI GI NO: 25407777 NR Description: hypothetical protein AT4g36930
  misc_feature (16)..(165): NCBI GI NO: 15217533 NR Description: putative phytochrome-associated protein 3
  misc_feature (16)..(165): NCBI GI NO: 4093153 NR Description: phytochrome-associated protein 3
  misc_feature (26)..(122): NCBI GI NO: 15240202 NR Description: putative protein; protein id: At5g67110
  misc_feature (26)..(122): NCBI GI NO: 21536863 NR Description: unknown [Arabidopsis thaliana]
  misc_feature (24)..(211): NCBI GI NO: 31043851 NR Description: BP-5 protein [Oryza sativa]
  misc_feature (1)..(177): NCBI GI NO: 34899612 NR Description: putative phytochrome interacting factor 4
  misc_feature (36)..(118): NCBI GI NO: 30680903 NR Description: (bHLH015) putative bHLH transcription factor
MFGGVAAFPAALGHGQQVDYGEDAGGLGDSDAGGSEPEPPPERTRGGSGGGGKRSRAAEVHNLSEKRRKSKINEKMKALQSLIPNSNKTDKASMLDEAIEYLKQLQLQVQMLSMRNGVYLNPPYLSGTIEPAQASQMFAAVGGGNITASSSGAVMPPVNQSSGLQVFDPLNPPRDQPLSFVLPNVDKTIQEAPFHLESSQFHPRPFRMPESSEMMLPGEVVAKHQLTSIQGRVSMPGIGMNPIRQESSTVKADQFDGCSHNKE

SEQ ID NO: 37717 - DNA, 1795 bp, Zea mays subsp. mays
  misc_feature (1)..(1795): Ceres Seq. ID no. 12366666
agtttttccctgtctgtcttcacttcatgtgtctttgtttagagaccttgccttgttggggcaggggacttgggacgacagagaggggagggcggagttggtgagcgagcacgggatcagctggtgacctcagaggctgtttgcctcggggggcgggggaattctttagcaccccatcttccacatgtctttcgactggctgctgctctttcggttggtaatatccttggatctctgactctagaccgttccacgaaatctccagtcctttcttcctcttggaggaggagggctgcggcttgagcaggagacgggagacatgggtagcttcgttaagctggcgaggagggcggtggagacggacgcgccggtcatggtcaagatacaagaactgcttcgaggggccaaggatgtcatgtcgcttgcgcagggagttgtttactggcaacctcctgagtcagcaatggctaaggtcgaaaaaataattagggaaccaacgcttagtaaatatggctctgatgatggtcttcccgagcttcgagaagcacttcttgaaaagttacgcagagagaataagcttactaagtcatcagttatggtcactgctggtgcaaatcaagcttttgtgaacttggtcctcactctttgcgatgctggtgattctgttgtcatgtttgcaccatattatttcaatgcctacatgtcattccagatgacaggtgttactgacatattagttggtggttctgatcacaagacacttcatcctgatgttgattggttggagaaggttctgaaagaaaatgaccctatccctaaacttgttaccgttgtgaatccggggaacccctctggagcttttattcccaggcctatgcttgagaggatttcagatctgtgcaaaaacgctggtgcatggcttgtggttgacaatacctatgaatactttatgtatgatggaatgaagcactattgcttagaaggcactcatattgtcaacctcttctcattctcaaaggcttatggaatgatggggtggcgtgtaggatacatcgcatttccaaacgaagtcgatggcttccacgaccagctcctcaaagtgcaggacaacatacccatctgcgcctccatcatcgggcagcgcctggcgctctactcgctggaggccggccccgagtggatcaaagaaagggtgagagacctggtgaaaaaccgcgcgctgctcgtggacgcgctgtccccgctcggtgacggcaacgtcaggggcgggcagggcgccatctacctctgggcgaagctgccggacacctgctccgacgatttcgaggtcgtcaggtggctcgcgaacaggcacggcgtcgccgtgatccctggcagcgccagcggaggccccgggcacatccgcgtctccttcggagggctcaaggaggaagacaccaggctggccgctgagaggctacggcgcggcttgcaggaactggtggctgatggaacggtacagtaacggctccattggtgtaggtaaaaaacacagcattgtagttttacacaacgactccgattttccaatggcataactccgccgggattgattctagagaagaactggaccttgttatgaagaataaaaggcatccggtctgcagtcacctttgttataaaatatgagtactacatattataatcagcagtaagtatttgtttttgtttggttttcagttatctatattactgatggcacccatttgtacttttgtacagagtcaaaagcataagcaagaaagtccttgatgtc

SEQ ID NO: 37718 - protein, 394 aa, Zea mays subsp. mays
  peptide (1)..(394): Ceres Seq. ID no. 12366667
  misc_feature (79)..(384): Pfam Name: Pfam Description:  Aminotransferase class I and II
  misc_feature (1)..(394): NCBI GI NO: 34906130 NR Description: putative aspartate transaminase
  misc_feature (1)..(394): NCBI GI NO: 15220119 NR Description: putative aspartate aminotransferase
  misc_feature (7)..(388): NCBI GI NO: 23123920 NR Description: hypothetical protein [Nostoc punctiforme]
  misc_feature (10)..(391): NCBI GI NO: 17228534 NR Description: probable aspartate aminotransferase
  misc_feature (16)..(387): NCBI GI NO: 16331997 NR Description: aspartate aminotransferase
  misc_feature (17)..(391): NCBI GI NO: 33863300 NR Description: Aminotransferases class-I
  misc_feature (7)..(384): NCBI GI NO: 34810106 NR Description: Chain A
  misc_feature (7)..(384): NCBI GI NO: 15826454 NR Description: Chain A
  misc_feature (7)..(384): NCBI GI NO: 17942613 NR Description: Chain A
  misc_feature (7)..(384): NCBI GI NO: 34809903 NR Description: Chain A
MGSFVKLARRAVETDAPVMVKIQELLRGAKDVMSLAQGVVYWQPPESAMAKVEKIIREPTLSKYGSDDGLPELREALLEKLRRENKLTKSSVMVTAGANQAFVNLVLTLCDAGDSVVMFAPYYFNAYMSFQMTGVTDILVGGSDHKTLHPDVDWLEKVLKENDPIPKLVTVVNPGNPSGAFIPRPMLERISDLCKNAGAWLVVDNTYEYFMYDGMKHYCLEGTHIVNLFSFSKAYGMMGWRVGYIAFPNEVDGFHDQLLKVQDNIPICASIIGQRLALYSLEAGPEWIKERVRDLVKNRALLVDALSPLGDGNVRGGQGAIYLWAKLPDTCSDDFEVVRWLANRHGVAVIPGSASGGPGHIRVSFGGLKEEDTRLAAERLRRGLQELVADGTVQ

SEQ ID NO: 37719 - protein, 376 aa, Zea mays subsp. mays
  peptide (1)..(376): Ceres Seq. ID no. 12366668
  misc_feature (61)..(366): Pfam Name: Pfam Description:  Aminotransferase class I and II
  misc_feature (1)..(376): NCBI GI NO: 34906130 NR Description: putative aspartate transaminase
  misc_feature (1)..(376): NCBI GI NO: 15220119 NR Description: putative aspartate aminotransferase
  misc_feature (1)..(370): NCBI GI NO: 23123920 NR Description: hypothetical protein [Nostoc punctiforme]
  misc_feature (1)..(373): NCBI GI NO: 17228534 NR Description: probable aspartate aminotransferase
  misc_feature (1)..(369): NCBI GI NO: 16331997 NR Description: aspartate aminotransferase
  misc_feature (1)..(373): NCBI GI NO: 33863300 NR Description: Aminotransferases class-I
  misc_feature (1)..(366): NCBI GI NO: 34810106 NR Description: Chain A
  misc_feature (1)..(366): NCBI GI NO: 15826454 NR Description: Chain A
  misc_feature (1)..(366): NCBI GI NO: 17942613 NR Description: Chain A
  misc_feature (1)..(366): NCBI GI NO: 34809903 NR Description: Chain A
MVKIQELLRGAKDVMSLAQGVVYWQPPESAMAKVEKIIREPTLSKYGSDDGLPELREALLEKLRRENKLTKSSVMVTAGANQAFVNLVLTLCDAGDSVVMFAPYYFNAYMSFQMTGVTDILVGGSDHKTLHPDVDWLEKVLKENDPIPKLVTVVNPGNPSGAFIPRPMLERISDLCKNAGAWLVVDNTYEYFMYDGMKHYCLEGTHIVNLFSFSKAYGMMGWRVGYIAFPNEVDGFHDQLLKVQDNIPICASIIGQRLALYSLEAGPEWIKERVRDLVKNRALLVDALSPLGDGNVRGGQGAIYLWAKLPDTCSDDFEVVRWLANRHGVAVIPGSASGGPGHIRVSFGGLKEEDTRLAAERLRRGLQELVADGTVQ

SEQ ID NO: 37720 - protein, 362 aa, Zea mays subsp. mays
  peptide (1)..(362): Ceres Seq. ID no. 12366669
  misc_feature (47)..(352): Pfam Name: Pfam Description:  Aminotransferase class I and II
  misc_feature (1)..(362): NCBI GI NO: 34906130 NR Description: putative aspartate transaminase
  misc_feature (1)..(362): NCBI GI NO: 15220119 NR Description: putative aspartate aminotransferase
  misc_feature (1)..(356): NCBI GI NO: 23123920 NR Description: hypothetical protein [Nostoc punctiforme]
  misc_feature (1)..(359): NCBI GI NO: 17228534 NR Description: probable aspartate aminotransferase
  misc_feature (1)..(355): NCBI GI NO: 16331997 NR Description: aspartate aminotransferase
  misc_feature (1)..(359): NCBI GI NO: 33863300 NR Description: Aminotransferases class-I
  misc_feature (1)..(352): NCBI GI NO: 34810106 NR Description: Chain A
  misc_feature (1)..(352): NCBI GI NO: 15826454 NR Description: Chain A
  misc_feature (1)..(352): NCBI GI NO: 17942613 NR Description: Chain A
  misc_feature (1)..(352): NCBI GI NO: 34809903 NR Description: Chain A
MSLAQGVVYWQPPESAMAKVEKIIREPTLSKYGSDDGLPELREALLEKLRRENKLTKSSVMVTAGANQAFVNLVLTLCDAGDSVVMFAPYYFNAYMSFQMTGVTDILVGGSDHKTLHPDVDWLEKVLKENDPIPKLVTVVNPGNPSGAFIPRPMLERISDLCKNAGAWLVVDNTYEYFMYDGMKHYCLEGTHIVNLFSFSKAYGMMGWRVGYIAFPNEVDGFHDQLLKVQDNIPICASIIGQRLALYSLEAGPEWIKERVRDLVKNRALLVDALSPLGDGNVRGGQGAIYLWAKLPDTCSDDFEVVRWLANRHGVAVIPGSASGGPGHIRVSFGGLKEEDTRLAAERLRRGLQELVADGTVQ

SEQ ID NO: 37721 - DNA, 504 bp, Zea mays subsp. mays
  misc_feature (1)..(504): Ceres Seq. ID no. 1555481
ctaatcataaaaaatcgaagacgtttgattcccgcaccacgagtccacggcacaagcaaatgaaacaatccacgcggaacgccgccgccgccattcccatggttttccatgctcggcaattccatttcagtgtcctccctcgtctcgtgaccttgccccatccagcccaacgctccgtccatcaactgaatagcttggcggtgtaaccctgtcgtgtgcgatgagctcctcgccgttgatcaccgccgcggcgtcggctgccgtggtggcgctggctgtcgccaaccgcgtgctctacaagctcgcgcttgtgcctctcaaggcgtaccccttcttcctcgcccagctcaccaccttcgggtacgttgccgtgtacttctcgatgctctacacgaggtaccgcactgggttggtgactcagagacatgctggcgctccccaagcaccggttcgtcgctatcggttyggctggaggcacttggagtcgctgctggcatgtctgct

SEQ ID NO: 37722 - protein, 67 aa, Zea mays subsp. mays
  peptide (1)..(67): Ceres Seq. ID no. 1555482
NHKKSKTFDSRTTSPRHKQMKQSTRNAAAAIPMVFHARQFHFSVLPRLVTLPHPAQRSVHQLNSLAV

SEQ ID NO: 37723 - protein, 48 aa, Zea mays subsp. mays
  peptide (1)..(48): Ceres Seq. ID no. 1555483
MKQSTRNAAAAIPMVFHARQFHFSVLPRLVTLPHPAQRSVHQLNSLAV

SEQ ID NO: 37724 - protein, 94 aa, Zea mays subsp. mays
  peptide (1)..(94): Ceres Seq. ID no. 1555484
  misc_feature (1)..(74): NCBI GI NO: 28973717 NR Description: unknown protein [Arabidopsis thaliana]
  misc_feature (1)..(74): NCBI GI NO: 7487326 NR Description: hypothetical protein T22A6
  misc_feature (1)..(74): NCBI GI NO: 30686536 NR Description: expressed protein [Arabidopsis thaliana]
  misc_feature (3)..(76): NCBI GI NO: 20161872 NR Description: B1139B11.13
  misc_feature (6)..(76): NCBI GI NO: 18419900 NR Description: putative protein; protein id: At5g19380
  misc_feature (6)..(76): NCBI GI NO: 21553716 NR Description: unknown [Arabidopsis thaliana]
  misc_feature (12)..(76): NCBI GI NO: 20260240 NR Description: unknown protein [Arabidopsis thaliana]
  misc_feature (12)..(76): NCBI GI NO: 21536591 NR Description: unknown [Arabidopsis thaliana]
  misc_feature (12)..(47): NCBI GI NO: 15239886 NR Description: putative protein; protein id: At5g12160.1
  misc_feature (82)..(82): Xaa is any aa, unknown or other
MSSSPLITAAASAAVVALAVANRVLYKLALVPLKAYPFFLAQLTTFGYVAVYFSMLYTRYRTGLVTQRHAGAPQAPVRRYRXGWRHLESLLACL

SEQ ID NO: 37725 - DNA, 1385 bp, Zea mays subsp. mays
  misc_feature (1)..(1385): Ceres Seq. ID no. 12406409
gcacgagaccattacctagaacatcctaatcaaaagagggggcaaagagcgatggacgccgcggtgcggaaggccgcgggcgccggcatcgcgcgcgcgccggcgctggtgctagcgctggtggcggcgggggcgttcctgatctcctacaacttcttcaccatgctgttccacggcggcggcggaataggcgcggcggtgaccgctgggacgagggaccctgtggtggccatgccagcgtggatgcgcgcggcggcggacaccgaggcgcgacggcggccgttccatgtggcgctcacggccacggacgcgccctacagccggtggcagtgccgggtcatgtacttctggtacaagcggatgcaggcgcggccgggcggagaggccatgggcgggttcacgcgcgtgctgcactcggggaagcccgacgggctcatggacgagatccccaccttcgtcgtcgacccgctgcccgctggcaaggaccacggatatgtggtcctaaataggccgtgggcatttgtgcagtggcttcagaaagcaaagattgaagaagagtatatactaatggcagaaccagaccatatatttgtgaaacctctaccaaatttggcccatgacgatgacccagcagcatttcccttcttttacattacaccatcagaacatgaaaaaattatcaggaaatactatgctaaagaaagaggtcctgtcacagatatcgatccgattgggaattctcctgtgatcattaagaagacaattcttgagaagattgcccccacatggatgaatgtgtcaattcaaatgaaagaggatgaagagacagataaagtttttggatgggtgttggaaatgtatgcatacgctgttgctagcgcattgcatggagttcatcatatccttcgtaaagatttcatgatccagccaccttttgatacaaagctccagaatacatttataatccacttcacttatggatgtgactactcactaaagggtgaactgacctatggtaaagttggtgaatggcgatttgacaaaagatcattcccagataggccaccaccaagaaatcttacattgccccctcctggagtaccagaaagtgtggttactctagtgaaaatggtcaatgaagctagtgcaaaccttcctcggtgggatgatggaatataaactttggatgatgtcaattatatcttaggttcctttgatctgcccttgtatatggggaatatcaaagtatcaggtgcagtcggttgtttggtttacatccaaaatagctgcttacacttgcacaccatacctgatagaagaagatacataattttctcattgtactttttaggaaaagaaaagaaatgaaagtaaagttagcatcg

SEQ ID NO: 37726 - protein, 392 aa, Zea mays subsp. mays
  peptide (1)..(392): Ceres Seq. ID no. 12406410
  misc_feature (30)..(389): NCBI GI NO: 15240642 NR Description: putative protein; protein id: At5g13500
  misc_feature (40)..(388): NCBI GI NO: 22327055 NR Description: Expressed protein; protein id: At5g25265
  misc_feature (74)..(389): NCBI GI NO: 24413996 NR Description: hypothetical protein~similar to Arabidopsisthaliana chromosome 5
  misc_feature (222)..(389): NCBI GI NO: 30682704 NR Description: expressed protein [Arabidopsis thaliana]
  misc_feature (92)..(165): NCBI GI NO: 30682704 NR Description: expressed protein [Arabidopsis thaliana]
  misc_feature (222)..(386): NCBI GI NO: 25371351 NR Description: hypothetical protein At2g25260
  misc_feature (92)..(165): NCBI GI NO: 25371351 NR Description: hypothetical protein At2g25260
  misc_feature (18)..(189): NCBI GI NO: 34903224 NR Description: unnamed protein product
  misc_feature (96)..(357): NCBI GI NO: 22330795 NR Description: unknown protein; protein id: At3g01720
ARDHYLEHPNQKRGQRAMDAAVRKAAGAGIARAPALVLALVAAGAFLISYNFFTMLFHGGGGIGAAVTAGTRDPVVAMPAWMRAAADTEARRRPFHVALTATDAPYSRWQCRVMYFWYKRMQARPGGEAMGGFTRVLHSGKPDGLMDEIPTFVVDPLPAGKDHGYVVLNRPWAFVQWLQKAKIEEEYILMAEPDHIFVKPLPNLAHDDDPAAFPFFYITPSEHEKIIRKYYAKERGPVTDIDPIGNSPVIIKKTILEKIAPTWMNVSIQMKEDEETDKVFGWVLEMYAYAVASALHGVHHILRKDFMIQPPFDTKLQNTFIIHFTYGCDYSLKGELTYGKVGEWRFDKRSFPDRPPPRNLTLPPPGVPESVVTLVKMVNEASANLPRWDDGI

SEQ ID NO: 37727 - protein, 375 aa, Zea mays subsp. mays
  peptide (1)..(375): Ceres Seq. ID no. 12406411
  misc_feature (13)..(372): NCBI GI NO: 15240642 NR Description: putative protein; protein id: At5g13500
  misc_feature (23)..(371): NCBI GI NO: 22327055 NR Description: Expressed protein; protein id: At5g25265
  misc_feature (57)..(372): NCBI GI NO: 24413996 NR Description: hypothetical protein~similar to Arabidopsisthaliana chromosome 5
  misc_feature (205)..(372): NCBI GI NO: 30682704 NR Description: expressed protein [Arabidopsis thaliana]
  misc_feature (75)..(148): NCBI GI NO: 30682704 NR Description: expressed protein [Arabidopsis thaliana]
  misc_feature (205)..(369): NCBI GI NO: 25371351 NR Description: hypothetical protein At2g25260
  misc_feature (75)..(148): NCBI GI NO: 25371351 NR Description: hypothetical protein At2g25260
  misc_feature (1)..(172): NCBI GI NO: 34903224 NR Description: unnamed protein product
  misc_feature (79)..(340): NCBI GI NO: 22330795 NR Description: unknown protein; protein id: At3g01720
MDAAVRKAAGAGIARAPALVLALVAAGAFLISYNFFTMLFHGGGGIGAAVTAGTRDPVVAMPAWMRAAADTEARRRPFHVALTATDAPYSRWQCRVMYFWYKRMQARPGGEAMGGFTRVLHSGKPDGLMDEIPTFVVDPLPAGKDHGYVVLNRPWAFVQWLQKAKIEEEYILMAEPDHIFVKPLPNLAHDDDPAAFPFFYITPSEHEKIIRKYYAKERGPVTDIDPIGNSPVIIKKTILEKIAPTWMNVSIQMKEDEETDKVFGWVLEMYAYAVASALHGVHHILRKDFMIQPPFDTKLQNTFIIHFTYGCDYSLKGELTYGKVGEWRFDKRSFPDRPPPRNLTLPPPGVPESVVTLVKMVNEASANLPRWDDGI

SEQ ID NO: 37728 - protein, 338 aa, Zea mays subsp. mays
  peptide (1)..(338): Ceres Seq. ID no. 12406412
  misc_feature (1)..(335): NCBI GI NO: 15240642 NR Description: putative protein; protein id: At5g13500
  misc_feature (1)..(334): NCBI GI NO: 22327055 NR Description: Expressed protein; protein id: At5g25265
  misc_feature (20)..(335): NCBI GI NO: 24413996 NR Description: hypothetical protein~similar to Arabidopsisthaliana chromosome 5
  misc_feature (168)..(335): NCBI GI NO: 30682704 NR Description: expressed protein [Arabidopsis thaliana]
  misc_feature (38)..(111): NCBI GI NO: 30682704 NR Description: expressed protein [Arabidopsis thaliana]
  misc_feature (168)..(332): NCBI GI NO: 25371351 NR Description: hypothetical protein At2g25260
  misc_feature (38)..(111): NCBI GI NO: 25371351 NR Description: hypothetical protein At2g25260
  misc_feature (1)..(135): NCBI GI NO: 34903224 NR Description: unnamed protein product
  misc_feature (42)..(303): NCBI GI NO: 22330795 NR Description: unknown protein; protein id: At3g01720
MLFHGGGGIGAAVTAGTRDPVVAMPAWMRAAADTEARRRPFHVALTATDAPYSRWQCRVMYFWYKRMQARPGGEAMGGFTRVLHSGKPDGLMDEIPTFVVDPLPAGKDHGYVVLNRPWAFVQWLQKAKIEEEYILMAEPDHIFVKPLPNLAHDDDPAAFPFFYITPSEHEKIIRKYYAKERGPVTDIDPIGNSPVIIKKTILEKIAPTWMNVSIQMKEDEETDKVFGWVLEMYAYAVASALHGVHHILRKDFMIQPPFDTKLQNTFIIHFTYGCDYSLKGELTYGKVGEWRFDKRSFPDRPPPRNLTLPPPGVPESVVTLVKMVNEASANLPRWDDGI

SEQ ID NO: 37729 - DNA, 1430 bp, Zea mays subsp. mays
  misc_feature (1)..(1430): Ceres Seq. ID no. 12434895
  misc_feature (535)..(535): n is a, c, t, g, unknown, or other
aggagacttggcttgtactgcatcgcaaaccgcaatcgcacgcggcacttgcccccgcgatcataacctcacaccgcccgccaccagctgcgcagcgctcgacagcctcaccagccgccatcactcgcggcagtacacggccgctgggactgggagagtgggagtgagacgctgctgttgccgagtgcgaggagacactactactcactctcaagactcgagagcagcaggggcgaccgagctctgcgtgcgtggggagaaccggagaaggcagcagaggagggagggagcgcgtggacgggctaggcgcagcagcatgggcgccgggatcagggtcctggcggcgctcttggcggcgctcgcggcagccaccgccggcgtgacggcgcagctgcggcaggactactacgcggcggtgtgcccggacctggagagcatcgtgcgcgccgcggtgtccaagaaggtgcaggcgcagcccgtcgccgtgggcgccaccatccgcctcttcttccacgactgcttcgtcgagggctgngacgcgtcggtgatcctggtgtccacggggaacaacacggcggagaaggaccacccgagcaacctctccctggccggcgacggcttcgacaccgtcatccaggccaaggcggccgtggacgccgtgccggcgtgcgccaaccaggtgtcgtgcgccgacatcctggcgctggccacccgggacgtcattgagctggctggcgggccgtcgtacgcggtggagctggggaggctggacgggctggtgtccatgtccaccaacgtcgacggcaagctgccgccgccgtccttcaacctggaccagctcacgagcattttcgccctcaacaacctgtcgcaggccgacatgattgctttatctgcggcgcacacggtggggttcgcgcactgcagcacgttctcggaccggatccagccgcagtcggtggacccgacgatgaacgcgacgtacgcggaggacctgcaggcggcgtgcccggcgggggtggaccccaacatcgcgctgcagctggaccccgtgacgccgcaggccttcgacaaccagtacttcgccaacctggtggaacggccgggggctgttcgcctccgaccaggtgctcttctccgacgcgcggtcgcagcccaccgtggtggcgtgggcgcagaacgccaccgccttcgagcaggccttcgtcgacgccatcaccaggctcggccgcgtcggcgtcaagaccgacccgtcgctgggggacgtccgccgcgactgcgccttcctcaactgaaaaggatggacatggagagctggtttatatctcacacaagtgttcatacacaatctagagtaaagtttttttgttgttgttattattatcatgtcaggtatgagcacaaggttgaattaatggttaatgcgattg

SEQ ID NO: 37730 - protein, 476 aa, Zea mays subsp. mays
  peptide (1)..(476): Ceres Seq. ID no. 12434896
  misc_feature (147)..(369): Pfam Name: Pfam Description:  Peroxidase
  misc_feature (106)..(369): NCBI GI NO: 17027274 NR Description: putative peroxidase
  misc_feature (111)..(364): NCBI GI NO: 34915320 NR Description: putative peroxidase
  misc_feature (127)..(369): NCBI GI NO: 14485511 NR Description: putative peroxidase [Solanum tuberosum]
  misc_feature (129)..(369): NCBI GI NO: 28629828 NR Description: peroxidase 1 [Artemisia annua]
  misc_feature (129)..(369): NCBI GI NO: 2117624 NR Description: peroxidase (EC 1.11.1.7) 2 precursor - alfalfa
  misc_feature (129)..(369): NCBI GI NO: 13992528 NR Description: peroxidase2 [Medicago sativa]
  misc_feature (110)..(369): NCBI GI NO: 15229646 NR Description: peroxidase, putative; protein id: At3g49960.1
  misc_feature (115)..(369): NCBI GI NO: 4138647 NR Description: peroxidase [Trifolium repens]
  misc_feature (113)..(369): NCBI GI NO: 15235600 NR Description: peroxidase, putative; protein id: At4g37530
  misc_feature (113)..(369): NCBI GI NO: 17979440 NR Description: putative peroxidase [Arabidopsis thaliana]
  misc_feature (178)..(178): Xaa is any aa, unknown or other
GDLACTASQTAIARGTCPRDHNLTPPATSCAALDSLTSRHHSRQYTAAGTGRVGVRRCCCRVRGDTTTHSQDSRAAGATELCVRGENRRRQQRREGARGRARRSSMGAGIRVLAALLAALAAATAGVTAQLRQDYYAAVCPDLESIVRAAVSKKVQAQPVAVGATIRLFFHDCFVEGXDASVILVSTGNNTAEKDHPSNLSLAGDGFDTVIQAKAAVDAVPACANQVSCADILALATRDVIELAGGPSYAVELGRLDGLVSMSTNVDGKLPPPSFNLDQLTSIFALNNLSQADMIALSAAHTVGFAHCSTFSDRIQPQSVDPTMNATYAEDLQAACPAGVDPNIALQLDPVTPQAFDNQYFANLVERPGAVRLRPGALLRRAVAAHRGGVGAERHRLRAGLRRRHHQARPRRRQDRPVAGGRPPRLRLPQLKRMDMESWFISHTSVHTQSRVKFFCCCYYYHVRYEHKVELMVNAI

SEQ ID NO: 37731 - protein, 371 aa, Zea mays subsp. mays
  peptide (1)..(371): Ceres Seq. ID no. 12434897
  misc_feature (42)..(264): Pfam Name: Pfam Description:  Peroxidase
  misc_feature (1)..(264): NCBI GI NO: 17027274 NR Description: putative peroxidase
  misc_feature (6)..(259): NCBI GI NO: 34915320 NR Description: putative peroxidase
  misc_feature (22)..(264): NCBI GI NO: 14485511 NR Description: putative peroxidase [Solanum tuberosum]
  misc_feature (24)..(264): NCBI GI NO: 28629828 NR Description: peroxidase 1 [Artemisia annua]
  misc_feature (24)..(264): NCBI GI NO: 2117624 NR Description: peroxidase (EC 1.11.1.7) 2 precursor - alfalfa
  misc_feature (24)..(264): NCBI GI NO: 13992528 NR Description: peroxidase2 [Medicago sativa]
  misc_feature (5)..(264): NCBI GI NO: 15229646 NR Description: peroxidase, putative; protein id: At3g49960.1
  misc_feature (10)..(264): NCBI GI NO: 4138647 NR Description: peroxidase [Trifolium repens]
  misc_feature (8)..(264): NCBI GI NO: 15235600 NR Description: peroxidase, putative; protein id: At4g37530
  misc_feature (8)..(264): NCBI GI NO: 17979440 NR Description: putative peroxidase [Arabidopsis thaliana]
  misc_feature (73)..(73): Xaa is any aa, unknown or other
MGAGIRVLAALLAALAAATAGVTAQLRQDYYAAVCPDLESIVRAAVSKKVQAQPVAVGATIRLFFHDCFVEGXDASVILVSTGNNTAEKDHPSNLSLAGDGFDTVIQAKAAVDAVPACANQVSCADILALATRDVIELAGGPSYAVELGRLDGLVSMSTNVDGKLPPPSFNLDQLTSIFALNNLSQADMIALSAAHTVGFAHCSTFSDRIQPQSVDPTMNATYAEDLQAACPAGVDPNIALQLDPVTPQAFDNQYFANLVERPGAVRLRPGALLRRAVAAHRGGVGAERHRLRAGLRRRHHQARPRRRQDRPVAGGRPPRLRLPQLKRMDMESWFISHTSVHTQSRVKFFCCCYYYHVRYEHKVELMVNAI

SEQ ID NO: 37732 - DNA, 678 bp, Zea mays subsp. mays
  misc_feature (1)..(678): Ceres Seq. ID no. 12341959
  misc_feature (470)..(470): n is a, c, t, g, unknown, or other
  misc_feature (586)..(586): n is a, c, t, g, unknown, or other
  misc_feature (458)..(458): n is a, c, t, g, unknown, or other
atcggcaagcgaagcactccactccactccactccacctgttagaaacaagctagctcaagttctctcaacttcttgccaggaaagcgcgcaggaggtcgacgggaacgaccatggtcagcgccaagagacttgtgcaaatggccaagaagtggcagaggatggccgccacggcaaggaggcggatcgcactggcgccgccggcaaaaggagccgccgagggatcgtcgccgccgtgcagcacctcgcgtgtagctgtagccggcaagggccactgcgtggtgtactcggcggacggcaggcggttcgaggtcccgctgccgtacctcgacaccgccgtcttcggcgtgctcctcggcatgtcgcgggaggagttcgggttcgccggtggcgacggcaggatcacggtgccctgtgacgccgccgtcatggagtacgtcatgtgtttgcttcggaganacgcgtcggaanaggtggtgagggcgttcctgagctccgtggtgagccggccttgcagccactgtggaaatggctcgctggtgcagtccaccacgggagttcgccagcaagctgctgtttctagcttntgagctgaggattaattagcacttagctagattgttttattattattattattattattattattattattattattattattattattatt

SEQ ID NO: 37733 - protein, 158 aa, Zea mays subsp. mays
  peptide (1)..(158): Ceres Seq. ID no. 12341960
  misc_feature (1)..(110): Pfam Name: Pfam Description:  Auxin responsive protein
  misc_feature (1)..(155): NCBI GI NO: 32187718 NR Description: auxin induced protein [Zea mays]
  misc_feature (1)..(135): NCBI GI NO: 20149052 NR Description: auxin-induced SAUR-like protein [Capsicum annuum]
  misc_feature (1)..(135): NCBI GI NO: 21553494 NR Description: auxin-induced protein, putative
  misc_feature (1)..(135): NCBI GI NO: 18397103 NR Description: auxin-induced protein, putative
  misc_feature (1)..(135): NCBI GI NO: 21592571 NR Description: auxin-induced protein, putative
  misc_feature (1)..(135): NCBI GI NO: 18397101 NR Description: auxin-induced protein, putative
  misc_feature (1)..(137): NCBI GI NO: 26452075 NR Description: putative auxin-induced protein
  misc_feature (1)..(137): NCBI GI NO: 15218924 NR Description: auxin-induced protein, putative
  misc_feature (1)..(151): NCBI GI NO: 18397123 NR Description: auxin-induced protein, putative
  misc_feature (1)..(151): NCBI GI NO: 26452170 NR Description: putative auxin-induced protein
  misc_feature (116)..(116): Xaa is any aa, unknown or other
  misc_feature (120)..(120): Xaa is any aa, unknown or other
  misc_feature (158)..(158): Xaa is any aa, unknown or other
MVSAKRLVQMAKKWQRMAATARRRIALAPPAKGAAEGSSPPCSTSRVAVAGKGHCVVYSADGRRFEVPLPYLDTAVFGVLLGMSREEFGFAGGDGRITVPCDAAVMEYVMCLLRRXASEXVVRAFLSSVVSRPCSHCGNGSLVQSTTGVRQQAAVSSX

SEQ ID NO: 37734 - protein, 149 aa, Zea mays subsp. mays
  peptide (1)..(149): Ceres Seq. ID no. 12341961
  misc_feature (1)..(101): Pfam Name: Pfam Description:  Auxin responsive protein
  misc_feature (1)..(146): NCBI GI NO: 32187718 NR Description: auxin induced protein [Zea mays]
  misc_feature (1)..(126): NCBI GI NO: 20149052 NR Description: auxin-induced SAUR-like protein [Capsicum annuum]
  misc_feature (1)..(126): NCBI GI NO: 21553494 NR Description: auxin-induced protein, putative
  misc_feature (1)..(126): NCBI GI NO: 18397103 NR Description: auxin-induced protein, putative
  misc_feature (1)..(126): NCBI GI NO: 21592571 NR Description: auxin-induced protein, putative
  misc_feature (1)..(126): NCBI GI NO: 18397101 NR Description: auxin-induced protein, putative
  misc_feature (1)..(128): NCBI GI NO: 26452075 NR Description: putative auxin-induced protein
  misc_feature (1)..(128): NCBI GI NO: 15218924 NR Description: auxin-induced protein, putative
  misc_feature (1)..(142): NCBI GI NO: 18397123 NR Description: auxin-induced protein, putative
  misc_feature (1)..(142): NCBI GI NO: 26452170 NR Description: putative auxin-induced protein
  misc_feature (107)..(107): Xaa is any aa, unknown or other
  misc_feature (111)..(111): Xaa is any aa, unknown or other
  misc_feature (149)..(149): Xaa is any aa, unknown or other
MAKKWQRMAATARRRIALAPPAKGAAEGSSPPCSTSRVAVAGKGHCVVYSADGRRFEVPLPYLDTAVFGVLLGMSREEFGFAGGDGRITVPCDAAVMEYVMCLLRRXASEXVVRAFLSSVVSRPCSHCGNGSLVQSTTGVRQQAAVSSX

SEQ ID NO: 37735 - protein, 142 aa, Zea mays subsp. mays
  peptide (1)..(142): Ceres Seq. ID no. 12341962
  misc_feature (1)..(94): Pfam Name: Pfam Description:  Auxin responsive protein
  misc_feature (1)..(139): NCBI GI NO: 32187718 NR Description: auxin induced protein [Zea mays]
  misc_feature (1)..(119): NCBI GI NO: 20149052 NR Description: auxin-induced SAUR-like protein [Capsicum annuum]
  misc_feature (1)..(119): NCBI GI NO: 21553494 NR Description: auxin-induced protein, putative
  misc_feature (1)..(119): NCBI GI NO: 18397103 NR Description: auxin-induced protein, putative
  misc_feature (1)..(119): NCBI GI NO: 21592571 NR Description: auxin-induced protein, putative
  misc_feature (1)..(119): NCBI GI NO: 18397101 NR Description: auxin-induced protein, putative
  misc_feature (1)..(121): NCBI GI NO: 26452075 NR Description: putative auxin-induced protein
  misc_feature (1)..(121): NCBI GI NO: 15218924 NR Description: auxin-induced protein, putative
  misc_feature (1)..(135): NCBI GI NO: 18397123 NR Description: auxin-induced protein, putative
  misc_feature (1)..(135): NCBI GI NO: 26452170 NR Description: putative auxin-induced protein
  misc_feature (100)..(100): Xaa is any aa, unknown or other
  misc_feature (104)..(104): Xaa is any aa, unknown or other
  misc_feature (142)..(142): Xaa is any aa, unknown or other
MAATARRRIALAPPAKGAAEGSSPPCSTSRVAVAGKGHCVVYSADGRRFEVPLPYLDTAVFGVLLGMSREEFGFAGGDGRITVPCDAAVMEYVMCLLRRXASEXVVRAFLSSVVSRPCSHCGNGSLVQSTTGVRQQAAVSSX

SEQ ID NO: 37736 - DNA, 1484 bp, Zea mays subsp. mays
  misc_feature (1)..(1484): Ceres Seq. ID no. 12362339
aaaaatcgtccgactgtagcctagtcgacggatttgatcccgcaggccgcagcgcagcggccgtgtccgctgccgccaccagccaccggccacagccaggcagccagctcgcgtcgaagaagacgacgtggcccgccaagctcccctgccaaaagaaacaggagggcccgcgtcgtcgcctagtcggcgcgtggtgggagtggtatggagaggggcgccgccacggccgccgcggcgctcggctgcgccctccgctccccttccccctccgcgtccccggctccccggtggccgccgctccaccgctgcccacggcgcggcccgcccgggcctccccgctccctcctgccgcccgcgcggcgtttcaggcccctagacatgaagaagggacatagtaggaactcaccgaagaccttcagctcatctggacactcgggggttagactaaacaacgaaggtctcgtcaacgacaggctcctaatagattgtggagaggatcaagattgtgtgctcggtggcatagttgccctgggaaaagtttgatgctctccacattggtcatcgggaattggcaatgcatgcttctaaagcagggactccttttcttctttcttttgtgggaatggccgaagtacttggctggacatataggccacctatagttgctcattgtgatcgcaagcgggtcctttcatcttgggctccatactgtaggaatgtggtaccacttgaatatcaagttgaattttcaaaggtcaggtccctgtctccacgacaatttgttgaaaggttatcaaaggatcttagaataaaaggtgtcgtggcaggtgaaaattacaggtttggttacaaagcatctggtgacgcaactgagttagtgaaactatgtgaggaatttggtttaagtgcattcattgtacgctctgtcatggacacagcaaaaagatctcttaatggattttcaggcgctataaattcgagtgataaaggacaggtttcttccagccgtgtccgccatgcattggctatgggtgacatggaatacgtctctgaattactagggaggaaacaccgtcttttgctaatggttaaccaacactgccttcatgaaaagaaaagcattgtactccctaattcttgcatgctgaacatgccaccagctgaaggtctctatgaaaactgcgaccttgttaatggagggtatcttggaccatgtagagtgatcatcaactctgatactatcatcattgagatgaaagatgataacagtttatccctaaatcctattcaagaagttcagttagggattgagtttggatgaagttatatactttttgcatctgccatcttgtggagattattgctgaaagaagacattggggggaatactgcaaggggaagtcgaagactttgttcaagcgtgcagtacgcctcatcgtgattgagttcaggagcattttgtagtctcacaagaatgctttatt

SEQ ID NO: 37737 - protein, 248 aa, Zea mays subsp. mays
  peptide (1)..(248): Ceres Seq. ID no. 12362340
  misc_feature (1)..(248): NCBI GI NO: 29150370 NR Description: unknow protein
  misc_feature (1)..(248): NCBI GI NO: 18420664 NR Description: expressed protein; protein id: At5g23330
  misc_feature (1)..(248): NCBI GI NO: 21553715 NR Description: unknown [Arabidopsis thaliana]
  misc_feature (1)..(248): NCBI GI NO: 22326656 NR Description: putative protein; protein id: At5g08340
  misc_feature (1)..(230): NCBI GI NO: 10178276 NR Description: putative protein [Arabidopsis thaliana]
  misc_feature (50)..(164): NCBI GI NO: 18310664 NR Description: riboflavin biosynthesis protein
  misc_feature (1)..(200): NCBI GI NO: 21224059 NR Description: probable riboflavin kinase (FAD synthetase)
MHASKAGTPFLLSFVGMAEVLGWTYRPPIVAHCDRKRVLSSWAPYCRNVVPLEYQVEFSKVRSLSPRQFVERLSKDLRIKGVVAGENYRFGYKASGDATELVKLCEEFGLSAFIVRSVMDTAKRSLNGFSGAINSSDKGQVSSSRVRHALAMGDMEYVSELLGRKHRLLLMVNQHCLHEKKSIVLPNSCMLNMPPAEGLYENCDLVNGGYLGPCRVIINSDTIIIEMKDDNSLSLNPIQEVQLGIEFG

SEQ ID NO: 37738 - protein, 232 aa, Zea mays subsp. mays
  peptide (1)..(232): Ceres Seq. ID no. 12362341
  misc_feature (1)..(232): NCBI GI NO: 29150370 NR Description: unknow protein
  misc_feature (1)..(232): NCBI GI NO: 18420664 NR Description: expressed protein; protein id: At5g23330
  misc_feature (1)..(232): NCBI GI NO: 21553715 NR Description: unknown [Arabidopsis thaliana]
  misc_feature (1)..(232): NCBI GI NO: 22326656 NR Description: putative protein; protein id: At5g08340
  misc_feature (1)..(214): NCBI GI NO: 10178276 NR Description: putative protein [Arabidopsis thaliana]
  misc_feature (34)..(148): NCBI GI NO: 18310664 NR Description: riboflavin biosynthesis protein
  misc_feature (1)..(184): NCBI GI NO: 21224059 NR Description: probable riboflavin kinase (FAD synthetase)
MAEVLGWTYRPPIVAHCDRKRVLSSWAPYCRNVVPLEYQVEFSKVRSLSPRQFVERLSKDLRIKGVVAGENYRFGYKASGDATELVKLCEEFGLSAFIVRSVMDTAKRSLNGFSGAINSSDKGQVSSSRVRHALAMGDMEYVSELLGRKHRLLLMVNQHCLHEKKSIVLPNSCMLNMPPAEGLYENCDLVNGGYLGPCRVIINSDTIIIEMKDDNSLSLNPIQEVQLGIEFG

SEQ ID NO: 37739 - protein, 130 aa, Zea mays subsp. mays
  peptide (1)..(130): Ceres Seq. ID no. 12362342
KSSDCSLVDGFDPAGRSAAAVSAAATSHRPQPGSQLASKKTTWPAKLPCQKKQEGPRRRLVGAWWEWYGEGRRHGRRGARLRPPLPFPLRVPGSPVAAAPPLPTARPARASPLPPAARAAFQAPRHEEGT

SEQ ID NO: 37740 - DNA, 1253 bp, Zea mays subsp. mays
  misc_feature (1)..(1253): Ceres Seq. ID no. 12358734
  misc_feature (1121)..(1121): n is a, c, t, g, unknown, or other
ctcacaccatcggaacacatagcagctggcaggaacgactgccaagcaagtccatcggtcgaggtcctagctagcgcaacgacgatggccaccgcgctctcctgcaaggccctcgcagtggccgcgctcctgtccgtggtgtccgtcgtcacctacggcgctcgcgcccagcagcagcccagccacaacgcctccgactccgagtcgtcgcaggacaggtccttgctgtcctacagcagtggctggctgcccgccaaggccacctggtacggcgcgcccaccggcgccggccccgacgacaacggtggtgcgtgcgggttcaagggcaccaaccagtacccgttctcgtccatgacgtcctgtggcaacgagcccatcttcaaggacggcaagggctgcggctcatgctatcagatacgggtgcctccggagcaaccacccggcctgctccggcgtgccgcagacggtgatcataaccgacatgaactactacccggtggccaagtaccacttcgacctgagcggcacggcgttcggcgccatggcgagttccggcctgaacgacaggctccggcacgccgggatcatcgacatgcagttccggagggtgccgtgcgacttcccgggcctgaccgtcaccttccgcgtgcagcacggctccaaccccatgtacctggccgtgctcatcgagcacgccaacatggacggcgacgtggtgcaggccgacatcatgcagaacaactccgggtactgggagcccttgcacgagtcctggggcgccgtctggcggatcgaccccagccgcccgctctgcggccccttctcggtgcgcatcaccaacgagtccggcaagcagctggtggcccagaacgtcatcccggccaactacatcgccgacgtcgactaccgctccttcgtccagtatacgaattaacccgaccggccgggcggggcgcccactgcatgagctagctcgatcggtcacctctgcgaccgtcgtacgtccgagatagctcgttgcttaagtgttcgtgtttagtggctgccgtcggcaaccgccggactgaggatttttaaacctcaattccggcgtggggtgtgtgttggtgtgtgtcttgaanatgtgtgggaaattagaggaggcgagcatcaatgcgctctcccgcccacggtcactctatcattaccggtgtgcggtgtgtaaccagcagaccatggatattggttaatactacatcagtgtgatgttgttt

SEQ ID NO: 37741 - protein, 323 aa, Zea mays subsp. mays
  peptide (1)..(323): Ceres Seq. ID no. 12358735
  misc_feature (29)..(140): NCBI GI NO: 14193771 NR Description: beta-expansin 6 [Zea mays]
  misc_feature (29)..(140): NCBI GI NO: 37536760 NR Description: beta-expansin EXPB3
  misc_feature (29)..(140): NCBI GI NO: 37536756 NR Description: beta-expansin EXPB6
  misc_feature (29)..(140): NCBI GI NO: 14330328 NR Description: beta expansin B2 [Festuca pratensis]
  misc_feature (31)..(140): NCBI GI NO: 14330330 NR Description: beta expansin B3 [Festuca pratensis]
  misc_feature (29)..(140): NCBI GI NO: 14193773 NR Description: beta-expansin 7 [Zea mays]
  misc_feature (77)..(159): NCBI GI NO: 4099919 NR Description: pollen allergen homolog [Triticum aestivum]
  misc_feature (78)..(140): NCBI GI NO: 37536758 NR Description: beta-expansin EXPB2
  misc_feature (78)..(140): NCBI GI NO: 7489455 NR Description: beta-expansin - rice
  misc_feature (39)..(140): NCBI GI NO: 14193775 NR Description: beta-expansin 8 [Zea mays]
LTPSEHIAAGRNDCQASPSVEVLASATTMATALSCKALAVAALLSVVSVVTYGARAQQQPSHNASDSESSQDRSLLSYSSGWLPAKATWYGAPTGAGPDDNGGACGFKGTNQYPFSSMTSCGNEPIFKDGKGCGSCYQIRVPPEQPPGLLRRAADGDHNRHELLPGGQVPLRPERHGVRRHGEFRPERQAPARRDHRHAVPEGAVRLPGPDRHLPRAARLQPHVPGRAHRARQHGRRRGAGRHHAEQLRVLGALARVLGRRLADRPQPPALRPLLGAHHQRVRQAAGGPERHPGQLHRRRRLPLLRPVYELTRPAGRGAHCMS

SEQ ID NO: 37742 - protein, 295 aa, Zea mays subsp. mays
  peptide (1)..(295): Ceres Seq. ID no. 12358736
  misc_feature (1)..(112): NCBI GI NO: 14193771 NR Description: beta-expansin 6 [Zea mays]
  misc_feature (1)..(112): NCBI GI NO: 37536760 NR Description: beta-expansin EXPB3
  misc_feature (1)..(112): NCBI GI NO: 37536756 NR Description: beta-expansin EXPB6
  misc_feature (1)..(112): NCBI GI NO: 14330328 NR Description: beta expansin B2 [Festuca pratensis]
  misc_feature (3)..(112): NCBI GI NO: 14330330 NR Description: beta expansin B3 [Festuca pratensis]
  misc_feature (1)..(112): NCBI GI NO: 14193773 NR Description: beta-expansin 7 [Zea mays]
  misc_feature (49)..(131): NCBI GI NO: 4099919 NR Description: pollen allergen homolog [Triticum aestivum]
  misc_feature (50)..(112): NCBI GI NO: 37536758 NR Description: beta-expansin EXPB2
  misc_feature (50)..(112): NCBI GI NO: 7489455 NR Description: beta-expansin - rice
  misc_feature (11)..(112): NCBI GI NO: 14193775 NR Description: beta-expansin 8 [Zea mays]
MATALSCKALAVAALLSVVSVVTYGARAQQQPSHNASDSESSQDRSLLSYSSGWLPAKATWYGAPTGAGPDDNGGACGFKGTNQYPFSSMTSCGNEPIFKDGKGCGSCYQIRVPPEQPPGLLRRAADGDHNRHELLPGGQVPLRPERHGVRRHGEFRPERQAPARRDHRHAVPEGAVRLPGPDRHLPRAARLQPHVPGRAHRARQHGRRRGAGRHHAEQLRVLGALARVLGRRLADRPQPPALRPLLGAHHQRVRQAAGGPERHPGQLHRRRRLPLLRPVYELTRPAGRGAHCMS

SEQ ID NO: 37743 - protein, 206 aa, Zea mays subsp. mays
  peptide (1)..(206): Ceres Seq. ID no. 12358737
  misc_feature (1)..(23): NCBI GI NO: 14193771 NR Description: beta-expansin 6 [Zea mays]
  misc_feature (1)..(23): NCBI GI NO: 37536760 NR Description: beta-expansin EXPB3
  misc_feature (1)..(23): NCBI GI NO: 37536756 NR Description: beta-expansin EXPB6
  misc_feature (1)..(23): NCBI GI NO: 14330328 NR Description: beta expansin B2 [Festuca pratensis]
  misc_feature (1)..(23): NCBI GI NO: 14330330 NR Description: beta expansin B3 [Festuca pratensis]
  misc_feature (1)..(23): NCBI GI NO: 14193773 NR Description: beta-expansin 7 [Zea mays]
  misc_feature (1)..(42): NCBI GI NO: 4099919 NR Description: pollen allergen homolog [Triticum aestivum]
  misc_feature (1)..(23): NCBI GI NO: 37536758 NR Description: beta-expansin EXPB2
  misc_feature (1)..(23): NCBI GI NO: 7489455 NR Description: beta-expansin - rice
  misc_feature (1)..(23): NCBI GI NO: 14193775 NR Description: beta-expansin 8 [Zea mays]
MTSCGNEPIFKDGKGCGSCYQIRVPPEQPPGLLRRAADGDHNRHELLPGGQVPLRPERHGVRRHGEFRPERQAPARRDHRHAVPEGAVRLPGPDRHLPRAARLQPHVPGRAHRARQHGRRRGAGRHHAEQLRVLGALARVLGRRLADRPQPPALRPLLGAHHQRVRQAAGGPERHPGQLHRRRRLPLLRPVYELTRPAGRGAHCMS

SEQ ID NO: 37744 - DNA, 1180 bp, Zea mays subsp. mays
  misc_feature (1)..(1180): Ceres Seq. ID no. 12366064
cccctctgccttttccttttccttccccgctttctccttccttcctccccactccccgctcccctcgcccagccactggccatgtcggtggagacggagcggagctccaccgagtcctccggggcttccgggctcgacttcgaggacaccgcgctcacgctcaccctccgcctcccgggctccgcgccttccgccgccgccgccgccgcggcctccctgtccctctcctcctcgtcgtcctccgccttccccgaccccgaccgcaagcgcgcgtcctccgacgccgaccccggccgctcctccccgctcgccgcgtcctccgacgctgcaccggcacccaaggctcgtgtggtgggctggccgccggtgaggtcgtaccgcaagaacgcgctcgccgacgccgcgggctccagcaaggccgccaagttcgtcaaggtggccgtcgacggcgcgccctacctgcggaaggtggacctgcaggcgtacgccggctacgaccagctgctccgcgcgctccaggacaagttcttctcccacttcaccatcaggaagttcgccgacgacgagaggaagctggtggacgcggtgaacgggacggagtacgtgcccacgtacgaggacaaggatggcgactggatcctcgtcggcgacgtcccctggaagatgttcgtggaaacctgccagcgccttcgtctgatgaaaggttcagaggccgtgaacttggcaccgagagccgcccgatgaggcacactagctccgttgggcgttggcacgcacgcacgcactggcgtcttgaaggaaagcgggaactctgctggtcttgatgaggatcttcacgtgagataggaacgtgtgtacagttgtcgccttatggtattgagttgaggaaacttggaagttccattacttgtctgtagtctctactttatatagatgcgaagaagcttgagatacacattgcctacaatgtctttttgatgaataagaccagacagcaccgaaccgaactcgtccttccacatctccacacggttgctttgccatctcggtggttttgtggtggtggtggtggtggtggtcgtgcttcctataggtgtgaggctgatggcgtggctgccatttatacaatctttaatcctgttttgttgagctttattatatggttttgttttgagagtcc

SEQ ID NO: 37745 - protein, 273 aa, Zea mays subsp. mays
  peptide (1)..(273): Ceres Seq. ID no. 12366065
PLPFPFPSPLSPSFLPTPRSPRPATGHVGGDGAELHRVLRGFRARLRGHRAHAHPPPPGLRAFRRRRRRGLPVPLLLVVLRLPRPRPQARVLRRRPRPLLPARRVLRRCTGTQGSCGGLAAGEVVPQERARRRRGLQQGRQVRQGGRRRRALPAEGGPAGVRRLRPAAPRAPGQVLLPLHHQEVRRRREEAGGRGERDGVRAHVRGQGWRLDPRRRRPLEDVRGNLPAPSSDERFRGRELGTESRPMRHTSSVGRWHARTHWRLEGKRELCWS

SEQ ID NO: 37746 - protein, 247 aa, Zea mays subsp. mays
  peptide (1)..(247): Ceres Seq. ID no. 12366066
  misc_feature (70)..(221): Pfam Name: Pfam Description:  AUX/IAA family
  misc_feature (70)..(221): NCBI GI NO: 34906138 NR Description: P0509B06.6
  misc_feature (77)..(245): NCBI GI NO: 4887022 NR Description: Nt-iaa4.1 deduced protein [Nicotiana tabacum]
  misc_feature (19)..(245): NCBI GI NO: 17976835 NR Description: putative auxin induced transcription factor Aux/IAA
  misc_feature (85)..(245): NCBI GI NO: 15219694 NR Description: putative auxin-induced protein, IAA17/AXR3-1
  misc_feature (85)..(245): NCBI GI NO: 21592887 NR Description: putative auxin-induced protein, IAA17/AXR3-1
  misc_feature (103)..(245): NCBI GI NO: 4887020 NR Description: Nt-iaa28 deduced protein [Nicotiana tabacum]
  misc_feature (87)..(245): NCBI GI NO: 20269051 NR Description: aux/IAA protein
  misc_feature (85)..(245): NCBI GI NO: 2921758 NR Description: IAA17/AXR3-1 protein [Arabidopsis thaliana]
  misc_feature (51)..(246): NCBI GI NO: 22531416 NR Description: IAA16 protein [Gossypium hirsutum]
  misc_feature (9)..(245): NCBI GI NO: 29465672 NR Description: Aux/IAA protein [Vitis vinifera]
PLCLFLFLPRFLLPSSPLPAPLAQPLAMSVETERSSTESSGASGLDFEDTALTLTLRLPGSAPSAAAAAAASLSLSSSSSSAFPDPDRKRASSDADPGRSSPLAASSDAAPAPKARVVGWPPVRSYRKNALADAAGSSKAAKFVKVAVDGAPYLRKVDLQAYAGYDQLLRALQDKFFSHFTIRKFADDERKLVDAVNGTEYVPTYEDKDGDWILVGDVPWKMFVETCQRLRLMKGSEAVNLAPRAAR

SEQ ID NO: 37747 - protein, 220 aa, Zea mays subsp. mays
  peptide (1)..(220): Ceres Seq. ID no. 12366067
  misc_feature (43)..(194): Pfam Name: Pfam Description:  AUX/IAA family
  misc_feature (43)..(194): NCBI GI NO: 34906138 NR Description: P0509B06.6
  misc_feature (50)..(218): NCBI GI NO: 4887022 NR Description: Nt-iaa4.1 deduced protein [Nicotiana tabacum]
  misc_feature (1)..(218): NCBI GI NO: 17976835 NR Description: putative auxin induced transcription factor Aux/IAA
  misc_feature (58)..(218): NCBI GI NO: 15219694 NR Description: putative auxin-induced protein, IAA17/AXR3-1
  misc_feature (58)..(218): NCBI GI NO: 21592887 NR Description: putative auxin-induced protein, IAA17/AXR3-1
  misc_feature (76)..(218): NCBI GI NO: 4887020 NR Description: Nt-iaa28 deduced protein [Nicotiana tabacum]
  misc_feature (60)..(218): NCBI GI NO: 20269051 NR Description: aux/IAA protein
  misc_feature (58)..(218): NCBI GI NO: 2921758 NR Description: IAA17/AXR3-1 protein [Arabidopsis thaliana]
  misc_feature (24)..(219): NCBI GI NO: 22531416 NR Description: IAA16 protein [Gossypium hirsutum]
  misc_feature (1)..(218): NCBI GI NO: 29465672 NR Description: Aux/IAA protein [Vitis vinifera]
MSVETERSSTESSGASGLDFEDTALTLTLRLPGSAPSAAAAAAASLSLSSSSSSAFPDPDRKRASSDADPGRSSPLAASSDAAPAPKARVVGWPPVRSYRKNALADAAGSSKAAKFVKVAVDGAPYLRKVDLQAYAGYDQLLRALQDKFFSHFTIRKFADDERKLVDAVNGTEYVPTYEDKDGDWILVGDVPWKMFVETCQRLRLMKGSEAVNLAPRAAR

SEQ ID NO: 37748 - DNA, 1658 bp, Zea mays subsp. mays
  misc_feature (1)..(1658): Ceres Seq. ID no. 12357029
aattttggcgtgctttacttccgcttccaatataccttttttctgcgacaaaaatcatttttgttaattgcgaaaaggaaagagcccgtgtgaacaggaggggtgaggagaagagggggaaaagagagagaaatcggagggcattagcaagaaaccatgagttctaggttcgcaatccctagtcgtcttgtcctgatcttacttgagtgctcgtgagctctttccagtggctaaagactgcagatttgagttctggcccaagaaccgcgtgctagcccgccatggaggtgaggtccgagcaagggctgatggcggggagggatctattcggcatgccgaagagcccgccggcgcccgcgcccgccgtcgtccgccgccatgcagagcgtgcgcatggcgtacaccgcggacggcaccgccgtgttcgctccggtgagctcttcgcctgcgacgccgtcttaccagccgcagggcgcagcccacggcgctagcatgtccgcggcgacggtcgttggaggcaatggcgctccagctgcgccgagcatgggtgagccgctggccaagaagaagcgcggacgaccaaggaagtacgggcccgacgggtccatggcgctggcaatggtgcctgcttcggcggcttcagggtcgccggcgacagggcagggtttttctgggccgttctcaccgcctgcgttaaatccggcgagctctctggtggtggcgtcgccagacggattcaagaagcggggccggcctaagggttctaccaacaggccacgcgtggacgctgctgggtcatcaggagctggatttacacctcatgttatcacagttcaagctggggaggacgtggcatcaaagattatgtcattttcccagcatggaacacacggagtttgtgttctttcaggcaaatggctccatatcaaatgtaacgcttcgtcagactgctacatcaggcagaactgtaacatacgagggtcaattcgagatactgtcgctgtcggggtcattcttcctggctgaggatggtgtccagcgcagccgaaacggaggcctcagcgtgtcgctggctggtcctgatggccgtctgttgggtggtggggtcgcaggacttctagtagcggcttcaccggttcagatagtactgggaagcttcaattctggaggcggaaaggagccacaaaagcaggctccttcagaacctacatcggctccaccgagggttgctccgacagctgggatgggaggacccagcagcccttcttcaagaggcacattgagcgagtcatccggtggcgctggaagcccaccgccactgcatcgagccatggctgctagtgctagcaatagtaaccagccaccgttcttgtccagcatgccttggagatgagtttgcagcttgcattctcttggccaattccaggcaggatgtagcaatctgcgctttcagtagcgcccgttgtgtgagtagctgtgtgcagtacaagccagaagcttgggtgggaatataattgcgtctggtaaatctgtagctctgttgtaggttccaccctgaattcctgtgctaggtgtgttgagctgtgtaagcaatgtaatcctttcagcgttatcaaatgctatttagttaaatgtttctaccaaggcatgtcgatttg

SEQ ID NO: 37749 - protein, 215 aa, Zea mays subsp. mays
  peptide (1)..(215): Ceres Seq. ID no. 12357030
  misc_feature (1)..(177): NCBI GI NO: 37537056 NR Description: putative AT-Hook DNA-binding protein
  misc_feature (1)..(177): NCBI GI NO: 38346715 NR Description: OSJNBa0086O06.13
  misc_feature (72)..(203): NCBI GI NO: 2598227 NR Description: AT-hook protein 1 [Arabidopsis thaliana]
  misc_feature (1)..(177): NCBI GI NO: 32352210 NR Description: hypothetical protein
  misc_feature (72)..(203): NCBI GI NO: 18403332 NR Description: AT-hook DNA-binding protein
  misc_feature (72)..(203): NCBI GI NO: 25408293 NR Description: AT-hook DNA-binding protein (AHP1)
  misc_feature (72)..(203): NCBI GI NO: 14326504 NR Description: At2g33620/F4P9.39 [Arabidopsis thaliana]
  misc_feature (11)..(94): NCBI GI NO: 2598227 NR Description: AT-hook protein 1 [Arabidopsis thaliana]
  misc_feature (11)..(94): NCBI GI NO: 18403332 NR Description: AT-hook DNA-binding protein
  misc_feature (11)..(94): NCBI GI NO: 14326504 NR Description: At2g33620/F4P9.39 [Arabidopsis thaliana]
MQSVRMAYTADGTAVFAPVSSSPATPSYQPQGAAHGASMSAATVVGGNGAPAAPSMGEPLAKKKRGRPRKYGPDGSMALAMVPASAASGSPATGQGFSGPFSPPALNPASSLVVASPDGFKKRGRPKGSTNRPRVDAAGSSGAGFTPHVITVQAGEDVASKIMSFSQHGTHGVCVLSGKWLHIKCNASSDCYIRQNCNIRGSIRDTVAVGVILPG

SEQ ID NO: 37750 - protein, 210 aa, Zea mays subsp. mays
  peptide (1)..(210): Ceres Seq. ID no. 12357031
  misc_feature (1)..(172): NCBI GI NO: 37537056 NR Description: putative AT-Hook DNA-binding protein
  misc_feature (1)..(172): NCBI GI NO: 38346715 NR Description: OSJNBa0086O06.13
  misc_feature (67)..(198): NCBI GI NO: 2598227 NR Description: AT-hook protein 1 [Arabidopsis thaliana]
  misc_feature (1)..(172): NCBI GI NO: 32352210 NR Description: hypothetical protein
  misc_feature (67)..(198): NCBI GI NO: 18403332 NR Description: AT-hook DNA-binding protein
  misc_feature (67)..(198): NCBI GI NO: 25408293 NR Description: AT-hook DNA-binding protein (AHP1)
  misc_feature (67)..(198): NCBI GI NO: 14326504 NR Description: At2g33620/F4P9.39 [Arabidopsis thaliana]
  misc_feature (6)..(89): NCBI GI NO: 2598227 NR Description: AT-hook protein 1 [Arabidopsis thaliana]
  misc_feature (6)..(89): NCBI GI NO: 18403332 NR Description: AT-hook DNA-binding protein
  misc_feature (6)..(89): NCBI GI NO: 14326504 NR Description: At2g33620/F4P9.39 [Arabidopsis thaliana]
MAYTADGTAVFAPVSSSPATPSYQPQGAAHGASMSAATVVGGNGAPAAPSMGEPLAKKKRGRPRKYGPDGSMALAMVPASAASGSPATGQGFSGPFSPPALNPASSLVVASPDGFKKRGRPKGSTNRPRVDAAGSSGAGFTPHVITVQAGEDVASKIMSFSQHGTHGVCVLSGKWLHIKCNASSDCYIRQNCNIRGSIRDTVAVGVILPG

SEQ ID NO: 37751 - protein, 190 aa, Zea mays subsp. mays
  peptide (1)..(190): Ceres Seq. ID no. 12357032
  misc_feature (6)..(180): NCBI GI NO: 37537056 NR Description: putative AT-Hook DNA-binding protein
  misc_feature (31)..(188): NCBI GI NO: 38346715 NR Description: OSJNBa0086O06.13
  misc_feature (31)..(190): NCBI GI NO: 2598227 NR Description: AT-hook protein 1 [Arabidopsis thaliana]
  misc_feature (31)..(164): NCBI GI NO: 32352210 NR Description: hypothetical protein
  misc_feature (31)..(190): NCBI GI NO: 18403332 NR Description: AT-hook DNA-binding protein
  misc_feature (31)..(190): NCBI GI NO: 25408293 NR Description: AT-hook DNA-binding protein (AHP1)
  misc_feature (31)..(190): NCBI GI NO: 14326504 NR Description: At2g33620/F4P9.39 [Arabidopsis thaliana]
  misc_feature (31)..(158): NCBI GI NO: 22328578 NR Description: putative DNA-binding protein; protein id:At4g12080
  misc_feature (31)..(181): NCBI GI NO: 15242131 NR Description: putative protein; protein id: At5g51590.1
  misc_feature (9)..(158): NCBI GI NO: 7485570 NR Description: hypothetical protein F16J13
MLSQFKLGRTWHQRLCHFPSMEHTEFVFFQANGSISNVTLRQTATSGRTVTYEGQFEILSLSGSFFLAEDGVQRSRNGGLSVSLAGPDGRLLGGGVAGLLVAASPVQIVLGSFNSGGGKEPQKQAPSEPTSAPPRVAPTAGMGGPSSPSSRGTLSESSGGAGSPPPLHRAMAASASNSNQPPFLSSMPWR

SEQ ID NO: 37752 - DNA, 1442 bp, Zea mays subsp. mays
  misc_feature (1)..(1442): Ceres Seq. ID no. 12406568
atgcgagactggaggcggaaccgcgcacgacaccaagctgccgcgccggactgctgcacgcaagcgcagcgcaggaccgaccgacctccgtaggcacgcacggcgccggcggcatggcggagcacctcctgtcgacggccgtgcacgacacgctgccggggagctacgtgcggccggagccggagcgcccgcgcctcgcggaggtcgtgaccggcgcgcgcatccccgtcgtggacctgggcagccccgaccgcggcgcggtcgtggccgccgtcggcgacgcctgccgctcgcacggcttcttccaggtcgtcaaccacgggatacacgccgccctggtcgcggcggtgatggccgcggggcgcggcttcttccggctgccccccgaggagaaggccaagctctactccgacgaccccgccaggaagatccggctgtccaccagcttcaacgtgcgcaaggagacggtgcacaactggcgcgactacctccgcctgcactgccatcccctcgacgagttcctgcccgattggccgtccaacccgcccgatttcaaggagaccatgggcacctactgcaaggaggtccgggagctcgggttcaggctgtacgccgcgatctcggagagcctgggcctagaggcgagctacatgaaggaagcgctgggggagcaggagcagcacatggcggtcaacttctacccgccgtgcccggagccggagctcacctacggcctcccggcgcacaccgaccccaacgcgctcaccatcctgctcatggacccggacgtcgccggcctgcaggtgctccacgccggccagtgggtcgccgtcaacccgcagcccggcgcgctcatcatcaacatcggcgaccagctgcaggcgctgagcaacgggcagtaccggagcgtgtggcaccgcgcggtggtgaactcggaccgggagcgcatgtccgtggcgtcgttcctgtgcccgtgcaaccacgtcgtgctcggccccgcgcggaagctcgtcaccgaggacaccccggccgtgtacaggaactacacgtacgacaagtactacgccaagttctggagcaggaacctggaccaggagcactgcctcgagctcttcagaacctagcgaatcggatacggatggatggatacattacatacgcgccctctgtttttctccatgacgttagaagaacacgttctgcaatgtttgtccattcaaggtggtatcaatcaaggctgtggtcgttgcaattcttccgctccatatacatgattaaatgctttgaaagaaaaagaaaaaaagaaacacaagtattatggcactactagtgtttttaggaacaaggaaagaggggttgcccctgctggctatatatattaaatataaataaaggtaaggctgtagacattggtgaataagagaaagtatttgagtttctct

SEQ ID NO: 37753 - protein, 442 aa, Zea mays subsp. mays
  peptide (1)..(442): Ceres Seq. ID no. 12406569
  misc_feature (164)..(286): Pfam Name: Pfam Description:  Herpesvirus UL87 family
CETGGGTAHDTKLPRRTAARKRSAGPTDLRRHARRRRHGGAPPVDGRARHAAGELRAAGAGAPAPRGGRDRRAHPRRGPGQPRPRRGRGRRRRRLPLARLLPGRQPRDTRRPGRGGDGRGARLLPAAPRGEGQALLRRPRQEDPAVHQLQRAQGDGAQLARLPPPALPSPRRVPARLAVQPARFQGDHGHLLQGGPGARVQAVRRDLGEPGPRGELHEGSAGGAGAAHGGQLLPAVPGAGAHLRPPGAHRPQRAHHPAHGPGRRRPAGAPRRPVGRRQPAARRAHHQHRRPAAGAEQRAVPERVAPRGGELGPGAHVRGVVPVPVQPRRARPRAEARHRGHPGRVQELHVRQVLRQVLEQEPGPGALPRALQNLANRIRMDGYITYAPSVFLHDVRRTRSAMFVHSRWYQSRLWSLQFFRSIYMIKCFERKRKKETQVLWHY

SEQ ID NO: 37754 - protein, 373 aa, Zea mays subsp. mays
  peptide (1)..(373): Ceres Seq. ID no. 12406570
  misc_feature (224)..(324): Pfam Name: II Pfam Description: 2OG-Fe
  misc_feature (40)..(373): NCBI GI NO: 37536444 NR Description: unknown protein
  misc_feature (42)..(372): NCBI GI NO: 38345872 NR Description: OSJNBa0064M23.14
  misc_feature (38)..(371): NCBI GI NO: 15238567 NR Description: flavanone 3-hydroxylase-like protein
  misc_feature (38)..(371): NCBI GI NO: 21553527 NR Description: flavanone 3-hydroxylase-like protein
  misc_feature (35)..(372): NCBI GI NO: 38345873 NR Description: OSJNBa0064M23.15
  misc_feature (46)..(372): NCBI GI NO: 15235124 NR Description: putative flavanone 3-beta-hydroxylase
  misc_feature (44)..(372): NCBI GI NO: 15235126 NR Description: putative Fe
  misc_feature (185)..(373): NCBI GI NO: 25446682 NR Description: Putative flavanone 3-hydroxylase
  misc_feature (40)..(353): NCBI GI NO: 15224472 NR Description: putative anthocyanidin synthase
  misc_feature (49)..(295): NCBI GI NO: 34907994 NR Description: leucoanthocyanidin dioxygenase-like protein
ARLEAEPRTTPSCRAGLLHASAAQDRPTSVGTHGAGGMAEHLLSTAVHDTLPGSYVRPEPERPRLAEVVTGARIPVVDLGSPDRGAVVAAVGDACRSHGFFQVVNHGIHAALVAAVMAAGRGFFRLPPEEKAKLYSDDPARKIRLSTSFNVRKETVHNWRDYLRLHCHPLDEFLPDWPSNPPDFKETMGTYCKEVRELGFRLYAAISESLGLEASYMKEALGEQEQHMAVNFYPPCPEPELTYGLPAHTDPNALTILLMDPDVAGLQVLHAGQWVAVNPQPGALIINIGDQLQALSNGQYRSVWHRAVVNSDRERMSVASFLCPCNHVVLGPARKLVTEDTPAVYRNYTYDKYYAKFWSRNLDQEHCLELFRT

SEQ ID NO: 37755 - protein, 336 aa, Zea mays subsp. mays
  peptide (1)..(336): Ceres Seq. ID no. 12406571
  misc_feature (187)..(287): Pfam Name: II Pfam Description: 2OG-Fe
  misc_feature (3)..(336): NCBI GI NO: 37536444 NR Description: unknown protein
  misc_feature (5)..(335): NCBI GI NO: 38345872 NR Description: OSJNBa0064M23.14
  misc_feature (1)..(334): NCBI GI NO: 15238567 NR Description: flavanone 3-hydroxylase-like protein
  misc_feature (1)..(334): NCBI GI NO: 21553527 NR Description: flavanone 3-hydroxylase-like protein
  misc_feature (1)..(335): NCBI GI NO: 38345873 NR Description: OSJNBa0064M23.15
  misc_feature (9)..(335): NCBI GI NO: 15235124 NR Description: putative flavanone 3-beta-hydroxylase
  misc_feature (7)..(335): NCBI GI NO: 15235126 NR Description: putative Fe
  misc_feature (148)..(336): NCBI GI NO: 25446682 NR Description: Putative flavanone 3-hydroxylase
  misc_feature (3)..(316): NCBI GI NO: 15224472 NR Description: putative anthocyanidin synthase
  misc_feature (12)..(258): NCBI GI NO: 34907994 NR Description: leucoanthocyanidin dioxygenase-like protein
MAEHLLSTAVHDTLPGSYVRPEPERPRLAEVVTGARIPVVDLGSPDRGAVVAAVGDACRSHGFFQVVNHGIHAALVAAVMAAGRGFFRLPPEEKAKLYSDDPARKIRLSTSFNVRKETVHNWRDYLRLHCHPLDEFLPDWPSNPPDFKETMGTYCKEVRELGFRLYAAISESLGLEASYMKEALGEQEQHMAVNFYPPCPEPELTYGLPAHTDPNALTILLMDPDVAGLQVLHAGQWVAVNPQPGALIINIGDQLQALSNGQYRSVWHRAVVNSDRERMSVASFLCPCNHVVLGPARKLVTEDTPAVYRNYTYDKYYAKFWSRNLDQEHCLELFRT

SEQ ID NO: 37756 - DNA, 1696 bp, Zea mays subsp. mays
  misc_feature (1)..(1696): Ceres Seq. ID no. 13498363
  misc_feature (443)..(443): n is a, c, t, g, unknown, or other
  misc_feature (441)..(441): n is a, c, t, g, unknown, or other
  misc_feature (444)..(444): n is a, c, t, g, unknown, or other
  misc_feature (440)..(440): n is a, c, t, g, unknown, or other
  misc_feature (1430)..(1430): n is a, c, t, g, unknown, or other
taatcaaaaaattattatttcttcttccagcgggcaattcctggccaccaccgggcgcgctgcaccgcgctatattactccgggctcgtggacaagcatgcagaggggcgtgtccttccctggcggaatggcggaggagtgcccgcccgccggcggcgccgagctctggctcccggacgagttcctggacgacgacttcttctccgaggaggagaaggcggcggtcgcggccaagagcgagagcgacgaggaggaagggatggacggcctctcgcgccgcgcggccgggctcgtcgtcgggggtggaggggacggttcccctgcaaaggcgcaagtgttagccggctcgccgcagtcgattctgtgcggcctgcatgcttccggggaggacagccccaacggcgcggcgtcgcaggtcagctcgccgccgtcgtcgccgnngnntaagacgccggccgacccctgggacctgctcaaagaggcggccggccaggtggcccgcatgcgcacaactagcggcatcctggtggcaacgaacgcgggcgcacatcaaagacaccccgtcccgccgctggcgcagaagctctctgcgccggccgacgctcccaaggccgcgggtgccaacctccctcaggctcagccgaagaactcgatggaacatcgccggattcagattgctcgttttaatgcgctgaagcagcagcagctcctgaagcacatgcgggagcgggagctcgccgtcgctacggcggcggcgtggggcacgagcgtcgcggggtctcatcgtgccgccgggtaccgtgcgccggcgccccatgtcctgagctcgtccgcgtggcccaccctccagaagcagcagcagcagcaaagggcggtgtccccggcgggcatgcgcgccgtcttcgtggcccctcctggcgccaagcgcgagtgcgccggcaccggcgtgttcatcccccgccaggccggcgcccccgcggagcccaagaaaaggccagcagcgtgcgcccctgtccttctcccggcgcgcgtcgtgcaggcgctcaacctcaacgtcgaggacctcggggcccgtcccatctacccgggcggcttcgtcctcgaccacgatgcactggtgagccggagcaacgctctgctggcgagccgcgcgtcccagcagctccatggcgcttcgtcgcgcgaggtgaatctcccccaggaatggacgtactgagggcgccgattcgccaccgcaccgctgcaagatgactcgacgatcactccagattaacggggggtgtcaaaaaaaaattactattgctattggtagcaataggtattataggtgttgttaggctagaagtaggaggcagcggtggtgtggcattacgcgccagcgttaggtgttcttttgtgcgggggtgatatattggttattttgggactgncggacgggttggtgatgagcaagagcgaaatcaatcatccgtggctctcgcaggtccgttgggggcggaggggagaaacagcaataataataataagtgggtgcttttgggggaggggagagaggggggtttggaactaatcctatgtttagctggttctggtactacgatggtttcccaagggaaaatcatcaagcattcagcagtctgtgaaagagatgtctcgtcactgtaagcaaataataataataataaacaggagctcc

SEQ ID NO: 37757 - protein, 404 aa, Zea mays subsp. mays
  peptide (1)..(404): Ceres Seq. ID no. 13498364
  misc_feature (43)..(393): NCBI GI NO: 20160564 NR Description: P0414E03.8
  misc_feature (228)..(334): NCBI GI NO: 37534638 NR Description: hypothetical protein
  misc_feature (261)..(404): NCBI GI NO: 15235509 NR Description: expressed protein [Arabidopsis thaliana]
  misc_feature (147)..(147): Xaa is any aa, unknown or other
  misc_feature (148)..(148): Xaa is any aa, unknown or other
NQKIIISSSSGQFLATTGRAAPRYITPGSWTSMQRGVSFPGGMAEECPPAGGAELWLPDEFLDDDFFSEEEKAAVAAKSESDEEEGMDGLSRRAAGLVVGGGGDGSPAKAQVLAGSPQSILCGLHASGEDSPNGAASQVSSPPSSPXXKTPADPWDLLKEAAGQVARMRTTSGILVATNAGAHQRHPVPPLAQKLSAPADAPKAAGANLPQAQPKNSMEHRRIQIARFNALKQQQLLKHMRERELAVATAAAWGTSVAGSHRAAGYRAPAPHVLSSSAWPTLQKQQQQQRAVSPAGMRAVFVAPPGAKRECAGTGVFIPRQAGAPAEPKKRPAACAPVLLPARVVQALNLNVEDLGARPIYPGGFVLDHDALVSRSNALLASRASQQLHGASSREVNLPQEWTY

SEQ ID NO: 37758 - protein, 372 aa, Zea mays subsp. mays
  peptide (1)..(372): Ceres Seq. ID no. 13498365
  misc_feature (11)..(361): NCBI GI NO: 20160564 NR Description: P0414E03.8
  misc_feature (196)..(302): NCBI GI NO: 37534638 NR Description: hypothetical protein
  misc_feature (229)..(372): NCBI GI NO: 15235509 NR Description: expressed protein [Arabidopsis thaliana]
  misc_feature (115)..(115): Xaa is any aa, unknown or other
  misc_feature (116)..(116): Xaa is any aa, unknown or other
MQRGVSFPGGMAEECPPAGGAELWLPDEFLDDDFFSEEEKAAVAAKSESDEEEGMDGLSRRAAGLVVGGGGDGSPAKAQVLAGSPQSILCGLHASGEDSPNGAASQVSSPPSSPXXKTPADPWDLLKEAAGQVARMRTTSGILVATNAGAHQRHPVPPLAQKLSAPADAPKAAGANLPQAQPKNSMEHRRIQIARFNALKQQQLLKHMRERELAVATAAAWGTSVAGSHRAAGYRAPAPHVLSSSAWPTLQKQQQQQRAVSPAGMRAVFVAPPGAKRECAGTGVFIPRQAGAPAEPKKRPAACAPVLLPARVVQALNLNVEDLGARPIYPGGFVLDHDALVSRSNALLASRASQQLHGASSREVNLPQEWTY

SEQ ID NO: 37759 - protein, 362 aa, Zea mays subsp. mays
  peptide (1)..(362): Ceres Seq. ID no. 13498366
  misc_feature (1)..(351): NCBI GI NO: 20160564 NR Description: P0414E03.8
  misc_feature (186)..(292): NCBI GI NO: 37534638 NR Description: hypothetical protein
  misc_feature (219)..(362): NCBI GI NO: 15235509 NR Description: expressed protein [Arabidopsis thaliana]
  misc_feature (105)..(105): Xaa is any aa, unknown or other
  misc_feature (106)..(106): Xaa is any aa, unknown or other
MAEECPPAGGAELWLPDEFLDDDFFSEEEKAAVAAKSESDEEEGMDGLSRRAAGLVVGGGGDGSPAKAQVLAGSPQSILCGLHASGEDSPNGAASQVSSPPSSPXXKTPADPWDLLKEAAGQVARMRTTSGILVATNAGAHQRHPVPPLAQKLSAPADAPKAAGANLPQAQPKNSMEHRRIQIARFNALKQQQLLKHMRERELAVATAAAWGTSVAGSHRAAGYRAPAPHVLSSSAWPTLQKQQQQQRAVSPAGMRAVFVAPPGAKRECAGTGVFIPRQAGAPAEPKKRPAACAPVLLPARVVQALNLNVEDLGARPIYPGGFVLDHDALVSRSNALLASRASQQLHGASSREVNLPQEWTY

SEQ ID NO: 37760 - DNA, 2056 bp, Zea mays subsp. mays
  misc_feature (1)..(2056): Ceres Seq. ID no. 12372969
agtatacacgccaagtcgccagccagcatttcctcccgaaccatccttccactccctcgccgaccctccccccgcgcccgccatggacacggcgatcggctccgtcccggcagcctccgacgcggcgcgtcacccagcgccgtccgcgtccgccccgcgcgacgcgacgctgggccggcacctggcgcggcgcctggcggaggtgggcgcccgggacgtgttcacggtgccgggggacttcaacctcacgctcctcgacgagctggaggccgagccgggcggcgtccgcctcgtcggctgctgcaacgagctcaacgcggcgtacgcggccgacgggtacgcccgcgcgcgcgccggcggggtcggcgcctgcgccgtcaccttcaccgtcggcggcctcagcgccatcaacggcgtcgccggcgccttcagcgagaacctccccgtcgtgtgcatcgtcggcggacccaacagcaacgactacgggagtaacaggatcctgcaccataccatcggcttgcctgatttcacgcaggagctcaggtgcttccagaacgtcacgtgctatcaggctgtggtgaacaacttggaagatgcgcacgagcagatcgatactgccatctccacggcaatcaaggagagcaagcctgtttacattagcatcaggctgcaacctcccttcgatcccacatcccaccttcagccgccatcctgtccctttcttcctctccccaaggctatcgaaccagatgaacctggaggctgcagtggaagccgccgcggctttcttgaacaaagccgtcaagccagtgcttgtaggtgggccaaagatgagggtgtccaaagcatgcgaagccttggcagagctggcagatgcctgcggctatcccgtcgccgtgatgccttctgcgaaggggctagtgccagagcaccactctaggttcattggcacgtactggggtgcggtgagcactccattctgtgctgagatcgtcgagtctgccgatgcctacctatttgctggccccgtattcaacgactacagctcggttgggtactcgctgctcctcaagaaggagaaggccatcattgtccaaccagagcgggtggtggtcgggcacggacccgcgtttgggtgtgttctgatgaaggatttccttcatgcccttgcaacccgtctgaagaagaacactgccgcgtatgagaactaccgtcgaatttatgtgcctttaggcgaaccacttccatctgaacctggcgagccgttgagagtgaacgtgctattcaagcatattcaggcaatgctgtctggcgacacggctgtcatcgcagagactggggactcgtggtttaactgccagaagctgaagctaccggaaggctgtggatacgaattccagatgcagtatggatcaattggctggtcagtgggcgcaactctaggatacgcacaggctgccaaggataaacgtgtcattgcctgcattggagacggcagctttcaggtgacggcacaagaagtgtcaacgatgctccggtgggggcacaacagcatcatcttcctgataaacaatggagggtacacaatcgaggtggagattcacgatggcccttataacgttatcaagaactggaactacaccggtctggtggaagcgttccacaatggcgagggcgcgtgctacacagcaaaggttcgaacagaggaggagctgacggaggcactggaggcagctctgggacctaagaaggactgcttatgcttcatcgaggtcatcgtgcataaggatgacaccagcaaagagcttctcgagtggggatctagggtttctgcggcgaatagccgtccacctaatcctcagtgaaatagccgtacatcaggtctcccgaattgtcctgtagatcaaaccgttttctggtgacgtccatagcaaaaagtctcggcgaggacatgctgtcgatttctgaataaattgtccctgcaattcactggtgttgaagtcctcgttgtaaaggtacaaagacgtttggaaaaatcactgacagcgtaaactct

SEQ ID NO: 37761 - protein, 423 aa, Zea mays subsp. mays
  peptide (1)..(423): Ceres Seq. ID no. 12372970
  misc_feature (58)..(207): Pfam Name: Pfam Description:  Thiamine pyrophosphate enzyme, central domain
  misc_feature (22)..(423): NCBI GI NO: 19851518 NR Description: pyruvate decarboxylase [Zea mays]
  misc_feature (22)..(423): NCBI GI NO: 10732644 NR Description: pyruvate decarboxylase 1 [Vitis vinifera]
  misc_feature (22)..(423): NCBI GI NO: 29373077 NR Description: pyruvate decarboxylase 1 [Lotus corniculatus]
  misc_feature (22)..(423): NCBI GI NO: 24745919 NR Description: pyruvate decarboxylase [Solanum tuberosum]
  misc_feature (22)..(423): NCBI GI NO: 23495286 NR Description: pyruvate decarboxylase [Oryza sativa]
  misc_feature (22)..(423): NCBI GI NO: 19851522 NR Description: pyruvate decarboxylase [Zea mays]
  misc_feature (22)..(423): NCBI GI NO: 19851524 NR Description: pyruvate decarboxylase [Zea mays]
  misc_feature (22)..(423): NCBI GI NO: 7436705 NR Description: pyruvate decarboxylase (EC 4.1.1.1) pdc1 - rice
  misc_feature (22)..(423): NCBI GI NO: 1706325 NR Description: Pyruvate decarboxylase isozyme 1 (PDC)
  misc_feature (22)..(423): NCBI GI NO: 15240423 NR Description: pyruvate decarboxylase (gb|AAB16855
MRTSRSILPSPRQSRRASLFTLASGCNLPSIPHPTFSRHPVPFFLSPRLSNQMNLEAAVEAAAAFLNKAVKPVLVGGPKMRVSKACEALAELADACGYPVAVMPSAKGLVPEHHSRFIGTYWGAVSTPFCAEIVESADAYLFAGPVFNDYSSVGYSLLLKKEKAIIVQPERVVVGHGPAFGCVLMKDFLHALATRLKKNTAAYENYRRIYVPLGEPLPSEPGEPLRVNVLFKHIQAMLSGDTAVIAETGDSWFNCQKLKLPEGCGYEFQMQYGSIGWSVGATLGYAQAAKDKRVIACIGDGSFQVTAQEVSTMLRWGHNSIIFLINNGGYTIEVEIHDGPYNVIKNWNYTGLVEAFHNGEGACYTAKVRTEEELTEALEAALGPKKDCLCFIEVIVHKDDTSKELLEWGSRVSAANSRPPNPQ

SEQ ID NO: 37762 - protein, 371 aa, Zea mays subsp. mays
  peptide (1)..(371): Ceres Seq. ID no. 12372971
  misc_feature (6)..(155): Pfam Name: Pfam Description:  Thiamine pyrophosphate enzyme, central domain
  misc_feature (1)..(371): NCBI GI NO: 19851518 NR Description: pyruvate decarboxylase [Zea mays]
  misc_feature (1)..(371): NCBI GI NO: 10732644 NR Description: pyruvate decarboxylase 1 [Vitis vinifera]
  misc_feature (1)..(371): NCBI GI NO: 29373077 NR Description: pyruvate decarboxylase 1 [Lotus corniculatus]
  misc_feature (1)..(371): NCBI GI NO: 24745919 NR Description: pyruvate decarboxylase [Solanum tuberosum]
  misc_feature (1)..(371): NCBI GI NO: 23495286 NR Description: pyruvate decarboxylase [Oryza sativa]
  misc_feature (1)..(371): NCBI GI NO: 19851522 NR Description: pyruvate decarboxylase [Zea mays]
  misc_feature (1)..(371): NCBI GI NO: 19851524 NR Description: pyruvate decarboxylase [Zea mays]
  misc_feature (1)..(371): NCBI GI NO: 7436705 NR Description: pyruvate decarboxylase (EC 4.1.1.1) pdc1 - rice
  misc_feature (1)..(371): NCBI GI NO: 1706325 NR Description: Pyruvate decarboxylase isozyme 1 (PDC)
  misc_feature (1)..(371): NCBI GI NO: 15240423 NR Description: pyruvate decarboxylase (gb|AAB16855
MNLEAAVEAAAAFLNKAVKPVLVGGPKMRVSKACEALAELADACGYPVAVMPSAKGLVPEHHSRFIGTYWGAVSTPFCAEIVESADAYLFAGPVFNDYSSVGYSLLLKKEKAIIVQPERVVVGHGPAFGCVLMKDFLHALATRLKKNTAAYENYRRIYVPLGEPLPSEPGEPLRVNVLFKHIQAMLSGDTAVIAETGDSWFNCQKLKLPEGCGYEFQMQYGSIGWSVGATLGYAQAAKDKRVIACIGDGSFQVTAQEVSTMLRWGHNSIIFLINNGGYTIEVEIHDGPYNVIKNWNYTGLVEAFHNGEGACYTAKVRTEEELTEALEAALGPKKDCLCFIEVIVHKDDTSKELLEWGSRVSAANSRPPNPQ

SEQ ID NO: 37763 - protein, 344 aa, Zea mays subsp. mays
  peptide (1)..(344): Ceres Seq. ID no. 12372972
  misc_feature (1)..(128): Pfam Name: Pfam Description:  Thiamine pyrophosphate enzyme, central domain
  misc_feature (1)..(344): NCBI GI NO: 19851518 NR Description: pyruvate decarboxylase [Zea mays]
  misc_feature (1)..(344): NCBI GI NO: 10732644 NR Description: pyruvate decarboxylase 1 [Vitis vinifera]
  misc_feature (1)..(344): NCBI GI NO: 29373077 NR Description: pyruvate decarboxylase 1 [Lotus corniculatus]
  misc_feature (1)..(344): NCBI GI NO: 24745919 NR Description: pyruvate decarboxylase [Solanum tuberosum]
  misc_feature (1)..(344): NCBI GI NO: 23495286 NR Description: pyruvate decarboxylase [Oryza sativa]
  misc_feature (1)..(344): NCBI GI NO: 19851522 NR Description: pyruvate decarboxylase [Zea mays]
  misc_feature (1)..(344): NCBI GI NO: 19851524 NR Description: pyruvate decarboxylase [Zea mays]
  misc_feature (1)..(344): NCBI GI NO: 7436705 NR Description: pyruvate decarboxylase (EC 4.1.1.1) pdc1 - rice
  misc_feature (1)..(344): NCBI GI NO: 1706325 NR Description: Pyruvate decarboxylase isozyme 1 (PDC)
  misc_feature (1)..(344): NCBI GI NO: 15240423 NR Description: pyruvate decarboxylase (gb|AAB16855
MRVSKACEALAELADACGYPVAVMPSAKGLVPEHHSRFIGTYWGAVSTPFCAEIVESADAYLFAGPVFNDYSSVGYSLLLKKEKAIIVQPERVVVGHGPAFGCVLMKDFLHALATRLKKNTAAYENYRRIYVPLGEPLPSEPGEPLRVNVLFKHIQAMLSGDTAVIAETGDSWFNCQKLKLPEGCGYEFQMQYGSIGWSVGATLGYAQAAKDKRVIACIGDGSFQVTAQEVSTMLRWGHNSIIFLINNGGYTIEVEIHDGPYNVIKNWNYTGLVEAFHNGEGACYTAKVRTEEELTEALEAALGPKKDCLCFIEVIVHKDDTSKELLEWGSRVSAANSRPPNPQ

SEQ ID NO: 37764 - DNA, 1639 bp, Zea mays subsp. mays
  misc_feature (1)..(1639): Ceres Seq. ID no. 12391357
  misc_feature (1214)..(1214): n is a, c, t, g, unknown, or other
aaactccaatccagcgttgagctcgacagctcgtgccaaactaggccgcagctggaaataccctccgctccacttacctgctgctggtgagcaccgcaagcaccaactcgcgcccaccgctccgctacaccagccgacgccatcatgtctaccgtcgccgccgcccccaccgtcgtgaaatcggctccggagctcgtcgcgccagtggggccaacacccggcggcaccctcccactgtcctccatcgacaagaccgcggcggtgcgtgtgtcggtggatttcatccaggtttttcccccggccgtaggagcaggcggggacaaagacgccgccgtggccgcgatgcgcgacggcttcgcgaaggcactggtgccgtactacccggtggccggccgcatcgcggacgccagccccggggagcccgtggtggagtgcaccgggcagggcgtctggttcgtggaggccgctgcgagctgcgcgctcgccgacgtcaactacctcgagcgccctctgctcatccccaaggaggagctcctcccgcgacctccccccgaggagaagctcgaggacctcgtcctcatggcacaggtgaccaagttcgcctgcggcgggttcgcggtcgggatctgcttcagccacctggtgttcgacgggcagggcgcggcgcagttcctcaaggcggccggcgagatggcgcgggggctgccggcgccgtcggttgcgccggtctgggaccgcgacgcgatcccggacccgcctaagctgccgcgcggccccccgccgtcgttcacggcgttcagcttcgtgacccaggtggtcgagatctcgccggagagcatcgcgcgcatcaaggacgacttcaaggacgcgacggggcagacctgctccaccttcgacgctgtcacggcggtggtgttcaagtgccgcgcgctggcgatggcgctccccgacgatgccgaggtccggctcggcttcgccgccagcacgcggcacctcctccacggcgtgctgccgtcggtggacggctactacggcaactgcgtgtaccccgtgggcatcacccggaccagcaaggcgatccgtgaggcgtcgcttccggaggtggtcggcgtgatgcgggaggccaaggaggcgcttaccacgcggttcacagactggatgcgcggcggcgccaaggacgaccactacaacgtgccgttggactacggcacggngacggtgtcggactggagccgcgtcgggttcaacgaggtggactacggcttcggtgaaccggggtacgtcttcacgctcaacgacgacgtcaacatcgtcgcgtcggtgatctacctcaaaccgcccgcgcccaagcgcggcatccggctcatgcttcgctgcgtcgaggaacctccacgctgcggcgttcgccgaggagctcgccaaattcgcgtagatggttgtttagtcttggtttatctatacttcattggtgtcggacactcggacctcatcttttacaatattatccatacttcattggtgtcaggcgctcattgattgtcatcggcattgttggatgtgcgggggacatgaaaaagctattacaagaacatttctggtatgcctaaaagtacacatattaaatcatgaccatttatct

SEQ ID NO: 37765 - protein, 463 aa, Zea mays subsp. mays
  peptide (1)..(463): Ceres Seq. ID no. 12391358
  misc_feature (8)..(415): Pfam Name: Pfam Description:  Transferase family
  misc_feature (1)..(415): NCBI GI NO: 34912652 NR Description: putative acetyl transferase
  misc_feature (6)..(413): NCBI GI NO: 34912654 NR Description: putative acetyl transferase
  misc_feature (10)..(412): NCBI GI NO: 34906304 NR Description: unnamed protein product
  misc_feature (4)..(417): NCBI GI NO: 34906150 NR Description: putative 0-deacetylbaccatin III-10-O-acetyltransferase
  misc_feature (17)..(414): NCBI GI NO: 15228696 NR Description: putative protein; protein id: At3g62160.1
  misc_feature (156)..(414): NCBI GI NO: 18558566 NR Description: putative 0-deacetylbaccatin III-10-O-acetyltransferase-like protein
  misc_feature (10)..(414): NCBI GI NO: 38346537 NR Description: OSJNBa0040D17.12
  misc_feature (10)..(414): NCBI GI NO: 38347149 NR Description: OSJNBa0039G19.9
  misc_feature (10)..(416): NCBI GI NO: 28558088 NR Description: 3'-N-debenzoyl-2'-deoxytaxol N-benzoyltransferase
  misc_feature (9)..(408): NCBI GI NO: 18034655 NR Description: 10-deacetylbaccatin III-10-O-acetyl transferase
  misc_feature (357)..(357): Xaa is any aa, unknown or other
MSTVAAAPTVVKSAPELVAPVGPTPGGTLPLSSIDKTAAVRVSVDFIQVFPPAVGAGGDKDAAVAAMRDGFAKALVPYYPVAGRIADASPGEPVVECTGQGVWFVEAAASCALADVNYLERPLLIPKEELLPRPPPEEKLEDLVLMAQVTKFACGGFAVGICFSHLVFDGQGAAQFLKAAGEMARGLPAPSVAPVWDRDAIPDPPKLPRGPPPSFTAFSFVTQVVEISPESIARIKDDFKDATGQTCSTFDAVTAVVFKCRALAMALPDDAEVRLGFAASTRHLLHGVLPSVDGYYGNCVYPVGITRTSKAIREASLPEVVGVMREAKEALTTRFTDWMRGGAKDDHYNVPLDYGTXTVSDWSRVGFNEVDYGFGEPGYVFTLNDDVNIVASVIYLKPPAPKRGIRLMLRCVEEPPRCGVRRGARQIRVDGCLVLVYLYFIGVGHSDLIFYNIIHTSLVSGAH

SEQ ID NO: 37766 - protein, 397 aa, Zea mays subsp. mays
  peptide (1)..(397): Ceres Seq. ID no. 12391359
  misc_feature (1)..(349): Pfam Name: Pfam Description:  Transferase family
  misc_feature (1)..(349): NCBI GI NO: 34912652 NR Description: putative acetyl transferase
  misc_feature (1)..(347): NCBI GI NO: 34912654 NR Description: putative acetyl transferase
  misc_feature (1)..(346): NCBI GI NO: 34906304 NR Description: unnamed protein product
  misc_feature (1)..(351): NCBI GI NO: 34906150 NR Description: putative 0-deacetylbaccatin III-10-O-acetyltransferase
  misc_feature (1)..(348): NCBI GI NO: 15228696 NR Description: putative protein; protein id: At3g62160.1
  misc_feature (90)..(348): NCBI GI NO: 18558566 NR Description: putative 0-deacetylbaccatin III-10-O-acetyltransferase-like protein
  misc_feature (1)..(348): NCBI GI NO: 38346537 NR Description: OSJNBa0040D17.12
  misc_feature (1)..(348): NCBI GI NO: 38347149 NR Description: OSJNBa0039G19.9
  misc_feature (1)..(350): NCBI GI NO: 28558088 NR Description: 3'-N-debenzoyl-2'-deoxytaxol N-benzoyltransferase
  misc_feature (1)..(342): NCBI GI NO: 18034655 NR Description: 10-deacetylbaccatin III-10-O-acetyl transferase
  misc_feature (291)..(291): Xaa is any aa, unknown or other
MRDGFAKALVPYYPVAGRIADASPGEPVVECTGQGVWFVEAAASCALADVNYLERPLLIPKEELLPRPPPEEKLEDLVLMAQVTKFACGGFAVGICFSHLVFDGQGAAQFLKAAGEMARGLPAPSVAPVWDRDAIPDPPKLPRGPPPSFTAFSFVTQVVEISPESIARIKDDFKDATGQTCSTFDAVTAVVFKCRALAMALPDDAEVRLGFAASTRHLLHGVLPSVDGYYGNCVYPVGITRTSKAIREASLPEVVGVMREAKEALTTRFTDWMRGGAKDDHYNVPLDYGTXTVSDWSRVGFNEVDYGFGEPGYVFTLNDDVNIVASVIYLKPPAPKRGIRLMLRCVEEPPRCGVRRGARQIRVDGCLVLVYLYFIGVGHSDLIFYNIIHTSLVSGAH

SEQ ID NO: 37767 - protein, 318 aa, Zea mays subsp. mays
  peptide (1)..(318): Ceres Seq. ID no. 12391360
  misc_feature (1)..(270): Pfam Name: Pfam Description:  Transferase family
  misc_feature (1)..(270): NCBI GI NO: 34912652 NR Description: putative acetyl transferase
  misc_feature (1)..(268): NCBI GI NO: 34912654 NR Description: putative acetyl transferase
  misc_feature (1)..(267): NCBI GI NO: 34906304 NR Description: unnamed protein product
  misc_feature (1)..(272): NCBI GI NO: 34906150 NR Description: putative 0-deacetylbaccatin III-10-O-acetyltransferase
  misc_feature (1)..(269): NCBI GI NO: 15228696 NR Description: putative protein; protein id: At3g62160.1
  misc_feature (11)..(269): NCBI GI NO: 18558566 NR Description: putative 0-deacetylbaccatin III-10-O-acetyltransferase-like protein
  misc_feature (1)..(269): NCBI GI NO: 38346537 NR Description: OSJNBa0040D17.12
  misc_feature (1)..(269): NCBI GI NO: 38347149 NR Description: OSJNBa0039G19.9
  misc_feature (1)..(271): NCBI GI NO: 28558088 NR Description: 3'-N-debenzoyl-2'-deoxytaxol N-benzoyltransferase
  misc_feature (1)..(263): NCBI GI NO: 18034655 NR Description: 10-deacetylbaccatin III-10-O-acetyl transferase
  misc_feature (212)..(212): Xaa is any aa, unknown or other
MAQVTKFACGGFAVGICFSHLVFDGQGAAQFLKAAGEMARGLPAPSVAPVWDRDAIPDPPKLPRGPPPSFTAFSFVTQVVEISPESIARIKDDFKDATGQTCSTFDAVTAVVFKCRALAMALPDDAEVRLGFAASTRHLLHGVLPSVDGYYGNCVYPVGITRTSKAIREASLPEVVGVMREAKEALTTRFTDWMRGGAKDDHYNVPLDYGTXTVSDWSRVGFNEVDYGFGEPGYVFTLNDDVNIVASVIYLKPPAPKRGIRLMLRCVEEPPRCGVRRGARQIRVDGCLVLVYLYFIGVGHSDLIFYNIIHTSLVSGAH

SEQ ID NO: 37768 - DNA, 2010 bp, Zea mays subsp. mays
  misc_feature (1)..(2010): Ceres Seq. ID no. 12367754
aaaaaagatctccactccagtatcccctccccgacttgcaacctctcctgaatcccaccgatcacgcgagctccccgccgcgatgtccgatcaccgagcgaagcggccgtccgacggcgcagccactgtggcatcgccggcggcgaagcgcgcccgcgacccgcccgcgccggcgttacccacgaacaaggaagctcccgacatggcccccaagacccgcatcttctgcgacatcctggcctcccgcgccgacgacgaggaactgaatgccgagctcgacaaggccgacatccgcgtaagcatcgctgacgtcgagcaggtgctccgcttctcctacgcgcacccgcgcgccgccgccgccttctttcgctggggcgggataccggtacctcggccacgagcactccccctactcgtggaacctcctcgtcgacatcctcggtaagaatcgtctcttcgagcccatgtgggacacagtcaaatctatgcagtcgcagcagctgctctcgctcgccactttcgcctccatattctcctccctggcggcgacccccggcggttccccgctcaaggcgttcatggacatgccccgctacggcatgacccgcgacacgccggcgctcaactcgctcctctccgcgctgtgtcgtgccaaccgcctcgacgacgctcgcgccgcgatcccagtagcccgcgccgaggctggcacgcgcccggatgccgactcctacgccatcctcctcgagggcagcgaggccgccgccgatctgcgggttgcgcgcgaggtgttcgacgaaatggtgcaggccattggattttatcctgacaacgtgcctgcctatgactccttcctcactacgcttgtttcaagtgactcctccacggcgctaccgggaagcaatggagtacctaaatgtcttgagcaggcacggctgttcgccaggagagaagttcttccgtgctgctcttgctgcacaccttgaggcacgacaattgcgcggagccatgaatctctgggatgactttgttgggcgtcgaggactcgtcccagatatggaaatgtacaacacaatgatcaagctgcagggcagtctcgggcatgctgagctgatagtgggttatctcgacgacatgatctccaatggagtcttccctgataccaacacatacaatgtggtcctccagcttttgttgaagggaaagaagcaccgagaggcagcggcaatatttagcgagatggtcaagaacgaatgttggccaaacgagggaaattgttcacttgcacttcgcatgtttttggatacacactattgggagactgggatcaaagtctggtgctgcatggtggagaatggcttgccacctttacaggagtgtgggaacatgcttgtagcaaagctgaaggatgacaggctacctgaggcatgcaaatatgcagaagacatgattgatcggggtatcaagttgagttcagcgacactgtccaagctgaagcagcgcctgcagaggattaagaaaggagagatccatgatcacctgcttgcaaaatggaaggcacattagtttgttgtgctcccctcgtatgggtaacctggtgcgatctcagtgttgacaatgaggttgagccttttatcactctgcaacgtttcaaacaacagttggaagtctctttctagtttctacattgaaattatcatattaatcagctggagcatttgggtctcaaggagtgagctggaacatcttccaagaaattctaccgtctgtatcaaatggctaagcctttttcaagaaagagtttgcccaggttatccatagagcatagaagaaatatttccttgaagaatgactagagcgtcagttgtggtctttttttaatatcttttgtgtcctttttttgtttcatgaattttgttgcttgcagctgtctggctgcaatttaggtagctgttccttttatgtatttgcataattatcaatgcaacattctaggcgtaaaagtgcattctc

SEQ ID NO: 37769 - protein, 281 aa, Zea mays subsp. mays
  peptide (1)..(281): Ceres Seq. ID no. 12367755
  misc_feature (57)..(277): NCBI GI NO: 14488357 NR Description: unknown protein
  misc_feature (57)..(270): NCBI GI NO: 15223926 NR Description: hypothetical protein; protein id: At1g77360.1
  misc_feature (56)..(277): NCBI GI NO: 15223927 NR Description: hypothetical protein; protein id: At1g71060.1
  misc_feature (65)..(264): NCBI GI NO: 21686921 NR Description: putative reverse transcriptase
  misc_feature (58)..(269): NCBI GI NO: 15228825 NR Description: hypothetical protein; protein id: At3g22670.1
  misc_feature (39)..(205): NCBI GI NO: 15228825 NR Description: hypothetical protein; protein id: At3g22670.1
  misc_feature (60)..(279): NCBI GI NO: 11357982 NR Description: hypothetical protein T12C14
  misc_feature (56)..(279): NCBI GI NO: 15228767 NR Description: putative protein; protein id: At3g62470.1
  misc_feature (61)..(270): NCBI GI NO: 15237345 NR Description: salt-inducible protein-like; protein id:At5g16420
  misc_feature (57)..(258): NCBI GI NO: 15242557 NR Description: putative protein; protein id: At5g02860.1
MPTPTPSSSRAARPPPICGLRARCSTKWCRPLDFILTTCLPMTPSSLRLFQVTPPRRYREAMEYLNVLSRHGCSPGEKFFRAALAAHLEARQLRGAMNLWDDFVGRRGLVPDMEMYNTMIKLQGSLGHAELIVGYLDDMISNGVFPDTNTYNVVLQLLLKGKKHREAAAIFSEMVKNECWPNEGNCSLALRMFLDTHYWETGIKVWCCMVENGLPPLQECGNMLVAKLKDDRLPEACKYAEDMIDRGIKLSSATLSKLKQRLQRIKKGEIHDHLLAKWKAH

SEQ ID NO: 37770 - protein, 240 aa, Zea mays subsp. mays
  peptide (1)..(240): Ceres Seq. ID no. 12367756
  misc_feature (16)..(236): NCBI GI NO: 14488357 NR Description: unknown protein
  misc_feature (16)..(229): NCBI GI NO: 15223926 NR Description: hypothetical protein; protein id: At1g77360.1
  misc_feature (15)..(236): NCBI GI NO: 15223927 NR Description: hypothetical protein; protein id: At1g71060.1
  misc_feature (24)..(223): NCBI GI NO: 21686921 NR Description: putative reverse transcriptase
  misc_feature (17)..(228): NCBI GI NO: 15228825 NR Description: hypothetical protein; protein id: At3g22670.1
  misc_feature (1)..(164): NCBI GI NO: 15228825 NR Description: hypothetical protein; protein id: At3g22670.1
  misc_feature (19)..(238): NCBI GI NO: 11357982 NR Description: hypothetical protein T12C14
  misc_feature (15)..(238): NCBI GI NO: 15228767 NR Description: putative protein; protein id: At3g62470.1
  misc_feature (20)..(229): NCBI GI NO: 15237345 NR Description: salt-inducible protein-like; protein id:At5g16420
  misc_feature (16)..(217): NCBI GI NO: 15242557 NR Description: putative protein; protein id: At5g02860.1
MTPSSLRLFQVTPPRRYREAMEYLNVLSRHGCSPGEKFFRAALAAHLEARQLRGAMNLWDDFVGRRGLVPDMEMYNTMIKLQGSLGHAELIVGYLDDMISNGVFPDTNTYNVVLQLLLKGKKHREAAAIFSEMVKNECWPNEGNCSLALRMFLDTHYWETGIKVWCCMVENGLPPLQECGNMLVAKLKDDRLPEACKYAEDMIDRGIKLSSATLSKLKQRLQRIKKGEIHDHLLAKWKAH

SEQ ID NO: 37771 - protein, 220 aa, Zea mays subsp. mays
  peptide (1)..(220): Ceres Seq. ID no. 12367757
  misc_feature (1)..(216): NCBI GI NO: 14488357 NR Description: unknown protein
  misc_feature (1)..(209): NCBI GI NO: 15223926 NR Description: hypothetical protein; protein id: At1g77360.1
  misc_feature (1)..(216): NCBI GI NO: 15223927 NR Description: hypothetical protein; protein id: At1g71060.1
  misc_feature (4)..(203): NCBI GI NO: 21686921 NR Description: putative reverse transcriptase
  misc_feature (1)..(208): NCBI GI NO: 15228825 NR Description: hypothetical protein; protein id: At3g22670.1
  misc_feature (1)..(144): NCBI GI NO: 15228825 NR Description: hypothetical protein; protein id: At3g22670.1
  misc_feature (1)..(218): NCBI GI NO: 11357982 NR Description: hypothetical protein T12C14
  misc_feature (1)..(218): NCBI GI NO: 15228767 NR Description: putative protein; protein id: At3g62470.1
  misc_feature (1)..(209): NCBI GI NO: 15237345 NR Description: salt-inducible protein-like; protein id:At5g16420
  misc_feature (1)..(197): NCBI GI NO: 15242557 NR Description: putative protein; protein id: At5g02860.1
MEYLNVLSRHGCSPGEKFFRAALAAHLEARQLRGAMNLWDDFVGRRGLVPDMEMYNTMIKLQGSLGHAELIVGYLDDMISNGVFPDTNTYNVVLQLLLKGKKHREAAAIFSEMVKNECWPNEGNCSLALRMFLDTHYWETGIKVWCCMVENGLPPLQECGNMLVAKLKDDRLPEACKYAEDMIDRGIKLSSATLSKLKQRLQRIKKGEIHDHLLAKWKAH

SEQ ID NO: 37772 - DNA, 1208 bp, Zea mays subsp. mays
  misc_feature (1)..(1208): Ceres Seq. ID no. 12373055
atcagactaaacaagacctcggtcctcggcttgacctgttgctgttggccatacctcctctctcgcctccggtcagatcagattagcctccatggccgccgatcgccgcttcaagatctttgcagccgccgatggcttcggccagccactcaaggacgccgtcgtcgcttatctccgcgcccaccccgccgtcgccgaggtcgttgacctcggcgtcgacaagtactacgccgccgccgcagccgtcgcccgacacgtctcctctcccgactcggagcccgacgctcccgagttccgcggcgtggtcgtctgcggcaccggcgccggcgtctgcatcttcgccaacaagtacccgcgcgtctacgccacccactgcgcttcccccgccgacgccgtcaacacacgctccatcaacgcctgcaacgtcctcgctctctccggaatcgccacgcagcccgacgccgcggccgccatagccgattcctggctcgccacgcccttccgcgccccttgccccgcctccggcgacgcgccctggccggaggacatccaggggttcttcgacaccgcgccagacgagatggccgccatcccggaggcggagggtgccccggactcggtctgcgccatctgctgtctcaggaacgggatggagttcgagccggtggggattatgcctggcggcgagatgcggatcgtgcgggagagccccacctcggcgtacgtccgcttcaaggctggcagtgtggagccagcgcaccaccacacctttggccacgacctggtggtcatcaagggcaagaagaaggtttggaacctcaccaagaaggaaagctacgacctggtggacggagattttctcttcacacctgccggggatgtgcacagggtcaagtactttgaggacacagagttcttcatccgttgggatggccactgggacatctttctcgacgaggatctcgacactgcacgcagtgccattgacgcggagcttgcagctgccagcaagtgagatcatgccatctatgtgcagtgatggcaacgcttctgaaggtgttatgctcacatatcctcatttgggattgtgattgatggtcttgcttccataatgttagttattcgaactctgtgtatgatcctcatcgtcctgtcttgttattttgtggaattatggttattgacaacgatgatggtacaatttggtt

SEQ ID NO: 37773 - protein, 307 aa, Zea mays subsp. mays
  peptide (1)..(307): Ceres Seq. ID no. 12373056
  misc_feature (70)..(147): Pfam Name: Pfam Description:  Ribose/Galactose Isomerase
  misc_feature (1)..(306): NCBI GI NO: 34913680 NR Description: putative DNA-damage-repair/toleration proteinDRT102
  misc_feature (1)..(301): NCBI GI NO: 18397039 NR Description: DNA-damage-repair/toleration protein DRT102
  misc_feature (82)..(301): NCBI GI NO: 1169199 NR Description: DNA-damage-repair/toleration protein DRT102
MAADRRFKIFAAADGFGQPLKDAVVAYLRAHPAVAEVVDLGVDKYYAAAAAVARHVSSPDSEPDAPEFRGVVVCGTGAGVCIFANKYPRVYATHCASPADAVNTRSINACNVLALSGIATQPDAAAAIADSWLATPFRAPCPASGDAPWPEDIQGFFDTAPDEMAAIPEAEGAPDSVCAICCLRNGMEFEPVGIMPGGEMRIVRESPTSAYVRFKAGSVEPAHHHTFGHDLVVIKGKKKVWNLTKKESYDLVDGDFLFTPAGDVHRVKYFEDTEFFIRWDGHWDIFLDEDLDTARSAIDAELAAASK

SEQ ID NO: 37774 - DNA, 1479 bp, Zea mays subsp. mays
  misc_feature (1)..(1479): Ceres Seq. ID no. 12369538
actttgaaatttgtccgtccatacgaactctacgactacgagcctactactctactactgcctacggaggagagagagagatttcatgagttcgtgttcagttagtcttggtgcaccagttccacccaccaccggatataggtcatgccccttataagctcgacacaggggcaggcacaccgcacagcaccgcaccgcactgcatcggtcgccagccgagccgagccgagccctgctctctcctccagctccccaaatcacactccgccatggccggcacgtgcgctcacgtcgagttcctccgcgcgcagccggcgtgggcgctggcgctggccgcggtgggcctgctcgtggccgtgcgcgccgccgcccgcttcgcgctctgggtctacgccgcgttcctccgcccgggcaagcccctgcgccgccgctacggcgcctgggccgtcgtgacgggcgccaccgacggcatcggccgcgccgtcgccttccgcctcgccgcgtccgggctcgggctcgtcctcgtcggccgcaaccaggagaagctggccgccgtcgccgccgagatcaaggccaggcaccccaaggtccccgaggtgcggactttcgtgctcgacttcgccggcgaggggctggccgccgccgtcgaggcgctcaaggactccatccggggcctcgacgtcggcgtgctcgtcaacaacgccggcgtgtcctacccgtacgcgcgctacttccacgaggtggacgaggagctgatgcgcaccctcatccgggtcaacgtcgagggcgtcacgcgtgtcacgcacgccgtgctgccggccatggtcgagaggaagcgcggcgccattgtcaacatcggctccggcgccgcctccgtcgtgccttctgatccgctctactccgtctacgccgctaccaaagcgtatgttgaccaattctcaagatgcctctatgttgagtacaagagcaagggtattgatgtgcaatgccaggtgcccttatacgtggcgacaaagatggcatccatcaggaagtcttccttcatggtcccatctgctgacacctatgctcgtgctgccgttcgtcacattggatacgagcctaggtgcacaccatactggccacactctgtcgtgtggttcttgatctccattcttcccgagtcccttatcgacagcgtgcgcctgggcatgtgcattaagatccgcaagaaggggctggccaaggacgccaagaagaaggcgctgtgattgatgtttcagaatgcatgttcagattcgcacatttcctcatcacctgtagtagacacgtgccttgctgtagtcactttattagctaccattacctcctgagtctgttaagaatcgagaatgtcattgttccatccgcggttatgatgatgaaaaatacgattcttcaattcaaaatgtaacactaatacgagtaatgatgcatgaaattaacttgaagaagttgtgc

SEQ ID NO: 37775 - protein, 326 aa, Zea mays subsp. mays
  peptide (1)..(326): Ceres Seq. ID no. 12369539
  misc_feature (1)..(326): NCBI GI NO: 7489808 NR Description: probable beta-keto acyl reductase - maize
  misc_feature (1)..(325): NCBI GI NO: 7489413 NR Description: probable b-keto acyl reductase (EC 1
  misc_feature (8)..(324): NCBI GI NO: 38345332 NR Description: OSJNBa0081L15.5
  misc_feature (10)..(324): NCBI GI NO: 28565601 NR Description: putative 3-ketoacyl-CoA reductase 2
  misc_feature (10)..(324): NCBI GI NO: 28565597 NR Description: putative 3-ketoacyl-CoA reductase 1
  misc_feature (10)..(324): NCBI GI NO: 18408847 NR Description: Expressed protein; protein id: At1g67730
  misc_feature (33)..(324): NCBI GI NO: 11072027 NR Description: F12A21.14 [Arabidopsis thaliana]
  misc_feature (99)..(326): NCBI GI NO: 2586123 NR Description: b-keto acyl reductase [Allium porrum]
  misc_feature (75)..(324): NCBI GI NO: 2586125 NR Description: b-keto acyl reductase [Arabidopsis thaliana]
  misc_feature (1)..(318): NCBI GI NO: 15221751 NR Description: putative b-keto acyl reductase
MAGTCAHVEFLRAQPAWALALAAVGLLVAVRAAARFALWVYAAFLRPGKPLRRRYGAWAVVTGATDGIGRAVAFRLAASGLGLVLVGRNQEKLAAVAAEIKARHPKVPEVRTFVLDFAGEGLAAAVEALKDSIRGLDVGVLVNNAGVSYPYARYFHEVDEELMRTLIRVNVEGVTRVTHAVLPAMVERKRGAIVNIGSGAASVVPSDPLYSVYAATKAYVDQFSRCLYVEYKSKGIDVQCQVPLYVATKMASIRKSSFMVPSADTYARAAVRHIGYEPRCTPYWPHSVVWFLISILPESLIDSVRLGMCIKIRKKGLAKDAKKKAL

SEQ ID NO: 37776 - protein, 164 aa, Zea mays subsp. mays
  peptide (1)..(164): Ceres Seq. ID no. 12369540
  misc_feature (1)..(164): NCBI GI NO: 7489808 NR Description: probable beta-keto acyl reductase - maize
  misc_feature (1)..(163): NCBI GI NO: 7489413 NR Description: probable b-keto acyl reductase (EC 1
  misc_feature (1)..(162): NCBI GI NO: 38345332 NR Description: OSJNBa0081L15.5
  misc_feature (1)..(162): NCBI GI NO: 28565601 NR Description: putative 3-ketoacyl-CoA reductase 2
  misc_feature (1)..(162): NCBI GI NO: 28565597 NR Description: putative 3-ketoacyl-CoA reductase 1
  misc_feature (1)..(162): NCBI GI NO: 18408847 NR Description: Expressed protein; protein id: At1g67730
  misc_feature (1)..(162): NCBI GI NO: 11072027 NR Description: F12A21.14 [Arabidopsis thaliana]
  misc_feature (1)..(164): NCBI GI NO: 2586123 NR Description: b-keto acyl reductase [Allium porrum]
  misc_feature (1)..(162): NCBI GI NO: 2586125 NR Description: b-keto acyl reductase [Arabidopsis thaliana]
  misc_feature (1)..(156): NCBI GI NO: 15221751 NR Description: putative b-keto acyl reductase
MRTLIRVNVEGVTRVTHAVLPAMVERKRGAIVNIGSGAASVVPSDPLYSVYAATKAYVDQFSRCLYVEYKSKGIDVQCQVPLYVATKMASIRKSSFMVPSADTYARAAVRHIGYEPRCTPYWPHSVVWFLISILPESLIDSVRLGMCIKIRKKGLAKDAKKKAL

SEQ ID NO: 37777 - DNA, 1548 bp, Zea mays subsp. mays
  misc_feature (1)..(1548): Ceres Seq. ID no. 12353157
cttcggccacacaacccaggtgttcgaccatgtcctcgccggcaccatcatcgccctccaggtccagccacggctcacgaggctccccgcgcatcgtcctcttcccgagcgctggcatgggccacctggtcccgttcacccgcctcgccgtcgcgctttcccggccacggttgcgagatctccctcctgacggcgctgcccacagtttcgtccgcggagtcccgccacatcgccgcgctctacgctgcgttccccgccatccggcagctggacctccgctttgcccctttcgacgcgtcgtccgaattccccggcgccgatccattctacctccgctacgaggccctgcgccgctgcgcgccctcgctcctcggcccgctcctcgctggcgcaggcgcgtcggctctcgtcgtggacatggcgctggcctccgtggccatacccgtagccagggagctccacgtcccgtgcttcgtcttcttcaccgcgtcggccacgatgctctcattcaaagcctactttcccacctacctcgacgacgtcggtgccggacatggcgttggcgacgttgacgtgcccggcgtgtaccgcatcccaagttcgtccgtcccacaggcgctgcatgatcccgacaacatcttcacccggcagttcgtcgcgaatggacgggcgctcgcgacagccgacggcctcctggtcaacgccttccacgccatggagccggaggccgtcgaggcactacagggtcgcttcgtgctctccgttttgccgcccgtgttcgccgtggggccgcttatgccggtgaacgacctccgggagacaggggaggcagcgcaaaaacaggggaactatagggcgtggctggacgagcagccgccgcggtctgtggtgtatgtcagctttggcagccgcaaggctctccccaaggaccagatcaaggagctcgccgccggactggaagcgtgtggccaccgcttcttgtgggttgtgaagggcgctgtcgtggacagggatgacgctggggagctcagcgaactgcttggcgaggccttcctgcggcgcgtgcaaggccgtggcctggtgaccaagtcatgggtcgagcaagaggaggtgctcaggcacccggccgtggcgctgttcgtcagccactgcggatggaactcggtgacggaggcagtgagcagcggcgtgccagtgctggcgtggccgaggttcgccgaccagcgagtgaacgcccgcgtggtggtccgttgcgggctcggtgtgtgggctgagcagtggagctgggagggggaagaggcgctggtgagagcggaggagatcgcagcgctggtgatggaggctatgggagacgacgcgatggcagtgaaagcggcgaacgtccgcgaggctgcgtcgagagccgtggtggacggcggcacgagctaccgatgcctggcggcgttcgtgcgtcgttgcaccgcgtgattgcgtgaagttatataaaaaaaaaacttatataacttcacgttcgtgtcgatccgcttcataaacttttaaaatgtgcct

SEQ ID NO: 37778 - protein, 488 aa, Zea mays subsp. mays
  peptide (1)..(488): Ceres Seq. ID no. 12353158
  misc_feature (52)..(483): Pfam Name: Pfam Description:  UDP-glucoronosyl and UDP-glucosyl transferase
  misc_feature (52)..(483): NCBI GI NO: 34910218 NR Description: putative flavonol glucosyltransferase
  misc_feature (53)..(483): NCBI GI NO: 22535568 NR Description: putative glucosyltransferase
  misc_feature (56)..(485): NCBI GI NO: 34908644 NR Description: putative flavonol 3-O-glucosyltransferase
  misc_feature (53)..(485): NCBI GI NO: 34910228 NR Description: putative flavonol glucosyltransferase
  misc_feature (29)..(479): NCBI GI NO: 34394676 NR Description: putative glucosyltransferase
  misc_feature (57)..(483): NCBI GI NO: 34910222 NR Description: putative flavonol glucosyltransferase
  misc_feature (55)..(479): NCBI GI NO: 34394680 NR Description: putative glucosyltransferase
  misc_feature (53)..(483): NCBI GI NO: 34910204 NR Description: putative flavonol glucosyltransferase
  misc_feature (51)..(484): NCBI GI NO: 18401158 NR Description: putative glucosyltransferase
  misc_feature (51)..(484): NCBI GI NO: 21593785 NR Description: putative glucosyltransferase
LRPHNPGVRPCPRRHHHRPPGPATAHEAPRASSSSRALAWATWSRSPASPSRFPGHGCEISLLTALPTVSSAESRHIAALYAAFPAIRQLDLRFAPFDASSEFPGADPFYLRYEALRRCAPSLLGPLLAGAGASALVVDMALASVAIPVARELHVPCFVFFTASATMLSFKAYFPTYLDDVGAGHGVGDVDVPGVYRIPSSSVPQALHDPDNIFTRQFVANGRALATADGLLVNAFHAMEPEAVEALQGRFVLSVLPPVFAVGPLMPVNDLRETGEAAQKQGNYRAWLDEQPPRSVVYVSFGSRKALPKDQIKELAAGLEACGHRFLWVVKGAVVDRDDAGELSELLGEAFLRRVQGRGLVTKSWVEQEEVLRHPAVALFVSHCGWNSVTEAVSSGVPVLAWPRFADQRVNARVVVRCGLGVWAEQWSWEGEEALVRAEEIAALVMEAMGDDAMAVKAANVREAASRAVVDGGTSYRCLAAFVRRCTA

SEQ ID NO: 37779 - protein, 349 aa, Zea mays subsp. mays
  peptide (1)..(349): Ceres Seq. ID no. 12353159
  misc_feature (1)..(344): Pfam Name: Pfam Description:  UDP-glucoronosyl and UDP-glucosyl transferase
  misc_feature (1)..(344): NCBI GI NO: 34910218 NR Description: putative flavonol glucosyltransferase
  misc_feature (1)..(344): NCBI GI NO: 22535568 NR Description: putative glucosyltransferase
  misc_feature (1)..(346): NCBI GI NO: 34908644 NR Description: putative flavonol 3-O-glucosyltransferase
  misc_feature (1)..(346): NCBI GI NO: 34910228 NR Description: putative flavonol glucosyltransferase
  misc_feature (1)..(340): NCBI GI NO: 34394676 NR Description: putative glucosyltransferase
  misc_feature (1)..(344): NCBI GI NO: 34910222 NR Description: putative flavonol glucosyltransferase
  misc_feature (1)..(340): NCBI GI NO: 34394680 NR Description: putative glucosyltransferase
  misc_feature (1)..(344): NCBI GI NO: 34910204 NR Description: putative flavonol glucosyltransferase
  misc_feature (1)..(345): NCBI GI NO: 18401158 NR Description: putative glucosyltransferase
  misc_feature (1)..(345): NCBI GI NO: 21593785 NR Description: putative glucosyltransferase
MALASVAIPVARELHVPCFVFFTASATMLSFKAYFPTYLDDVGAGHGVGDVDVPGVYRIPSSSVPQALHDPDNIFTRQFVANGRALATADGLLVNAFHAMEPEAVEALQGRFVLSVLPPVFAVGPLMPVNDLRETGEAAQKQGNYRAWLDEQPPRSVVYVSFGSRKALPKDQIKELAAGLEACGHRFLWVVKGAVVDRDDAGELSELLGEAFLRRVQGRGLVTKSWVEQEEVLRHPAVALFVSHCGWNSVTEAVSSGVPVLAWPRFADQRVNARVVVRCGLGVWAEQWSWEGEEALVRAEEIAALVMEAMGDDAMAVKAANVREAASRAVVDGGTSYRCLAAFVRRCTA

SEQ ID NO: 37780 - protein, 322 aa, Zea mays subsp. mays
  peptide (1)..(322): Ceres Seq. ID no. 12353160
  misc_feature (1)..(317): Pfam Name: Pfam Description:  UDP-glucoronosyl and UDP-glucosyl transferase
  misc_feature (1)..(317): NCBI GI NO: 34910218 NR Description: putative flavonol glucosyltransferase
  misc_feature (1)..(317): NCBI GI NO: 22535568 NR Description: putative glucosyltransferase
  misc_feature (1)..(319): NCBI GI NO: 34908644 NR Description: putative flavonol 3-O-glucosyltransferase
  misc_feature (1)..(319): NCBI GI NO: 34910228 NR Description: putative flavonol glucosyltransferase
  misc_feature (1)..(313): NCBI GI NO: 34394676 NR Description: putative glucosyltransferase
  misc_feature (1)..(317): NCBI GI NO: 34910222 NR Description: putative flavonol glucosyltransferase
  misc_feature (1)..(313): NCBI GI NO: 34394680 NR Description: putative glucosyltransferase
  misc_feature (1)..(317): NCBI GI NO: 34910204 NR Description: putative flavonol glucosyltransferase
  misc_feature (1)..(318): NCBI GI NO: 18401158 NR Description: putative glucosyltransferase
  misc_feature (1)..(318): NCBI GI NO: 21593785 NR Description: putative glucosyltransferase
MLSFKAYFPTYLDDVGAGHGVGDVDVPGVYRIPSSSVPQALHDPDNIFTRQFVANGRALATADGLLVNAFHAMEPEAVEALQGRFVLSVLPPVFAVGPLMPVNDLRETGEAAQKQGNYRAWLDEQPPRSVVYVSFGSRKALPKDQIKELAAGLEACGHRFLWVVKGAVVDRDDAGELSELLGEAFLRRVQGRGLVTKSWVEQEEVLRHPAVALFVSHCGWNSVTEAVSSGVPVLAWPRFADQRVNARVVVRCGLGVWAEQWSWEGEEALVRAEEIAALVMEAMGDDAMAVKAANVREAASRAVVDGGTSYRCLAAFVRRCTA

SEQ ID NO: 37781 - DNA, 1993 bp, Zea mays subsp. mays
  misc_feature (1)..(1993): Ceres Seq. ID no. 13492718
agtgcgcgcctcgtgctcgtgctcccccgagcagactagaccagcgcgctagcgccagcaaggccaaggcgagggaggggcgatgctcgcccgatctgctacagccgccgccgccgccgggatctgactgtgattaaggatgtcggcgtcgcggagcgggaggatcaggcgggccgggagcgtggcgctcggggactttctgcggcgggaggcgtcggcggagcgggccgcgttgggaggcggcgagcggccctcggtcgcggcggggcadgcctgccgggcgaagaagggcgaggacttcgcgctgctcaagcccgcctgcgagcgacgccccggcgcgccgtccacctccttctccgccttcgccctgttcgatgggcataacgggagcgccgcwkcggtgtacgccgaggagcacctcctcggcaacgtgctcggctgcgtcccggccgatctgagcagggacgactggctcgccgcgctcctaagggcgctcgtcgcggggttcgtcaagaccgacaaggattttcaaactaaagctcattcctcggggacaaccgtgacacttgccataattgatggctccgttgtaactgttgcgtccgttggtgattcacgttgtgtccttgatgctgcgggatccatctactatttgtcggctgaccaccgctttgacgctaatgaagaggaggttggacgtgtaaccgaatgcggaggtgaagttggaaggctaaatgttgtcggtggtgctgagattggtccccttagatgttggccaggtggtctatgcctctcaagatcgattggtgaccaggacgtaggtgaatttatcattccggttccttatgtgaagcaaattaagctgtctaacgctggaggccgtcttattatttcaagtgacggtgtttgggatgctttgactgcggaaatggcttttagatgtgcacgggggcttcctcctgaggctgcagccgagcaaattgttaaagaagcagttgaatcaaaaggattgagagatgatacaacttgcattgtcattgacataatcccaccagagaaacaaaaatgcactatagaatctccaaaaacgccaggaaaaggccttgtacttctaaaaaatttcttcttaaggaaaacggcatctggttcattgtctctcgctgacaaggataattatcccgagccagatttcgtggaggaggtctttgaggatggatgcccatccctttcgaggaggcttaattctgaatatcctgtccgagatatgttcaagctttttgcatgtgcaatttgtcaaattgacttggagtctggccaaggcatatccatacacgagggttcgtcaaaggcagggaagctgcgtccctgggatggccctttcctttgccacagttgccaggaaaagaaagaggcgatggaggggaagcgtcactcgcgagactcctcgtcaagaaatagcgggtcaagtgaatagtgactaaagccaggagtcatcttgaggcgaccacctagcgtgtgacgagctaactcttgttgcagttgtcattgtagcagcacttcctctatacatggattaccattggacatagacagatgttggaacttggatggtgccatgcgtacatatgttggagctaatgcggtaatggaccgtcggccaaattcaatcgcctctaggtaccacaccggcgacggcgtcttcggcaaggcttgtagcagtaactcatgcaggtagtgatgacaagggactgttagcgaagaatgtcgacagtggccaatggtcatgtaaattgttcatcgtatagagaggtgcaagtgacaaatagccacggttttgtaattctgagctaggattagctattgagaccctgtaattcgtctgggcagacctcaaactagaggtcaacaacgtagcctggcctattgtagaatgtatcttgctctacagtcttcatgatccaacgctgtaattaggctgttgccagtgcttccc

SEQ ID NO: 37782 - protein, 444 aa, Zea mays subsp. mays
  peptide (1)..(444): Ceres Seq. ID no. 15222889
  misc_feature (47)..(295): Pfam Name: Pfam Description:  Protein phosphatase 2C
  misc_feature (1)..(444): NCBI GI NO: 38344839 NR Description: OSJNBa0064H22.20
  misc_feature (14)..(440): NCBI GI NO: 18401703 NR Description: protein phosphatase 2C (PP2C) -related
  misc_feature (14)..(440): NCBI GI NO: 15292869 NR Description: unknown protein [Arabidopsis thaliana]
  misc_feature (7)..(431): NCBI GI NO: 14029015 NR Description: Unknown protein [Oryza sativa]
  misc_feature (3)..(432): NCBI GI NO: 15221404 NR Description: protein phosphatase 2C (PP2C) -related
  misc_feature (33)..(438): NCBI GI NO: 34394411 NR Description: protein phosphatase 2C-like
  misc_feature (1)..(435): NCBI GI NO: 15217454 NR Description: protein phosphatase 2C (PP2C) -related
  misc_feature (37)..(432): NCBI GI NO: 34914644 NR Description: OSJNBa0054L14.21
  misc_feature (33)..(366): NCBI GI NO: 34898168 NR Description: protein phosphatase 2C-like
  misc_feature (1)..(365): NCBI GI NO: 16930415 NR Description: At1g09160/T12M4_13 [Arabidopsis thaliana]
  misc_feature (44)..(44): Xaa is any aa, unknown or other
  misc_feature (86)..(86): Xaa is any aa, unknown or other
  misc_feature (87)..(87): Xaa is any aa, unknown or other
MSASRSGRIRRAGSVALGDFLRREASAERAALGGGERPSVAAGXACRAKKGEDFALLKPACERRPGAPSTSFSAFALFDGHNGSAXXVYAEEHLLGNVLGCVPADLSRDDWLAALLRALVAGFVKTDKDFQTKAHSSGTTVTLAIIDGSVVTVASVGDSRCVLDAAGSIYYLSADHRFDANEEEVGRVTECGGEVGRLNVVGGAEIGPLRCWPGGLCLSRSIGDQDVGEFIIPVPYVKQIKLSNAGGRLIISSDGVWDALTAEMAFRCARGLPPEAAAEQIVKEAVESKGLRDDTTCIVIDIIPPEKQKCTIESPKTPGKGLVLLKNFFLRKTASGSLSLADKDNYPEPDFVEEVFEDGCPSLSRRLNSEYPVRDMFKLFACAICQIDLESGQGISIHEGSSKAGKLRPWDGPFLCHSCQEKKEAMEGKRHSRDSSSRNSGSSE

SEQ ID NO: 37783 - DNA, 1239 bp, Zea mays subsp. mays
  misc_feature (1)..(1239): Ceres Seq. ID no. 12354519
gtgacattgttgtgcgccttccactacagtaatggaagcaggcgccggggaagcagcaccaagcgcgccgcgcagactgaccctgccgtggaaggtgcggctcctgctcctctgcctcgatgtcgtcgccggtctctcgatgcgtcgcgacggcaccatcaaccgctccatcttcaacctcttcgaccttcgtgccaccgccagcacgcgcccggacaggcagggcgtccggtccgccgacgtggacgcgtcgcgcggcctgtgggcgcgcgtgttctggccgtcgccggagtcgtccgcggccccgctcccagtcgtggtatacttccacggcggcgccttcacgctgctctctgcggcctcgtacgtctacgacgccatgtgccgccggttctgccgcgagctgggcgccgtcgtcgtgtccgtcaactaccgcctcgcacccgagcaccgctggcccgccgcgtacgaggacggcgtcgccatgcttcgatacctcgcctccgcgggtctccccgacagcgtcgacgtccccgtggacctctcccgctgcttcctcgccggggacagcgccggcgccaacatcgcccaccacgtggcgcagcgctggacgacggcctcctccccgccgcggtccatccccgtccacctcgctggcgccatcctggtgcagccgtactttggcggcgaggagcggacggaagctgaggtcaggctggatgggaacgtgccggtggtgaccgtgcgtggctcggactggatgtggcgggcgttcctgccggaaggcgccgatcggaaccactccgccgcgcacgtgacagacgacaacgccgacctggcggacggctttccgccggtgatggtggtgatcggtggcttcgacccgctgcaggagtggcagaggcggtacgccgacgtgctgcggaggagggggaaggaggtaagggtggtggagttcccggacgccattcacactttcttcctcttccccgagctcaccgatcatggtacgctcgtggaggcgatgaaggcgttcatacgcgagcaacgcatctgatctaattctgcctcacggtcacggatcaccaacctacgtggacctacatggtccgtgcaaataattttgtttcccatgcacgtaatggtccctacatggtccgtgcaaataatttctctataaaccactattcaagtctcccatatatttattcagttcatcgagcatctcttctagatctt

SEQ ID NO: 37784 - protein, 341 aa, Zea mays subsp. mays
  peptide (1)..(341): Ceres Seq. ID no. 12354520
  misc_feature (85)..(138): Pfam Name: Pfam Description:  Carboxylesterase
  misc_feature (13)..(336): NCBI GI NO: 34904770 NR Description: similar to carboxylesterase
  misc_feature (14)..(338): NCBI GI NO: 34904772 NR Description: similar to carboxylesterase
  misc_feature (3)..(338): NCBI GI NO: 34904760 NR Description: similar to carboxylesterase
  misc_feature (3)..(340): NCBI GI NO: 34393714 NR Description: putative esterase
  misc_feature (3)..(340): NCBI GI NO: 34904774 NR Description: similar to carboxylesterase
  misc_feature (35)..(340): NCBI GI NO: 34904758 NR Description: hypothetical protein~predicted by GeneMark
  misc_feature (8)..(341): NCBI GI NO: 15237783 NR Description: putative protein; protein id: At5g23530
  misc_feature (8)..(341): NCBI GI NO: 21618039 NR Description: unknown [Arabidopsis thaliana]
  misc_feature (15)..(339): NCBI GI NO: 15240483 NR Description: putative protein; protein id: At5g27320
  misc_feature (3)..(336): NCBI GI NO: 15229371 NR Description: putative protein; protein id: At3g63010.1
MEAGAGEAAPSAPRRLTLPWKVRLLLLCLDVVAGLSMRRDGTINRSIFNLFDLRATASTRPDRQGVRSADVDASRGLWARVFWPSPESSAAPLPVVVYFHGGAFTLLSAASYVYDAMCRRFCRELGAVVVSVNYRLAPEHRWPAAYEDGVAMLRYLASAGLPDSVDVPVDLSRCFLAGDSAGANIAHHVAQRWTTASSPPRSIPVHLAGAILVQPYFGGEERTEAEVRLDGNVPVVTVRGSDWMWRAFLPEGADRNHSAAHVTDDNADLADGFPPVMVVIGGFDPLQEWQRRYADVLRRRGKEVRVVEFPDAIHTFFLFPELTDHGTLVEAMKAFIREQRI

SEQ ID NO: 37785 - protein, 305 aa, Zea mays subsp. mays
  peptide (1)..(305): Ceres Seq. ID no. 12354521
  misc_feature (49)..(102): Pfam Name: Pfam Description:  Carboxylesterase
  misc_feature (1)..(300): NCBI GI NO: 34904770 NR Description: similar to carboxylesterase
  misc_feature (1)..(302): NCBI GI NO: 34904772 NR Description: similar to carboxylesterase
  misc_feature (1)..(302): NCBI GI NO: 34904760 NR Description: similar to carboxylesterase
  misc_feature (1)..(304): NCBI GI NO: 34393714 NR Description: putative esterase
  misc_feature (1)..(304): NCBI GI NO: 34904774 NR Description: similar to carboxylesterase
  misc_feature (1)..(304): NCBI GI NO: 34904758 NR Description: hypothetical protein~predicted by GeneMark
  misc_feature (1)..(305): NCBI GI NO: 15237783 NR Description: putative protein; protein id: At5g23530
  misc_feature (1)..(305): NCBI GI NO: 21618039 NR Description: unknown [Arabidopsis thaliana]
  misc_feature (1)..(303): NCBI GI NO: 15240483 NR Description: putative protein; protein id: At5g27320
  misc_feature (1)..(300): NCBI GI NO: 15229371 NR Description: putative protein; protein id: At3g63010.1
MRRDGTINRSIFNLFDLRATASTRPDRQGVRSADVDASRGLWARVFWPSPESSAAPLPVVVYFHGGAFTLLSAASYVYDAMCRRFCRELGAVVVSVNYRLAPEHRWPAAYEDGVAMLRYLASAGLPDSVDVPVDLSRCFLAGDSAGANIAHHVAQRWTTASSPPRSIPVHLAGAILVQPYFGGEERTEAEVRLDGNVPVVTVRGSDWMWRAFLPEGADRNHSAAHVTDDNADLADGFPPVMVVIGGFDPLQEWQRRYADVLRRRGKEVRVVEFPDAIHTFFLFPELTDHGTLVEAMKAFIREQRI

SEQ ID NO: 37786 - protein, 235 aa, Zea mays subsp. mays
  peptide (1)..(235): Ceres Seq. ID no. 12354522
VTLLCAFHYSNGSRRRGSSTKRAAQTDPAVEGAAPAPLPRCRRRSLDASRRHHQPLHLQPLRPSCHRQHAPGQAGRPVRRRGRVARPVGARVLAVAGVVRGPAPSRGILPRRRLHAALCGLVRLRRHVPPVLPRAGRRRRVRQLPPRTRAPLARRVRGRRRHASIPRLRGSPRQRRRPRGPLPLLPRRGQRRRQHRPPRGAALDDGLLPAAVHPRPPRWRHPGAAVLWRRGADGS

SEQ ID NO: 37787 - DNA, 529 bp, Zea mays subsp. mays
  misc_feature (1)..(529): Ceres Seq. ID no. 1555861
aaaccgaggccacaggccaccaccattccttccttgttccttccccagctccgcaggctgctcatcgccctccctccgcgcccccgatccagatccagatccaggggcttgtcatggcatccaaacgtatcctcaaggaattaaaggacttgcaaaaggaccctccaacatcatgcagtgcaggtcctgctggtgaggatatgttccactggcaggcaaccatcatgggtcctcctgatagtccatatgctggaggtgttttcttggtgaacattcatttcccgccagactaccccttcaagcctccaaaggtatcttttaagacgaaggtcttccatccaaacatcaatagtaatggaagcatatgtcttgacattcttaaggagcagtggagccctgctttgacaatctctaaggtgctgggacaatttagtactaactttactagtatatacactgttcatattatagctttaaatgacttgtgcacagtaaatgattagcttaaaatgcatgctgtgatgtttat

SEQ ID NO: 37788 - protein, 166 aa, Zea mays subsp. mays
  peptide (1)..(166): Ceres Seq. ID no. 1555862
  misc_feature (38)..(140): NCBI GI NO: 2668744 NR Description: ubiquitin conjugating enzyme [Zea mays]
  misc_feature (38)..(140): NCBI GI NO: 34909292 NR Description: ubiquitin conjugating enzyme
  misc_feature (38)..(148): NCBI GI NO: 20086317 NR Description: elicitor and UV light related transcription factor
  misc_feature (38)..(140): NCBI GI NO: 32488376 NR Description: OSJNBa0043A12.6
  misc_feature (38)..(140): NCBI GI NO: 30025160 NR Description: ubiquitin-conjugating enzyme [Hordeum vulgare]
  misc_feature (38)..(140): NCBI GI NO: 5762457 NR Description: ubiquitin-conjugating enzyme UBC2
  misc_feature (38)..(140): NCBI GI NO: 464981 NR Description: Ubiquitin-conjugating enzyme E2-17 kDa
  misc_feature (38)..(140): NCBI GI NO: 28569269 NR Description: ubiquitin-conjugating enzyme E2
  misc_feature (38)..(140): NCBI GI NO: 28569263 NR Description: ubiquitin-conjugating enzyme E2
  misc_feature (38)..(140): NCBI GI NO: 18398206 NR Description: E2, ubiquitin-conjugating enzyme 11
TEATGHHHSFLVPSPAPQAAHRPPSAPPIQIQIQGLVMASKRILKELKDLQKDPPTSCSAGPAGEDMFHWQATIMGPPDSPYAGGVFLVNIHFPPDYPFKPPKVSFKTKVFHPNINSNGSICLDILKEQWSPALTISKVLGQFSTNFTSIYTVHIIALNDLCTVND

SEQ ID NO: 37789 - protein, 129 aa, Zea mays subsp. mays
  peptide (1)..(129): Ceres Seq. ID no. 1555863
  misc_feature (1)..(103): NCBI GI NO: 2668744 NR Description: ubiquitin conjugating enzyme [Zea mays]
  misc_feature (1)..(103): NCBI GI NO: 34909292 NR Description: ubiquitin conjugating enzyme
  misc_feature (1)..(111): NCBI GI NO: 20086317 NR Description: elicitor and UV light related transcription factor
  misc_feature (1)..(103): NCBI GI NO: 32488376 NR Description: OSJNBa0043A12.6
  misc_feature (1)..(103): NCBI GI NO: 30025160 NR Description: ubiquitin-conjugating enzyme [Hordeum vulgare]
  misc_feature (1)..(103): NCBI GI NO: 5762457 NR Description: ubiquitin-conjugating enzyme UBC2
  misc_feature (1)..(103): NCBI GI NO: 464981 NR Description: Ubiquitin-conjugating enzyme E2-17 kDa
  misc_feature (1)..(103): NCBI GI NO: 18398206 NR Description: E2, ubiquitin-conjugating enzyme 11
  misc_feature (1)..(103): NCBI GI NO: 28569269 NR Description: ubiquitin-conjugating enzyme E2
  misc_feature (1)..(103): NCBI GI NO: 28569263 NR Description: ubiquitin-conjugating enzyme E2
MASKRILKELKDLQKDPPTSCSAGPAGEDMFHWQATIMGPPDSPYAGGVFLVNIHFPPDYPFKPPKVSFKTKVFHPNINSNGSICLDILKEQWSPALTISKVLGQFSTNFTSIYTVHIIALNDLCTVND

SEQ ID NO: 37790 - protein, 100 aa, Zea mays subsp. mays
  peptide (1)..(100): Ceres Seq. ID no. 1555864
  misc_feature (1)..(74): NCBI GI NO: 2668744 NR Description: ubiquitin conjugating enzyme [Zea mays]
  misc_feature (1)..(74): NCBI GI NO: 34909292 NR Description: ubiquitin conjugating enzyme
  misc_feature (1)..(82): NCBI GI NO: 20086317 NR Description: elicitor and UV light related transcription factor
  misc_feature (1)..(74): NCBI GI NO: 32488376 NR Description: OSJNBa0043A12.6
  misc_feature (1)..(74): NCBI GI NO: 30025160 NR Description: ubiquitin-conjugating enzyme [Hordeum vulgare]
  misc_feature (1)..(74): NCBI GI NO: 5762457 NR Description: ubiquitin-conjugating enzyme UBC2
  misc_feature (1)..(74): NCBI GI NO: 464981 NR Description: Ubiquitin-conjugating enzyme E2-17 kDa
  misc_feature (1)..(74): NCBI GI NO: 28569263 NR Description: ubiquitin-conjugating enzyme E2
  misc_feature (1)..(74): NCBI GI NO: 28569269 NR Description: ubiquitin-conjugating enzyme E2
  misc_feature (1)..(74): NCBI GI NO: 18398206 NR Description: E2, ubiquitin-conjugating enzyme 11
MFHWQATIMGPPDSPYAGGVFLVNIHFPPDYPFKPPKVSFKTKVFHPNINSNGSICLDILKEQWSPALTISKVLGQFSTNFTSIYTVHIIALNDLCTVND

SEQ ID NO: 37791 - DNA, 1400 bp, Zea mays subsp. mays
  misc_feature (1)..(1400): Ceres Seq. ID no. 12391337
  misc_feature (407)..(407): n is a, c, t, g, unknown, or other
  misc_feature (793)..(793): n is a, c, t, g, unknown, or other
  misc_feature (1244)..(1244): n is a, c, t, g, unknown, or other
  misc_feature (929)..(929): n is a, c, t, g, unknown, or other
  misc_feature (950)..(950): n is a, c, t, g, unknown, or other
  misc_feature (782)..(782): n is a, c, t, g, unknown, or other
  misc_feature (783)..(783): n is a, c, t, g, unknown, or other
  misc_feature (928)..(928): n is a, c, t, g, unknown, or other
  misc_feature (753)..(753): n is a, c, t, g, unknown, or other
gcacgagaccattacctagaacatcctaatcgaaaaatagtattcgacaggctcacaagtcacaattccagctcaggccaccagcaagcacatcgcaaaggagaacagaacagaacagagagccatggcggcggtcgccgtgagcggggggcactggaggaggctgcggacgctggggcgcggcgcgtcgggcgccgtggtgtcgctggcgtgggacgccgcgtcgggggagctggtcgcggtcaagtcggccggcgcgatcggcgcggcggcgctgaggcgggagcacgcggtgctggccgggctgcgctcgccgcacgtcgtgcgctgcgtcggcggcggcgatgcggcggaggaggggtcgtcgtaccagctcttcctcgagtacgcccccggcgggtcgctcnccgacgaggtggcccggagcgggggctccctcggggagcgcgccgtccgcgcgttcgccgccgacgtgctgcgggggctggcgtacctccacgcccgctccgtcgtgcacggcgacgtcaaggcgcggaacgtgctggtcggcgccggcggccgcgccatgctcgccgacttcgggtgcgccagggcgctgtccggctccggctccgcgcgccggccgatcgtcggcgccacgccggcgttcatggcgcccgaggtggcccgcggggaggaccagggcccccccgccgacgtctgggcgctgggctgcaccgtcgtcgagatggccaccggccgcgccccgttcgncggcatgggtggcgctggcggcgccctcnnggcggtccantggatcgggtacacggacgccgtgccggaggtgccggcctggctgtcgcctgaggccggggacttcctggcccactgcttcgccagagacgccgccgatcggtggaccgccgcgcggctcctggagcacccgttnngtggcgttcgcccgccacgangacaaggccccgcggccgtctcccaagagcgctctggacgccgccgcgttctgggagtccgaaacagagtccgaggacgaagcgtcagggagcgcgtcggagaggatcgagtcactggcgtgctccgccggggccttgcccgactgggacggcgagggaggatggatcgacgtgctcggcgagcactgcggcgcgccaggcaaagcgtccagcgtcctggtggcggtgccagctggggagatggatgtcggcggcggtctacccagtgaagatggactggaagcagaggaggtnccgttcggtggcggcggtgttccagttccagttccagcagctgatgcttcggctgggcgtcatgagaaacactgttcgagttccgactgtcatgcgctctcctgtcagctagtaccttgtaatctagtctttaatgcaataaagttatgggttccc

SEQ ID NO: 37792 - protein, 364 aa, Zea mays subsp. mays
  peptide (1)..(364): Ceres Seq. ID no. 12391338
  misc_feature (11)..(267): Pfam Name: Pfam Description:  Protein kinase domain
  misc_feature (3)..(267): NCBI GI NO: 34911466 NR Description: NPK1-related protein kinase-like protein
  misc_feature (12)..(293): NCBI GI NO: 34911474 NR Description: NPK1-related protein kinase-like protein
  misc_feature (5)..(267): NCBI GI NO: 34911472 NR Description: NPK1-related protein kinase-like protein
  misc_feature (12)..(267): NCBI GI NO: 34911476 NR Description: NPK1-related protein kinase-like protein
  misc_feature (1)..(267): NCBI GI NO: 37530786 NR Description: putative NPK1-related protein kinase
  misc_feature (1)..(267): NCBI GI NO: 37530788 NR Description: putative NPK1-related protein kinase
  misc_feature (134)..(267): NCBI GI NO: 19110337 NR Description: NPK1-related protein kinase-like protein
  misc_feature (10)..(267): NCBI GI NO: 15236903 NR Description: putative NPK1-related protein kinase
  misc_feature (10)..(267): NCBI GI NO: 19423926 NR Description: unknown protein [Arabidopsis thaliana]
  misc_feature (11)..(273): NCBI GI NO: 15225692 NR Description: putative protein kinase; protein id: At2g32510.1
  misc_feature (95)..(95): Xaa is any aa, unknown or other
  misc_feature (210)..(210): Xaa is any aa, unknown or other
  misc_feature (220)..(220): Xaa is any aa, unknown or other
  misc_feature (223)..(223): Xaa is any aa, unknown or other
  misc_feature (268)..(268): Xaa is any aa, unknown or other
  misc_feature (269)..(269): Xaa is any aa, unknown or other
  misc_feature (276)..(276): Xaa is any aa, unknown or other
MAAVAVSGGHWRRLRTLGRGASGAVVSLAWDAASGELVAVKSAGAIGAAALRREHAVLAGLRSPHVVRCVGGGDAAEEGSSYQLFLEYAPGGSLXDEVARSGGSLGERAVRAFAADVLRGLAYLHARSVVHGDVKARNVLVGAGGRAMLADFGCARALSGSGSARRPIVGATPAFMAPEVARGEDQGPPADVWALGCTVVEMATGRAPFXGMGGAGGALXAVXWIGYTDAVPEVPAWLSPEAGDFLAHCFARDAADRWTAARLLEHPXXGVRPPRXQGPAAVSQERSGRRRVLGVRNRVRGRSVRERVGEDRVTGVLRRGLARLGRRGRMDRRARRALRRARQSVQRPGGGASWGDGCRRRSTQ

SEQ ID NO: 37793 - protein, 352 aa, Zea mays subsp. mays
  peptide (1)..(352): Ceres Seq. ID no. 12391339
  misc_feature (196)..(337): NCBI GI NO: 34911466 NR Description: NPK1-related protein kinase-like protein
  misc_feature (204)..(318): NCBI GI NO: 34911474 NR Description: NPK1-related protein kinase-like protein
  misc_feature (203)..(283): NCBI GI NO: 34911472 NR Description: NPK1-related protein kinase-like protein
  misc_feature (209)..(298): NCBI GI NO: 34911476 NR Description: NPK1-related protein kinase-like protein
  misc_feature (204)..(262): NCBI GI NO: 37530786 NR Description: putative NPK1-related protein kinase
  misc_feature (226)..(291): NCBI GI NO: 37530788 NR Description: putative NPK1-related protein kinase
  misc_feature (221)..(305): NCBI GI NO: 37530786 NR Description: putative NPK1-related protein kinase
  misc_feature (209)..(254): NCBI GI NO: 19110337 NR Description: NPK1-related protein kinase-like protein
  misc_feature (21)..(21): Xaa is any aa, unknown or other
  misc_feature (137)..(137): Xaa is any aa, unknown or other
  misc_feature (146)..(146): Xaa is any aa, unknown or other
  misc_feature (147)..(147): Xaa is any aa, unknown or other
  misc_feature (150)..(150): Xaa is any aa, unknown or other
  misc_feature (195)..(195): Xaa is any aa, unknown or other
  misc_feature (202)..(202): Xaa is any aa, unknown or other
  misc_feature (300)..(300): Xaa is any aa, unknown or other
MRRRRGRRTSSSSSTPPAGRXPTRWPGAGAPSGSAPSARSPPTCCGGWRTSTPAPSCTATSRRGTCWSAPAAAPCSPTSGAPGRCPAPAPRAGRSSAPRRRSWRPRWPAGRTRAPPPTSGRWAAPSSRWPPAAPRSXAWVALAAPXXRSXGSGTRTPCRRCRPGCRLRPGTSWPTASPETPPIGGPPRGSWSTRXVAFARHXDKAPRPSPKSALDAAAFWESETESEDEASGSASERIESLACSAGALPDWDGEGGWIDVLGEHCGAPGKASSVLVAVPAGEMDVGGGLPSEDGLEAEEXPFGGGGVPVPVPAADASAGRHEKHCSSSDCHALSCQLVPCNLVFNAIKLWVP

SEQ ID NO: 37794 - protein, 281 aa, Zea mays subsp. mays
  peptide (1)..(281): Ceres Seq. ID no. 12391340
  misc_feature (20)..(281): NCBI GI NO: 30424862 NR Description: RIKEN cDNA 5033413A03 [Mus musculus]
  misc_feature (136)..(136): Xaa is any aa, unknown or other
  misc_feature (251)..(251): Xaa is any aa, unknown or other
  misc_feature (261)..(261): Xaa is any aa, unknown or other
  misc_feature (265)..(265): Xaa is any aa, unknown or other
ARDHYLEHPNRKIVFDRLTSHNSSSGHQQAHRKGEQNRTESHGGGRRERGALEEAADAGARRVGRRGVAGVGRRVGGAGRGQVGRRDRRGGAEAGARGAGRAALAARRALRRRRRCGGGGVVVPALPRVRPRRVAXRRGGPERGLPRGARRPRVRRRRAAGAGVPPRPLRRARRRQGAERAGRRRRPRHARRLRVRQGAVRLRLRAPADRRRHAGVHGARGGPRGGPGPPRRRLGAGLHRRRDGHRPRPVXRHGWRWRRPXGGPXDRVHGRRAGGAGLAVA

SEQ ID NO: 37795 - DNA, 2365 bp, Zea mays subsp. mays; identical to SEQ ID NO: 25648
  misc_feature (1)..(2365): Ceres Seq. ID no. 13635021

SEQ ID NO: 37796 - protein, 699 aa, Zea mays subsp. mays; identical to SEQ ID NO: 25649
  peptide (1)..(699): Ceres Seq. ID no. 13635022
  misc_feature (41)..(699): NCBI GI NO: 11277127 NR Description: dnaK-type molecular chaperone BiP precursor
  misc_feature (34)..(699): NCBI GI NO: 1346172 NR Description: Luminal binding protein precursor
  misc_feature (39)..(699): NCBI GI NO: 10944737 NR Description: putative luminal binding protein
  misc_feature (43)..(699): NCBI GI NO: 30693962 NR Description: luminal binding protein 2 precursor
  misc_feature (233)..(699): NCBI GI NO: 168424 NR Description: polypeptide chain-binding protein
  misc_feature (47)..(689): NCBI GI NO: 31419302 NR Description: Unknown (protein for MGC:55994) [Danio rerio]
  misc_feature (49)..(695): NCBI GI NO: 31981722 NR Description: heat shock 70kD protein 5
  misc_feature (36)..(695): NCBI GI NO: 31208237 NR Description: ENSANGP00000012893 [Anopheles gambiae]
  misc_feature (49)..(695): NCBI GI NO: 1304157 NR Description: 78 kDa glucose-regulated protein [Mus musculus]
  misc_feature (46)..(699): NCBI GI NO: 32405376 NR Description: 78 KDA GLUCOSE-REGULATED PROTEIN HOMOLOG PRECURSOR

SEQ ID NO: 37797 - protein, 663 aa, Zea mays subsp. mays; identical to SEQ ID NO: 25650
  peptide (1)..(663): Ceres Seq. ID no. 13635023
  misc_feature (5)..(663): NCBI GI NO: 11277127 NR Description: dnaK-type molecular chaperone BiP precursor
  misc_feature (1)..(663): NCBI GI NO: 1346172 NR Description: Luminal binding protein precursor
  misc_feature (3)..(663): NCBI GI NO: 10944737 NR Description: putative luminal binding protein
  misc_feature (7)..(663): NCBI GI NO: 30693962 NR Description: luminal binding protein 2 precursor
  misc_feature (197)..(663): NCBI GI NO: 168424 NR Description: polypeptide chain-binding protein
  misc_feature (11)..(653): NCBI GI NO: 31419302 NR Description: Unknown (protein for MGC:55994) [Danio rerio]
  misc_feature (13)..(659): NCBI GI NO: 31981722 NR Description: heat shock 70kD protein 5
  misc_feature (1)..(659): NCBI GI NO: 31208237 NR Description: ENSANGP00000012893 [Anopheles gambiae]
  misc_feature (13)..(659): NCBI GI NO: 1304157 NR Description: 78 kDa glucose-regulated protein [Mus musculus]
  misc_feature (10)..(663): NCBI GI NO: 32405376 NR Description: 78 KDA GLUCOSE-REGULATED PROTEIN HOMOLOG PRECURSOR

SEQ ID NO: 37798 - protein, 548 aa, Zea mays subsp. mays; identical to SEQ ID NO: 25651
  peptide (1)..(548): Ceres Seq. ID no. 13635024
  misc_feature (1)..(548): NCBI GI NO: 11277127 NR Description: dnaK-type molecular chaperone BiP precursor
  misc_feature (1)..(548): NCBI GI NO: 1346172 NR Description: Luminal binding protein precursor
  misc_feature (1)..(548): NCBI GI NO: 10944737 NR Description: putative luminal binding protein
  misc_feature (1)..(548): NCBI GI NO: 30693962 NR Description: luminal binding protein 2 precursor
  misc_feature (82)..(548): NCBI GI NO: 168424 NR Description: polypeptide chain-binding protein
  misc_feature (1)..(538): NCBI GI NO: 31419302 NR Description: Unknown (protein for MGC:55994) [Danio rerio]
  misc_feature (1)..(544): NCBI GI NO: 31981722 NR Description: heat shock 70kD protein 5
  misc_feature (1)..(544): NCBI GI NO: 31208237 NR Description: ENSANGP00000012893 [Anopheles gambiae]
  misc_feature (1)..(544): NCBI GI NO: 1304157 NR Description: 78 kDa glucose-regulated protein [Mus musculus]
  misc_feature (1)..(548): NCBI GI NO: 32405376 NR Description: 78 KDA GLUCOSE-REGULATED PROTEIN HOMOLOG PRECURSOR

SEQ ID NO: 37799 - DNA, 514 bp, Zea mays subsp. mays
  misc_feature (1)..(514): Ceres Seq. ID no. 2789020
gtgctctctcagaggtgggctggcttctcctccccctcttaccaagtcctcttcgggttagggttacttagggttttgtggaggggcgatggcggcggctgatgtggagtaccgttgcttcgtcggcgggcttgcctgggccaccagcaacgagtcgctggagaatgccttcgcctcctacggcgagatcctcgactccaaggtttgcttcgtcctcgctaggtttcattccgcggtctgtttgtgccgttggggctagatccgggtcgtggttcaacagatctgcttcgttttggtacagatctgcgttcgctcgaatcgagcatgacgttttcatgtgattatgcaggtcatcaccgaccgggagacggggaggtctcgcggcttcggcttcgttaccttctcctccgagaactccatgctcgacgctatcgagaacatgaacggcaaggagctcgacggccgtaacatcaccgttaaccaggcccagtccgtggcggtggcggtggcggcg

SEQ ID NO: 37800 - protein, 79 aa, Zea mays subsp. mays
  peptide (1)..(79): Ceres Seq. ID no. 2789021
MWSTVASSAGLPGPPATSRWRMPSPPTARSSTPRFASSSLGFIPRSVCAVGARSGSWFNRSASFWYRSAFARIEHDVFM

SEQ ID NO: 37801 - protein, 58 aa, Zea mays subsp. mays
  peptide (1)..(58): Ceres Seq. ID no. 2789022
MPSPPTARSSTPRFASSSLGFIPRSVCAVGARSGSWFNRSASFWYRSAFARIEHDVFM

SEQ ID NO: 37802 - protein, 56 aa, Zea mays subsp. mays
  peptide (1)..(56): Ceres Seq. ID no. 2789023
  misc_feature (1)..(39): NCBI GI NO: 112994 NR Description: Glycine-rich RNA-binding
  misc_feature (1)..(39): NCBI GI NO: 10799202 NR Description: glycine-rich RNA-binding protein [Sorghum bicolor]
  misc_feature (1)..(39): NCBI GI NO: 544423 NR Description: Glycine-rich RNA-binding protein 2
  misc_feature (1)..(39): NCBI GI NO: 2331133 NR Description: glycine-rich protein [Oryza sativa]
  misc_feature (1)..(39): NCBI GI NO: 2293480 NR Description: glycine-rich protein [Oryza sativa]
  misc_feature (1)..(39): NCBI GI NO: 18103931 NR Description: glycine rich RNA binding protein [Oryza sativa]
  misc_feature (1)..(39): NCBI GI NO: 7439985 NR Description: glycine-rich RNA-binding protein - rice
  misc_feature (1)..(39): NCBI GI NO: 7439987 NR Description: glycine-rich RNA-binding protein - rice
  misc_feature (1)..(39): NCBI GI NO: 2331131 NR Description: glycine-rich protein [Oryza sativa]
  misc_feature (1)..(39): NCBI GI NO: 18076086 NR Description: glycine-rich RNA-binding protein
MAAADVEYRCFVGGLAWATSNESLENAFASYGEILDSKVCFVLARFHSAVCLCRWG

SEQ ID NO: 37803 - protein, 57 aa, Zea mays subsp. mays
  peptide (1)..(57): Ceres Seq. ID no. 2789024
  misc_feature (2)..(50): NCBI GI NO: 112994 NR Description: Glycine-rich RNA-binding
  misc_feature (2)..(50): NCBI GI NO: 10799202 NR Description: glycine-rich RNA-binding protein [Sorghum bicolor]
  misc_feature (2)..(50): NCBI GI NO: 544423 NR Description: Glycine-rich RNA-binding protein 2
  misc_feature (2)..(50): NCBI GI NO: 2331133 NR Description: glycine-rich protein [Oryza sativa]
  misc_feature (2)..(50): NCBI GI NO: 2293480 NR Description: glycine-rich protein [Oryza sativa]
  misc_feature (2)..(50): NCBI GI NO: 18103931 NR Description: glycine rich RNA binding protein [Oryza sativa]
  misc_feature (2)..(50): NCBI GI NO: 7439985 NR Description: glycine-rich RNA-binding protein - rice
  misc_feature (2)..(50): NCBI GI NO: 7439987 NR Description: glycine-rich RNA-binding protein - rice
  misc_feature (2)..(50): NCBI GI NO: 2331131 NR Description: glycine-rich protein [Oryza sativa]
  misc_feature (2)..(50): NCBI GI NO: 18076086 NR Description: glycine-rich RNA-binding protein
MQVITDRETGRSRGFGFVTFSSENSMLDAIENMNGKELDGRNITVNQAQSVAVAVAA

SEQ ID NO: 37804 - DNA, 1648 bp, Zea mays subsp. mays; identical to SEQ ID NO: 31479
  misc_feature (1)..(1648): Ceres Seq. ID no. 12595157
  misc_feature (986)..(986): n is a, c, t, g, unknown, or other

SEQ ID NO: 37805 - protein, 338 aa, Zea mays subsp. mays; identical to SEQ ID NO: 31480
  peptide (1)..(338): Ceres Seq. ID no. 12595158
  misc_feature (31)..(159): Pfam Name: NAM Pfam Description: No apical meristem
  misc_feature (10)..(338): NCBI GI NO: 28411877 NR Description: putative NAM
  misc_feature (9)..(185): NCBI GI NO: 15223043 NR Description: unknown protein; protein id: At1g76420.1
  misc_feature (43)..(185): NCBI GI NO: 21389170 NR Description: nam-like protein 16 [Petunia x hybrida]
  misc_feature (28)..(182): NCBI GI NO: 1279640 NR Description: NAM [Petunia x hybrida]
  misc_feature (31)..(312): NCBI GI NO: 15232511 NR Description: NAM-like protein; protein id: At3g15170
  misc_feature (26)..(181): NCBI GI NO: 15238882 NR Description: CUC2 (dbj|BAA19529.1); protein id: At5g53950.1
  misc_feature (31)..(291): NCBI GI NO: 11994506 NR Description: contains similarity to NAM
  misc_feature (28)..(181): NCBI GI NO: 40737029 NR Description: putative OsNAC1 protein
  misc_feature (28)..(215): NCBI GI NO: 15241819 NR Description: NAM / CUC2 - like protein; protein id: At5g39610
  misc_feature (28)..(215): NCBI GI NO: 21536866 NR Description: NAM / CUC2-like protein [Arabidopsis thaliana]
  misc_feature (230)..(230): Xaa is any aa, unknown or other

SEQ ID NO: 37806 - protein, 329 aa, Zea mays subsp. mays; identical to SEQ ID NO: 31481
  peptide (1)..(329): Ceres Seq. ID no. 12595159
  misc_feature (22)..(150): Pfam Name: NAM Pfam Description: No apical meristem
  misc_feature (1)..(329): NCBI GI NO: 28411877 NR Description: putative NAM
  misc_feature (1)..(176): NCBI GI NO: 15223043 NR Description: unknown protein; protein id: At1g76420.1
  misc_feature (34)..(176): NCBI GI NO: 21389170 NR Description: nam-like protein 16 [Petunia x hybrida]
  misc_feature (19)..(173): NCBI GI NO: 1279640 NR Description: NAM [Petunia x hybrida]
  misc_feature (22)..(303): NCBI GI NO: 15232511 NR Description: NAM-like protein; protein id: At3g15170
  misc_feature (17)..(172): NCBI GI NO: 15238882 NR Description: CUC2 (dbj|BAA19529.1); protein id: At5g53950.1
  misc_feature (22)..(282): NCBI GI NO: 11994506 NR Description: contains similarity to NAM
  misc_feature (19)..(172): NCBI GI NO: 40737029 NR Description: putative OsNAC1 protein
  misc_feature (19)..(206): NCBI GI NO: 15241819 NR Description: NAM / CUC2 - like protein; protein id: At5g39610
  misc_feature (19)..(206): NCBI GI NO: 21536866 NR Description: NAM / CUC2-like protein [Arabidopsis thaliana]
  misc_feature (221)..(221): Xaa is any aa, unknown or other

SEQ ID NO: 37807 - protein, 317 aa, Zea mays subsp. mays; identical to SEQ ID NO: 31482
  peptide (1)..(317): Ceres Seq. ID no. 12595160
  misc_feature (10)..(138): Pfam Name: NAM Pfam Description: No apical meristem
  misc_feature (1)..(317): NCBI GI NO: 28411877 NR Description: putative NAM
  misc_feature (1)..(164): NCBI GI NO: 15223043 NR Description: unknown protein; protein id: At1g76420.1
  misc_feature (22)..(164): NCBI GI NO: 21389170 NR Description: nam-like protein 16 [Petunia x hybrida]
  misc_feature (7)..(161): NCBI GI NO: 1279640 NR Description: NAM [Petunia x hybrida]
  misc_feature (10)..(291): NCBI GI NO: 15232511 NR Description: NAM-like protein; protein id: At3g15170
  misc_feature (5)..(160): NCBI GI NO: 15238882 NR Description: CUC2 (dbj|BAA19529.1); protein id: At5g53950.1
  misc_feature (10)..(270): NCBI GI NO: 11994506 NR Description: contains similarity to NAM
  misc_feature (7)..(160): NCBI GI NO: 40737029 NR Description: putative OsNAC1 protein
  misc_feature (7)..(194): NCBI GI NO: 15241819 NR Description: NAM / CUC2 - like protein; protein id: At5g39610
  misc_feature (7)..(194): NCBI GI NO: 21536866 NR Description: NAM / CUC2-like protein [Arabidopsis thaliana]
  misc_feature (209)..(209): Xaa is any aa, unknown or other

SEQ ID NO: 37808 - DNA, 1240 bp, Zea mays subsp. mays
  misc_feature (1)..(1240): Ceres Seq. ID no. 14309637
gcagcacacaacctaccacactcgcattgcattgcattgcattccttcagttcagtagtgtgctctgacagtgagatggcgagcgtgaaggttttcgggtcacccacctcggcggaggtcgcccgcgtgctcatgtgcctcttcgagaaggaggtggagttccagctgatccgcgtcgacgcctaccgcggcaccaagcgcatgccccagtacctcaagctgcagccgcaaggcgaggcgctcaccttcgaggacgagagcctcaccctctccgactccagggggatcctccgccacatctcccacaagtacgcgaagcagggcaacccgtacctgattggcacgggcgcgctggagcgggcgtccatcgagcagtggctgcagacggaggcgcagagcttcgacgcgcccagcgccgagatggtctacagcctcgccttcctgccgcccaccctgcccaggcagaacgacaacggcaacggcggcgcgttcaacgccagggaagccaccgtgggcagtaacgccgacgcgtccagcagcaagcgcggtgtggccgggtcacagccggcggcaagccagaccaaggtgagcgcgcagaaggaggaggagatgctgaagctgttcgagcagaggaagaaggacctggagaagctgctggacatctacgagcagcgcctggaggaggccacgttcctggccggcgacaacttcaccatcgccgacctgtcgcacctgccctacgcggaccacctcgtctccgacccgcgctcccgccgcatgttcgagtcccgcaagaacgtcagcaggtggtggcacgacgtctccggccgcgacacctggaagtacgtcaagaccctgcagcgcccgccgtccacgtccaccgacgccagcgccaagaacggccagctgggccagcagcagcacctgccgtcgtccaccgacggccacggcgtgaagagccaacggctggtccagaacgagcggcacttctagccgttgccgtcccttcccgccgacgaataaactacctgcgccgccgccaccgccgccgtccatcaacatggttcctgctgctgttcgtgtcgttttcatacgtcatacgtgtcttgctgcttttgaagctccgttcccgggtgcagggacctacgagtccattccgccgtttgctcattctgttcgtcgtgtaataaaatgaaaaccccaccccgttttgaatgaaattcaattctcagtgttgtgc

SEQ ID NO: 37809 - protein, 330 aa, Zea mays subsp. mays
  peptide (1)..(330): Ceres Seq. ID no. 14309638
  misc_feature (121)..(278): Pfam Name: Pfam Description:  Glutathione S-transferase, C-terminal domain
  misc_feature (26)..(110): NCBI GI NO: 11385473 NR Description: glutathione S-transferase GST 11 [Zea mays]
  misc_feature (27)..(330): NCBI GI NO: 22758271 NR Description: Putative glutathione S-transferase
  misc_feature (28)..(291): NCBI GI NO: 37536564 NR Description: putative glutathione S-transferase
  misc_feature (29)..(162): NCBI GI NO: 11385479 NR Description: glutathione S-transferase GST 14 [Zea mays]
  misc_feature (176)..(291): NCBI GI NO: 11385479 NR Description: glutathione S-transferase GST 14 [Zea mays]
  misc_feature (27)..(149): NCBI GI NO: 22758269 NR Description: Putative glutathione S-transferase
  misc_feature (206)..(287): NCBI GI NO: 22758269 NR Description: Putative glutathione S-transferase
  misc_feature (27)..(149): NCBI GI NO: 11385475 NR Description: glutathione S-transferase GST 12 [Zea mays]
  misc_feature (210)..(288): NCBI GI NO: 11385475 NR Description: glutathione S-transferase GST 12 [Zea mays]
  misc_feature (27)..(149): NCBI GI NO: 11385469 NR Description: glutathione S-transferase GST 9 [Zea mays]
AAHNLPHSHCIALHSFSSVVCSDSEMASVKVFGSPTSAEVARVLMCLFEKEVEFQLIRVDAYRGTKRMPQYLKLQPQGEALTFEDESLTLSDSRGILRHISHKYAKQGNPYLIGTGALERASIEQWLQTEAQSFDAPSAEMVYSLAFLPPTLPRQNDNGNGGAFNAREATVGSNADASSSKRGVAGSQPAASQTKVSAQKEEEMLKLFEQRKKDLEKLLDIYEQRLEEATFLAGDNFTIADLSHLPYADHLVSDPRSRRMFESRKNVSRWWHDVSGRDTWKYVKTLQRPPSTSTDASAKNGQLGQQQHLPSSTDGHGVKSQRLVQNERHF

SEQ ID NO: 37810 - protein, 305 aa, Zea mays subsp. mays
  peptide (1)..(305): Ceres Seq. ID no. 14309639
  misc_feature (96)..(253): Pfam Name: Pfam Description:  Glutathione S-transferase, C-terminal domain
  misc_feature (1)..(85): NCBI GI NO: 11385473 NR Description: glutathione S-transferase GST 11 [Zea mays]
  misc_feature (2)..(305): NCBI GI NO: 22758271 NR Description: Putative glutathione S-transferase
  misc_feature (3)..(266): NCBI GI NO: 37536564 NR Description: putative glutathione S-transferase
  misc_feature (4)..(137): NCBI GI NO: 11385479 NR Description: glutathione S-transferase GST 14 [Zea mays]
  misc_feature (151)..(266): NCBI GI NO: 11385479 NR Description: glutathione S-transferase GST 14 [Zea mays]
  misc_feature (2)..(124): NCBI GI NO: 22758269 NR Description: Putative glutathione S-transferase
  misc_feature (181)..(262): NCBI GI NO: 22758269 NR Description: Putative glutathione S-transferase
  misc_feature (2)..(124): NCBI GI NO: 11385475 NR Description: glutathione S-transferase GST 12 [Zea mays]
  misc_feature (185)..(263): NCBI GI NO: 11385475 NR Description: glutathione S-transferase GST 12 [Zea mays]
  misc_feature (2)..(124): NCBI GI NO: 11385469 NR Description: glutathione S-transferase GST 9 [Zea mays]
MASVKVFGSPTSAEVARVLMCLFEKEVEFQLIRVDAYRGTKRMPQYLKLQPQGEALTFEDESLTLSDSRGILRHISHKYAKQGNPYLIGTGALERASIEQWLQTEAQSFDAPSAEMVYSLAFLPPTLPRQNDNGNGGAFNAREATVGSNADASSSKRGVAGSQPAASQTKVSAQKEEEMLKLFEQRKKDLEKLLDIYEQRLEEATFLAGDNFTIADLSHLPYADHLVSDPRSRRMFESRKNVSRWWHDVSGRDTWKYVKTLQRPPSTSTDASAKNGQLGQQQHLPSSTDGHGVKSQRLVQNERHF

SEQ ID NO: 37811 - protein, 286 aa, Zea mays subsp. mays
  peptide (1)..(286): Ceres Seq. ID no. 14309640
  misc_feature (77)..(234): Pfam Name: Pfam Description:  Glutathione S-transferase, C-terminal domain
  misc_feature (1)..(66): NCBI GI NO: 11385473 NR Description: glutathione S-transferase GST 11 [Zea mays]
  misc_feature (1)..(286): NCBI GI NO: 22758271 NR Description: Putative glutathione S-transferase
  misc_feature (1)..(247): NCBI GI NO: 37536564 NR Description: putative glutathione S-transferase
  misc_feature (1)..(118): NCBI GI NO: 11385479 NR Description: glutathione S-transferase GST 14 [Zea mays]
  misc_feature (132)..(247): NCBI GI NO: 11385479 NR Description: glutathione S-transferase GST 14 [Zea mays]
  misc_feature (1)..(105): NCBI GI NO: 22758269 NR Description: Putative glutathione S-transferase
  misc_feature (162)..(243): NCBI GI NO: 22758269 NR Description: Putative glutathione S-transferase
  misc_feature (1)..(105): NCBI GI NO: 11385475 NR Description: glutathione S-transferase GST 12 [Zea mays]
  misc_feature (166)..(244): NCBI GI NO: 11385475 NR Description: glutathione S-transferase GST 12 [Zea mays]
  misc_feature (1)..(105): NCBI GI NO: 11385469 NR Description: glutathione S-transferase GST 9 [Zea mays]
MCLFEKEVEFQLIRVDAYRGTKRMPQYLKLQPQGEALTFEDESLTLSDSRGILRHISHKYAKQGNPYLIGTGALERASIEQWLQTEAQSFDAPSAEMVYSLAFLPPTLPRQNDNGNGGAFNAREATVGSNADASSSKRGVAGSQPAASQTKVSAQKEEEMLKLFEQRKKDLEKLLDIYEQRLEEATFLAGDNFTIADLSHLPYADHLVSDPRSRRMFESRKNVSRWWHDVSGRDTWKYVKTLQRPPSTSTDASAKNGQLGQQQHLPSSTDGHGVKSQRLVQNERHF

SEQ ID NO: 37812 - DNA, 1483 bp, Zea mays subsp. mays
  misc_feature (1)..(1483): Ceres Seq. ID no. 12367762
aactagcacctccgcctcgcggctcgctccatcccttccaccaccaccgcctcaccagtcaccactcccctatcacgggacgggaccaccgccgccgcgtcctatgacgtcgccgtcctcgcaccacccggactccacctcggcgtcctctacccctcgcgccggtgtcgggaacggcggcatccaccacctccatccgccatctctgcacccggcgcccgcgcctaccccggctgctccccccgcgcaggcgcaggcggcgcacgggggcccgcaagtgcgcctcatgtgcagcttcggcggccgcatcttaccgcgccctggggaccgccagctgcgctacgtcggcggggagacccgcatcgtctccttcccgcgcgccgcaacttccttcgccgccctcgtcgccgcgctcgccaaggtcgcgcccgtgctcttcgccccgggggcgcccaggccgtcgctcaagtaccagctgccccaggacgacctcgactcgctcgtctccatcacctccgacgacgacgtcgaccacctcatggacgagcttgaccgcatccaagacctctccgccaacgtcgccaggccaccccgcctccgcgtcttcctcttcgcgcccgcgcctgacgccgccttcggctccgtcttctccggcaccaccagtgaggccgcctccaccgaccagtggtttgtcgacgcgctaaacgcccccgcgccgcagccgcaccccaccgagcgcggccgatccgaggcctcctcgatcgtctccgaggtccccgactacctcttcggcctcgaaaccacgtccggtgagcccagccccggccccgcggccgtccgcgccaagtccgatgccacggagactccgcgccaccacgacgacgacgaatgcgacgtgccaccttccgcgcgccagatgccgtacgtcgtagagggagcgtcatcgtggcccgcccccgccgccgccgtacatggcgcagcctgtgtactacttccccgtgccgccgccggtccactatctcgaaccgtctgcgcagggcggctacatgcctcgcccggtctaccacattgtcggtggcggaggaagcgaggcgcctggcggagatcttcacgcggccggcggcgtctacggcgtcccgcaggcacatgcaggcgttcccggcgatgatgtacgcgccgccgcgcgcggtcgtctacaactacaactcggaggggatgccatcgctgcctcccgaaggtggggcacactcttcctaggcgcatcggctgcttcacatctctggttcctgattattattgcagatgcctgagttctgcgtgcgtattagatttttatcgattcgtcttggttggtgtatagatgactaagatgagggaggcggatgatggatagatattattgcagttttcgtctagtggaaatatattcgtgaaatggatctatgagcatgatataatactaagtagtatagtatttggtgtg

SEQ ID NO: 37813 - protein, 388 aa, Zea mays subsp. mays
  peptide (1)..(388): Ceres Seq. ID no. 12367763
  misc_feature (12)..(92): Pfam Name: Pfam Description:  Extensin-like region
  misc_feature (14)..(275): NCBI GI NO: 34895646 NR Description: P0480E02.2
  misc_feature (91)..(317): NCBI GI NO: 18412822 NR Description: putative protein; protein id: At4g05150
  misc_feature (91)..(317): NCBI GI NO: 25407315 NR Description: hypothetical protein AT4g05150
  misc_feature (13)..(91): NCBI GI NO: 20138131 NR Description: Vegetative cell wall protein gp1 precursor
  misc_feature (10)..(91): NCBI GI NO: 20138131 NR Description: Vegetative cell wall protein gp1 precursor
  misc_feature (75)..(293): NCBI GI NO: 15237703 NR Description: putative protein; protein id: At5g64430
  misc_feature (8)..(82): NCBI GI NO: 6523547 NR Description: hydroxyproline-rich glycoprotein DZ-HRGP
  misc_feature (10)..(81): NCBI GI NO: 6523547 NR Description: hydroxyproline-rich glycoprotein DZ-HRGP
  misc_feature (29)..(254): NCBI GI NO: 15229599 NR Description: unknown protein; protein id: At3g18230.1
  misc_feature (27)..(271): NCBI GI NO: 21553908 NR Description: unknown [Arabidopsis thaliana]
TSTSASRLAPSLPPPPPHQSPLPYHGTGPPPPRPMTSPSSHHPDSTSASSTPRAGVGNGGIHHLHPPSLHPAPAPTPAAPPAQAQAAHGGPQVRLMCSFGGRILPRPGDRQLRYVGGETRIVSFPRAATSFAALVAALAKVAPVLFAPGAPRPSLKYQLPQDDLDSLVSITSDDDVDHLMDELDRIQDLSANVARPPRLRVFLFAPAPDAAFGSVFSGTTSEAASTDQWFVDALNAPAPQPHPTERGRSEASSIVSEVPDYLFGLETTSGEPSPGPAAVRAKSDATETPRHHDDDECDVPPSARQMPYVVEGASSWPAPAAAVHGAACVLLPRAAAGPLSRTVCAGRLHASPGLPHCRWRRKRGAWRRSSRGRRRLRRPAGTCRRSRR

SEQ ID NO: 37814 - protein, 354 aa, Zea mays subsp. mays
  peptide (1)..(354): Ceres Seq. ID no. 12367764
  misc_feature (1)..(58): Pfam Name: Pfam Description:  Extensin-like region
  misc_feature (1)..(241): NCBI GI NO: 34895646 NR Description: P0480E02.2
  misc_feature (57)..(283): NCBI GI NO: 18412822 NR Description: putative protein; protein id: At4g05150
  misc_feature (57)..(283): NCBI GI NO: 25407315 NR Description: hypothetical protein AT4g05150
  misc_feature (1)..(57): NCBI GI NO: 20138131 NR Description: Vegetative cell wall protein gp1 precursor
  misc_feature (1)..(57): NCBI GI NO: 20138131 NR Description: Vegetative cell wall protein gp1 precursor
  misc_feature (41)..(259): NCBI GI NO: 15237703 NR Description: putative protein; protein id: At5g64430
  misc_feature (1)..(48): NCBI GI NO: 6523547 NR Description: hydroxyproline-rich glycoprotein DZ-HRGP
  misc_feature (1)..(47): NCBI GI NO: 6523547 NR Description: hydroxyproline-rich glycoprotein DZ-HRGP
  misc_feature (1)..(220): NCBI GI NO: 15229599 NR Description: unknown protein; protein id: At3g18230.1
  misc_feature (1)..(237): NCBI GI NO: 21553908 NR Description: unknown [Arabidopsis thaliana]
MTSPSSHHPDSTSASSTPRAGVGNGGIHHLHPPSLHPAPAPTPAAPPAQAQAAHGGPQVRLMCSFGGRILPRPGDRQLRYVGGETRIVSFPRAATSFAALVAALAKVAPVLFAPGAPRPSLKYQLPQDDLDSLVSITSDDDVDHLMDELDRIQDLSANVARPPRLRVFLFAPAPDAAFGSVFSGTTSEAASTDQWFVDALNAPAPQPHPTERGRSEASSIVSEVPDYLFGLETTSGEPSPGPAAVRAKSDATETPRHHDDDECDVPPSARQMPYVVEGASSWPAPAAAVHGAACVLLPRAAAGPLSRTVCAGRLHASPGLPHCRWRRKRGAWRRSSRGRRRLRRPAGTCRRSRR

SEQ ID NO: 37815 - protein, 293 aa, Zea mays subsp. mays
  peptide (1)..(293): Ceres Seq. ID no. 12367765
  misc_feature (12)..(109): Pfam Name: Pfam Description:  PB1 domain
  misc_feature (1)..(180): NCBI GI NO: 34895646 NR Description: P0480E02.2
  misc_feature (1)..(222): NCBI GI NO: 18412822 NR Description: putative protein; protein id: At4g05150
  misc_feature (1)..(222): NCBI GI NO: 25407315 NR Description: hypothetical protein AT4g05150
  misc_feature (1)..(198): NCBI GI NO: 15237703 NR Description: putative protein; protein id: At5g64430
  misc_feature (1)..(159): NCBI GI NO: 15229599 NR Description: unknown protein; protein id: At3g18230.1
  misc_feature (1)..(176): NCBI GI NO: 21553908 NR Description: unknown [Arabidopsis thaliana]
  misc_feature (1)..(176): NCBI GI NO: 18379168 NR Description: expressed protein; protein id: At2g01190
  misc_feature (1)..(12): NCBI GI NO: 20138131 NR Description: Vegetative cell wall protein gp1 precursor
  misc_feature (1)..(141): NCBI GI NO: 25410886 NR Description: hypothetical protein At2g01190
  misc_feature (1)..(179): NCBI GI NO: 15242462 NR Description: putative protein; protein id: At5g09620.1
MCSFGGRILPRPGDRQLRYVGGETRIVSFPRAATSFAALVAALAKVAPVLFAPGAPRPSLKYQLPQDDLDSLVSITSDDDVDHLMDELDRIQDLSANVARPPRLRVFLFAPAPDAAFGSVFSGTTSEAASTDQWFVDALNAPAPQPHPTERGRSEASSIVSEVPDYLFGLETTSGEPSPGPAAVRAKSDATETPRHHDDDECDVPPSARQMPYVVEGASSWPAPAAAVHGAACVLLPRAAAGPLSRTVCAGRLHASPGLPHCRWRRKRGAWRRSSRGRRRLRRPAGTCRRSRR

SEQ ID NO: 37816 - DNA, 520 bp, Zea mays subsp. mays
  misc_feature (1)..(520): Ceres Seq. ID no. 1601784
aaccgaggtcccccaatcccccaaacatttcccccaaacatttttttgtcgagatctgtcgtgagatcctccccgacgagatggcggggaagggagccaaggccacggccgccaagtcggcggacaaggacaaggggaagaaggccggcggccccgtctcgcgctcctcccgcgccgcacctcaggagaattcaactccgaagaaagatgtttatcaattgttcgctgagaaggttagggataacaaacagctggaatcaagatgggcaatcatgcaagaaacccgtgtggagtattttcgtggaaaagatttcaatgccttcatcaagaattatccagaagtcagggaaattttggggccagataaggatttagaagtggaagacattgttaacactttgttgaccaagaaccttgtgataaggtgtgaccgagttatgaaaactgtgaggcctggcaagaaaaagttatcatcatggcctgctcactttggagatacataatgaacaagtgtttactg

SEQ ID NO: 37817 - protein, 124 aa, Zea mays subsp. mays
  peptide (1)..(124): Ceres Seq. ID no. 1601785
NRGPPIPQTFPPNIFLSRSVVRSSPTRWRGREPRPRPPSRRTRTRGRRPAAPSRAPPAPHLRRIQLRRKMFINCSLRRLGITNSWNQDGQSCKKPVWSIFVEKISMPSSRIIQKSGKFWGQIRI

SEQ ID NO: 37818 - protein, 166 aa, Zea mays subsp. mays
  peptide (1)..(166): Ceres Seq. ID no. 1601786
  misc_feature (93)..(162): Pfam Name: Pfam Description:  Translocation protein Sec62
  misc_feature (40)..(162): NCBI GI NO: 18402801 NR Description: expressed protein; protein id: At3g20920
  misc_feature (40)..(162): NCBI GI NO: 21593719 NR Description: unknown [Arabidopsis thaliana]
PRSPNPPNISPKHFFVEICREILPDEMAGKGAKATAAKSADKDKGKKAGGPVSRSSRAAPQENSTPKKDVYQLFAEKVRDNKQLESRWAIMQETRVEYFRGKDFNAFIKNYPEVREILGPDKDLEVEDIVNTLLTKNLVIRCDRVMKTVRPGKKKLSSWPAHFGDT

SEQ ID NO: 37819 - protein, 140 aa, Zea mays subsp. mays
  peptide (1)..(140): Ceres Seq. ID no. 1601787
  misc_feature (67)..(136): Pfam Name: Pfam Description:  Translocation protein Sec62
  misc_feature (14)..(136): NCBI GI NO: 18402801 NR Description: expressed protein; protein id: At3g20920
  misc_feature (14)..(136): NCBI GI NO: 21593719 NR Description: unknown [Arabidopsis thaliana]
MAGKGAKATAAKSADKDKGKKAGGPVSRSSRAAPQENSTPKKDVYQLFAEKVRDNKQLESRWAIMQETRVEYFRGKDFNAFIKNYPEVREILGPDKDLEVEDIVNTLLTKNLVIRCDRVMKTVRPGKKKLSSWPAHFGDT

SEQ ID NO: 37820 - DNA, 1575 bp, Zea mays subsp. mays
  misc_feature (1)..(1575): Ceres Seq. ID no. 12349572
gcctggctctggtattgggttccccgttctgctgctcagctcagcccagccccagagcccctgacctgccgtcctccctccttccctccccgtgagtcgccgtacggcggtacgggatcgccaccgcggcgtccagggatggcggacgggagcctctacgcctggtggtgctgtgccttgggctgggcgctggcgcttgtcgcagcggacggcttcctcgtggacatcacctatgtggaaagcgccgtggccaaaggagcagtgtgtttggatggtagtgcgccggcgtaccatctcgcccgcggctccggctccggtgagaacagctggctggtccatttcgaggggggaggatggtgcaacaatgtcaccacctgcctgcaacggaagcgcactcggttgggttcgtccaaggagatggcgacgcagattgccttctccggaatcctgagtgacacgccggatgacaacccagatttttacaattggaacaaggtcaaggttcggtactgtgatggttcatctttcactggagatgttgaagaagttgaccctgcaacaaagctacattatagaggtgccaggatatggcaagctgtcatggacgacctgcttgccaaagggatggacaaagctgaaaatgctctaatttcaggctgttctgctggtggtttaacctccatactacactgtgacagatttcatgaccttctgccgccggctgcgagggttaagtgcctttctgatgctgggttcttcattaatgagaaagacgttgcaggagttgggtacattgctgcctttttcaacgacgtcgttacaacacatgggtcagcaaagaatttgccgccttcatgcacttcgacgttacctccaggaacgtgctttttcccccagaacgaggtgaaacagatacagacacctctgttcatcctcaacgcagcatatgattcatggcaggtaaggaacattttggtgccaggagtagctgaccctcatggaaaatggcatagctgtaagcatgatatagaccagtgctctgcatcgcagctacgggtattgcagggattcaggggtgattttctgaaggaagtggcagaactagggaactccgactcgagagggttgttcataaactcatgcttcgtgcactgccagtctgagatacaggagctatggttctcatctgactcccccgtgctcggaaacacaacagtagcaaacgctgttggcgactggttcttcgaccgcagctccttccagaagatagactgcccatacccttgtgactcgacctgtcacaatcggatctacgatgactcatcacaagcatagcaattacagtggcctcacttcgtactgccattcaccatgttattacatttgacgcttccagcattgctaacagtagggcaatgcgttgatagccattgattttttttttctttttacgaataagatcaggtgccggcggctttaactcggttgctaccggaaagtgagcgtgcatcttccgacggtacatggcatggtttatctggatggatgaatcgataatcataaattcttaaaaac

SEQ ID NO: 37821 - protein, 444 aa, Zea mays subsp. mays
  peptide (1)..(444): Ceres Seq. ID no. 12349573
  misc_feature (66)..(423): Pfam Name: Pfam Description:  Pectinacetylesterase
  misc_feature (56)..(443): NCBI GI NO: 7488883 NR Description: pectin acetylesterase (EC 3
  misc_feature (56)..(438): NCBI GI NO: 22328797 NR Description: pectinacetylesterase family; protein id:At4g19420
  misc_feature (60)..(440): NCBI GI NO: 38344147 NR Description: OSJNBa0041A02.14
  misc_feature (56)..(433): NCBI GI NO: 21593445 NR Description: pectin acetylesterase [Arabidopsis thaliana]
  misc_feature (56)..(433): NCBI GI NO: 15242357 NR Description: pectinacetylesterase, putative
  misc_feature (50)..(433): NCBI GI NO: 18415308 NR Description: pectinacetylesterase, putative
  misc_feature (66)..(439): NCBI GI NO: 28392968 NR Description: putative pectinacetylesterase
  misc_feature (73)..(438): NCBI GI NO: 15226462 NR Description: pectinacetylesterase, putative
  misc_feature (73)..(438): NCBI GI NO: 18397406 NR Description: pectinacetylesterase, putative
  misc_feature (73)..(438): NCBI GI NO: 25347293 NR Description: probable pectinacetylesterase precursor T8L23.6
AWLWYWVPRSAAQLSPAPEPLTCRPPSFPPRESPYGGTGSPPRRPGMADGSLYAWWCCALGWALALVAADGFLVDITYVESAVAKGAVCLDGSAPAYHLARGSGSGENSWLVHFEGGGWCNNVTTCLQRKRTRLGSSKEMATQIAFSGILSDTPDDNPDFYNWNKVKVRYCDGSSFTGDVEEVDPATKLHYRGARIWQAVMDDLLAKGMDKAENALISGCSAGGLTSILHCDRFHDLLPPAARVKCLSDAGFFINEKDVAGVGYIAAFFNDVVTTHGSAKNLPPSCTSTLPPGTCFFPQNEVKQIQTPLFILNAAYDSWQVRNILVPGVADPHGKWHSCKHDIDQCSASQLRVLQGFRGDFLKEVAELGNSDSRGLFINSCFVHCQSEIQELWFSSDSPVLGNTTVANAVGDWFFDRSSFQKIDCPYPCDSTCHNRIYDDSSQA

SEQ ID NO: 37822 - protein, 398 aa, Zea mays subsp. mays
  peptide (1)..(398): Ceres Seq. ID no. 12349574
  misc_feature (20)..(377): Pfam Name: Pfam Description:  Pectinacetylesterase
  misc_feature (10)..(397): NCBI GI NO: 7488883 NR Description: pectin acetylesterase (EC 3
  misc_feature (10)..(392): NCBI GI NO: 22328797 NR Description: pectinacetylesterase family; protein id:At4g19420
  misc_feature (14)..(394): NCBI GI NO: 38344147 NR Description: OSJNBa0041A02.14
  misc_feature (10)..(387): NCBI GI NO: 21593445 NR Description: pectin acetylesterase [Arabidopsis thaliana]
  misc_feature (10)..(387): NCBI GI NO: 15242357 NR Description: pectinacetylesterase, putative
  misc_feature (4)..(387): NCBI GI NO: 18415308 NR Description: pectinacetylesterase, putative
  misc_feature (20)..(393): NCBI GI NO: 28392968 NR Description: putative pectinacetylesterase
  misc_feature (27)..(392): NCBI GI NO: 15226462 NR Description: pectinacetylesterase, putative
  misc_feature (27)..(392): NCBI GI NO: 18397406 NR Description: pectinacetylesterase, putative
  misc_feature (27)..(392): NCBI GI NO: 25347293 NR Description: probable pectinacetylesterase precursor T8L23.6
MADGSLYAWWCCALGWALALVAADGFLVDITYVESAVAKGAVCLDGSAPAYHLARGSGSGENSWLVHFEGGGWCNNVTTCLQRKRTRLGSSKEMATQIAFSGILSDTPDDNPDFYNWNKVKVRYCDGSSFTGDVEEVDPATKLHYRGARIWQAVMDDLLAKGMDKAENALISGCSAGGLTSILHCDRFHDLLPPAARVKCLSDAGFFINEKDVAGVGYIAAFFNDVVTTHGSAKNLPPSCTSTLPPGTCFFPQNEVKQIQTPLFILNAAYDSWQVRNILVPGVADPHGKWHSCKHDIDQCSASQLRVLQGFRGDFLKEVAELGNSDSRGLFINSCFVHCQSEIQELWFSSDSPVLGNTTVANAVGDWFFDRSSFQKIDCPYPCDSTCHNRIYDDSSQA

SEQ ID NO: 37823 - protein, 305 aa, Zea mays subsp. mays
  peptide (1)..(305): Ceres Seq. ID no. 12349575
  misc_feature (1)..(284): Pfam Name: Pfam Description:  Pectinacetylesterase
  misc_feature (1)..(304): NCBI GI NO: 7488883 NR Description: pectin acetylesterase (EC 3
  misc_feature (1)..(299): NCBI GI NO: 22328797 NR Description: pectinacetylesterase family; protein id:At4g19420
  misc_feature (1)..(301): NCBI GI NO: 38344147 NR Description: OSJNBa0041A02.14
  misc_feature (1)..(294): NCBI GI NO: 21593445 NR Description: pectin acetylesterase [Arabidopsis thaliana]
  misc_feature (1)..(294): NCBI GI NO: 15242357 NR Description: pectinacetylesterase, putative
  misc_feature (1)..(294): NCBI GI NO: 18415308 NR Description: pectinacetylesterase, putative
  misc_feature (1)..(300): NCBI GI NO: 28392968 NR Description: putative pectinacetylesterase
  misc_feature (1)..(299): NCBI GI NO: 15226462 NR Description: pectinacetylesterase, putative
  misc_feature (1)..(299): NCBI GI NO: 18397406 NR Description: pectinacetylesterase, putative
  misc_feature (1)..(299): NCBI GI NO: 25347293 NR Description: probable pectinacetylesterase precursor T8L23.6
MATQIAFSGILSDTPDDNPDFYNWNKVKVRYCDGSSFTGDVEEVDPATKLHYRGARIWQAVMDDLLAKGMDKAENALISGCSAGGLTSILHCDRFHDLLPPAARVKCLSDAGFFINEKDVAGVGYIAAFFNDVVTTHGSAKNLPPSCTSTLPPGTCFFPQNEVKQIQTPLFILNAAYDSWQVRNILVPGVADPHGKWHSCKHDIDQCSASQLRVLQGFRGDFLKEVAELGNSDSRGLFINSCFVHCQSEIQELWFSSDSPVLGNTTVANAVGDWFFDRSSFQKIDCPYPCDSTCHNRIYDDSSQA

SEQ ID NO: 37824 - DNA, 1745 bp, Zea mays subsp. mays
  misc_feature (1)..(1745): Ceres Seq. ID no. 12383093
gcaattaaccctcactaaagggaacaaaagctggagctccaccgcggtggcggccgctctagaactagtggatcccccgggctgcaggaattcgcacgagaccattacctagaacatcctaatcgaaaaatttccgcaccacgcccagtcgcccacgcagccggcccaagcccaaaaacctttctccatcctctactctcatccccacgatggccgccgccgccaccacgccgcactccctcctcctccagcgcgccgcgatcccggccgcgccgtcgagggcgtccgccgccgcctctcccgtccgcctcccggtccgcgccgccaggatctcgtgcgcggcggtggcggcgccgtccccggccgcagccgccgcggcggacgaggtggagcgcggcgtctacaacttcgcggcgggtcccgcgacgctccctctctccgtgctcaagcgggcgcaggcggagctggtggactaccacggctccgggatgagcatcatggagatgagccaccgcgggaaggagttcgacgccgccatcaagaaggccgagtccgacctgcgcgcgctcctcgcggtgcccgacacccacgccgtgctcttcctccagggcggcgccaccacgcagttcgccgccgtcccgctcaacctctgcacggggccctccgacccggccgacttcgtcgtgtccggatcctggagcgacaaggccttcaaggaggccaagaagttctccgccgcctccgtcgcctggtcgggtaaagacggcaagtacacggccctcccgccgttcgacgccatcgcccagaaccccgaggccaggttcctccacatctgctccaacgagaccatccacggcgtggagttcaaggactacccggagccccgcaacaggtcgggcatcctcgtcgccgacatgtcctccaacttctgctccaagcccgtcgacgtctcccgcttcggcgtcatctacgccggcgcacagaagaacgtcgggccctccggcgtcaccatcgccatcgtgcgcaaggacctcatcggcgccgctcagcccttcacgcccgtcatgctcgacttcaagacgcacgccgacaacgcctccctctacaacaccccgccctgcttcgccatctacgtctgcggtctcgtcttcgaggacctgctcgcgcagggcggcctcgccgaggtcgagaagaagaacgcgcgcaaggccggcgccctctacgacaccatcgacgccagcggagggtactacgtctgccccgtcgacaagtccgtgcggtcgcacatgaacgtgcccttcaccctggccaagggcccggatttcgagaagcagttcatcgccgaggcggccaaggagggcatggtgcagctcaaggggcacaggtctgtcggcggtgtccgcgcctctatctacaatgccatgccgctcgccggcgtggagaagctcgtcgccttcatgaaggacttccaagccaggaacccttgattgccttgtgcttatggtcatttggtattgctactcagtctttcttcctagcataagtgggctcgtgcaagagctgtctcgcgttgcgcactgggatctatctgtagtattagtaccataacgtaacggctactgtattttgcaatgttttttttctctctctcgcttttgttaggtgttcatggaatttcatttctatggatcaccattgcagttgtaatgtgtttttgctggaaataaggaataaggtagagatcc

SEQ ID NO: 37825 - protein, 425 aa, Zea mays subsp. mays
  peptide (1)..(425): Ceres Seq. ID no. 12383094
  misc_feature (74)..(413): Pfam Name: Pfam Description:  Aminotransferase class-V
  misc_feature (2)..(425): NCBI GI NO: 21397263 NR Description: Putative phosphoserine aminotransferase
  misc_feature (35)..(424): NCBI GI NO: 22135922 NR Description: phosphoserine aminotransferase
  misc_feature (35)..(424): NCBI GI NO: 15237069 NR Description: phosphoserine aminotransferase
  misc_feature (35)..(424): NCBI GI NO: 21592931 NR Description: phosphoserine aminotransferase
  misc_feature (1)..(424): NCBI GI NO: 1711381 NR Description: Phosphoserine aminotransferase
  misc_feature (52)..(424): NCBI GI NO: 15227876 NR Description: putative phosphoserine aminotransferase
  misc_feature (64)..(420): NCBI GI NO: 34497756 NR Description: phosphoserine transaminase
  misc_feature (59)..(420): NCBI GI NO: 17402893 NR Description: phosphoserine aminotransferase, isoform 1
  misc_feature (59)..(420): NCBI GI NO: 30583943 NR Description: Homo sapiens phosphoserine aminotransferase
  misc_feature (59)..(420): NCBI GI NO: 16741698 NR Description: Similar to phosphoserine aminotransferase
MAAAATTPHSLLLQRAAIPAAPSRASAAASPVRLPVRAARISCAAVAAPSPAAAAAADEVERGVYNFAAGPATLPLSVLKRAQAELVDYHGSGMSIMEMSHRGKEFDAAIKKAESDLRALLAVPDTHAVLFLQGGATTQFAAVPLNLCTGPSDPADFVVSGSWSDKAFKEAKKFSAASVAWSGKDGKYTALPPFDAIAQNPEARFLHICSNETIHGVEFKDYPEPRNRSGILVADMSSNFCSKPVDVSRFGVIYAGAQKNVGPSGVTIAIVRKDLIGAAQPFTPVMLDFKTHADNASLYNTPPCFAIYVCGLVFEDLLAQGGLAEVEKKNARKAGALYDTIDASGGYYVCPVDKSVRSHMNVPFTLAKGPDFEKQFIAEAAKEGMVQLKGHRSVGGVRASIYNAMPLAGVEKLVAFMKDFQARNP

SEQ ID NO: 37826 - protein, 332 aa, Zea mays subsp. mays
  peptide (1)..(332): Ceres Seq. ID no. 12383095
  misc_feature (1)..(320): Pfam Name: Pfam Description:  Aminotransferase class-V
  misc_feature (1)..(332): NCBI GI NO: 21397263 NR Description: Putative phosphoserine aminotransferase
  misc_feature (1)..(331): NCBI GI NO: 22135922 NR Description: phosphoserine aminotransferase
  misc_feature (1)..(331): NCBI GI NO: 15237069 NR Description: phosphoserine aminotransferase
  misc_feature (1)..(331): NCBI GI NO: 21592931 NR Description: phosphoserine aminotransferase
  misc_feature (1)..(331): NCBI GI NO: 1711381 NR Description: Phosphoserine aminotransferase
  misc_feature (1)..(331): NCBI GI NO: 15227876 NR Description: putative phosphoserine aminotransferase
  misc_feature (1)..(327): NCBI GI NO: 34497756 NR Description: phosphoserine transaminase
  misc_feature (1)..(327): NCBI GI NO: 17402893 NR Description: phosphoserine aminotransferase, isoform 1
  misc_feature (1)..(327): NCBI GI NO: 30583943 NR Description: Homo sapiens phosphoserine aminotransferase
  misc_feature (1)..(327): NCBI GI NO: 16741698 NR Description: Similar to phosphoserine aminotransferase
MSIMEMSHRGKEFDAAIKKAESDLRALLAVPDTHAVLFLQGGATTQFAAVPLNLCTGPSDPADFVVSGSWSDKAFKEAKKFSAASVAWSGKDGKYTALPPFDAIAQNPEARFLHICSNETIHGVEFKDYPEPRNRSGILVADMSSNFCSKPVDVSRFGVIYAGAQKNVGPSGVTIAIVRKDLIGAAQPFTPVMLDFKTHADNASLYNTPPCFAIYVCGLVFEDLLAQGGLAEVEKKNARKAGALYDTIDASGGYYVCPVDKSVRSHMNVPFTLAKGPDFEKQFIAEAAKEGMVQLKGHRSVGGVRASIYNAMPLAGVEKLVAFMKDFQARNP

SEQ ID NO: 37827 - protein, 329 aa, Zea mays subsp. mays
  peptide (1)..(329): Ceres Seq. ID no. 12383096
  misc_feature (1)..(317): Pfam Name: Pfam Description:  Aminotransferase class-V
  misc_feature (1)..(329): NCBI GI NO: 21397263 NR Description: Putative phosphoserine aminotransferase
  misc_feature (1)..(328): NCBI GI NO: 22135922 NR Description: phosphoserine aminotransferase
  misc_feature (1)..(328): NCBI GI NO: 15237069 NR Description: phosphoserine aminotransferase
  misc_feature (1)..(328): NCBI GI NO: 21592931 NR Description: phosphoserine aminotransferase
  misc_feature (1)..(328): NCBI GI NO: 1711381 NR Description: Phosphoserine aminotransferase
  misc_feature (1)..(328): NCBI GI NO: 15227876 NR Description: putative phosphoserine aminotransferase
  misc_feature (1)..(324): NCBI GI NO: 34497756 NR Description: phosphoserine transaminase
  misc_feature (1)..(324): NCBI GI NO: 17402893 NR Description: phosphoserine aminotransferase, isoform 1
  misc_feature (1)..(324): NCBI GI NO: 30583943 NR Description: Homo sapiens phosphoserine aminotransferase
  misc_feature (1)..(324): NCBI GI NO: 16741698 NR Description: Similar to phosphoserine aminotransferase
MEMSHRGKEFDAAIKKAESDLRALLAVPDTHAVLFLQGGATTQFAAVPLNLCTGPSDPADFVVSGSWSDKAFKEAKKFSAASVAWSGKDGKYTALPPFDAIAQNPEARFLHICSNETIHGVEFKDYPEPRNRSGILVADMSSNFCSKPVDVSRFGVIYAGAQKNVGPSGVTIAIVRKDLIGAAQPFTPVMLDFKTHADNASLYNTPPCFAIYVCGLVFEDLLAQGGLAEVEKKNARKAGALYDTIDASGGYYVCPVDKSVRSHMNVPFTLAKGPDFEKQFIAEAAKEGMVQLKGHRSVGGVRASIYNAMPLAGVEKLVAFMKDFQARNP

SEQ ID NO: 37828 - DNA, 880 bp, Zea mays subsp. mays
  misc_feature (1)..(880): Ceres Seq. ID no. 12357013
gacaagcaagaacagctgtcgatccaattgtcacttgctctccctccaacaagctaattaaggccggtcatccctcttctagctcgtttcattatccatggcggaggagaagcaccaccaccaccacctgttccaccacaagaaggacgaggagcaggaggagcagctcgccggcggcgggtacggcgagtccgccgagtacacggaggccacggtgacggaggtcgtgtccacgggcgagaacgagtacgacgagtacaagaaggaggagaagcagcacaagcacaagcagcacctcggcgaggccggcgccatcgccgccggcgccttcgcactcgtacgtagtcctccgatcgatccgatcctccttgagtagtatatacatacatgaacgcgataacgaataatatattaatcgaacgaactgaatgatgatcacggatcacctcgtgtgacgtggacatgcacagtacgagaagcacgaggcaaagaaggacccggagcacgcgcaccgccacaagatcgaggaggaggtcgcggcggcggcggccgtcggctccggcggcttcgccttccacgagcaccacgagaagaagaaggaccacaaggacgccgaggaggccggcggcgagaagaagcaccacttcttcggctgattgatcctcccgtatcgtcgtccctccccgtgtgctacgcgtgcgtgtgtgagagtgatatcgagcgcccgccgtgttgtgcgcgcgtacgtatgtatgcgctcgtgtgatgcacgaataagcgtggctacgtaatctatcgtatgtatacgtgtgtgtatgcatgtgcttgtgtatgatcgtggtacgaggaccgaaaaaatgtatgcaactctgatttactt

SEQ ID NO: 37829 - protein, 92 aa, Zea mays subsp. mays
  peptide (1)..(92): Ceres Seq. ID no. 12357014
  misc_feature (1)..(80): NCBI GI NO: 15667623 NR Description: drought inducible 22 kD protein
  misc_feature (1)..(80): NCBI GI NO: 7489448 NR Description: abscisic acid- and stress-induced protein - rice
  misc_feature (1)..(48): NCBI GI NO: 7489708 NR Description: ABA- and ripening-inducible-like protein - maize
  misc_feature (1)..(80): NCBI GI NO: 6525055 NR Description: anth [Lilium longiflorum]
  misc_feature (1)..(80): NCBI GI NO: 7484607 NR Description: ABA stress ripening protein - common ice plant
  misc_feature (26)..(80): NCBI GI NO: 16588758 NR Description: abscisic stress ripening-like protein
  misc_feature (26)..(80): NCBI GI NO: 38532363 NR Description: abscisic acid and water deficit stress inducibleprotein
  misc_feature (26)..(80): NCBI GI NO: 2677824 NR Description: abscisic stress ripening protein homolog
  misc_feature (1)..(80): NCBI GI NO: 14582465 NR Description: putative transcription factor [Vitis vinifera]
  misc_feature (1)..(80): NCBI GI NO: 7484489 NR Description: abscisic acid
MAEEKHHHHHLFHHKKDEEQEEQLAGGGYGESAEYTEATVTEVVSTGENEYDEYKKEEKQHKHKQHLGEAGAIAAGAFALVRSPPIDPILLE

SEQ ID NO: 37830 - protein, 71 aa, Zea mays subsp. mays; identical to SEQ ID NO: 28032
  peptide (1)..(71): Ceres Seq. ID no. 12357015

SEQ ID NO: 37831 - protein, 65 aa, Zea mays subsp. mays
  peptide (1)..(65): Ceres Seq. ID no. 12357016
MHSTRSTRQRRTRSTRTATRSRRRSRRRRPSAPAASPSTSTTRRRRTTRTPRRPAARRSTTSSAD

SEQ ID NO: 37832 - DNA, 653 bp, Zea mays subsp. mays
  misc_feature (1)..(653): Ceres Seq. ID no. 12346489
acacgatcaaaaacaaaaccaagctccaagcacccatagccacacaccacaccaagtcaagcaaggagctcgatcgacagcaacaacggccatcatgaactccagcttcatcgggctcaagcccgctgcggcagcagcccaggccaccgcggctgcctcgtcgccgatgaagcagcagcaggtgcaggtcgcgccccagagccgccgcgccgcgctgctcggcctggcggccgtcttcgccgtcaccgccaccacggccggatcagccaaggctggggtcttcgacgagtacctcgagaagagcaaggctaacaaggagctgaacgacaagaagaggatggccaccagcgctgccaactttgcgcgcgcctacacagtcgagttcggcagctgccagttcccctacaacttcactgggtgccaggacctcgccaagcagaagaaagtccctttcctcagcgacgacctcgagatcgagtgcgaggggaaggagaagttcaagtgcggctccaacgtcttctggaagtggtgaagcagcgcgcgtctgatatgacggagacctgtgtatctagatgatgcatgtgcccagactgcaggaaaaatgatatcaaatttgactgctattctgtcaaccagggttcagttcttaaccg

SEQ ID NO: 37833 - protein, 176 aa, Zea mays subsp. mays
  peptide (1)..(176): Ceres Seq. ID no. 12346490
  misc_feature (37)..(176): Pfam Name: PSAN or PSI-N Pfam Description: Photosystem I reaction centre subunit N
  misc_feature (32)..(176): NCBI GI NO: 400879 NR Description: Photosystem I reaction centre subunit N
  misc_feature (84)..(176): NCBI GI NO: 3914466 NR Description: Photosystem I reaction centre subunit N
  misc_feature (32)..(176): NCBI GI NO: 28629385 NR Description: photosystem I-N subunit [Phaseolus vulgaris]
  misc_feature (68)..(176): NCBI GI NO: 15237593 NR Description: photosystem I reaction center subunit PSI-Nprecursor
  misc_feature (43)..(170): NCBI GI NO: 11134150 NR Description: Photosystem I reaction centre subunit N
  misc_feature (43)..(170): NCBI GI NO: 12744797 NR Description: PsaN precursor [Chlamydomonas reinhardtii]
  misc_feature (92)..(141): NCBI GI NO: 485082 NR Description: photosystem I 9K protein - rice
HDQKQNQAPSTHSHTPHQVKQGARSTATTAIMNSSFIGLKPAAAAAQATAAASSPMKQQQVQVAPQSRRAALLGLAAVFAVTATTAGSAKAGVFDEYLEKSKANKELNDKKRMATSAANFARAYTVEFGSCQFPYNFTGCQDLAKQKKVPFLSDDLEIECEGKEKFKCGSNVFWKW

SEQ ID NO: 37834 - protein, 145 aa, Zea mays subsp. mays
  peptide (1)..(145): Ceres Seq. ID no. 12346491
  misc_feature (6)..(145): Pfam Name: PSAN or PSI-N Pfam Description: Photosystem I reaction centre subunit N
  misc_feature (1)..(145): NCBI GI NO: 400879 NR Description: Photosystem I reaction centre subunit N
  misc_feature (53)..(145): NCBI GI NO: 3914466 NR Description: Photosystem I reaction centre subunit N
  misc_feature (1)..(145): NCBI GI NO: 28629385 NR Description: photosystem I-N subunit [Phaseolus vulgaris]
  misc_feature (37)..(145): NCBI GI NO: 15237593 NR Description: photosystem I reaction center subunit PSI-Nprecursor
  misc_feature (12)..(139): NCBI GI NO: 11134150 NR Description: Photosystem I reaction centre subunit N
  misc_feature (12)..(139): NCBI GI NO: 12744797 NR Description: PsaN precursor [Chlamydomonas reinhardtii]
  misc_feature (61)..(110): NCBI GI NO: 485082 NR Description: photosystem I 9K protein - rice
MNSSFIGLKPAAAAAQATAAASSPMKQQQVQVAPQSRRAALLGLAAVFAVTATTAGSAKAGVFDEYLEKSKANKELNDKKRMATSAANFARAYTVEFGSCQFPYNFTGCQDLAKQKKVPFLSDDLEIECEGKEKFKCGSNVFWKW

SEQ ID NO: 37835 - protein, 121 aa, Zea mays subsp. mays
  peptide (1)..(121): Ceres Seq. ID no. 12346492
  misc_feature (1)..(121): Pfam Name: PSAN or PSI-N Pfam Description: Photosystem I reaction centre subunit N
  misc_feature (1)..(121): NCBI GI NO: 400879 NR Description: Photosystem I reaction centre subunit N
  misc_feature (29)..(121): NCBI GI NO: 3914466 NR Description: Photosystem I reaction centre subunit N
  misc_feature (1)..(121): NCBI GI NO: 28629385 NR Description: photosystem I-N subunit [Phaseolus vulgaris]
  misc_feature (13)..(121): NCBI GI NO: 15237593 NR Description: photosystem I reaction center subunit PSI-Nprecursor
  misc_feature (1)..(115): NCBI GI NO: 11134150 NR Description: Photosystem I reaction centre subunit N
  misc_feature (1)..(115): NCBI GI NO: 12744797 NR Description: PsaN precursor [Chlamydomonas reinhardtii]
  misc_feature (37)..(86): NCBI GI NO: 485082 NR Description: photosystem I 9K protein - rice
MKQQQVQVAPQSRRAALLGLAAVFAVTATTAGSAKAGVFDEYLEKSKANKELNDKKRMATSAANFARAYTVEFGSCQFPYNFTGCQDLAKQKKVPFLSDDLEIECEGKEKFKCGSNVFWKW

SEQ ID NO: 37836 - DNA, 1336 bp, Zea mays subsp. mays
  misc_feature (1)..(1336): Ceres Seq. ID no. 12364240
  misc_feature (167)..(167): n is a, c, t, g, unknown, or other
  misc_feature (174)..(174): n is a, c, t, g, unknown, or other
  misc_feature (214)..(214): n is a, c, t, g, unknown, or other
  misc_feature (147)..(147): n is a, c, t, g, unknown, or other
  misc_feature (182)..(182): n is a, c, t, g, unknown, or other
  misc_feature (108)..(108): n is a, c, t, g, unknown, or other
  misc_feature (220)..(220): n is a, c, t, g, unknown, or other
  misc_feature (211)..(211): n is a, c, t, g, unknown, or other
  misc_feature (109)..(109): n is a, c, t, g, unknown, or other
  misc_feature (169)..(169): n is a, c, t, g, unknown, or other
agagagagaaggtgagtgctttgacaaggggaaaaaacccaggtctgtgtgtgtgtgtgcgagagagagagagagagagagagagagagagagagagaggcgaaggcnnctcaggcgacgcgatggcgatggcggcgctgcgacgcnaggggaggcgcctcatcctntnctccnccgtcccnaacccgtctctggcggccgctttctctgnggngacgcnatcctccgccgtctcgcaaccggagatggctccacttggtgcacggtctatttcaactcaaatcgtgaggaaccggatgaagagtgtcaggaatatccagaagatcacaaaggctatgaagatggttgcagcatcaaagctccgggcagttcagacaaggactgaaaattcacgtggcttgtggcaaccgttcaccgcccttcttggggatgctcctagtgttgacgtcaagaagaatgtgattgtggccattacctctgataagggactctgtggtggtattaattcaacatcagtgaaagttagcagggcccttcacaaattgacatctggtccagaaaaagaaaccaagtatgttatattaggagaaaagggcaaagttcagctgttgcgtgactcaaaggacagcattgaaatgactgcaactgaactgcagaagaaccctatcaactacacacaggttgccgtgctcgcggatgacatattgaaaaatgtggaatatgatgctctgagggttattttcaacaagttccaatctgtcatatcgtttaagcccacaatggtaacaatactttcccccgaggttgcagaaaaagaatcagaagctggtgggaagatgggtgacctagattcttatgagattgaaggcggcgagacaaaatcagagattttgcagaatctagctgagttccagttttcttgtgtcctgtacaatggtgccctagagaatgcatgcagtgagcttggagcccgtatgtctgccatggacagctctagcagaaatgctggcgatatgcttgatcgtctcactctcacttacaacaggacacgccaagcatccatcaccacagagcttactgagattatatctggtgcatcggcccttgaggggtagtgaagagactgcggacttcttccttttgccgtttgtgttcctctcccatgaaggcttttttcctcgggagtctcagtttcagctcctttcatttcacttttccttgagaaacttgctctcatgctttgttgcaataatcaggccaacgacaatgatagtgccgtgcacccttggcacattgcagaaagagtgtaaacagctatggttaatgggtggttttc

SEQ ID NO: 37837 - protein, 370 aa, Zea mays subsp. mays
  peptide (1)..(370): Ceres Seq. ID no. 12364241
  misc_feature (95)..(226): Pfam Name: Pfam Description:  ATP synthase
  misc_feature (41)..(370): NCBI GI NO: 543867 NR Description: ATP synthase gamma chain, mitochondrial precursor
  misc_feature (227)..(370): NCBI GI NO: 37532654 NR Description: putative ATP SYNTHASE GAMMA CHAIN
  misc_feature (95)..(226): NCBI GI NO: 37532654 NR Description: putative ATP SYNTHASE GAMMA CHAIN
  misc_feature (41)..(369): NCBI GI NO: 15227257 NR Description: mitochondrial F1-ATPase, gamma subunit
  misc_feature (41)..(369): NCBI GI NO: 22530902 NR Description: mitochondrial F1-ATPase, gamma subunit
  misc_feature (43)..(369): NCBI GI NO: 7436158 NR Description: probable H+-transporting two-sector ATPase (EC3
  misc_feature (207)..(370): NCBI GI NO: 7436157 NR Description: probable H+-transporting two-sector ATPase (EC3
  misc_feature (91)..(368): NCBI GI NO: 11466530 NR Description: ATP synthase F1 subunit alpha
  misc_feature (82)..(368): NCBI GI NO: 23490546 NR Description: ATP synthase F1, gamma subunit
  misc_feature (87)..(368): NCBI GI NO: 17544026 NR Description: ATP synthase (32.4 kD) [Caenorhabditis elegans]
  misc_feature (36)..(36): Xaa is any aa, unknown or other
  misc_feature (49)..(49): Xaa is any aa, unknown or other
  misc_feature (55)..(55): Xaa is any aa, unknown or other
  misc_feature (56)..(56): Xaa is any aa, unknown or other
  misc_feature (58)..(58): Xaa is any aa, unknown or other
  misc_feature (60)..(60): Xaa is any aa, unknown or other
  misc_feature (70)..(70): Xaa is any aa, unknown or other
  misc_feature (71)..(71): Xaa is any aa, unknown or other
  misc_feature (73)..(73): Xaa is any aa, unknown or other
REKVSALTRGKNPGLCVCVRERERERERERERGEGXSGDAMAMAALRRXGRRLIXXSXVXNPSLAAAFSXXTXSSAVSQPEMAPLGARSISTQIVRNRMKSVRNIQKITKAMKMVAASKLRAVQTRTENSRGLWQPFTALLGDAPSVDVKKNVIVAITSDKGLCGGINSTSVKVSRALHKLTSGPEKETKYVILGEKGKVQLLRDSKDSIEMTATELQKNPINYTQVAVLADDILKNVEYDALRVIFNKFQSVISFKPTMVTILSPEVAEKESEAGGKMGDLDSYEIEGGETKSEILQNLAEFQFSCVLYNGALENACSELGARMSAMDSSSRNAGDMLDRLTLTYNRTRQASITTELTEIISGASALEG

SEQ ID NO: 37838 - protein, 330 aa, Zea mays subsp. mays
  peptide (1)..(330): Ceres Seq. ID no. 12364242
  misc_feature (55)..(186): Pfam Name: Pfam Description:  ATP synthase
  misc_feature (1)..(330): NCBI GI NO: 543867 NR Description: ATP synthase gamma chain, mitochondrial precursor
  misc_feature (187)..(330): NCBI GI NO: 37532654 NR Description: putative ATP SYNTHASE GAMMA CHAIN
  misc_feature (55)..(186): NCBI GI NO: 37532654 NR Description: putative ATP SYNTHASE GAMMA CHAIN
  misc_feature (1)..(329): NCBI GI NO: 15227257 NR Description: mitochondrial F1-ATPase, gamma subunit
  misc_feature (1)..(329): NCBI GI NO: 22530902 NR Description: mitochondrial F1-ATPase, gamma subunit
  misc_feature (3)..(329): NCBI GI NO: 7436158 NR Description: probable H+-transporting two-sector ATPase (EC3
  misc_feature (167)..(330): NCBI GI NO: 7436157 NR Description: probable H+-transporting two-sector ATPase (EC3
  misc_feature (51)..(328): NCBI GI NO: 11466530 NR Description: ATP synthase F1 subunit alpha
  misc_feature (42)..(328): NCBI GI NO: 23490546 NR Description: ATP synthase F1, gamma subunit
  misc_feature (47)..(328): NCBI GI NO: 17544026 NR Description: ATP synthase (32.4 kD) [Caenorhabditis elegans]
  misc_feature (9)..(9): Xaa is any aa, unknown or other
  misc_feature (15)..(15): Xaa is any aa, unknown or other
  misc_feature (16)..(16): Xaa is any aa, unknown or other
  misc_feature (18)..(18): Xaa is any aa, unknown or other
  misc_feature (20)..(20): Xaa is any aa, unknown or other
  misc_feature (30)..(30): Xaa is any aa, unknown or other
  misc_feature (31)..(31): Xaa is any aa, unknown or other
  misc_feature (33)..(33): Xaa is any aa, unknown or other
MAMAALRRXGRRLIXXSXVXNPSLAAAFSXXTXSSAVSQPEMAPLGARSISTQIVRNRMKSVRNIQKITKAMKMVAASKLRAVQTRTENSRGLWQPFTALLGDAPSVDVKKNVIVAITSDKGLCGGINSTSVKVSRALHKLTSGPEKETKYVILGEKGKVQLLRDSKDSIEMTATELQKNPINYTQVAVLADDILKNVEYDALRVIFNKFQSVISFKPTMVTILSPEVAEKESEAGGKMGDLDSYEIEGGETKSEILQNLAEFQFSCVLYNGALENACSELGARMSAMDSSSRNAGDMLDRLTLTYNRTRQASITTELTEIISGASALEG

SEQ ID NO: 37839 - protein, 328 aa, Zea mays subsp. mays
  peptide (1)..(328): Ceres Seq. ID no. 12364243
  misc_feature (53)..(184): Pfam Name: Pfam Description:  ATP synthase
  misc_feature (1)..(328): NCBI GI NO: 543867 NR Description: ATP synthase gamma chain, mitochondrial precursor
  misc_feature (185)..(328): NCBI GI NO: 37532654 NR Description: putative ATP SYNTHASE GAMMA CHAIN
  misc_feature (53)..(184): NCBI GI NO: 37532654 NR Description: putative ATP SYNTHASE GAMMA CHAIN
  misc_feature (1)..(327): NCBI GI NO: 15227257 NR Description: mitochondrial F1-ATPase, gamma subunit
  misc_feature (1)..(327): NCBI GI NO: 22530902 NR Description: mitochondrial F1-ATPase, gamma subunit
  misc_feature (1)..(327): NCBI GI NO: 7436158 NR Description: probable H+-transporting two-sector ATPase (EC3
  misc_feature (165)..(328): NCBI GI NO: 7436157 NR Description: probable H+-transporting two-sector ATPase (EC3
  misc_feature (49)..(326): NCBI GI NO: 11466530 NR Description: ATP synthase F1 subunit alpha
  misc_feature (40)..(326): NCBI GI NO: 23490546 NR Description: ATP synthase F1, gamma subunit
  misc_feature (45)..(326): NCBI GI NO: 17544026 NR Description: ATP synthase (32.4 kD) [Caenorhabditis elegans]
  misc_feature (7)..(7): Xaa is any aa, unknown or other
  misc_feature (13)..(13): Xaa is any aa, unknown or other
  misc_feature (14)..(14): Xaa is any aa, unknown or other
  misc_feature (16)..(16): Xaa is any aa, unknown or other
  misc_feature (18)..(18): Xaa is any aa, unknown or other
  misc_feature (28)..(28): Xaa is any aa, unknown or other
  misc_feature (29)..(29): Xaa is any aa, unknown or other
  misc_feature (31)..(31): Xaa is any aa, unknown or other
MAALRRXGRRLIXXSXVXNPSLAAAFSXXTXSSAVSQPEMAPLGARSISTQIVRNRMKSVRNIQKITKAMKMVAASKLRAVQTRTENSRGLWQPFTALLGDAPSVDVKKNVIVAITSDKGLCGGINSTSVKVSRALHKLTSGPEKETKYVILGEKGKVQLLRDSKDSIEMTATELQKNPINYTQVAVLADDILKNVEYDALRVIFNKFQSVISFKPTMVTILSPEVAEKESEAGGKMGDLDSYEIEGGETKSEILQNLAEFQFSCVLYNGALENACSELGARMSAMDSSSRNAGDMLDRLTLTYNRTRQASITTELTEIISGASALEG

SEQ ID NO: 37840 - DNA, 1431 bp, Zea mays subsp. mays
  misc_feature (1)..(1431): Ceres Seq. ID no. 12367949
gtcttcctcacaaatcccacccaaaaaaaaaacgcctcccggttgctcgcctctatcctcattgaaaatctttgaaagaggtttggatcccgaaaccgccaagggcccgccccgcaagtgcatggcagtgaacttcctggccaatgaggtgtcggacctgtgcatcggcaagccggccgtgaggtcgctaccgctctccgccgccaccggcgaccttgccgccgccctccggagggtgtcccgctctggcgccgcagcctgcgtcgcggtgaccggaccagcgcgcgccgtcgtcggccgggtcggcctcgcggacgtcctctgcttcctctgcaccgaccccgaggcgctcgcgcgccccgccgcggtgttcgccaagccggtctccgcgctcctgcctaaggacggcgccggagaggtccgccgcgtcgatccccgctccagtatcttggaggcccttgatgcggttctgagcggggcgcaggtgctggccgtcccactccgcgctggcgggcgcaagaagcagctcgttggcgccgccgacgacggcgacttctgctggctcacgcaggaggacctcgtgcgctactttctcaactacatctgcctcgtctacaatgtggcggcgcgctccgtgtcctccctcgggctcgtgcgcgccgacttcctctcggtgcgccccggcgaggcgtccctgtccgccgtgcccctcatccgccgcgccgtcgccacggagacggcggtcgccgtggtcgccgaagacgggcacctcgtcggcgagatctcccctgcccttctcgcggcctgcgacgagacggcggcggcagccatcgccacgctctcggccgccgacctcatggcctacatcgaccactacgtgtcgccgccggagcacatcctgcgcgccgtcaaggccgggctgaaggacaagggcctggacgccttgcttgcgctggttgaggacgagacgctgtcgtccttctcgtccctctccgcgtcctcctcgtccgacgaggaggcaggccgggcgcagctgaggcgcccgtcgtcggggagctacgggcggcgggcggctgacgagccggtggtgtgcagccccgcgagctcactggtggccgtcttggtgcaggccctcgcgcacagggtgagctacgtctgggtcctcgacgaggacaacgactgccgcctcgccggcatcgtcaggttcgcggacgtgctgagggtgttccgggaccagctgctgtgaggtctgacgagtgcttactgtttcctggctcccatcttgtggtgtcatggaattgagaagaatatgagctcttgtttctgaaacatttttatttgaagagtatgtgtttgcttgcttggtagccagttcagaattcagatgaacagctttggcattggtgcgttttcattaaatttcttcctatt

SEQ ID NO: 37841 - protein, 414 aa, Zea mays subsp. mays
  peptide (1)..(414): Ceres Seq. ID no. 12367950
  misc_feature (355)..(410): Pfam Name: Pfam Description:  CBS domain
  misc_feature (41)..(413): NCBI GI NO: 37535750 NR Description: unknown protein
  misc_feature (184)..(414): NCBI GI NO: 15238832 NR Description: putative protein; protein id: At5g53750.1
  misc_feature (41)..(167): NCBI GI NO: 15238832 NR Description: putative protein; protein id: At5g53750.1
  misc_feature (98)..(410): NCBI GI NO: 27754524 NR Description: unknown protein [Arabidopsis thaliana]
  misc_feature (98)..(410): NCBI GI NO: 30687603 NR Description: expressed protein [Arabidopsis thaliana]
  misc_feature (98)..(402): NCBI GI NO: 7486257 NR Description: hypothetical protein F27G19
  misc_feature (185)..(412): NCBI GI NO: 15218643 NR Description: hypothetical protein; protein id: At1g65320.1
  misc_feature (185)..(412): NCBI GI NO: 7487793 NR Description: hypothetical protein T8F5
SSSQIPPKKKTPPGCSPLSSLKIFERGLDPETAKGPPRKCMAVNFLANEVSDLCIGKPAVRSLPLSAATGDLAAALRRVSRSGAAACVAVTGPARAVVGRVGLADVLCFLCTDPEALARPAAVFAKPVSALLPKDGAGEVRRVDPRSSILEALDAVLSGAQVLAVPLRAGGRKKQLVGAADDGDFCWLTQEDLVRYFLNYICLVYNVAARSVSSLGLVRADFLSVRPGEASLSAVPLIRRAVATETAVAVVAEDGHLVGEISPALLAACDETAAAAIATLSAADLMAYIDHYVSPPEHILRAVKAGLKDKGLDALLALVEDETLSSFSSLSASSSSDEEAGRAQLRRPSSGSYGRRAADEPVVCSPASSLVAVLVQALAHRVSYVWVLDEDNDCRLAGIVRFADVLRVFRDQLL

SEQ ID NO: 37842 - protein, 374 aa, Zea mays subsp. mays
  peptide (1)..(374): Ceres Seq. ID no. 12367951
  misc_feature (315)..(370): Pfam Name: Pfam Description:  CBS domain
  misc_feature (1)..(373): NCBI GI NO: 37535750 NR Description: unknown protein
  misc_feature (144)..(374): NCBI GI NO: 15238832 NR Description: putative protein; protein id: At5g53750.1
  misc_feature (1)..(127): NCBI GI NO: 15238832 NR Description: putative protein; protein id: At5g53750.1
  misc_feature (58)..(370): NCBI GI NO: 27754524 NR Description: unknown protein [Arabidopsis thaliana]
  misc_feature (58)..(370): NCBI GI NO: 30687603 NR Description: expressed protein [Arabidopsis thaliana]
  misc_feature (58)..(362): NCBI GI NO: 7486257 NR Description: hypothetical protein F27G19
  misc_feature (145)..(372): NCBI GI NO: 15218643 NR Description: hypothetical protein; protein id: At1g65320.1
  misc_feature (145)..(372): NCBI GI NO: 7487793 NR Description: hypothetical protein T8F5
MAVNFLANEVSDLCIGKPAVRSLPLSAATGDLAAALRRVSRSGAAACVAVTGPARAVVGRVGLADVLCFLCTDPEALARPAAVFAKPVSALLPKDGAGEVRRVDPRSSILEALDAVLSGAQVLAVPLRAGGRKKQLVGAADDGDFCWLTQEDLVRYFLNYICLVYNVAARSVSSLGLVRADFLSVRPGEASLSAVPLIRRAVATETAVAVVAEDGHLVGEISPALLAACDETAAAAIATLSAADLMAYIDHYVSPPEHILRAVKAGLKDKGLDALLALVEDETLSSFSSLSASSSSDEEAGRAQLRRPSSGSYGRRAADEPVVCSPASSLVAVLVQALAHRVSYVWVLDEDNDCRLAGIVRFADVLRVFRDQLL

SEQ ID NO: 37843 - DNA, 1541 bp, Zea mays subsp. mays
  misc_feature (1)..(1541): Ceres Seq. ID no. 12373039
cccgttcaacccacctttctgccacacacctcgagcgaagcaagcaccgcaagaattgaagagccagggagattttccgtcgctccgtccgatccatggccgaacagtggtggggcagtgcctctcacaggagtcacggcacgtcggcgtgctcggccgccgcgccaccgccgctcacggtcacgggcagggtggcctgcggcagcaccttccccaccgcagccgttgagtcgacgagctccgtaaccttccaggacccttatagaagctccacccatcagcctttgtctgatgccgcctcctcgctcggtgatccacacctggactggacgcaaaccttcttgagcgggaggagcgatgccagcttccaagccgtgctccaagaaccctccgcgacgaacgatccattaatcagggaccacatggacatgggtgccggcttcttggccgaccaggcgcagctagcgccgtcgccgtacggcgatacggagccatcgcaagctcaagctctattcgacgccacggcggccgtgcacaacattttgatgtacggagacagcgaatcctcggtcagctacgacgccggcgcggcatcgatgcagttttcccagctgctcaggacctcggtgcccgcgtctacgcctacgcctacgcaaggcgacggcgtcagcgtcggcgtcggcgctccgatgcagtacttgtccggcagcagttacctgcctttcggtggcccgctgccgtctcaccttctcttgcaggccctgcaggcggctaagcccaatagccgcagctccaacgctaactctccgtcggcgaaggacgactgctctccaccaccggcggcgacgaggaaaagcgtctccgagccgcctgccgccgcgaaaaggccacggatcgaggcgccatcgccgctaccgacttttaaggtgcggaaagagaagctaggggacagaatcactgcgctccagcaactcgtctcgccttttggaaagactgataccgcatcggttcttcacgaggccatcgaatacatcaaattccttcacgaccaagttgcgtcactgagctctccctacttgaaaaatgggatccccatgaagcaattccagcacaagggctctgaggattccaaggataacggcgacacgaagcaagcagacctgcggagccggggcctgtgccttgtcccagtagcgagcacatacacggtggcggccgagacaccggagttctggcaccctacatttggaggcacattccgatggtgatgatcgtccagttttagtagcaagctaagtagcctgctgagacggaaagcaagaagtcatgatgcggcccaaagcaatcgaaggatgttttgcaagggaaaagatgtacgagatggatatgataataggtttccagtggtctcttctaagacatgcatgctggatcaggtgcagaagagagaatgattaattgaggccgtgtgtatgtgtggcacctatactcatatatatgcatgcatgcaactttgcaagcaaataattagtgacagctat

SEQ ID NO: 37844 - protein, 390 aa, Zea mays subsp. mays
  peptide (1)..(390): Ceres Seq. ID no. 12373040
  misc_feature (279)..(316): Pfam Name: Pfam Description:  Helix-loop-helix DNA-binding domain
  misc_feature (1)..(325): NCBI GI NO: 34910130 NR Description: B1070A12.8
  misc_feature (46)..(389): NCBI GI NO: 9294343 NR Description: gene_id:F3H11.2~unknown protein
  misc_feature (46)..(389): NCBI GI NO: 15232315 NR Description: hypothetical protein; protein id: At3g20640.1
  misc_feature (253)..(389): NCBI GI NO: 18407276 NR Description: expressed protein; protein id: At1g61660
  misc_feature (253)..(389): NCBI GI NO: 21553730 NR Description: unknown [Arabidopsis thaliana]
  misc_feature (6)..(389): NCBI GI NO: 34910130 NR Description: B1070A12.8
  misc_feature (263)..(381): NCBI GI NO: 22328848 NR Description: hypothetical protein; protein id: At4g21340
  misc_feature (259)..(374): NCBI GI NO: 15234636 NR Description: putative protein; protein id: At4g05170.1
  misc_feature (261)..(384): NCBI GI NO: 22093671 NR Description: similar to bHLH
  misc_feature (221)..(390): NCBI GI NO: 14488370 NR Description: putative ethylene-responsive protein
MAEQWWGSASHRSHGTSACSAAAPPPLTVTGRVACGSTFPTAAVESTSSVTFQDPYRSSTHQPLSDAASSLGDPHLDWTQTFLSGRSDASFQAVLQEPSATNDPLIRDHMDMGAGFLADQAQLAPSPYGDTEPSQAQALFDATAAVHNILMYGDSESSVSYDAGAASMQFSQLLRTSVPASTPTPTQGDGVSVGVGAPMQYLSGSSYLPFGGPLPSHLLLQALQAAKPNSRSSNANSPSAKDDCSPPPAATRKSVSEPPAAAKRPRIEAPSPLPTFKVRKEKLGDRITALQQLVSPFGKTDTASVLHEAIEYIKFLHDQVASLSSPYLKNGIPMKQFQHKGSEDSKDNGDTKQADLRSRGLCLVPVASTYTVAAETPEFWHPTFGGTFRW

SEQ ID NO: 37845 - protein, 281 aa, Zea mays subsp. mays
  peptide (1)..(281): Ceres Seq. ID no. 12373041
  misc_feature (170)..(207): Pfam Name: Pfam Description:  Helix-loop-helix DNA-binding domain
  misc_feature (1)..(216): NCBI GI NO: 34910130 NR Description: B1070A12.8
  misc_feature (1)..(280): NCBI GI NO: 9294343 NR Description: gene_id:F3H11.2~unknown protein
  misc_feature (1)..(280): NCBI GI NO: 15232315 NR Description: hypothetical protein; protein id: At3g20640.1
  misc_feature (144)..(280): NCBI GI NO: 18407276 NR Description: expressed protein; protein id: At1g61660
  misc_feature (144)..(280): NCBI GI NO: 21553730 NR Description: unknown [Arabidopsis thaliana]
  misc_feature (1)..(280): NCBI GI NO: 34910130 NR Description: B1070A12.8
  misc_feature (154)..(272): NCBI GI NO: 22328848 NR Description: hypothetical protein; protein id: At4g21340
  misc_feature (150)..(265): NCBI GI NO: 15234636 NR Description: putative protein; protein id: At4g05170.1
  misc_feature (152)..(275): NCBI GI NO: 22093671 NR Description: similar to bHLH
  misc_feature (112)..(281): NCBI GI NO: 14488370 NR Description: putative ethylene-responsive protein
MDMGAGFLADQAQLAPSPYGDTEPSQAQALFDATAAVHNILMYGDSESSVSYDAGAASMQFSQLLRTSVPASTPTPTQGDGVSVGVGAPMQYLSGSSYLPFGGPLPSHLLLQALQAAKPNSRSSNANSPSAKDDCSPPPAATRKSVSEPPAAAKRPRIEAPSPLPTFKVRKEKLGDRITALQQLVSPFGKTDTASVLHEAIEYIKFLHDQVASLSSPYLKNGIPMKQFQHKGSEDSKDNGDTKQADLRSRGLCLVPVASTYTVAAETPEFWHPTFGGTFRW

SEQ ID NO: 37846 - protein, 279 aa, Zea mays subsp. mays
  peptide (1)..(279): Ceres Seq. ID no. 12373042
  misc_feature (168)..(205): Pfam Name: Pfam Description:  Helix-loop-helix DNA-binding domain
  misc_feature (1)..(214): NCBI GI NO: 34910130 NR Description: B1070A12.8
  misc_feature (1)..(278): NCBI GI NO: 9294343 NR Description: gene_id:F3H11.2~unknown protein
  misc_feature (1)..(278): NCBI GI NO: 15232315 NR Description: hypothetical protein; protein id: At3g20640.1
  misc_feature (142)..(278): NCBI GI NO: 18407276 NR Description: expressed protein; protein id: At1g61660
  misc_feature (142)..(278): NCBI GI NO: 21553730 NR Description: unknown [Arabidopsis thaliana]
  misc_feature (1)..(278): NCBI GI NO: 34910130 NR Description: B1070A12.8
  misc_feature (152)..(270): NCBI GI NO: 22328848 NR Description: hypothetical protein; protein id: At4g21340
  misc_feature (148)..(263): NCBI GI NO: 15234636 NR Description: putative protein; protein id: At4g05170.1
  misc_feature (150)..(273): NCBI GI NO: 22093671 NR Description: similar to bHLH
  misc_feature (110)..(279): NCBI GI NO: 14488370 NR Description: putative ethylene-responsive protein
MGAGFLADQAQLAPSPYGDTEPSQAQALFDATAAVHNILMYGDSESSVSYDAGAASMQFSQLLRTSVPASTPTPTQGDGVSVGVGAPMQYLSGSSYLPFGGPLPSHLLLQALQAAKPNSRSSNANSPSAKDDCSPPPAATRKSVSEPPAAAKRPRIEAPSPLPTFKVRKEKLGDRITALQQLVSPFGKTDTASVLHEAIEYIKFLHDQVASLSSPYLKNGIPMKQFQHKGSEDSKDNGDTKQADLRSRGLCLVPVASTYTVAAETPEFWHPTFGGTFRW

SEQ ID NO: 37847 - DNA, 1261 bp, Zea mays subsp. mays
  misc_feature (1)..(1261): Ceres Seq. ID no. 12383097
ttaaccctcactaaagggaacaaaagctggagctccaccgcggtggcggccgctctagaactagtggatcccccgggctgcaggaattcgacgagaccattacctagaacatcctaatcgaaaactcacacaccatcgaaacacaaaccagcagcaggcagagcaacgactagctgccaggcaagccggccgggggtgctgcaagagtgcaacaaacaatggccaccgcgctctccttcaaggccttggcactggccgcgctcctctccatggtcgtcgcctctggcgctcgcgccgagcaacagttcaagcgcaacgccaccaccgcctcgcaggacagatccttgttgtcctacagcagtggctggctgccggccaaggccacctggtacggcgcccccaccggcgccggccccctcgacaacggtggtgcgtgcgggttcaagggcaccaaccagtacccgttctcgtccatgacgtcctgtggcaacgagcccatcttcaaggacggcaagggttgcggctcatgctaccagatacggtgcctgaagagcaaccacccggcctgctccggcgtggctcagacggtgatcatcacggacatgaactactacccggtggccaagtaccacttcgacctgagcggcacggcgttcgggtccatggccagctggggcctgaacgacaagctccggcacgccgggatcatcgacatgcagttcaggcgggtgccgtgcaacttcccgggcctgaccatcaccttccgcgtccagcacggctccaaccccatgtacctggccgtgctcatcgagcacgagaacaaggacggcgacgtggtgcaggcggacatcatgcagagcaactccggccactgggagcccatgcacgagtcctggggctccatctggaggatcgaccccaaccgcccgctccgtggccccttctccatgcgcatcaccaacgagtccggcaggcagctggtggccaagaacgtcatcccggccaactacatccccgacgtcgactaccgctccttcgtccagtactaatgatcgagctagcttggtcattgcttaagcgtttaattgtttcttctttatttaattagtggctgccgttgccgacatgcatgtgggggaaattggaggaggcaagcatcaatgcaatgtgtgctctcccgcccactgtcactataccgttattaattaccagtgtgtaaccagcaaatcatactacatatatggttatataatttcatact

SEQ ID NO: 37848 - protein, 276 aa, Zea mays subsp. mays
  peptide (1)..(276): Ceres Seq. ID no. 12383098
  misc_feature (180)..(261): Pfam Name: Pfam Description:  Pollen allergen
  misc_feature (1)..(276): NCBI GI NO: 14193771 NR Description: beta-expansin 6 [Zea mays]
  misc_feature (1)..(276): NCBI GI NO: 14330328 NR Description: beta expansin B2 [Festuca pratensis]
  misc_feature (3)..(276): NCBI GI NO: 14330330 NR Description: beta expansin B3 [Festuca pratensis]
  misc_feature (1)..(276): NCBI GI NO: 37536756 NR Description: beta-expansin EXPB6
  misc_feature (1)..(276): NCBI GI NO: 37536760 NR Description: beta-expansin EXPB3
  misc_feature (1)..(276): NCBI GI NO: 14193773 NR Description: beta-expansin 7 [Zea mays]
  misc_feature (5)..(276): NCBI GI NO: 4099919 NR Description: pollen allergen homolog [Triticum aestivum]
  misc_feature (36)..(276): NCBI GI NO: 8118432 NR Description: beta-expansin [Oryza sativa]
  misc_feature (6)..(276): NCBI GI NO: 8118425 NR Description: beta-expansin [Oryza sativa]
  misc_feature (6)..(276): NCBI GI NO: 37536762 NR Description: beta-expansin EXPB4
MATALSFKALALAALLSMVVASGARAEQQFKRNATTASQDRSLLSYSSGWLPAKATWYGAPTGAGPLDNGGACGFKGTNQYPFSSMTSCGNEPIFKDGKGCGSCYQIRCLKSNHPACSGVAQTVIITDMNYYPVAKYHFDLSGTAFGSMASWGLNDKLRHAGIIDMQFRRVPCNFPGLTITFRVQHGSNPMYLAVLIEHENKDGDVVQADIMQSNSGHWEPMHESWGSIWRIDPNRPLRGPFSMRITNESGRQLVAKNVIPANYIPDVDYRSFVQY

SEQ ID NO: 37849 - protein, 259 aa, Zea mays subsp. mays
  peptide (1)..(259): Ceres Seq. ID no. 12383099
  misc_feature (163)..(244): Pfam Name: Pfam Description:  Pollen allergen
  misc_feature (1)..(259): NCBI GI NO: 14193771 NR Description: beta-expansin 6 [Zea mays]
  misc_feature (1)..(259): NCBI GI NO: 14330328 NR Description: beta expansin B2 [Festuca pratensis]
  misc_feature (1)..(259): NCBI GI NO: 14330330 NR Description: beta expansin B3 [Festuca pratensis]
  misc_feature (1)..(259): NCBI GI NO: 37536756 NR Description: beta-expansin EXPB6
  misc_feature (1)..(259): NCBI GI NO: 37536760 NR Description: beta-expansin EXPB3
  misc_feature (1)..(259): NCBI GI NO: 14193773 NR Description: beta-expansin 7 [Zea mays]
  misc_feature (1)..(259): NCBI GI NO: 4099919 NR Description: pollen allergen homolog [Triticum aestivum]
  misc_feature (19)..(259): NCBI GI NO: 8118432 NR Description: beta-expansin [Oryza sativa]
  misc_feature (1)..(259): NCBI GI NO: 8118425 NR Description: beta-expansin [Oryza sativa]
  misc_feature (1)..(259): NCBI GI NO: 37536762 NR Description: beta-expansin EXPB4
MVVASGARAEQQFKRNATTASQDRSLLSYSSGWLPAKATWYGAPTGAGPLDNGGACGFKGTNQYPFSSMTSCGNEPIFKDGKGCGSCYQIRCLKSNHPACSGVAQTVIITDMNYYPVAKYHFDLSGTAFGSMASWGLNDKLRHAGIIDMQFRRVPCNFPGLTITFRVQHGSNPMYLAVLIEHENKDGDVVQADIMQSNSGHWEPMHESWGSIWRIDPNRPLRGPFSMRITNESGRQLVAKNVIPANYIPDVDYRSFVQY

SEQ ID NO: 37850 - protein, 193 aa, Zea mays subsp. mays
  peptide (1)..(193): Ceres Seq. ID no. 12383100
MLPDTVPEEQPPGLLRRGSDGDHHGHELLPGGQVPLRPERHGVRVHGQLGPERQAPARRDHRHAVQAGAVQLPGPDHHLPRPARLQPHVPGRAHRAREQGRRRGAGGHHAEQLRPLGAHARVLGLHLEDRPQPPAPWPLLHAHHQRVRQAAGGQERHPGQLHPRRRLPLLRPVLMIELAWSLLKRLIVSSLFN

SEQ ID NO: 37851 - DNA, 1835 bp, Zea mays subsp. mays
  misc_feature (1)..(1835): Ceres Seq. ID no. 12349580
aaatccagatatcagggcagctggaactgaaggtggcgggagccgagtgatccggcggtgagctgagcggggcgggatggcggcggagcaggggcggtcgctggcggagacgcccacctggtccgtggcaaccgtcaccacgctcatggtcgctgcctgcttcctcgtcgagcgctccctctcgcgcttcgccaagtggctgcgcaagaccaagcggaaggccatgctcgccgcgctcgagaagatccgcgaagagctgatgctgctcggagtcatctcgctgctgctcagccagacggcgcgcttcatatcggagatctgcgtgccgtcctcgctcttcaccagccgcttctacatctgctccgagagcgactaccaggacctgctgcgcaacacggacgccaaccagacggcgctcgacaagaacatgttcggtggccaacggctgcacgtctgtggcgagggccatgaaccttttgtttcgtacgagggccttgagcagctgcaccggtttctcttcatccttggtatcactcatgtgttgtacagttttgtaacagtggttctgtccatgatcaagatctatagctggaggaagtgggaaaccttagcaggtccaattgctgctgaggaattgaaagctaggagaaccaaggtgatgagaaggcagtcaacctttgtttttaacaatgcttctcatccatggagcaaaaataaaatacttatttggatgctttgctttttgcgtcaattcaagggctccataataaggtcagactatttggcactgaggttgggctttgtcacatatcacaagctaccacattcatatgacttccataaatacatggtacggagcatggaagatgattacaatgggactattggtatcagttggccactttgggcatatgcgattgtctgcatattaatcaatgttcatggtatcaatatatatttctggttgtcctttgttcctgttattctggtgcttctagtgggtactgaacttcagcacgtcattgctcagttggctttggaagtcgctgaggcaacagcgccttatgttggctcacaacttaaactgcgtgatgatctattttggtttggaaagcctcgggtactctggtggcttatacagttcatttcatttcagaatgcttttgagctggcgacattcttatggtctctgtgggaactcagtgcacatacatgtttcatgaagcactactacatggttgccattcggttgatttctgggctcctagttcagttttggtgcagctacagcacactgccgctgaatgtgattatttctcagatgggttccaagttcaagaaatcactggtctcggagaacgtgagggagtcgctgcacagctggtgcaagagggttaaggacaggagccgacacaacccgctcttctcgcggaacgggaccctcacgaccagatccgtgtgctccctagacaccacctacgagacggatcacgagacgaacacggtgtgcacgctgtcgaggacggcgtcggcaacgtcgctggacgaccagttgaccgtggtcaccgtcgatgacgagccgtcctgcattgagaaggatgtctgacgcagttgctgattcgccaaaactacatactgcatcgacctgtgtgttaggaggtactctaggactgaaatgaatgtatatgtgcagtggttgcccctatcgtggcagtgaccatgtgtatatatagaactaaaaaaactataatgtctcttagctgagagtgagaggctgtacatggaaatacttgaggcagcttggaccaaatacaaaactgcggccccgtttgttt

SEQ ID NO: 37852 - protein, 509 aa, Zea mays subsp. mays
  peptide (1)..(509): Ceres Seq. ID no. 12349581
  misc_feature (4)..(501): Pfam Name: Pfam Description:  Mlo family
  misc_feature (1)..(509): NCBI GI NO: 13784981 NR Description: seven transmembrane protein Mlo4 [Zea mays]
  misc_feature (4)..(503): NCBI GI NO: 18391228 NR Description: Barley Mlo protein isolog; protein id: At1g11000
  misc_feature (4)..(503): NCBI GI NO: 33942041 NR Description: At1g11000 [Arabidopsis thaliana]
  misc_feature (1)..(481): NCBI GI NO: 15238833 NR Description: putative protein; protein id: At5g53760
  misc_feature (7)..(509): NCBI GI NO: 18396019 NR Description: Mlo protein, putative; protein id: At1g26700
  misc_feature (1)..(465): NCBI GI NO: 32487408 NR Description: OSJNBb0017I01.22
  misc_feature (3)..(443): NCBI GI NO: 34907492 NR Description: putative seven transmembrane protein
  misc_feature (127)..(473): NCBI GI NO: 13784991 NR Description: seven transmembrane protein Mlo9 [Zea mays]
  misc_feature (1)..(473): NCBI GI NO: 37536520 NR Description: putative Mlo (pathogen resistance) protein
  misc_feature (1)..(467): NCBI GI NO: 13784977 NR Description: seven transmembrane protein Mlo2 [Zea mays]
MAAEQGRSLAETPTWSVATVTTLMVAACFLVERSLSRFAKWLRKTKRKAMLAALEKIREELMLLGVISLLLSQTARFISEICVPSSLFTSRFYICSESDYQDLLRNTDANQTALDKNMFGGQRLHVCGEGHEPFVSYEGLEQLHRFLFILGITHVLYSFVTVVLSMIKIYSWRKWETLAGPIAAEELKARRTKVMRRQSTFVFNNASHPWSKNKILIWMLCFLRQFKGSIIRSDYLALRLGFVTYHKLPHSYDFHKYMVRSMEDDYNGTIGISWPLWAYAIVCILINVHGINIYFWLSFVPVILVLLVGTELQHVIAQLALEVAEATAPYVGSQLKLRDDLFWFGKPRVLWWLIQFISFQNAFELATFLWSLWELSAHTCFMKHYYMVAIRLISGLLVQFWCSYSTLPLNVIISQMGSKFKKSLVSENVRESLHSWCKRVKDRSRHNPLFSRNGTLTTRSVCSLDTTYETDHETNTVCTLSRTASATSLDDQLTVVTVDDEPSCIEKDV

SEQ ID NO: 37853 - protein, 486 aa, Zea mays subsp. mays
  peptide (1)..(486): Ceres Seq. ID no. 12349582
  misc_feature (1)..(478): Pfam Name: Pfam Description:  Mlo family
  misc_feature (1)..(486): NCBI GI NO: 13784981 NR Description: seven transmembrane protein Mlo4 [Zea mays]
  misc_feature (1)..(480): NCBI GI NO: 18391228 NR Description: Barley Mlo protein isolog; protein id: At1g11000
  misc_feature (1)..(480): NCBI GI NO: 33942041 NR Description: At1g11000 [Arabidopsis thaliana]
  misc_feature (1)..(458): NCBI GI NO: 15238833 NR Description: putative protein; protein id: At5g53760
  misc_feature (1)..(486): NCBI GI NO: 18396019 NR Description: Mlo protein, putative; protein id: At1g26700
  misc_feature (1)..(442): NCBI GI NO: 32487408 NR Description: OSJNBb0017I01.22
  misc_feature (1)..(420): NCBI GI NO: 34907492 NR Description: putative seven transmembrane protein
  misc_feature (104)..(450): NCBI GI NO: 13784991 NR Description: seven transmembrane protein Mlo9 [Zea mays]
  misc_feature (1)..(450): NCBI GI NO: 37536520 NR Description: putative Mlo (pathogen resistance) protein
  misc_feature (1)..(444): NCBI GI NO: 13784977 NR Description: seven transmembrane protein Mlo2 [Zea mays]
MVAACFLVERSLSRFAKWLRKTKRKAMLAALEKIREELMLLGVISLLLSQTARFISEICVPSSLFTSRFYICSESDYQDLLRNTDANQTALDKNMFGGQRLHVCGEGHEPFVSYEGLEQLHRFLFILGITHVLYSFVTVVLSMIKIYSWRKWETLAGPIAAEELKARRTKVMRRQSTFVFNNASHPWSKNKILIWMLCFLRQFKGSIIRSDYLALRLGFVTYHKLPHSYDFHKYMVRSMEDDYNGTIGISWPLWAYAIVCILINVHGINIYFWLSFVPVILVLLVGTELQHVIAQLALEVAEATAPYVGSQLKLRDDLFWFGKPRVLWWLIQFISFQNAFELATFLWSLWELSAHTCFMKHYYMVAIRLISGLLVQFWCSYSTLPLNVIISQMGSKFKKSLVSENVRESLHSWCKRVKDRSRHNPLFSRNGTLTTRSVCSLDTTYETDHETNTVCTLSRTASATSLDDQLTVVTVDDEPSCIEKDV

SEQ ID NO: 37854 - protein, 460 aa, Zea mays subsp. mays
  peptide (1)..(460): Ceres Seq. ID no. 12349583
  misc_feature (1)..(452): Pfam Name: Pfam Description:  Mlo family
  misc_feature (1)..(460): NCBI GI NO: 13784981 NR Description: seven transmembrane protein Mlo4 [Zea mays]
  misc_feature (1)..(454): NCBI GI NO: 18391228 NR Description: Barley Mlo protein isolog; protein id: At1g11000
  misc_feature (1)..(454): NCBI GI NO: 33942041 NR Description: At1g11000 [Arabidopsis thaliana]
  misc_feature (1)..(432): NCBI GI NO: 15238833 NR Description: putative protein; protein id: At5g53760
  misc_feature (1)..(460): NCBI GI NO: 18396019 NR Description: Mlo protein, putative; protein id: At1g26700
  misc_feature (1)..(416): NCBI GI NO: 32487408 NR Description: OSJNBb0017I01.22
  misc_feature (1)..(394): NCBI GI NO: 34907492 NR Description: putative seven transmembrane protein
  misc_feature (78)..(424): NCBI GI NO: 13784991 NR Description: seven transmembrane protein Mlo9 [Zea mays]
  misc_feature (1)..(424): NCBI GI NO: 37536520 NR Description: putative Mlo (pathogen resistance) protein
  misc_feature (1)..(418): NCBI GI NO: 13784977 NR Description: seven transmembrane protein Mlo2 [Zea mays]
MLAALEKIREELMLLGVISLLLSQTARFISEICVPSSLFTSRFYICSESDYQDLLRNTDANQTALDKNMFGGQRLHVCGEGHEPFVSYEGLEQLHRFLFILGITHVLYSFVTVVLSMIKIYSWRKWETLAGPIAAEELKARRTKVMRRQSTFVFNNASHPWSKNKILIWMLCFLRQFKGSIIRSDYLALRLGFVTYHKLPHSYDFHKYMVRSMEDDYNGTIGISWPLWAYAIVCILINVHGINIYFWLSFVPVILVLLVGTELQHVIAQLALEVAEATAPYVGSQLKLRDDLFWFGKPRVLWWLIQFISFQNAFELATFLWSLWELSAHTCFMKHYYMVAIRLISGLLVQFWCSYSTLPLNVIISQMGSKFKKSLVSENVRESLHSWCKRVKDRSRHNPLFSRNGTLTTRSVCSLDTTYETDHETNTVCTLSRTASATSLDDQLTVVTVDDEPSCIEKDV

SEQ ID NO: 37855 - DNA, 1825 bp, Zea mays subsp. mays
  misc_feature (1)..(1825): Ceres Seq. ID no. 12368369
gcacgagaccattacctagaacatcctaatcgaaaagtgggctggtcctcagtcctcttccgttcttcctcctcgctcccgccccctcgcgcccctcgcctttcagttttggatgccacggaggcctgccagtggtgggccaccgccgtacgcgcgcgacgatgccggtgaagcgttcggcgtccgcgctggcgctcccgccggtcggccgccgcgcgcgggcccgcctctgcatccgcctcgccgcgccgctctccttcctgctcctcttcgtggcgctgttccacgcccagccgctcctgggcgttccgcccgctgcgcagccgccctccgcggggcccggtaaggtcgccttccttttcctcgtccgcgcgggggtgccgctcgacttcctctgggacgccttcttccgcaacggcgaggaggggaagttctcggtgtacgtgcactccgcgccggggttccagctcgaccgcaccaccacgggatccccatacttctatgggcggcaacttgcgaggagcgtcaaggtggtgtggggcgaggccaccatggtggaggcagagaggatgttgtttgccgccgcgcttcaggatcccgcgaaccagcgctttgttttgctctctgatagctgtgtcccactctacaatttcagctccatatatacttacctgatggcttcacctaaaagttttgtagacagctttgttgataagacggagaagcgttataatcaaaacatgtctcctgccattccaaaggataaatggaggaaaggatctcagtgggtagtattaatcagaaaacatgctgaagttgttgttggtgacaaaaacgtattaaaagtattcagaagacattgcaagatggtagtaaccaagagcttgtttagacgaaggccaaatgctagacaactggggttcacctttcggagaaagcagatactgaaaggagtagctcaacaggagcatgattgtattccggatgaacattatgtgcagacattattttctatcaaaggacttgaagatgaactggagagaagaactttgacctatacctcgtggaaccaatcatcaaatccgaaagacaaaatgacttggcatcctatgaaatttgagtatgatacatctagccctgagcatatcaatgctatcaagagaattgatcatgtcaactatcaaatggagcacaggacagagtggtgccaatgcaatggtacctcggccccatgttttttatttgccaggaagttctcctatagtgcggccatgcatcttttggaacaaggagccattggcacaccgaaatctgctcagctgatgattaacttttaacaaaattgtttacacaagtctgcgctcacttttttgatgggtcattataccgttcacaatttcaccagcctcaatgggagctgtacattagcagcggtagctacagagacatggagtatcagagtattgacagcgaccagaatgcgcttagacagctaaggacttgaagagagttgatgcacaaactacagagcctcggttttgaagtttgtcagctctatcagtatgcgatttccaggggacagatggtagtgaaggacagagtacacacaacccttaccctaacaggacaggaaagttataacaatagcttgattttccttataaatattcttccccttgtatgattaaagaatagatagttttttttacttgcatacaggttatcagacatagcgaatagggaaacatgcaagaagatacatgtgtccataggacctactgtttagaacattggtcacattggcaagaagataagctgccttttc

SEQ ID NO: 37856 - protein, 391 aa, Zea mays subsp. mays
  peptide (1)..(391): Ceres Seq. ID no. 12368370
  misc_feature (101)..(210): Pfam Name: Pfam Description:  Arabidopsis protein of unknown function, DUF266
  misc_feature (1)..(333): NCBI GI NO: 34911442 NR Description: P0431H09.21
  misc_feature (13)..(387): NCBI GI NO: 30682534 NR Description: expressed protein [Arabidopsis thaliana]
  misc_feature (62)..(235): NCBI GI NO: 15241437 NR Description: putative protein; protein id: At5g14550.1
  misc_feature (268)..(376): NCBI GI NO: 15241437 NR Description: putative protein; protein id: At5g14550.1
  misc_feature (13)..(235): NCBI GI NO: 25402693 NR Description: hypothetical protein
  misc_feature (282)..(387): NCBI GI NO: 25402693 NR Description: hypothetical protein
  misc_feature (62)..(235): NCBI GI NO: 30684956 NR Description: expressed protein [Arabidopsis thaliana]
  misc_feature (268)..(333): NCBI GI NO: 30684956 NR Description: expressed protein [Arabidopsis thaliana]
  misc_feature (120)..(236): NCBI GI NO: 22330381 NR Description: hypothetical protein; protein id: At1g62305.1
  misc_feature (62)..(84): NCBI GI NO: 22330381 NR Description: hypothetical protein; protein id: At1g62305.1
MPVKRSASALALPPVGRRARARLCIRLAAPLSFLLLFVALFHAQPLLGVPPAAQPPSAGPGKVAFLFLVRAGVPLDFLWDAFFRNGEEGKFSVYVHSAPGFQLDRTTTGSPYFYGRQLARSVKVVWGEATMVEAERMLFAAALQDPANQRFVLLSDSCVPLYNFSSIYTYLMASPKSFVDSFVDKTEKRYNQNMSPAIPKDKWRKGSQWVVLIRKHAEVVVGDKNVLKVFRRHCKMVVTKSLFRRRPNARQLGFTFRRKQILKGVAQQEHDCIPDEHYVQTLFSIKGLEDELERRTLTYTSWNQSSNPKDKMTWHPMKFEYDTSSPEHINAIKRIDHVNYQMEHRTEWCQCNGTSAPCFLFARKFSYSAAMHLLEQGAIGTPKSAQLMINF

SEQ ID NO: 37857 - protein, 261 aa, Zea mays subsp. mays
  peptide (1)..(261): Ceres Seq. ID no. 12368371
  misc_feature (1)..(80): Pfam Name: Pfam Description:  Arabidopsis protein of unknown function, DUF266
  misc_feature (1)..(203): NCBI GI NO: 34911442 NR Description: P0431H09.21
  misc_feature (1)..(257): NCBI GI NO: 30682534 NR Description: expressed protein [Arabidopsis thaliana]
  misc_feature (1)..(105): NCBI GI NO: 15241437 NR Description: putative protein; protein id: At5g14550.1
  misc_feature (138)..(246): NCBI GI NO: 15241437 NR Description: putative protein; protein id: At5g14550.1
  misc_feature (1)..(105): NCBI GI NO: 25402693 NR Description: hypothetical protein
  misc_feature (152)..(257): NCBI GI NO: 25402693 NR Description: hypothetical protein
  misc_feature (1)..(105): NCBI GI NO: 30684956 NR Description: expressed protein [Arabidopsis thaliana]
  misc_feature (138)..(203): NCBI GI NO: 30684956 NR Description: expressed protein [Arabidopsis thaliana]
  misc_feature (1)..(106): NCBI GI NO: 22330381 NR Description: hypothetical protein; protein id: At1g62305.1
  misc_feature (1)..(104): NCBI GI NO: 37531372 NR Description: hypothetical protein
MVEAERMLFAAALQDPANQRFVLLSDSCVPLYNFSSIYTYLMASPKSFVDSFVDKTEKRYNQNMSPAIPKDKWRKGSQWVVLIRKHAEVVVGDKNVLKVFRRHCKMVVTKSLFRRRPNARQLGFTFRRKQILKGVAQQEHDCIPDEHYVQTLFSIKGLEDELERRTLTYTSWNQSSNPKDKMTWHPMKFEYDTSSPEHINAIKRIDHVNYQMEHRTEWCQCNGTSAPCFLFARKFSYSAAMHLLEQGAIGTPKSAQLMINF

SEQ ID NO: 37858 - protein, 255 aa, Zea mays subsp. mays
  peptide (1)..(255): Ceres Seq. ID no. 12368372
  misc_feature (1)..(74): Pfam Name: Pfam Description:  Arabidopsis protein of unknown function, DUF266
  misc_feature (1)..(197): NCBI GI NO: 34911442 NR Description: P0431H09.21
  misc_feature (1)..(251): NCBI GI NO: 30682534 NR Description: expressed protein [Arabidopsis thaliana]
  misc_feature (1)..(99): NCBI GI NO: 15241437 NR Description: putative protein; protein id: At5g14550.1
  misc_feature (132)..(240): NCBI GI NO: 15241437 NR Description: putative protein; protein id: At5g14550.1
  misc_feature (1)..(99): NCBI GI NO: 25402693 NR Description: hypothetical protein
  misc_feature (146)..(251): NCBI GI NO: 25402693 NR Description: hypothetical protein
  misc_feature (1)..(99): NCBI GI NO: 30684956 NR Description: expressed protein [Arabidopsis thaliana]
  misc_feature (132)..(197): NCBI GI NO: 30684956 NR Description: expressed protein [Arabidopsis thaliana]
  misc_feature (1)..(100): NCBI GI NO: 22330381 NR Description: hypothetical protein; protein id: At1g62305.1
  misc_feature (1)..(98): NCBI GI NO: 37531372 NR Description: hypothetical protein
MLFAAALQDPANQRFVLLSDSCVPLYNFSSIYTYLMASPKSFVDSFVDKTEKRYNQNMSPAIPKDKWRKGSQWVVLIRKHAEVVVGDKNVLKVFRRHCKMVVTKSLFRRRPNARQLGFTFRRKQILKGVAQQEHDCIPDEHYVQTLFSIKGLEDELERRTLTYTSWNQSSNPKDKMTWHPMKFEYDTSSPEHINAIKRIDHVNYQMEHRTEWCQCNGTSAPCFLFARKFSYSAAMHLLEQGAIGTPKSAQLMINF

SEQ ID NO: 37859 - DNA, 1372 bp, Zea mays subsp. mays
  misc_feature (1)..(1372): Ceres Seq. ID no. 12377676
agctcgggctgtggccatatcacgatggaatggaatgaacgagaacaaggaacgccgaaagaaaaagcgtgtccacatactcctccattcaccgcctctgccgctcacacgtctacacctgacgaagtgaacgcggcacacagatttggctttgctgaagaatccggctcctttcatttgttagaaggatcccagatctagatgcagcagcgcgatctgaaaccgtgttgtcggccagccaagctgcggagtacttagtatttgtttagtcaaatttgacggtggaaaccgaagctgccattgccagtaccgctgctgctagaggctatctgctgcctgccgactgccgggcctacctggtcaaacttcgcgagcagggggaagaagacgaagccgcgcccgtgcgccgagcctggggtgtggggtcgcgtcgcatcgcgtccgcccttcgccgcagccgtcggtccgggtccggccctccctagcgcggcgatggatacggaggcggtcccggcgctggcggtggtggacgcgcggttctgcgcggcgggcgcggccacgctggccgtggccaaggcgctgagcatgtccggcagcgacttcgccgtcacggacgcggccacgggcgcgcccgtgctgcgcgtcgacggcgtgctcttcagcctgcgccggcgctgcgtgctcgtcgacgccgaccgccgccccgtcctcaccgtccaagaatcggcgctgatgctgaacacgcggtggaaggtgttccggggcgacagcacccgccggcgggacctcatgttcagcgtcgtgaagccgtccgtgatccagctgcggggccccaccaaggtcagcgtcttcctcgccagcaacgacgccgagcaggcctgcgacttcaggatcaccggcagctaccacgacggcgcctgcgccgtctccctcggcgactccgacaccgtcatcgccaagatcgaccggcggttcagcgtggtcagcgcgctgctggggaagaactcgtacagcgtcaccgtcaacccggggatcgactacgccttcgtcgtcgcgctcgtcgtcatcctcgacgagatccattaccagcgatgacacgcacgcttcagttttggttccaagccgcgcgccttcccttctgctgttggctgttgcgtggaataaggctcgccccgttctcgaatgtttgtcgcgagagactacttaatttccatacgaggatcttaaccttcctaggcacttggcagttccatctggctgtgtactcgacacggacgttctctatttgttaaatacctatgctatttattgtacacttaaatattctacatattttacttttaattaatttattgtctaaagtataaaatct

SEQ ID NO: 37860 - protein, 200 aa, Zea mays subsp. mays
  peptide (1)..(200): Ceres Seq. ID no. 12377677
  misc_feature (11)..(192): Pfam Name: DUF567 Pfam Description: Protein of unknown function
  misc_feature (79)..(159): NCBI GI NO: 28876016 NR Description: hypothetical protein
  misc_feature (1)..(78): NCBI GI NO: 28876016 NR Description: hypothetical protein
  misc_feature (155)..(199): NCBI GI NO: 28876016 NR Description: hypothetical protein
  misc_feature (1)..(200): NCBI GI NO: 27818079 NR Description: OSJNBa0086N05.7
  misc_feature (1)..(197): NCBI GI NO: 30679390 NR Description: expressed protein [Arabidopsis thaliana]
  misc_feature (1)..(178): NCBI GI NO: 28876019 NR Description: hypothetical protein
  misc_feature (11)..(196): NCBI GI NO: 17979321 NR Description: unknown protein [Arabidopsis thaliana]
  misc_feature (11)..(196): NCBI GI NO: 15225960 NR Description: unknown protein; protein id: At2g14560
  misc_feature (1)..(193): NCBI GI NO: 9665105 NR Description: Hypothetical protein [Arabidopsis thaliana]
  misc_feature (9)..(193): NCBI GI NO: 15217694 NR Description: unknown protein; protein id: At1g33840.1
MDTEAVPALAVVDARFCAAGAATLAVAKALSMSGSDFAVTDAATGAPVLRVDGVLFSLRRRCVLVDADRRPVLTVQESALMLNTRWKVFRGDSTRRRDLMFSVVKPSVIQLRGPTKVSVFLASNDAEQACDFRITGSYHDGACAVSLGDSDTVIAKIDRRFSVVSALLGKNSYSVTVNPGIDYAFVVALVVILDEIHYQR

SEQ ID NO: 37861 - protein, 169 aa, Zea mays subsp. mays
  peptide (1)..(169): Ceres Seq. ID no. 12377678
  misc_feature (1)..(161): Pfam Name: DUF567 Pfam Description: Protein of unknown function
  misc_feature (48)..(128): NCBI GI NO: 28876016 NR Description: hypothetical protein
  misc_feature (1)..(47): NCBI GI NO: 28876016 NR Description: hypothetical protein
  misc_feature (124)..(168): NCBI GI NO: 28876016 NR Description: hypothetical protein
  misc_feature (1)..(169): NCBI GI NO: 27818079 NR Description: OSJNBa0086N05.7
  misc_feature (1)..(166): NCBI GI NO: 30679390 NR Description: expressed protein [Arabidopsis thaliana]
  misc_feature (1)..(147): NCBI GI NO: 28876019 NR Description: hypothetical protein
  misc_feature (1)..(165): NCBI GI NO: 17979321 NR Description: unknown protein [Arabidopsis thaliana]
  misc_feature (1)..(165): NCBI GI NO: 15225960 NR Description: unknown protein; protein id: At2g14560
  misc_feature (1)..(162): NCBI GI NO: 9665105 NR Description: Hypothetical protein [Arabidopsis thaliana]
  misc_feature (1)..(162): NCBI GI NO: 15217694 NR Description: unknown protein; protein id: At1g33840.1
MSGSDFAVTDAATGAPVLRVDGVLFSLRRRCVLVDADRRPVLTVQESALMLNTRWKVFRGDSTRRRDLMFSVVKPSVIQLRGPTKVSVFLASNDAEQACDFRITGSYHDGACAVSLGDSDTVIAKIDRRFSVVSALLGKNSYSVTVNPGIDYAFVVALVVILDEIHYQR

SEQ ID NO: 37862 - protein, 120 aa, Zea mays subsp. mays
  peptide (1)..(120): Ceres Seq. ID no. 12377679
  misc_feature (1)..(112): Pfam Name: DUF567 Pfam Description: Protein of unknown function
  misc_feature (1)..(79): NCBI GI NO: 28876016 NR Description: hypothetical protein
  misc_feature (75)..(119): NCBI GI NO: 28876016 NR Description: hypothetical protein
  misc_feature (1)..(120): NCBI GI NO: 27818079 NR Description: OSJNBa0086N05.7
  misc_feature (1)..(117): NCBI GI NO: 30679390 NR Description: expressed protein [Arabidopsis thaliana]
  misc_feature (1)..(98): NCBI GI NO: 28876019 NR Description: hypothetical protein
  misc_feature (1)..(116): NCBI GI NO: 17979321 NR Description: unknown protein [Arabidopsis thaliana]
  misc_feature (1)..(116): NCBI GI NO: 15225960 NR Description: unknown protein; protein id: At2g14560
  misc_feature (1)..(113): NCBI GI NO: 9665105 NR Description: Hypothetical protein [Arabidopsis thaliana]
  misc_feature (1)..(113): NCBI GI NO: 15217694 NR Description: unknown protein; protein id: At1g33840.1
  misc_feature (1)..(77): NCBI GI NO: 21553506 NR Description: unknown [Arabidopsis thaliana]
MLNTRWKVFRGDSTRRRDLMFSVVKPSVIQLRGPTKVSVFLASNDAEQACDFRITGSYHDGACAVSLGDSDTVIAKIDRRFSVVSALLGKNSYSVTVNPGIDYAFVVALVVILDEIHYQR

SEQ ID NO: 37863 - DNA, 1694 bp, Zea mays subsp. mays
  misc_feature (1)..(1694): Ceres Seq. ID no. 12366041
acccggttgtcatcgtcagccgctcgctccctcggtcactcactcactcactcccctctagtacatcactcaccgcccgccaagcgcgaagctgtcactctgctgaccgcttgacagagcagagcacggcacctagccgccctctcaccgacccatggccatgggcggcgcgttccccttccagtggcccgagggccccgcggatcctgttctcgacgacgtgaccttgcctccgctgcccacggcggcgcccgacgccggggtcgccgcgtactacgcggacgcggcggacgtgcacgcgatgcacatggcgctgcccgatttcgcggcggcgctggctgcgatgcggcgggaggaggaggaggccgcgggcatccgcctggtgcacctcctcatgagctgcgccggcgccgtcgaggcggccgaccacgcgggcgcgtccgcgcacctggcggacgcgcacgccgcgctcgccgccgtctcgcccacatccggcatcggccgcgtgtgccgtgcacttcaccgccgcgctgtcccgccggctgttccctcccacgccttcgccttcgcctccgcccccggccccgcacgccgccgacgccgaccgagccttcctctaccaccgcttctacgaggcgggtccctacctcaagtttgcgcacttcacggccaaccaggccatcctggaggccgtccagggctgcaagcacgtgcacatcatcgacttcagcatcatgcagggcctccagtggccagcgctaatccaggccctcgcgctccggcccggcgggccgccgtcggtccgcctcacgggcattgggccgccgtccccgccagggcgcgacgacctccgcgacgtcggggtccgcctcgccgacctggcgcgctccgtgcgcgtccacttctccttccgcggcgtggccgccaaccgcctcgacgaggtgcggccctggatgctgcaggtctcgcagggcgaggccgtggccgtgaactccgtgctccagctgcaccgcctcctcgccgacgctccctcgtcgggcgacgcccgggcgcccatcgacgccgtgctggagtgcgtcgcgtccgtgcgccccagggtgttcacggtggtggagcaggaggcggaccacaacaagtcggggttcctggaccggttcacggaggcgctcttctactactcggcggtgttcgactccctggacgcggcgagcggcggcgcgggcgacgcggcggcggaggcctacctggagcgcgagatctgcgacatcgtgtgcggcgagggcgcggagcgcagggagcggcacgagccgctgtggcggtggcgggacaggctgggtcgcacggggctggccgccgtgccgctgggggccaacgcgctgcggcaggcgaggatgctggtggggctcttctccggggaaggacactgcgtggaggaggccgaggggtgcctgacactgggctgacacgggcgcccgctcttctcggcgtccgcgtggcgcgcggaagagaacaatcagagtgacagcaggagcaggagcagcggcagtgaggagagcaatatcagctgcagcagctagagcgtcgctactttactgtaaattccttcggtgagaggctagtagcggggtttactgtaaaatcgcggtgcccgcgatccaaatggttcgattgagagagcgttggcatcggtcgtc

SEQ ID NO: 37864 - protein, 455 aa, Zea mays subsp. mays
  peptide (1)..(455): Ceres Seq. ID no. 12366042
  misc_feature (55)..(138): Pfam Name: Pfam Description:  GRAS family transcription factor
  misc_feature (7)..(138): NCBI GI NO: 34911732 NR Description: putative OsGAI
  misc_feature (7)..(138): NCBI GI NO: 39841619 NR Description: GAI protein [Oryza sativa]
  misc_feature (68)..(108): NCBI GI NO: 6970472 NR Description: OsGAI [Oryza sativa (japonica cultivar-group)]
  misc_feature (177)..(429): NCBI GI NO: 29830954 NR Description: putative GntR-family transcriptional regulator
MAMGGAFPFQWPEGPADPVLDDVTLPPLPTAAPDAGVAAYYADAADVHAMHMALPDFAAALAAMRREEEEAAGIRLVHLLMSCAGAVEAADHAGASAHLADAHAALAAVSPTSGIGRVCRALHRRAVPPAVPSHAFAFASAPGPARRRRRPSLPLPPLLRGGSLPQVCALHGQPGHPGGRPGLQARAHHRLQHHAGPPVASANPGPRAPARRAAVGPPHGHWAAVPARARRPPRRRGPPRRPGALRARPLLLPRRGRQPPRRGAALDAAGLAGRGRGRELRAPAAPPPRRRSLVGRRPGAHRRRAGVRRVRAPQGVHGGGAGGGPQQVGVPGPVHGGALLLLGGVRLPGRGERRRGRRGGGGLPGARDLRHRVRRGRGAQGAARAAVAVAGQAGSHGAGRRAAGGQRAAAGEDAGGALLRGRTLRGGGRGVPDTGLTRAPALLGVRVARGREQSE

SEQ ID NO: 37865 - protein, 453 aa, Zea mays subsp. mays
  peptide (1)..(453): Ceres Seq. ID no. 12366043
  misc_feature (53)..(136): Pfam Name: Pfam Description:  GRAS family transcription factor
  misc_feature (5)..(136): NCBI GI NO: 34911732 NR Description: putative OsGAI
  misc_feature (5)..(136): NCBI GI NO: 39841619 NR Description: GAI protein [Oryza sativa]
  misc_feature (66)..(106): NCBI GI NO: 6970472 NR Description: OsGAI [Oryza sativa (japonica cultivar-group)]
  misc_feature (175)..(427): NCBI GI NO: 29830954 NR Description: putative GntR-family transcriptional regulator
MGGAFPFQWPEGPADPVLDDVTLPPLPTAAPDAGVAAYYADAADVHAMHMALPDFAAALAAMRREEEEAAGIRLVHLLMSCAGAVEAADHAGASAHLADAHAALAAVSPTSGIGRVCRALHRRAVPPAVPSHAFAFASAPGPARRRRRPSLPLPPLLRGGSLPQVCALHGQPGHPGGRPGLQARAHHRLQHHAGPPVASANPGPRAPARRAAVGPPHGHWAAVPARARRPPRRRGPPRRPGALRARPLLLPRRGRQPPRRGAALDAAGLAGRGRGRELRAPAAPPPRRRSLVGRRPGAHRRRAGVRRVRAPQGVHGGGAGGGPQQVGVPGPVHGGALLLLGGVRLPGRGERRRGRRGGGGLPGARDLRHRVRRGRGAQGAARAAVAVAGQAGSHGAGRRAAGGQRAAAGEDAGGALLRGRTLRGGGRGVPDTGLTRAPALLGVRVARGREQSE

SEQ ID NO: 37866 - protein, 406 aa, Zea mays subsp. mays
  peptide (1)..(406): Ceres Seq. ID no. 12366044
  misc_feature (6)..(89): Pfam Name: Pfam Description:  GRAS family transcription factor
  misc_feature (1)..(89): NCBI GI NO: 34911732 NR Description: putative OsGAI
  misc_feature (1)..(89): NCBI GI NO: 39841619 NR Description: GAI protein [Oryza sativa]
  misc_feature (19)..(59): NCBI GI NO: 6970472 NR Description: OsGAI [Oryza sativa (japonica cultivar-group)]
  misc_feature (128)..(380): NCBI GI NO: 29830954 NR Description: putative GntR-family transcriptional regulator
MHMALPDFAAALAAMRREEEEAAGIRLVHLLMSCAGAVEAADHAGASAHLADAHAALAAVSPTSGIGRVCRALHRRAVPPAVPSHAFAFASAPGPARRRRRPSLPLPPLLRGGSLPQVCALHGQPGHPGGRPGLQARAHHRLQHHAGPPVASANPGPRAPARRAAVGPPHGHWAAVPARARRPPRRRGPPRRPGALRARPLLLPRRGRQPPRRGAALDAAGLAGRGRGRELRAPAAPPPRRRSLVGRRPGAHRRRAGVRRVRAPQGVHGGGAGGGPQQVGVPGPVHGGALLLLGGVRLPGRGERRRGRRGGGGLPGARDLRHRVRRGRGAQGAARAAVAVAGQAGSHGAGRRAAGGQRAAAGEDAGGALLRGRTLRGGGRGVPDTGLTRAPALLGVRVARGREQSE

SEQ ID NO: 37867 - DNA, 495 bp, Zea mays subsp. mays
  misc_feature (1)..(495): Ceres Seq. ID no. 13565414
agcgcccgcaggccgcagctgcagtctgcagagcacagccgtgcgcggtttgcaaccgtaccagcacaagcaccccaggcgggcaggaaacaagcctcctccgctgctccgccgcaatggcgtccccgcgcggccatcgccgggccagcgtgctgcagaaggcggcggcgctcctcctgctcgccctgtcctgctgcggctgcaccggtgccggcgccggtccatcggcgccaaccccgaaggtgccggcggtgatcgtgttcggggactcgacggtggacacgggcaacaacaacgcgatcgggaccatcctgaagagcaacttcccgccgtacgggcgcgacatggccggcggggcccagcccacggggcggttctgcaacgggcgcctgccgccggacttcatctccgaggcgctcggcctgccgccgctggtcccggcctacctcgaccccgcctacggcatccaggacttcgcccgcggcgtctgcttcg

SEQ ID NO: 37868 - protein, 164 aa, Zea mays subsp. mays
  peptide (1)..(164): Ceres Seq. ID no. 13565415
  misc_feature (84)..(163): Pfam Name: Pfam Description:  GDSL-like Lipase/Acylhydrolase
  misc_feature (80)..(163): NCBI GI NO: 40641607 NR Description: putative GDSL-motif lipase [Triticum aestivum]
  misc_feature (80)..(163): NCBI GI NO: 15228157 NR Description: GDSL-motif lipase/hydrolase protein
  misc_feature (80)..(163): NCBI GI NO: 21593518 NR Description: putative GDSL-motif lipase/hydrolase
  misc_feature (80)..(163): NCBI GI NO: 7485330 NR Description: hypothetical protein F10M23
  misc_feature (80)..(163): NCBI GI NO: 18416824 NR Description: GDSL-motif lipase/hydrolase protein
  misc_feature (43)..(163): NCBI GI NO: 15237351 NR Description: GDSL-motif lipase/hydrolase protein
  misc_feature (43)..(163): NCBI GI NO: 21536954 NR Description: GDSL-motif lipase/hydrolase-like protein
  misc_feature (57)..(163): NCBI GI NO: 18406327 NR Description: lipase, putative [Arabidopsis thaliana]
  misc_feature (57)..(163): NCBI GI NO: 15217977 NR Description: lipase, putative [Arabidopsis thaliana]
  misc_feature (70)..(163): NCBI GI NO: 15229719 NR Description: lipase, putative [Arabidopsis thaliana]
RPQAAAAVCRAQPCAVCNRTSTSTPGGQETSLLRCSAAMASPRGHRRASVLQKAAALLLLALSCCGCTGAGAGPSAPTPKVPAVIVFGDSTVDTGNNNAIGTILKSNFPPYGRDMAGGAQPTGRFCNGRLPPDFISEALGLPPLVPAYLDPAYGIQDFARGVCF

SEQ ID NO: 37869 - protein, 164 aa, Zea mays subsp. mays
  peptide (1)..(164): Ceres Seq. ID no. 13565416
APAGRSCSLQSTAVRGLQPYQHKHPRRAGNKPPPLLRRNGVPARPSPGQRAAEGGGAPPARPVLLRLHRCRRRSIGANPEGAGGDRVRGLDGGHGQQQRDRDHPEEQLPAVRARHGRRGPAHGAVLQRAPAAGLHLRGARPAAAGPGLPRPRLRHPGLRPRRLL

SEQ ID NO: 37870 - protein, 126 aa, Zea mays subsp. mays
  peptide (1)..(126): Ceres Seq. ID no. 13565417
  misc_feature (46)..(125): Pfam Name: Pfam Description:  GDSL-like Lipase/Acylhydrolase
  misc_feature (42)..(125): NCBI GI NO: 40641607 NR Description: putative GDSL-motif lipase [Triticum aestivum]
  misc_feature (42)..(125): NCBI GI NO: 15228157 NR Description: GDSL-motif lipase/hydrolase protein
  misc_feature (42)..(125): NCBI GI NO: 21593518 NR Description: putative GDSL-motif lipase/hydrolase
  misc_feature (42)..(125): NCBI GI NO: 7485330 NR Description: hypothetical protein F10M23
  misc_feature (42)..(125): NCBI GI NO: 18416824 NR Description: GDSL-motif lipase/hydrolase protein
  misc_feature (5)..(125): NCBI GI NO: 15237351 NR Description: GDSL-motif lipase/hydrolase protein
  misc_feature (5)..(125): NCBI GI NO: 21536954 NR Description: GDSL-motif lipase/hydrolase-like protein
  misc_feature (19)..(125): NCBI GI NO: 18406327 NR Description: lipase, putative [Arabidopsis thaliana]
  misc_feature (19)..(125): NCBI GI NO: 15217977 NR Description: lipase, putative [Arabidopsis thaliana]
  misc_feature (32)..(125): NCBI GI NO: 15229719 NR Description: lipase, putative [Arabidopsis thaliana]
MASPRGHRRASVLQKAAALLLLALSCCGCTGAGAGPSAPTPKVPAVIVFGDSTVDTGNNNAIGTILKSNFPPYGRDMAGGAQPTGRFCNGRLPPDFISEALGLPPLVPAYLDPAYGIQDFARGVCF

SEQ ID NO: 37871 - DNA, 1740 bp, Zea mays subsp. mays
  misc_feature (1)..(1740): Ceres Seq. ID no. 12566955
gcacgagaccattacctagaacatcctaatcaaaagtttatattcttgtgaggaagaaacattcccatccccgtcattgaggaattcggaatcggggatcgagtacatctccacttcttcccaggcggccaggccctggcccgcggccgcaccgcaccgtagtttgttccttccgccaggaagcgagagaaaatcgagtgaaaaggaaggggaaataaggctgaatcacagtttctggatcggaggagcatccccgcctaggtctctgcagccatggttcgcggatcgctcggcaagcttgcatcgcgcgccctctccgtcgccgggagatggcagcaccagcagctccgccgcctcaacatccacgagtaccagggcgcggagttgatgggtaaatacgggatcaacgtgcccaggggcgcggcggctgggtccgtacacgaggtcaaggacgccttgaagaacatgttccccagcgagaaagagatagttgttaaaagtcaaatccttgctggtggccgagggctgggaactttcaaaagcggactgcaaggtggtgtccatattgttaaggctgaggaagctgaattgattgcaagtaaaatgttaggccagattctgataacgaaacaaactggtccagagggaaagattgtgagcaaggtctacttgtgtgagaaactatctcttactaatgagatgtactttgccatcacccttgataggaaaactgctggtccgctcattattgcttgcagcaagggaggaaccagtattgaagatcttgcggagaagtatcctgatatgattattaaggttcctattgatgtatttaaaggaatcacagatgaggatgcagctaaagttgttgatggtctagctctaaaggcagcggataggcagtcttctatagaacagattaagaagctgtatgaacttttctgcaagtgtgattgcacattgctggagataaatcctctggcggagacagctgacaacaagcttgttgctgctgatgcaaaattgaactttgatgataatgctgcatttagacagaaagaaatatttgcactgcgtgatacaactcaggaagaccccagggaggtcgctgctgccaaagcagatttgaactatattggtcttgatggagagattggttgcatggtgaatggagcaggattggccatggcgaccatggatattataaagttgcatggtggtacgcccgccaattttcttgatgtcggtggaagtgcatcagaggggcaggttgtggaagcttttaagatactgacttcagatgatagagtgaaggcaattctagtgaacatttttggtggcattatgaaatgtgatgtgatagcaagtggaattgttaatgctgccaaacaggttgacctgaaagttcctgttgttgttcggttggaaggcaccaatgtagaccaaggaaagaggattcttaaggaaagtggaatgactttgatcactgcagaagatcttgatgatgcggcagagaaagctgtaaaagcatccgtcaaataactagtgtatcaatctgaagtttttttttcactggtacaagatgagcagtgctcttttacggatttcgatttggagcagaagtcgtgaactgcaacatttttgaagtggggttattttggccttgttttgctgttaaatgttgccagtgccgaaattgtggtctcgttttaataaacaaatctatcggtcccattggtc

SEQ ID NO: 37872 - protein, 422 aa, Zea mays subsp. mays
  peptide (1)..(422): Ceres Seq. ID no. 12566956
  misc_feature (71)..(233): Pfam Name: Pfam Description:  ATP-grasp domain
  misc_feature (2)..(419): NCBI GI NO: 15225353 NR Description: succinyl-CoA ligase beta subunit
  misc_feature (2)..(419): NCBI GI NO: 21593189 NR Description: succinyl-CoA ligase beta subunit
  misc_feature (6)..(419): NCBI GI NO: 27803873 NR Description: succinyl CoA ligase beta subunit
  misc_feature (24)..(422): NCBI GI NO: 28829983 NR Description: similar to Sus scrofa (Pig). Succinyl-CoA ligase
  misc_feature (24)..(422): NCBI GI NO: 28828953 NR Description: similar to Mus musculus (Mouse)
  misc_feature (1)..(420): NCBI GI NO: 11321583 NR Description: succinate-CoA ligase, ADP-forming, beta subunit
  misc_feature (1)..(420): NCBI GI NO: 21263997 NR Description: Succinyl-CoA ligase
  misc_feature (1)..(420): NCBI GI NO: 34364605 NR Description: hypothetical protein [Homo sapiens]
  misc_feature (1)..(420): NCBI GI NO: 7023369 NR Description: unnamed protein product [Homo sapiens]
  misc_feature (1)..(420): NCBI GI NO: 20876884 NR Description: succinate-Coenzyme A ligase
MVRGSLGKLASRALSVAGRWQHQQLRRLNIHEYQGAELMGKYGINVPRGAAAGSVHEVKDALKNMFPSEKEIVVKSQILAGGRGLGTFKSGLQGGVHIVKAEEAELIASKMLGQILITKQTGPEGKIVSKVYLCEKLSLTNEMYFAITLDRKTAGPLIIACSKGGTSIEDLAEKYPDMIIKVPIDVFKGITDEDAAKVVDGLALKAADRQSSIEQIKKLYELFCKCDCTLLEINPLAETADNKLVAADAKLNFDDNAAFRQKEIFALRDTTQEDPREVAAAKADLNYIGLDGEIGCMVNGAGLAMATMDIIKLHGGTPANFLDVGGSASEGQVVEAFKILTSDDRVKAILVNIFGGIMKCDVIASGIVNAAKQVDLKVPVVVRLEGTNVDQGKRILKESGMTLITAEDLDDAAEKAVKASVK

SEQ ID NO: 37873 - protein, 384 aa, Zea mays subsp. mays
  peptide (1)..(384): Ceres Seq. ID no. 12566957
  misc_feature (33)..(195): Pfam Name: Pfam Description:  ATP-grasp domain
  misc_feature (1)..(381): NCBI GI NO: 15225353 NR Description: succinyl-CoA ligase beta subunit
  misc_feature (1)..(381): NCBI GI NO: 21593189 NR Description: succinyl-CoA ligase beta subunit
  misc_feature (1)..(381): NCBI GI NO: 27803873 NR Description: succinyl CoA ligase beta subunit
  misc_feature (1)..(384): NCBI GI NO: 28829983 NR Description: similar to Sus scrofa (Pig). Succinyl-CoA ligase
  misc_feature (1)..(384): NCBI GI NO: 28828953 NR Description: similar to Mus musculus (Mouse)
  misc_feature (1)..(382): NCBI GI NO: 11321583 NR Description: succinate-CoA ligase, ADP-forming, beta subunit
  misc_feature (1)..(382): NCBI GI NO: 21263997 NR Description: Succinyl-CoA ligase
  misc_feature (1)..(382): NCBI GI NO: 34364605 NR Description: hypothetical protein [Homo sapiens]
  misc_feature (1)..(382): NCBI GI NO: 7023369 NR Description: unnamed protein product [Homo sapiens]
  misc_feature (1)..(382): NCBI GI NO: 20876884 NR Description: succinate-Coenzyme A ligase
MGKYGINVPRGAAAGSVHEVKDALKNMFPSEKEIVVKSQILAGGRGLGTFKSGLQGGVHIVKAEEAELIASKMLGQILITKQTGPEGKIVSKVYLCEKLSLTNEMYFAITLDRKTAGPLIIACSKGGTSIEDLAEKYPDMIIKVPIDVFKGITDEDAAKVVDGLALKAADRQSSIEQIKKLYELFCKCDCTLLEINPLAETADNKLVAADAKLNFDDNAAFRQKEIFALRDTTQEDPREVAAAKADLNYIGLDGEIGCMVNGAGLAMATMDIIKLHGGTPANFLDVGGSASEGQVVEAFKILTSDDRVKAILVNIFGGIMKCDVIASGIVNAAKQVDLKVPVVVRLEGTNVDQGKRILKESGMTLITAEDLDDAAEKAVKASVK

SEQ ID NO: 37874 - protein, 358 aa, Zea mays subsp. mays
  peptide (1)..(358): Ceres Seq. ID no. 12566958
  misc_feature (7)..(169): Pfam Name: Pfam Description:  ATP-grasp domain
  misc_feature (1)..(355): NCBI GI NO: 15225353 NR Description: succinyl-CoA ligase beta subunit
  misc_feature (1)..(355): NCBI GI NO: 21593189 NR Description: succinyl-CoA ligase beta subunit
  misc_feature (1)..(355): NCBI GI NO: 27803873 NR Description: succinyl CoA ligase beta subunit
  misc_feature (1)..(358): NCBI GI NO: 28829983 NR Description: similar to Sus scrofa (Pig). Succinyl-CoA ligase
  misc_feature (1)..(358): NCBI GI NO: 28828953 NR Description: similar to Mus musculus (Mouse)
  misc_feature (1)..(356): NCBI GI NO: 11321583 NR Description: succinate-CoA ligase, ADP-forming, beta subunit
  misc_feature (1)..(356): NCBI GI NO: 21263997 NR Description: Succinyl-CoA ligase
  misc_feature (1)..(356): NCBI GI NO: 34364605 NR Description: hypothetical protein [Homo sapiens]
  misc_feature (1)..(356): NCBI GI NO: 7023369 NR Description: unnamed protein product [Homo sapiens]
  misc_feature (1)..(356): NCBI GI NO: 20876884 NR Description: succinate-Coenzyme A ligase
MFPSEKEIVVKSQILAGGRGLGTFKSGLQGGVHIVKAEEAELIASKMLGQILITKQTGPEGKIVSKVYLCEKLSLTNEMYFAITLDRKTAGPLIIACSKGGTSIEDLAEKYPDMIIKVPIDVFKGITDEDAAKVVDGLALKAADRQSSIEQIKKLYELFCKCDCTLLEINPLAETADNKLVAADAKLNFDDNAAFRQKEIFALRDTTQEDPREVAAAKADLNYIGLDGEIGCMVNGAGLAMATMDIIKLHGGTPANFLDVGGSASEGQVVEAFKILTSDDRVKAILVNIFGGIMKCDVIASGIVNAAKQVDLKVPVVVRLEGTNVDQGKRILKESGMTLITAEDLDDAAEKAVKASVK

SEQ ID NO: 37875 - DNA, 1405 bp, Zea mays subsp. mays
  misc_feature (1)..(1405): Ceres Seq. ID no. 13577701
gcacgagaccattacctagaacatcctaatcgaaaaacccctaggaaacgacgaccgcaactacataccagccagccgacccgacccccagcagtcttgcaggctacagcccctgcggcaccagagggagcggccgcggcagggcgtcctcgtcgccgcggcagggcgctagggcaggcaggcatgcgctgatggaattcacggcccaggagggggaggagcccgtctcggaggagatgggcgcgagctccgcgccgccgccctgcctcggccccggccgcggcacggggaaccagaaccacgccgccgaggcgacgtaccacgagtgtctgcgcaaccacgcggcggcgctgggcggacacgtcgtcgatggctgcggcgagttcatgcccgaggacgccgacaggctcaagtgcgcagcctgcggctgccaccgcagcttccaccgcaagggcgacgcggggcgccgccaccagctcctgctgccgccgcccgccgcggcggtcccgcgcgtcccgctgctcctgcctccgccccacccctacgcggccggctgctgcccacccccactacgcgtcgccgccgctgttcccgtaccacggcacgcccagcggcaccacgaccgagtcgtccagcgaggagcgtggcccgccgtccgggttcgccgccgcgccgcacgcgcacgcgcagggccacgtccggcggaagcggatccggaccaagttcacgccggagcagaaggagcagatgctggcgttcgcggaacgcctcggctggcggatgcagaagcaggacgacgcgctggtgcagcacttctgcgaccaggtcggcgtccggcggcaggtcttcaaggtctggatgcacaacaacaagcacatcggcagcggcggcaggaggcagccgccgccgcacctgccgcctcccgaggggcagcaacagccccagcagccccagtagccacggtgggagacaaggctcagcagtcagcagcaccaccaccaccaccaccatttgcttaatcccccgcctcatttttttatgggctccgagagggggtgtgggattaaacaagggaagtcaggaggggttcctatcctttcttcccttccgtttttgggttcaccttatccttgattttttgtagtcacttcacgtcttcaccatcctcttttgcttcacgattcttgcttgcatatctttggttttattctgttcttactagcttgggggatcaattggaaggaggaggaggcactgtgcatgttttgtagctacaatcctgctaccttattgccatttagcccccttcggcgagcaaggttaaccaatctaaattccgatctatatttccatcttcacttaatctgttaatcaatagcgaatatagccggtggtctctcctccg

SEQ ID NO: 37876 - protein, 275 aa, Zea mays subsp. mays
  peptide (1)..(275): Ceres Seq. ID no. 13577702
  misc_feature (38)..(89): Pfam Name: Pfam Description:  ZF-HD protein dimerisation region
  misc_feature (43)..(160): NCBI GI NO: 15238445 NR Description: expressed protein [Arabidopsis thaliana]
  misc_feature (38)..(87): NCBI GI NO: 18410804 NR Description: expressed protein [Arabidopsis thaliana]
  misc_feature (43)..(112): NCBI GI NO: 15223757 NR Description: expressed protein [Arabidopsis thaliana]
  misc_feature (43)..(99): NCBI GI NO: 15226993 NR Description: expressed protein [Arabidopsis thaliana]
  misc_feature (43)..(99): NCBI GI NO: 20148768 NR Description: hypothetical protein At2g02540/T822.16
  misc_feature (41)..(100): NCBI GI NO: 15230335 NR Description: expressed protein [Arabidopsis thaliana]
  misc_feature (1)..(87): NCBI GI NO: 18398714 NR Description: expressed protein [Arabidopsis thaliana]
  misc_feature (35)..(132): NCBI GI NO: 13277220 NR Description: ZF-HD homeobox protein [Flaveria bidentis]
  misc_feature (1)..(137): NCBI GI NO: 15228530 NR Description: expressed protein [Arabidopsis thaliana]
  misc_feature (18)..(138): NCBI GI NO: 5091602 NR Description: 10A19I.6 [Oryza sativa]
MEFTAQEGEEPVSEEMGASSAPPPCLGPGRGTGNQNHAAEATYHECLRNHAAALGGHVVDGCGEFMPEDADRLKCAACGCHRSFHRKGDAGRRHQLLLPPPAAAVPRVPLLLPPPHPYAAGCCPPPLRVAAAVPVPRHAQRHHDRVVQRGAWPAVRVRRRAARARAGPRPAEADPDQVHAGAEGADAGVRGTPRLADAEAGRRAGAALLRPGRRPAAGLQGLDAQQQAHRQRRQEAAAAAPAASRGAATAPAAPVATVGDKAQQSAAPPPPPPFA

SEQ ID NO: 37877 - protein, 260 aa, Zea mays subsp. mays
  peptide (1)..(260): Ceres Seq. ID no. 13577703
  misc_feature (23)..(74): Pfam Name: Pfam Description:  ZF-HD protein dimerisation region
  misc_feature (28)..(145): NCBI GI NO: 15238445 NR Description: expressed protein [Arabidopsis thaliana]
  misc_feature (23)..(72): NCBI GI NO: 18410804 NR Description: expressed protein [Arabidopsis thaliana]
  misc_feature (28)..(97): NCBI GI NO: 15223757 NR Description: expressed protein [Arabidopsis thaliana]
  misc_feature (28)..(84): NCBI GI NO: 15226993 NR Description: expressed protein [Arabidopsis thaliana]
  misc_feature (28)..(84): NCBI GI NO: 20148768 NR Description: hypothetical protein At2g02540/T822.16
  misc_feature (26)..(85): NCBI GI NO: 15230335 NR Description: expressed protein [Arabidopsis thaliana]
  misc_feature (1)..(72): NCBI GI NO: 18398714 NR Description: expressed protein [Arabidopsis thaliana]
  misc_feature (20)..(117): NCBI GI NO: 13277220 NR Description: ZF-HD homeobox protein [Flaveria bidentis]
  misc_feature (1)..(122): NCBI GI NO: 15228530 NR Description: expressed protein [Arabidopsis thaliana]
  misc_feature (3)..(123): NCBI GI NO: 5091602 NR Description: 10A19I.6 [Oryza sativa]
MGASSAPPPCLGPGRGTGNQNHAAEATYHECLRNHAAALGGHVVDGCGEFMPEDADRLKCAACGCHRSFHRKGDAGRRHQLLLPPPAAAVPRVPLLLPPPHPYAAGCCPPPLRVAAAVPVPRHAQRHHDRVVQRGAWPAVRVRRRAARARAGPRPAEADPDQVHAGAEGADAGVRGTPRLADAEAGRRAGAALLRPGRRPAAGLQGLDAQQQAHRQRRQEAAAAAPAASRGAATAPAAPVATVGDKAQQSAAPPPPPPFA

SEQ ID NO: 37878 - protein, 210 aa, Zea mays subsp. mays
  peptide (1)..(210): Ceres Seq. ID no. 13577704
  misc_feature (97)..(208): Pfam Name: Pfam Description:  MARCKS family
  misc_feature (1)..(95): NCBI GI NO: 15238445 NR Description: expressed protein [Arabidopsis thaliana]
  misc_feature (1)..(22): NCBI GI NO: 18410804 NR Description: expressed protein [Arabidopsis thaliana]
  misc_feature (1)..(47): NCBI GI NO: 15223757 NR Description: expressed protein [Arabidopsis thaliana]
  misc_feature (1)..(34): NCBI GI NO: 15226993 NR Description: expressed protein [Arabidopsis thaliana]
  misc_feature (1)..(34): NCBI GI NO: 20148768 NR Description: hypothetical protein At2g02540/T822.16
  misc_feature (1)..(35): NCBI GI NO: 15230335 NR Description: expressed protein [Arabidopsis thaliana]
  misc_feature (1)..(22): NCBI GI NO: 18398714 NR Description: expressed protein [Arabidopsis thaliana]
  misc_feature (1)..(67): NCBI GI NO: 13277220 NR Description: ZF-HD homeobox protein [Flaveria bidentis]
  misc_feature (1)..(72): NCBI GI NO: 15228530 NR Description: expressed protein [Arabidopsis thaliana]
  misc_feature (1)..(73): NCBI GI NO: 5091602 NR Description: 10A19I.6 [Oryza sativa]
MPEDADRLKCAACGCHRSFHRKGDAGRRHQLLLPPPAAAVPRVPLLLPPPHPYAAGCCPPPLRVAAAVPVPRHAQRHHDRVVQRGAWPAVRVRRRAARARAGPRPAEADPDQVHAGAEGADAGVRGTPRLADAEAGRRAGAALLRPGRRPAAGLQGLDAQQQAHRQRRQEAAAAAPAASRGAATAPAAPVATVGDKAQQSAAPPPPPPFA

SEQ ID NO: 37879 - protein, 195 aa, Zea mays subsp. mays
  peptide (1)..(195): Ceres Seq. ID no. 13577705
  misc_feature (104)..(195): NCBI GI NO: 15238445 NR Description: expressed protein [Arabidopsis thaliana]
  misc_feature (50)..(193): NCBI GI NO: 5091602 NR Description: 10A19I.6 [Oryza sativa]
  misc_feature (40)..(180): NCBI GI NO: 18410804 NR Description: expressed protein [Arabidopsis thaliana]
  misc_feature (63)..(168): NCBI GI NO: 15223757 NR Description: expressed protein [Arabidopsis thaliana]
  misc_feature (73)..(168): NCBI GI NO: 15226993 NR Description: expressed protein [Arabidopsis thaliana]
  misc_feature (73)..(168): NCBI GI NO: 20148768 NR Description: hypothetical protein At2g02540/T822.16
  misc_feature (111)..(168): NCBI GI NO: 15230335 NR Description: expressed protein [Arabidopsis thaliana]
  misc_feature (60)..(168): NCBI GI NO: 18398714 NR Description: expressed protein [Arabidopsis thaliana]
  misc_feature (57)..(182): NCBI GI NO: 13277220 NR Description: ZF-HD homeobox protein [Flaveria bidentis]
  misc_feature (56)..(169): NCBI GI NO: 15228530 NR Description: expressed protein [Arabidopsis thaliana]
MAAASSCPRTPTGSSAQPAAATAASTARATRGAATSSCCRRPPRRSRASRCSCLRPTPTRPAAAHPHYASPPLFPYHGTPSGTTTESSSEERGPPSGFAAAPHAHAQGHVRRKRIRTKFTPEQKEQMLAFAERLGWRMQKQDDALVQHFCDQVGVRRQVFKVWMHNNKHIGSGGRRQPPPHLPPPEGQQQPQQPQ

SEQ ID NO: 37880 - DNA, 1801 bp, Zea mays subsp. mays
  misc_feature (1)..(1801): Ceres Seq. ID no. 12358426
aggagaaaggttgccatctcgtgtgtgtgtgtctgttggatggatctctgtgagccatgccctctttgtcttcttgcttttgctttcttggtcccttcccttctcttttctagcagagctctcgtggttcttggccttccgtgtgtctgccaggtagaaattttaaccgaaaaaaagattcttccgagcaaaggagcgctgccagctttcacataaacaagttggggaagcagttgaggttttctaattcttcttggaaggattgagatctccagttctgataatgggttcttttgggatgaactggaatcagaaggaccccatggtgtgggattgggaacatctagtaccgtctgtctcaaatgcagttacaaggcacggatctgctaattcatctggtggtactcttacttctaactcagagctagggcatggttcatccaagagctctatttcagcgtccattgattcaccctctggagtagggaacagcttagagttcaacttcgccgctgttgagaggcatgttaagaacacgggcacgaacggcagagtcgatgactcggggaattctccatcgtcaatgatagctttcaaccaaggagagccattaatcagcctgaaacttgggaagagggcttacttcgaaaacgcctgcggaggacaggatgccaaggtttctgcagcttcagacgttacttctgcagccagcgtggtcaagaagactaaggtgtctcagcagaatgcaaagaactggtactgtcaggttgaagggtgcaaagttgacctgtcttctgctaaagattacaatcgcaagcacaaggtctgtgtagtccattctaaagctaccaaggtggttgttgctggtctagagcgtcggttttgtcaacagtgtagccgttttcatggtttagcggagtttgatcagaacaaacgaagctgtcgtaggcgtctgatgcatcataatgcacggaggaggaaacctcaggcagacacaatttcattcaattcatcgacaatgttttatgatacaaggcagcggacaaatcttttctttagtcaaccactttatggccaagtgaggagcaatgcagggtcttcatgggataacttgggaggcttaaaattcatggagacgaaacatccgccagtgcatccaacaaaaacagcatcccctgatgaactgcatttctcagccctccagataactagtgctgcggctcacaccggacatcatcatgatctcgatgggttcatggcgttcaagggaaccagcacaaaggtccttaaccaaggcgtggaggcttgggcggccgcttccagctcgaacaacggaggcccagaaggtgggcgtgctctctctcttctgtcagacggctcgtggggctcgagttcagccgtcatccagcagcccacatctcacgcggacgccggtgcattgctgccgcccctcgccaccgttgccgtctccaacgccgccgccgccgccgggcatcctctggacccgtccccgggaaggttctggccgcaagacgatcatcccccgctcgtcgacggacccgccacgcagattccggagctggcgcacctccggatatggtgaaaggaaacgcatgtgatgcggtgactggtgacatgccagttcgagggcctggctgggaacacatctggttggttagcctgccgctctggcttgaatttgccggcgacgacagtctttgtttgtatcttttgatcagaacggacacagacatgtttgcacaatataatgtgacgagtccctctttggggttgaggagtt

SEQ ID NO: 37881 - protein, 439 aa, Zea mays subsp. mays
  peptide (1)..(439): Ceres Seq. ID no. 12358427
  misc_feature (160)..(235): Pfam Name: Pfam Description:  SBP domain
  misc_feature (13)..(385): NCBI GI NO: 25456646 NR Description: squamosa promoter binding protein 2
  misc_feature (13)..(379): NCBI GI NO: 15239820 NR Description: squamosa promoter binding protein-like 2
  misc_feature (1)..(377): NCBI GI NO: 9802546 NR Description: F17L21.15 [Arabidopsis thaliana]
  misc_feature (1)..(377): NCBI GI NO: 22329813 NR Description: putative squamosa-promoter binding protein 2
  misc_feature (1)..(377): NCBI GI NO: 18650611 NR Description: At1g27370/F17L21_16 [Arabidopsis thaliana]
  misc_feature (1)..(366): NCBI GI NO: 18396302 NR Description: putative squamosa-promoter binding protein 2
  misc_feature (1)..(366): NCBI GI NO: 25403307 NR Description: protein F17L21.14
  misc_feature (110)..(332): NCBI GI NO: 25352584 NR Description: squamosa promoter binding protein-homolog 4
  misc_feature (160)..(419): NCBI GI NO: 25352582 NR Description: squamosa promoter binding protein-homolog 5
  misc_feature (94)..(315): NCBI GI NO: 15230904 NR Description: squamosa promoter-binding protein homolog
MGSFGMNWNQKDPMVWDWEHLVPSVSNAVTRHGSANSSGGTLTSNSELGHGSSKSSISASIDSPSGVGNSLEFNFAAVERHVKNTGTNGRVDDSGNSPSSMIAFNQGEPLISLKLGKRAYFENACGGQDAKVSAASDVTSAASVVKKTKVSQQNAKNWYCQVEGCKVDLSSAKDYNRKHKVCVVHSKATKVVVAGLERRFCQQCSRFHGLAEFDQNKRSCRRRLMHHNARRRKPQADTISFNSSTMFYDTRQRTNLFFSQPLYGQVRSNAGSSWDNLGGLKFMETKHPPVHPTKTASPDELHFSALQITSAAAHTGHHHDLDGFMAFKGTSTKVLNQGVEAWAAASSSNNGGPEGGRALSLLSDGSWGSSSAVIQQPTSHADAGALLPPLATVAVSNAAAAAGHPLDPSPGRFWPQDDHPPLVDGPATQIPELAHLRIW

SEQ ID NO: 37882 - protein, 434 aa, Zea mays subsp. mays
  peptide (1)..(434): Ceres Seq. ID no. 12358428
  misc_feature (155)..(230): Pfam Name: Pfam Description:  SBP domain
  misc_feature (8)..(380): NCBI GI NO: 25456646 NR Description: squamosa promoter binding protein 2
  misc_feature (8)..(374): NCBI GI NO: 15239820 NR Description: squamosa promoter binding protein-like 2
  misc_feature (1)..(372): NCBI GI NO: 9802546 NR Description: F17L21.15 [Arabidopsis thaliana]
  misc_feature (1)..(372): NCBI GI NO: 22329813 NR Description: putative squamosa-promoter binding protein 2
  misc_feature (1)..(372): NCBI GI NO: 18650611 NR Description: At1g27370/F17L21_16 [Arabidopsis thaliana]
  misc_feature (1)..(361): NCBI GI NO: 18396302 NR Description: putative squamosa-promoter binding protein 2
  misc_feature (1)..(361): NCBI GI NO: 25403307 NR Description: protein F17L21.14
  misc_feature (105)..(327): NCBI GI NO: 25352584 NR Description: squamosa promoter binding protein-homolog 4
  misc_feature (155)..(414): NCBI GI NO: 25352582 NR Description: squamosa promoter binding protein-homolog 5
  misc_feature (89)..(310): NCBI GI NO: 15230904 NR Description: squamosa promoter-binding protein homolog
MNWNQKDPMVWDWEHLVPSVSNAVTRHGSANSSGGTLTSNSELGHGSSKSSISASIDSPSGVGNSLEFNFAAVERHVKNTGTNGRVDDSGNSPSSMIAFNQGEPLISLKLGKRAYFENACGGQDAKVSAASDVTSAASVVKKTKVSQQNAKNWYCQVEGCKVDLSSAKDYNRKHKVCVVHSKATKVVVAGLERRFCQQCSRFHGLAEFDQNKRSCRRRLMHHNARRRKPQADTISFNSSTMFYDTRQRTNLFFSQPLYGQVRSNAGSSWDNLGGLKFMETKHPPVHPTKTASPDELHFSALQITSAAAHTGHHHDLDGFMAFKGTSTKVLNQGVEAWAAASSSNNGGPEGGRALSLLSDGSWGSSSAVIQQPTSHADAGALLPPLATVAVSNAAAAAGHPLDPSPGRFWPQDDHPPLVDGPATQIPELAHLRIW

SEQ ID NO: 37883 - protein, 426 aa, Zea mays subsp. mays
  peptide (1)..(426): Ceres Seq. ID no. 12358429
  misc_feature (147)..(222): Pfam Name: Pfam Description:  SBP domain
  misc_feature (1)..(372): NCBI GI NO: 25456646 NR Description: squamosa promoter binding protein 2
  misc_feature (1)..(366): NCBI GI NO: 15239820 NR Description: squamosa promoter binding protein-like 2
  misc_feature (1)..(364): NCBI GI NO: 9802546 NR Description: F17L21.15 [Arabidopsis thaliana]
  misc_feature (1)..(364): NCBI GI NO: 22329813 NR Description: putative squamosa-promoter binding protein 2
  misc_feature (1)..(364): NCBI GI NO: 18650611 NR Description: At1g27370/F17L21_16 [Arabidopsis thaliana]
  misc_feature (1)..(353): NCBI GI NO: 18396302 NR Description: putative squamosa-promoter binding protein 2
  misc_feature (1)..(353): NCBI GI NO: 25403307 NR Description: protein F17L21.14
  misc_feature (97)..(319): NCBI GI NO: 25352584 NR Description: squamosa promoter binding protein-homolog 4
  misc_feature (147)..(406): NCBI GI NO: 25352582 NR Description: squamosa promoter binding protein-homolog 5
  misc_feature (81)..(302): NCBI GI NO: 15230904 NR Description: squamosa promoter-binding protein homolog
MVWDWEHLVPSVSNAVTRHGSANSSGGTLTSNSELGHGSSKSSISASIDSPSGVGNSLEFNFAAVERHVKNTGTNGRVDDSGNSPSSMIAFNQGEPLISLKLGKRAYFENACGGQDAKVSAASDVTSAASVVKKTKVSQQNAKNWYCQVEGCKVDLSSAKDYNRKHKVCVVHSKATKVVVAGLERRFCQQCSRFHGLAEFDQNKRSCRRRLMHHNARRRKPQADTISFNSSTMFYDTRQRTNLFFSQPLYGQVRSNAGSSWDNLGGLKFMETKHPPVHPTKTASPDELHFSALQITSAAAHTGHHHDLDGFMAFKGTSTKVLNQGVEAWAAASSSNNGGPEGGRALSLLSDGSWGSSSAVIQQPTSHADAGALLPPLATVAVSNAAAAAGHPLDPSPGRFWPQDDHPPLVDGPATQIPELAHLRIW

SEQ ID NO: 37884 - DNA, 1774 bp, Zea mays subsp. mays
  misc_feature (1)..(1774): Ceres Seq. ID no. 13565630
atccatctatccatcatcaccagctagcacctcctttcccacgactcccgagcgctctgcgtgtggcgcgcggcagcatggcgactgcgaacgggagcagcaaggggtcgttcgaggtgcccaaggtggaggtcaggttcaccaagctcttcatcgacggcaagttcgtcgacgccgtctccggcaagacgttcgagacccgggaccctcgcaccggcgaggtgatcgccagcatcgcggagggaggcaaggccgacgtcgacctcgccgtcaaggccgcccgggaggccttcgacaacgggccctggcccaggatgacgggatacgagcgtggtcggatcctccacaggttcgcggacctgatcgacgagcacgtggaggagctggcggcgctggacacggtggacgccggcaagctgttcgccgtgggcaaggcgcgggacatcccgggcgccgcgcacctgctgcgctactacgccggcgccgccgacaaggtgcacggcgcgacgctcaagatggcgcagcggatgcacgggtacacgctcaaggagcccgtgggcgtggtgggccacatcgtgccctggaactaccccaccaccatgttcttcttcaaggtagggcccgcgctcgccgccggctgcgccgtcgtcgtcaagcccgccgagcagacgccgctgtccgcgctcttctacgcgcacctcgccagggaggccggcgtcccagccggcgtgctcaacgtcgtgccgggattcgggcccacggccggggccgccgtcgccgcccacatggacgtcgacaaggtcagcttcaccgggtccacggaggtcggccgcctcgtcatgagggccgcggccgagagcaacctcaagcccgtgtcgctcgagctgggcggcaagtctcccgtcatcgtcttcgacgacgccgacctcgacatggccgttaacctcgtcaacttcgccacctacaccaacaagggcgagatctgtgtggccggcacacgcatctacgtgcaggaagggatctacgacgagttcgtgaagaaggccgccgagctcgccagcaagtccgtggtcggagacccgttcaacccgagtgtcagccagggcccccaggttgacaaggaccagtacgagaaggtcctcaggtacattgacatcggaaagcgcgaaggcgccacgctggtcaccggagggaagccctgcggcgacaataagggctactacatcgagcccaccatcttcacggacgtcaaggacgacatgacgatcgcacaggatgaaatctttgggccggtgatggctctcatgaaattcaagaccgtggaggaggtgatccagaaagcgaacaacacccggtacggcctggccgccggcatcgtgaccaagaacatcgacgtcgccaacaccgtgtcgcggtccatccgcgccggcgccatctggatcaactgctacttcgcgttcgacccggacgcgccgttcggcgggtacaagatgagcgggttcggcaaggacatgggcatggacgcgctcgacaagtacctgcagaccaagaccgtcgtcactccgctgtacaacactccatggctctgaccgaccgacctctcatcctgtccgatgaacagttcaacatcacaaacaagaagaaacatgtcttgtaagatactcctccaaaggatcgggtgcctgtagctgtactcttacacctgcatggattgatgtcttgatgatgtagtgcaatgtagcattcagaacaataaagacatgtttcggactgc

SEQ ID NO: 37885 - protein, 528 aa, Zea mays subsp. mays
  peptide (1)..(528): Ceres Seq. ID no. 13565631
  misc_feature (26)..(528): NCBI GI NO: 19850243 NR Description: cytosolic aldehyde dehydrogenase RF2C [Zea mays]
  misc_feature (26)..(528): NCBI GI NO: 19850241 NR Description: cytosolic aldehyde dehydrogenase RF2C [Zea mays]
  misc_feature (26)..(528): NCBI GI NO: 34912248 NR Description: cytosolic aldehyde dehydrogenase
  misc_feature (22)..(527): NCBI GI NO: 19850247 NR Description: cytosolic aldehyde dehydrogenase RF2D [Zea mays]
  misc_feature (62)..(527): NCBI GI NO: 19850245 NR Description: cytosolic aldehyde dehydrogenase RF2D [Zea mays]
  misc_feature (30)..(528): NCBI GI NO: 18404212 NR Description: aldehyde dehydrogenase (ALDH1a)
  misc_feature (13)..(528): NCBI GI NO: 8163730 NR Description: aldehyde dehydrogenase [Oryza sativa]
  misc_feature (13)..(528): NCBI GI NO: 11691926 NR Description: aldehyde dehydrogenase ALDH2b
  misc_feature (9)..(528): NCBI GI NO: 20530131 NR Description: mitochondrial aldehyde dehydrogenase
  misc_feature (40)..(528): NCBI GI NO: 7431451 NR Description: rf2 nuclear restorer protein - maize
PSIHHHQLAPPFPRLPSALRVARGSMATANGSSKGSFEVPKVEVRFTKLFIDGKFVDAVSGKTFETRDPRTGEVIASIAEGGKADVDLAVKAAREAFDNGPWPRMTGYERGRILHRFADLIDEHVEELAALDTVDAGKLFAVGKARDIPGAAHLLRYYAGAADKVHGATLKMAQRMHGYTLKEPVGVVGHIVPWNYPTTMFFFKVGPALAAGCAVVVKPAEQTPLSALFYAHLAREAGVPAGVLNVVPGFGPTAGAAVAAHMDVDKVSFTGSTEVGRLVMRAAAESNLKPVSLELGGKSPVIVFDDADLDMAVNLVNFATYTNKGEICVAGTRIYVQEGIYDEFVKKAAELASKSVVGDPFNPSVSQGPQVDKDQYEKVLRYIDIGKREGATLVTGGKPCGDNKGYYIEPTIFTDVKDDMTIAQDEIFGPVMALMKFKTVEEVIQKANNTRYGLAAGIVTKNIDVANTVSRSIRAGAIWINCYFAFDPDAPFGGYKMSGFGKDMGMDALDKYLQTKTVVTPLYNTPWL

SEQ ID NO: 37886 - protein, 503 aa, Zea mays subsp. mays
  peptide (1)..(503): Ceres Seq. ID no. 13565632
  misc_feature (1)..(503): NCBI GI NO: 19850243 NR Description: cytosolic aldehyde dehydrogenase RF2C [Zea mays]
  misc_feature (1)..(503): NCBI GI NO: 19850241 NR Description: cytosolic aldehyde dehydrogenase RF2C [Zea mays]
  misc_feature (1)..(503): NCBI GI NO: 34912248 NR Description: cytosolic aldehyde dehydrogenase
  misc_feature (1)..(502): NCBI GI NO: 19850247 NR Description: cytosolic aldehyde dehydrogenase RF2D [Zea mays]
  misc_feature (37)..(502): NCBI GI NO: 19850245 NR Description: cytosolic aldehyde dehydrogenase RF2D [Zea mays]
  misc_feature (5)..(503): NCBI GI NO: 18404212 NR Description: aldehyde dehydrogenase (ALDH1a)
  misc_feature (1)..(503): NCBI GI NO: 8163730 NR Description: aldehyde dehydrogenase [Oryza sativa]
  misc_feature (1)..(503): NCBI GI NO: 11691926 NR Description: aldehyde dehydrogenase ALDH2b
  misc_feature (1)..(503): NCBI GI NO: 20530131 NR Description: mitochondrial aldehyde dehydrogenase
  misc_feature (15)..(503): NCBI GI NO: 7431451 NR Description: rf2 nuclear restorer protein - maize
MATANGSSKGSFEVPKVEVRFTKLFIDGKFVDAVSGKTFETRDPRTGEVIASIAEGGKADVDLAVKAAREAFDNGPWPRMTGYERGRILHRFADLIDEHVEELAALDTVDAGKLFAVGKARDIPGAAHLLRYYAGAADKVHGATLKMAQRMHGYTLKEPVGVVGHIVPWNYPTTMFFFKVGPALAAGCAVVVKPAEQTPLSALFYAHLAREAGVPAGVLNVVPGFGPTAGAAVAAHMDVDKVSFTGSTEVGRLVMRAAAESNLKPVSLELGGKSPVIVFDDADLDMAVNLVNFATYTNKGEICVAGTRIYVQEGIYDEFVKKAAELASKSVVGDPFNPSVSQGPQVDKDQYEKVLRYIDIGKREGATLVTGGKPCGDNKGYYIEPTIFTDVKDDMTIAQDEIFGPVMALMKFKTVEEVIQKANNTRYGLAAGIVTKNIDVANTVSRSIRAGAIWINCYFAFDPDAPFGGYKMSGFGKDMGMDALDKYLQTKTVVTPLYNTPWL

SEQ ID NO: 37887 - protein, 424 aa, Zea mays subsp. mays
  peptide (1)..(424): Ceres Seq. ID no. 13565633
  misc_feature (1)..(424): NCBI GI NO: 19850243 NR Description: cytosolic aldehyde dehydrogenase RF2C [Zea mays]
  misc_feature (1)..(424): NCBI GI NO: 19850241 NR Description: cytosolic aldehyde dehydrogenase RF2C [Zea mays]
  misc_feature (1)..(424): NCBI GI NO: 34912248 NR Description: cytosolic aldehyde dehydrogenase
  misc_feature (1)..(423): NCBI GI NO: 19850247 NR Description: cytosolic aldehyde dehydrogenase RF2D [Zea mays]
  misc_feature (1)..(423): NCBI GI NO: 19850245 NR Description: cytosolic aldehyde dehydrogenase RF2D [Zea mays]
  misc_feature (1)..(424): NCBI GI NO: 18404212 NR Description: aldehyde dehydrogenase (ALDH1a)
  misc_feature (1)..(424): NCBI GI NO: 8163730 NR Description: aldehyde dehydrogenase [Oryza sativa]
  misc_feature (1)..(424): NCBI GI NO: 11691926 NR Description: aldehyde dehydrogenase ALDH2b
  misc_feature (1)..(424): NCBI GI NO: 20530131 NR Description: mitochondrial aldehyde dehydrogenase
  misc_feature (1)..(424): NCBI GI NO: 7431451 NR Description: rf2 nuclear restorer protein - maize
MTGYERGRILHRFADLIDEHVEELAALDTVDAGKLFAVGKARDIPGAAHLLRYYAGAADKVHGATLKMAQRMHGYTLKEPVGVVGHIVPWNYPTTMFFFKVGPALAAGCAVVVKPAEQTPLSALFYAHLAREAGVPAGVLNVVPGFGPTAGAAVAAHMDVDKVSFTGSTEVGRLVMRAAAESNLKPVSLELGGKSPVIVFDDADLDMAVNLVNFATYTNKGEICVAGTRIYVQEGIYDEFVKKAAELASKSVVGDPFNPSVSQGPQVDKDQYEKVLRYIDIGKREGATLVTGGKPCGDNKGYYIEPTIFTDVKDDMTIAQDEIFGPVMALMKFKTVEEVIQKANNTRYGLAAGIVTKNIDVANTVSRSIRAGAIWINCYFAFDPDAPFGGYKMSGFGKDMGMDALDKYLQTKTVVTPLYNTPWL

SEQ ID NO: 37888 - DNA, 1478 bp, Zea mays subsp. mays
  misc_feature (1)..(1478): Ceres Seq. ID no. 12407112
actactacagcgcgccaccaggcagtacactgcagccagccagccacctccctcctctcagttcagttggctccctcccggctcccgccccactagtcgttgtagtcaatactgtgcagtacgccacccaccacctctccaagtctccattaaagaaaaggggaggcaagtcggggcctcggggagaaggggctgagcatcagaccatgacgtccggggcggcggcggcggcaggaggtctggggcggacgccgacgtggaaggagcgggagaacaacaagcgccgggagcgccggcggagggccatcgccgccaagatcttcacgggcctgcgcgcgctcggcaactacaagctgcccaagcactgcgacaacaacgaggtgctcaaggcgctctgccgcgaggcggggtgggtcgtcgaggacgacggcaccacctaccggaagggttgcaggccgccgccggggatgctgagcccgtgctcgtcgtcgcagctgctgagcgcgccgtcctcgagcttcccgagcccggtgccgtcctaccacgccagcccggcgtcgtcgagcttcccgagcccgacgcgcctcgaccacagcagcggcggcagcagcacccacaaccccgccgcggcggccgccgccgccgcctccctgctcccgttcctccggggcctgccgaacctgccgccgctccgcgtgtccagcagcgcgcccgtcacgccgccgctctcctctcccacggccgcggcggcggcgtcgcgaccgcccaccaaggtccgcaggcccgactgggacgccgccgccgaccccttccggcaccccttcttcgcggtctccgcccccgccagccccacccgcgcgcgccggcgcgagcacccggacaccatcccggagtgcgacgagtccgacgtctgctccgcggccgactccgcccggtggatcagcttccaggccaccacggcgcccgcgtcgcccacgtacaacctcgtccacccggcctccgactccatggagctggacgggacgacggcagccgtcgaggagttcgagttcgacaagggccgcgtcgtcacgccatgggaaggcgagcggatccacgaggtggccgccgaggagctcgagctcacgctcggcgtcggcgccaagtgaagcgaagctctcaagcaaagctcggatctttgagctcccgtactgcaaatgccgcgattggcagaaaaaaaaatgtgtacgtactacgtagcgtcgtagccgcgtgaagaaatcgtggatgcattcgtgctgagtttcgatcggaggcacattcggtgtagggcgtaggtgttgtttcattcatggacagctgatcaggtgaaagaacaatcgttgttcgtccgtccctccgcctgtattgcattgcattattgatcacagactgtatgctgactccattcggatgtagtactaggtggatctttggcatctacttactgtttgttctgc

SEQ ID NO: 37889 - protein, 381 aa, Zea mays subsp. mays
  peptide (1)..(381): Ceres Seq. ID no. 12407113
  misc_feature (174)..(292): Pfam Name: Pfam Description:  Atrophin-1 family
  misc_feature (69)..(381): NCBI GI NO: 33146833 NR Description: putative mature anther-specific protein LAT61
  misc_feature (69)..(381): NCBI GI NO: 15215731 NR Description: AT4g36780/C7A10_580 [Arabidopsis thaliana]
  misc_feature (62)..(379): NCBI GI NO: 18086461 NR Description: At1g75080/F9E10_7 [Arabidopsis thaliana]
  misc_feature (62)..(379): NCBI GI NO: 18410764 NR Description: expressed protein; protein id: At1g75080
  misc_feature (68)..(379): NCBI GI NO: 21592457 NR Description: unknown [Arabidopsis thaliana]
  misc_feature (68)..(379): NCBI GI NO: 18394728 NR Description: expressed protein; protein id: At1g19350
  misc_feature (68)..(379): NCBI GI NO: 6651069 NR Description: 107 protein [Arabidopsis thaliana]
  misc_feature (62)..(379): NCBI GI NO: 25352558 NR Description: unknown protein F9E10.7
  misc_feature (47)..(379): NCBI GI NO: 14626761 NR Description: mature anther-specific protein LAT61
  misc_feature (69)..(245): NCBI GI NO: 15230298 NR Description: putative protein; protein id: At3g50750.1
YYSAPPGSTLQPASHLPPLSSVGSLPAPAPLVVVVNTVQYATHHLSKSPLKKRGGKSGPRGEGAEHQTMTSGAAAAAGGLGRTPTWKERENNKRRERRRRAIAAKIFTGLRALGNYKLPKHCDNNEVLKALCREAGWVVEDDGTTYRKGCRPPPGMLSPCSSSQLLSAPSSSFPSPVPSYHASPASSSFPSPTRLDHSSGGSSTHNPAAAAAAAASLLPFLRGLPNLPPLRVSSSAPVTPPLSSPTAAAAASRPPTKVRRPDWDAAADPFRHPFFAVSAPASPTRARRREHPDTIPECDESDVCSAADSARWISFQATTAPASPTYNLVHPASDSMELDGTTAAVEEFEFDKGRVVTPWEGERIHEVAAEELELTLGVGAK

SEQ ID NO: 37890 - protein, 313 aa, Zea mays subsp. mays
  peptide (1)..(313): Ceres Seq. ID no. 12407114
  misc_feature (106)..(224): Pfam Name: Pfam Description:  Atrophin-1 family
  misc_feature (1)..(313): NCBI GI NO: 33146833 NR Description: putative mature anther-specific protein LAT61
  misc_feature (1)..(313): NCBI GI NO: 15215731 NR Description: AT4g36780/C7A10_580 [Arabidopsis thaliana]
  misc_feature (1)..(311): NCBI GI NO: 18086461 NR Description: At1g75080/F9E10_7 [Arabidopsis thaliana]
  misc_feature (1)..(311): NCBI GI NO: 18410764 NR Description: expressed protein; protein id: At1g75080
  misc_feature (1)..(311): NCBI GI NO: 21592457 NR Description: unknown [Arabidopsis thaliana]
  misc_feature (1)..(311): NCBI GI NO: 18394728 NR Description: expressed protein; protein id: At1g19350
  misc_feature (1)..(311): NCBI GI NO: 6651069 NR Description: 107 protein [Arabidopsis thaliana]
  misc_feature (1)..(311): NCBI GI NO: 25352558 NR Description: unknown protein F9E10.7
  misc_feature (1)..(311): NCBI GI NO: 14626761 NR Description: mature anther-specific protein LAT61
  misc_feature (1)..(177): NCBI GI NO: 15230298 NR Description: putative protein; protein id: At3g50750.1
MTSGAAAAAGGLGRTPTWKERENNKRRERRRRAIAAKIFTGLRALGNYKLPKHCDNNEVLKALCREAGWVVEDDGTTYRKGCRPPPGMLSPCSSSQLLSAPSSSFPSPVPSYHASPASSSFPSPTRLDHSSGGSSTHNPAAAAAAAASLLPFLRGLPNLPPLRVSSSAPVTPPLSSPTAAAAASRPPTKVRRPDWDAAADPFRHPFFAVSAPASPTRARRREHPDTIPECDESDVCSAADSARWISFQATTAPASPTYNLVHPASDSMELDGTTAAVEEFEFDKGRVVTPWEGERIHEVAAEELELTLGVGAK

SEQ ID NO: 37891 - protein, 226 aa, Zea mays subsp. mays
  peptide (1)..(226): Ceres Seq. ID no. 12407115
  misc_feature (19)..(137): Pfam Name: Pfam Description:  Atrophin-1 family
  misc_feature (1)..(226): NCBI GI NO: 33146833 NR Description: putative mature anther-specific protein LAT61
  misc_feature (1)..(226): NCBI GI NO: 15215731 NR Description: AT4g36780/C7A10_580 [Arabidopsis thaliana]
  misc_feature (1)..(224): NCBI GI NO: 18086461 NR Description: At1g75080/F9E10_7 [Arabidopsis thaliana]
  misc_feature (1)..(224): NCBI GI NO: 18410764 NR Description: expressed protein; protein id: At1g75080
  misc_feature (1)..(224): NCBI GI NO: 21592457 NR Description: unknown [Arabidopsis thaliana]
  misc_feature (1)..(224): NCBI GI NO: 18394728 NR Description: expressed protein; protein id: At1g19350
  misc_feature (1)..(224): NCBI GI NO: 6651069 NR Description: 107 protein [Arabidopsis thaliana]
  misc_feature (1)..(224): NCBI GI NO: 25352558 NR Description: unknown protein F9E10.7
  misc_feature (1)..(224): NCBI GI NO: 14626761 NR Description: mature anther-specific protein LAT61
  misc_feature (1)..(90): NCBI GI NO: 15230298 NR Description: putative protein; protein id: At3g50750.1
MLSPCSSSQLLSAPSSSFPSPVPSYHASPASSSFPSPTRLDHSSGGSSTHNPAAAAAAAASLLPFLRGLPNLPPLRVSSSAPVTPPLSSPTAAAAASRPPTKVRRPDWDAAADPFRHPFFAVSAPASPTRARRREHPDTIPECDESDVCSAADSARWISFQATTAPASPTYNLVHPASDSMELDGTTAAVEEFEFDKGRVVTPWEGERIHEVAAEELELTLGVGAK

SEQ ID NO: 37892 - DNA, 1814 bp, Zea mays subsp. mays
  misc_feature (1)..(1814): Ceres Seq. ID no. 12382156
gcacgagaccattacctagaacatcctaatcgaaaaaaacacagacacagttgcgtcgtcgcccggccgctgtgcgtgcgtgcgtgcgtgctgtgctgcctttctttctcgctttaatttctttccatccatccgctttccccccctcccaatcccaatccctccaaaaatccgctccgcgcgcgcaagcgcggccggcctttatcgatccctcccggcctctagcgctgctccggcggcggagtccggccccaggaaacaaaggccgcgcgcgccgaccggaccgaccggggggccgtccagttccagttccagttccaggccgcacaagcacatgagatcatgagctcggaggactcgctcaagtcgctgtcgctggactacctgaacctgctcatcaacgggcaggccttcagcgacgtggccttcagcgtggagggccggctggtgcacgcgcaccgctgcgtgctggccgcgcgcagcctcttcttccgcaagctcttctgcggcctggacccgagccaccagccgcccccacccaccgccggcgggcgcgcgccggacctcgtcatccccgtcagctccatccgctacgaggtgctggtgctggtgctccagttcctctacagcggccaggcctccgtcgccgctcccaagagcggcccgctcccgggctgcggcgccaggggctgctggcacacccgctgcggcgccgccgtcgacctcgccctcgacaccctcgccgctgcgcgctccttcggcgtcgagcagctcgcgctcctcgtccagaagcagctggaggccatggtgaaggaggcgtccgtggacgacgtgatgaaggtgctgatggcgtcgcgcaagttcgagatgcaggagctctgggccgcctgctcccacctggtggcgcgctcgggcctctccgccgacctcctcgccaagcacctccccatcgacgtggtcgccaagatcgaggagatccgcgccaagtcccccggcggcgccgccgccgcgggcggcgccgggccgcgctcgccgttcctcacccaccactacctccccatcaacgcggcgtcgtcggcggccgaccgcgagcaccggatccggcgcatgcggcgcgcgctggacgccgccgacatcgagctcgtcaagctgatggtgatgggcgaggggctggacctggacgacgcgctggccgtgcactacgccgtccagcactgcggccgcgacgtcgtcaaggcgctgctggagctgggcgccgccgacgtcaactcccgcgccgggcccgcgggcaagacggcgctgcacctggcggccgagatggtgtcccccgacatggtctccgtgctcctggaccaccacgccgaccccaacgcccgcacgctcgacggcgtcaccccgctcgacgtgctccgcagcctcacctccgagttcctcttcaagggcgccgtgccggggctcacgcacatcgagcccaacaagctcaggctctgcctcgagctcgtgcagtccgcagtcatggtggccacgcgcgacgacggcggcgcgcacggcgacgccgggggaggtgggagcgacggcgggagcttcccgaggggcggcgacgccgccgacgacagcttggtgagcctcaccatgaactccacgctcatgtaccagggccaggagatggcggcggcgctggccggcgacgccaggaaagggagcggcggcggccgagggagtccgtccagcttgtacttccccaatggcttcgcatgagtatttaatctccttcatcaagcaagagcaatgcattttcgtttctctctacatat

SEQ ID NO: 37893 - protein, 471 aa, Zea mays subsp. mays
  peptide (1)..(471): Ceres Seq. ID no. 12382157
  misc_feature (15)..(156): Pfam Name: Pfam Description:  BTB/POZ domain
  misc_feature (68)..(470): NCBI GI NO: 22830934 NR Description: P0466H10.32
  misc_feature (4)..(68): NCBI GI NO: 22830934 NR Description: P0466H10.32
  misc_feature (1)..(412): NCBI GI NO: 15227330 NR Description: hypothetical protein; protein id: At2g41370.1
  misc_feature (1)..(412): NCBI GI NO: 27754703 NR Description: unknown protein [Arabidopsis thaliana]
  misc_feature (4)..(434): NCBI GI NO: 15230230 NR Description: putative protein; protein id: At3g57130.1
  misc_feature (33)..(213): NCBI GI NO: 40538911 NR Description: expressed protein (with alternative splicing)
  misc_feature (238)..(362): NCBI GI NO: 40538911 NR Description: expressed protein (with alternative splicing)
  misc_feature (33)..(213): NCBI GI NO: 40538910 NR Description: expressed protein (with alternative splicing)
  misc_feature (238)..(362): NCBI GI NO: 40538910 NR Description: expressed protein (with alternative splicing)
  misc_feature (33)..(213): NCBI GI NO: 40538909 NR Description: expressed protein (with alternative splicing)
MSSEDSLKSLSLDYLNLLINGQAFSDVAFSVEGRLVHAHRCVLAARSLFFRKLFCGLDPSHQPPPPTAGGRAPDLVIPVSSIRYEVLVLVLQFLYSGQASVAAPKSGPLPGCGARGCWHTRCGAAVDLALDTLAAARSFGVEQLALLVQKQLEAMVKEASVDDVMKVLMASRKFEMQELWAACSHLVARSGLSADLLAKHLPIDVVAKIEEIRAKSPGGAAAAGGAGPRSPFLTHHYLPINAASSAADREHRIRRMRRALDAADIELVKLMVMGEGLDLDDALAVHYAVQHCGRDVVKALLELGAADVNSRAGPAGKTALHLAAEMVSPDMVSVLLDHHADPNARTLDGVTPLDVLRSLTSEFLFKGAVPGLTHIEPNKLRLCLELVQSAVMVATRDDGGAHGDAGGGGSDGGSFPRGGDAADDSLVSLTMNSTLMYQGQEMAAALAGDARKGSGGGRGSPSSLYFPNGFA

SEQ ID NO: 37894 - protein, 317 aa, Zea mays subsp. mays
  peptide (1)..(317): Ceres Seq. ID no. 12382158
  misc_feature (161)..(193): Pfam Name: Pfam Description:  Ankyrin repeat
  misc_feature (1)..(316): NCBI GI NO: 22830934 NR Description: P0466H10.32
  misc_feature (1)..(258): NCBI GI NO: 15227330 NR Description: hypothetical protein; protein id: At2g41370.1
  misc_feature (1)..(258): NCBI GI NO: 27754703 NR Description: unknown protein [Arabidopsis thaliana]
  misc_feature (1)..(280): NCBI GI NO: 15230230 NR Description: putative protein; protein id: At3g57130.1
  misc_feature (1)..(59): NCBI GI NO: 40538911 NR Description: expressed protein (with alternative splicing)
  misc_feature (84)..(208): NCBI GI NO: 40538911 NR Description: expressed protein (with alternative splicing)
  misc_feature (1)..(59): NCBI GI NO: 40538910 NR Description: expressed protein (with alternative splicing)
  misc_feature (84)..(208): NCBI GI NO: 40538910 NR Description: expressed protein (with alternative splicing)
  misc_feature (1)..(59): NCBI GI NO: 40538909 NR Description: expressed protein (with alternative splicing)
  misc_feature (84)..(208): NCBI GI NO: 40538909 NR Description: expressed protein (with alternative splicing)
MVKEASVDDVMKVLMASRKFEMQELWAACSHLVARSGLSADLLAKHLPIDVVAKIEEIRAKSPGGAAAAGGAGPRSPFLTHHYLPINAASSAADREHRIRRMRRALDAADIELVKLMVMGEGLDLDDALAVHYAVQHCGRDVVKALLELGAADVNSRAGPAGKTALHLAAEMVSPDMVSVLLDHHADPNARTLDGVTPLDVLRSLTSEFLFKGAVPGLTHIEPNKLRLCLELVQSAVMVATRDDGGAHGDAGGGGSDGGSFPRGGDAADDSLVSLTMNSTLMYQGQEMAAALAGDARKGSGGGRGSPSSLYFPNGFA

SEQ ID NO: 37895 - protein, 307 aa, Zea mays subsp. mays
  peptide (1)..(307): Ceres Seq. ID no. 12382159
  misc_feature (151)..(183): Pfam Name: Pfam Description:  Ankyrin repeat
  misc_feature (1)..(306): NCBI GI NO: 22830934 NR Description: P0466H10.32
  misc_feature (1)..(248): NCBI GI NO: 15227330 NR Description: hypothetical protein; protein id: At2g41370.1
  misc_feature (1)..(248): NCBI GI NO: 27754703 NR Description: unknown protein [Arabidopsis thaliana]
  misc_feature (1)..(270): NCBI GI NO: 15230230 NR Description: putative protein; protein id: At3g57130.1
  misc_feature (1)..(49): NCBI GI NO: 40538911 NR Description: expressed protein (with alternative splicing)
  misc_feature (74)..(198): NCBI GI NO: 40538911 NR Description: expressed protein (with alternative splicing)
  misc_feature (1)..(49): NCBI GI NO: 40538910 NR Description: expressed protein (with alternative splicing)
  misc_feature (74)..(198): NCBI GI NO: 40538910 NR Description: expressed protein (with alternative splicing)
  misc_feature (1)..(49): NCBI GI NO: 40538909 NR Description: expressed protein (with alternative splicing)
  misc_feature (74)..(198): NCBI GI NO: 40538909 NR Description: expressed protein (with alternative splicing)
MKVLMASRKFEMQELWAACSHLVARSGLSADLLAKHLPIDVVAKIEEIRAKSPGGAAAAGGAGPRSPFLTHHYLPINAASSAADREHRIRRMRRALDAADIELVKLMVMGEGLDLDDALAVHYAVQHCGRDVVKALLELGAADVNSRAGPAGKTALHLAAEMVSPDMVSVLLDHHADPNARTLDGVTPLDVLRSLTSEFLFKGAVPGLTHIEPNKLRLCLELVQSAVMVATRDDGGAHGDAGGGGSDGGSFPRGGDAADDSLVSLTMNSTLMYQGQEMAAALAGDARKGSGGGRGSPSSLYFPNGFA

SEQ ID NO: 37896 - DNA, 1562 bp, Zea mays subsp. mays
  misc_feature (1)..(1562): Ceres Seq. ID no. 12386730
gattcactcacctcactccacctcttgactgaagaagccgtctgcctgcctccgactcccgcgtctctcctccaagtgatctccttccacctttgccgatcgcccgttgccaccggccgggcgatcctcgtacttccacttccaccatggcctcctcctcctcttcctcctcctcctcctcctcctcctcctcctcctcccgcttcctcctcccgctgctactgctctgttcgcacctctccctcgcctcggcagaggaggcggcgtcggcggcagcggacctcctcagcgaggcgcgcgcgccggggttcgccgcgtggctgcgcggcgtgcggcggcgcatccaccagcgtcccgagctggccttccaggagttccgcaccagcgagctcgtgcgggccgagctcgacgcgatcggcgtcccgtaccggtggcccgtcgcccagaccggcgtcgtggccaccatcgcgggcgccgccgccggccccgtcgtcgcgctccgggccgacatggacgcgctccccgtgcaggagctggtggactgggagcacaagagccaggagagtgggaaaatgcacgcttgcggacacgacgtgcacacgacaatgcttctgggggctgccagaatactccaggatcgcaagagcgacctaatgggcaccgtgaagcttgtattccagccggcagaggagggccagggcggcgcgtactacgtgctgcaagaaggcgtccttgacgacgcgtcagccatattcggcttgcacgttgacccggccctccccgtcggcgtcgtttcgtccaggccagggcccttcgcggcgacgtccggtcggttcctggcgacggtcaccggtaaaggcgggcacgccgcgatgccccacgaatccatcgaccctgttgtagctgcagccactactgtcgtcagcctccagaagatcatctcccgagaaatcgatcccctgcagggcgcggttgtgtccgtcacttttctgaagggaggagaagcgtacaatgtcatcccagagaatgtggcctttggcggcaccatgaggagcatgacgaatgaaggtctatcgtatctcaagaagaggatcaaagagatcgtcgaaggacaggcagcggtgcaccactgcagtgccagcgtggacttcatggaggacacgatgaagccgtacccggccgtggtcaacgacgaagggatgtacgctcacgccaaggaggtggccgagggcctccttggggagaagaacgtcagggtgggtccccaggtgatgggcgcggaggacttcgggttctacgcgcagaggatggcgggcgccttcttcaccatcggggtcggcaacgcgagcaccatggcgaccatccattccacccactcgcctcacttcgtcgtcgacgaggacgtgcttcccgtcggagctgcgttccatgctgctgtggcgattgaatatgtcaggaagaaccgtgcgtcgacctaaacgctaaactcaaataaatcagacggaacaaaacggcagtagtttgtcttaggtgtcactatatataatgcgagtatttacatc

SEQ ID NO: 37897 - protein, 443 aa, Zea mays subsp. mays
  peptide (1)..(443): Ceres Seq. ID no. 12386731
  misc_feature (56)..(436): Pfam Name: Pfam Description:  Peptidase family M20/M25/M40
  misc_feature (11)..(442): NCBI GI NO: 34900784 NR Description: IAA amidohydrolase-like protein~contains ESTsAU057861
  misc_feature (5)..(439): NCBI GI NO: 34900780 NR Description: putative IAA amidohydrolase
  misc_feature (15)..(442): NCBI GI NO: 34900782 NR Description: putative IAA amidohydrolase
  misc_feature (35)..(439): NCBI GI NO: 28376718 NR Description: putative  IAA amidohydrolase
  misc_feature (45)..(439): NCBI GI NO: 28376716 NR Description: putative  IAA amidohydrolase
  misc_feature (20)..(436): NCBI GI NO: 15233011 NR Description: IAA-amino acid hydrolase
  misc_feature (20)..(436): NCBI GI NO: 21554648 NR Description: IAA-amino acid hydrolase (ILR1)
  misc_feature (20)..(436): NCBI GI NO: 18129692 NR Description: IAA amidohydrolase [Arabidopsis suecica]
  misc_feature (20)..(436): NCBI GI NO: 887785 NR Description: ILR1
  misc_feature (13)..(443): NCBI GI NO: 34914096 NR Description: putative IAA-Ala hydrolase
MASSSSSSSSSSSSSSSSRFLLPLLLLCSHLSLASAEEAASAAADLLSEARAPGFAAWLRGVRRRIHQRPELAFQEFRTSELVRAELDAIGVPYRWPVAQTGVVATIAGAAAGPVVALRADMDALPVQELVDWEHKSQESGKMHACGHDVHTTMLLGAARILQDRKSDLMGTVKLVFQPAEEGQGGAYYVLQEGVLDDASAIFGLHVDPALPVGVVSSRPGPFAATSGRFLATVTGKGGHAAMPHESIDPVVAAATTVVSLQKIISREIDPLQGAVVSVTFLKGGEAYNVIPENVAFGGTMRSMTNEGLSYLKKRIKEIVEGQAAVHHCSASVDFMEDTMKPYPAVVNDEGMYAHAKEVAEGLLGEKNVRVGPQVMGAEDFGFYAQRMAGAFFTIGVGNASTMATIHSTHSPHFVVDEDVLPVGAAFHAAVAIEYVRKNRAST

SEQ ID NO: 37898 - protein, 322 aa, Zea mays subsp. mays
  peptide (1)..(322): Ceres Seq. ID no. 12386732
  misc_feature (1)..(315): Pfam Name: Pfam Description:  Peptidase family M20/M25/M40
  misc_feature (1)..(321): NCBI GI NO: 34900784 NR Description: IAA amidohydrolase-like protein~contains ESTsAU057861
  misc_feature (1)..(318): NCBI GI NO: 34900780 NR Description: putative IAA amidohydrolase
  misc_feature (1)..(321): NCBI GI NO: 34900782 NR Description: putative IAA amidohydrolase
  misc_feature (1)..(318): NCBI GI NO: 28376718 NR Description: putative  IAA amidohydrolase
  misc_feature (1)..(318): NCBI GI NO: 28376716 NR Description: putative  IAA amidohydrolase
  misc_feature (1)..(315): NCBI GI NO: 15233011 NR Description: IAA-amino acid hydrolase
  misc_feature (1)..(315): NCBI GI NO: 21554648 NR Description: IAA-amino acid hydrolase (ILR1)
  misc_feature (1)..(315): NCBI GI NO: 18129692 NR Description: IAA amidohydrolase [Arabidopsis suecica]
  misc_feature (1)..(315): NCBI GI NO: 887785 NR Description: ILR1
  misc_feature (1)..(322): NCBI GI NO: 34914096 NR Description: putative IAA-Ala hydrolase
MDALPVQELVDWEHKSQESGKMHACGHDVHTTMLLGAARILQDRKSDLMGTVKLVFQPAEEGQGGAYYVLQEGVLDDASAIFGLHVDPALPVGVVSSRPGPFAATSGRFLATVTGKGGHAAMPHESIDPVVAAATTVVSLQKIISREIDPLQGAVVSVTFLKGGEAYNVIPENVAFGGTMRSMTNEGLSYLKKRIKEIVEGQAAVHHCSASVDFMEDTMKPYPAVVNDEGMYAHAKEVAEGLLGEKNVRVGPQVMGAEDFGFYAQRMAGAFFTIGVGNASTMATIHSTHSPHFVVDEDVLPVGAAFHAAVAIEYVRKNRAST

SEQ ID NO: 37899 - protein, 301 aa, Zea mays subsp. mays
  peptide (1)..(301): Ceres Seq. ID no. 12386733
  misc_feature (1)..(294): Pfam Name: Pfam Description:  Peptidase family M20/M25/M40
  misc_feature (1)..(300): NCBI GI NO: 34900784 NR Description: IAA amidohydrolase-like protein~contains ESTsAU057861
  misc_feature (1)..(297): NCBI GI NO: 34900780 NR Description: putative IAA amidohydrolase
  misc_feature (1)..(300): NCBI GI NO: 34900782 NR Description: putative IAA amidohydrolase
  misc_feature (1)..(297): NCBI GI NO: 28376718 NR Description: putative  IAA amidohydrolase
  misc_feature (1)..(297): NCBI GI NO: 28376716 NR Description: putative  IAA amidohydrolase
  misc_feature (1)..(294): NCBI GI NO: 15233011 NR Description: IAA-amino acid hydrolase
  misc_feature (1)..(294): NCBI GI NO: 21554648 NR Description: IAA-amino acid hydrolase (ILR1)
  misc_feature (1)..(294): NCBI GI NO: 18129692 NR Description: IAA amidohydrolase [Arabidopsis suecica]
  misc_feature (1)..(294): NCBI GI NO: 887785 NR Description: ILR1
  misc_feature (1)..(301): NCBI GI NO: 34914096 NR Description: putative IAA-Ala hydrolase
MHACGHDVHTTMLLGAARILQDRKSDLMGTVKLVFQPAEEGQGGAYYVLQEGVLDDASAIFGLHVDPALPVGVVSSRPGPFAATSGRFLATVTGKGGHAAMPHESIDPVVAAATTVVSLQKIISREIDPLQGAVVSVTFLKGGEAYNVIPENVAFGGTMRSMTNEGLSYLKKRIKEIVEGQAAVHHCSASVDFMEDTMKPYPAVVNDEGMYAHAKEVAEGLLGEKNVRVGPQVMGAEDFGFYAQRMAGAFFTIGVGNASTMATIHSTHSPHFVVDEDVLPVGAAFHAAVAIEYVRKNRAST

SEQ ID NO: 37900 - DNA, 1476 bp, Zea mays subsp. mays
  misc_feature (1)..(1476): Ceres Seq. ID no. 12357049
ctcccgcggccattgcaggtcttgcagcaacgtctctctcctctgggcggtgggcgctcgatgttcttggctccttcacttggacttcgccccgtcggcgtccactgatcaattgatcatctgcaggtagataagctaccagcatctattttgcgtatctgaactccaaaaaggagagctcgaaactacagcaatgggttgctaccctgtgttctgtaggaagaagaactccagaagccaggttgtgcagcttgaccaagacatcccaatcgcgggcaacgtgaaaatctactcgtccaaggagctgaggaaagccacgggaaatttctgcccgggaagcaagcttggacagggttctttcggccgtgtatacctgggaaaactgaacaatggcgagaaagttgccatcaaggtgctctcctcagagtccaggcaagggacaaaggagttcttgaatgaactgagtgtcatatccaacataactcaccacaaccttgtcaaactgcatggctgctgcatcgacggaggccagaagatgctggtctacaactacgtggagaacaacagccttgcacaaacccttttcggtaattcccgcagcggcatcagatttgactggagaacaagggtggagatctgcgttggcgttgccgatgggctcacgtacctccacgaagaagtccgtccaccgatcgtccaccgcgacatcaaagcgagcaacatccttctcgacagaaatctgagacccaagatagcagactttgggctggcgaagttcttccctggcaacatgacacacatcagcaccagagttgcagggacgctaggatatcttgcgccagagtacgccatccgagggcagctgaccaagaaggccgacgtctacagctttggtgtactgctgctggagatcgtcagtggcagatgccacactgatcccacattacctcttgacgagcagttcctcctagaaaaggtctggacactctcggagtccgatgatcttgagagcatcatcgacggtaccatggagcgcgatttcgacaccgaggaagcacgtcggttgctgaaaataggtcttctgtgcacccaggatagccccaagatcaggccctccatgtcaatggttgccaagatgctgaagggtgagtgtgatgtgagtgaaaagatcatgcggcccagcctgatcacagacgtcatggacctgaaagtcaggacagtagagccgatccagttcagtttatccccatcgatgtcacctgcgctgagcagctcactggtgtccacacttgcattagctggtagcacagttgtagagagccgctgaaggaactagttaaaggaccaggttcctacaaaaaatggtttgttagaagcagcatgaattgtttttttgtttgtgttttagtacattgtaaggttgtcagtttgtatatataacatcctagtttgattatcgagattagagattttggc

SEQ ID NO: 37901 - protein, 377 aa, Zea mays subsp. mays
  peptide (1)..(377): Ceres Seq. ID no. 12357050
  misc_feature (1)..(341): NCBI GI NO: 18394385 NR Description: receptor-like serine/threonine kinase, putative
  misc_feature (1)..(341): NCBI GI NO: 25287648 NR Description: hypothetical protein F19K19.4
  misc_feature (30)..(340): NCBI GI NO: 38344329 NR Description: OSJNBa0058K23.11
  misc_feature (62)..(340): NCBI GI NO: 5679843 NR Description: Putitive Ser/Thr protein kinase
  misc_feature (172)..(340): NCBI GI NO: 5852099 NR Description: zwh22.1 [Oryza sativa (indica cultivar-group)]
  misc_feature (30)..(148): NCBI GI NO: 5852099 NR Description: zwh22.1 [Oryza sativa (indica cultivar-group)]
  misc_feature (3)..(334): NCBI GI NO: 38344039 NR Description: OSJNBb0017I01.6
  misc_feature (22)..(334): NCBI GI NO: 34901978 NR Description: putative receptor ser/thr protein
  misc_feature (6)..(334): NCBI GI NO: 38345599 NR Description: OSJNBa0093O08.1
  misc_feature (21)..(334): NCBI GI NO: 6056376 NR Description: Similar to serine/threonine kinases
MGCYPVFCRKKNSRSQVVQLDQDIPIAGNVKIYSSKELRKATGNFCPGSKLGQGSFGRVYLGKLNNGEKVAIKVLSSESRQGTKEFLNELSVISNITHHNLVKLHGCCIDGGQKMLVYNYVENNSLAQTLFGNSRSGIRFDWRTRVEICVGVADGLTYLHEEVRPPIVHRDIKASNILLDRNLRPKIADFGLAKFFPGNMTHISTRVAGTLGYLAPEYAIRGQLTKKADVYSFGVLLLEIVSGRCHTDPTLPLDEQFLLEKVWTLSESDDLESIIDGTMERDFDTEEARRLLKIGLLCTQDSPKIRPSMSMVAKMLKGECDVSEKIMRPSLITDVMDLKVRTVEPIQFSLSPSMSPALSSSLVSTLALAGSTVVESR

SEQ ID NO: 37902 - protein, 263 aa, Zea mays subsp. mays
  peptide (1)..(263): Ceres Seq. ID no. 12357051
  misc_feature (1)..(227): NCBI GI NO: 18394385 NR Description: receptor-like serine/threonine kinase, putative
  misc_feature (1)..(227): NCBI GI NO: 25287648 NR Description: hypothetical protein F19K19.4
  misc_feature (1)..(226): NCBI GI NO: 38344329 NR Description: OSJNBa0058K23.11
  misc_feature (1)..(226): NCBI GI NO: 5679843 NR Description: Putitive Ser/Thr protein kinase
  misc_feature (58)..(226): NCBI GI NO: 5852099 NR Description: zwh22.1 [Oryza sativa (indica cultivar-group)]
  misc_feature (1)..(34): NCBI GI NO: 5852099 NR Description: zwh22.1 [Oryza sativa (indica cultivar-group)]
  misc_feature (1)..(220): NCBI GI NO: 38344039 NR Description: OSJNBb0017I01.6
  misc_feature (1)..(220): NCBI GI NO: 34901978 NR Description: putative receptor ser/thr protein
  misc_feature (1)..(220): NCBI GI NO: 38345599 NR Description: OSJNBa0093O08.1
  misc_feature (1)..(220): NCBI GI NO: 6056376 NR Description: Similar to serine/threonine kinases
MLVYNYVENNSLAQTLFGNSRSGIRFDWRTRVEICVGVADGLTYLHEEVRPPIVHRDIKASNILLDRNLRPKIADFGLAKFFPGNMTHISTRVAGTLGYLAPEYAIRGQLTKKADVYSFGVLLLEIVSGRCHTDPTLPLDEQFLLEKVWTLSESDDLESIIDGTMERDFDTEEARRLLKIGLLCTQDSPKIRPSMSMVAKMLKGECDVSEKIMRPSLITDVMDLKVRTVEPIQFSLSPSMSPALSSSLVSTLALAGSTVVESR

SEQ ID NO: 37903 - DNA, 1266 bp, Zea mays subsp. mays; identical to SEQ ID NO: 30555
  misc_feature (1)..(1266): Ceres Seq. ID no. 12358430

SEQ ID NO: 37904 - protein, 352 aa, Zea mays subsp. mays; identical to SEQ ID NO: 30556
  peptide (1)..(352): Ceres Seq. ID no. 12358431
  misc_feature (28)..(352): NCBI GI NO: 22671730 NR Description: phosphoribosyl pyrophosphate synthetase
  misc_feature (29)..(352): NCBI GI NO: 15228027 NR Description: putative ribose phosphate pyrophosphokinase
  misc_feature (40)..(352): NCBI GI NO: 4902879 NR Description: phosphoribosyl pyrophosphate synthase isozyme 4
  misc_feature (38)..(352): NCBI GI NO: 34910736 NR Description: putative phosphoribosyl pyrophosphate synthase
  misc_feature (20)..(352): NCBI GI NO: 4902877 NR Description: phosphoribosyl pyrophosphate synthase isozyme 3
  misc_feature (37)..(352): NCBI GI NO: 15220191 NR Description: phosphoribosyl diphosphate synthase
  misc_feature (37)..(352): NCBI GI NO: 25529012 NR Description: ribose-phosphate diphosphokinase (EC 2
  misc_feature (37)..(352): NCBI GI NO: 25402614 NR Description: hypothetical protein
  misc_feature (37)..(210): NCBI GI NO: 6573738 NR Description: F20B24.13 [Arabidopsis thaliana]
  misc_feature (210)..(303): NCBI GI NO: 6573738 NR Description: F20B24.13 [Arabidopsis thaliana]

SEQ ID NO: 37905 - protein, 325 aa, Zea mays subsp. mays; identical to SEQ ID NO: 30557
  peptide (1)..(325): Ceres Seq. ID no. 12358432
  misc_feature (1)..(325): NCBI GI NO: 22671730 NR Description: phosphoribosyl pyrophosphate synthetase
  misc_feature (2)..(325): NCBI GI NO: 15228027 NR Description: putative ribose phosphate pyrophosphokinase
  misc_feature (13)..(325): NCBI GI NO: 4902879 NR Description: phosphoribosyl pyrophosphate synthase isozyme 4
  misc_feature (11)..(325): NCBI GI NO: 34910736 NR Description: putative phosphoribosyl pyrophosphate synthase
  misc_feature (1)..(325): NCBI GI NO: 4902877 NR Description: phosphoribosyl pyrophosphate synthase isozyme 3
  misc_feature (10)..(325): NCBI GI NO: 15220191 NR Description: phosphoribosyl diphosphate synthase
  misc_feature (10)..(325): NCBI GI NO: 25529012 NR Description: ribose-phosphate diphosphokinase (EC 2
  misc_feature (10)..(325): NCBI GI NO: 25402614 NR Description: hypothetical protein
  misc_feature (10)..(183): NCBI GI NO: 6573738 NR Description: F20B24.13 [Arabidopsis thaliana]
  misc_feature (183)..(276): NCBI GI NO: 6573738 NR Description: F20B24.13 [Arabidopsis thaliana]

SEQ ID NO: 37906 - protein, 196 aa, Zea mays subsp. mays; identical to SEQ ID NO: 30558
  peptide (1)..(196): Ceres Seq. ID no. 12358433
  misc_feature (1)..(196): NCBI GI NO: 22671730 NR Description: phosphoribosyl pyrophosphate synthetase
  misc_feature (1)..(196): NCBI GI NO: 15228027 NR Description: putative ribose phosphate pyrophosphokinase
  misc_feature (1)..(196): NCBI GI NO: 4902879 NR Description: phosphoribosyl pyrophosphate synthase isozyme 4
  misc_feature (1)..(196): NCBI GI NO: 34910736 NR Description: putative phosphoribosyl pyrophosphate synthase
  misc_feature (1)..(196): NCBI GI NO: 4902877 NR Description: phosphoribosyl pyrophosphate synthase isozyme 3
  misc_feature (1)..(196): NCBI GI NO: 15220191 NR Description: phosphoribosyl diphosphate synthase
  misc_feature (1)..(196): NCBI GI NO: 25529012 NR Description: ribose-phosphate diphosphokinase (EC 2
  misc_feature (1)..(196): NCBI GI NO: 25402614 NR Description: hypothetical protein
  misc_feature (1)..(54): NCBI GI NO: 6573738 NR Description: F20B24.13 [Arabidopsis thaliana]
  misc_feature (54)..(147): NCBI GI NO: 6573738 NR Description: F20B24.13 [Arabidopsis thaliana]

SEQ ID NO: 37907 - DNA, 1783 bp, Zea mays subsp. mays
  misc_feature (1)..(1783): Ceres Seq. ID no. 12376532
aagagctaccgcttcttctcgcagctcgaggcgctgcacgcctcggcgccgcctccgccgcccccgccctcgggcatgaccacggtgcaagctagccctcatcagccgatggaaatggcatggacggcgggccctacggtgctgggccctgccgccgtcgccggcctgccagacctcagcttctcgtcgatgtccgagtccgactcagagtacgactcggacgacgactctggtgcgggggaggagggcctcagcgggggcgagtgcgacagggagatgatggccatcttcgaggggatgatgaagcagttcacggagaagcaagaccgccatgcagcgcgtgttcctggagacgctggagcggtgcgaggcagagcgcacggcgcgcgaggaggcgtggcggcgccaggaggtcgcccgcatgaaccgcgagcgcgagcagctcgccagggagcgcgccgccgcggcctcccgcgacgccgcgctgatcgcgttcctccagcgtgtcggcggggggcagggcgagcccgcgcggctccctccgcacggcgccggcgtcgtgcccgcgccgccgatgccggactgcgcccctccgtcgcctcggcgcgacgcggcggccgcctcgcttcagcagctggtgcccgcaccgccgaaggcggtggaggccttggcgcgcgctggaggagagggcggcgggtccacgccgtcgcggtggcccaaggaggaagtggaggcgctgatccagatgcggaacgagaagggcgagaagtaccacgacgcgggggccaaggggcccctttgggaggacatcgccgccgcgatgcgggggatcgggtacagccggagcgccaagcggtgcaaggagaagtgggagaacatcaacaagtactacaagaaggtgaaggagagcaacaagaggcgccccgaggactccaagacctgtccttacttccaccagctcgacgccatgtaccgcaacaaacaccgcggcggcacaggcggcagaacggcacccagagcgaacatggcctccgccgtcgccgtcgccgtcgcagcaaacgtgcaggacaacccgagcaagcgcgagctcgagggaaagagcagcaacgatgccgacaaccggaagaatggtgaacaggggaacgtgcttacttctcccgctagcggcgatacagcaccaggtggcgccgccaaaaacaagacggcagagggcaatgtggatgatacagatgtgcagcaccagcagcggttcagtgccgacgagacggacagcgacgacgaggacatgtacatggcaagaaactacacagtctacactgaagaaggcaacgacgaagacaaaatgaagtacaagatgggcgtccaggagcgtgatgtgatcgggagcagcgggcaacgtgcttgcgccaccaccaccagcagcagcagcagccacggctgcggcaccgacgagttcagctgccccaacgagcagcaccttccttgccgttcagtagagggcaatgctgcaggaggaggcccggtgccagccgatcagcaccagtgcatcaccaccttttgcggcccataatcaccgagtatacttgccctgcatctgaaccatccgaataccatttattgatttgttctgtaataagtaccagatcatggaaacctcaaaaggtaaaaagaagacaatgaagaacagaggaggcagcagagacgcctaaacagaaagttcttttcttttttctctcattataggtcatgttatactttacctattgctaacaattgtacattc

SEQ ID NO: 37908 - protein, 412 aa, Zea mays subsp. mays
  peptide (1)..(412): Ceres Seq. ID no. 12376533
  misc_feature (147)..(184): Pfam Name: Pfam Description:  Myb-like DNA-binding domain
  misc_feature (63)..(375): NCBI GI NO: 38344985 NR Description: OSJNBa0011L07.15
  misc_feature (63)..(375): NCBI GI NO: 283004 NR Description: DNA-binding protein Gt-2 - rice
  misc_feature (66)..(334): NCBI GI NO: 27476085 NR Description: Hypothetical protein
  misc_feature (1)..(90): NCBI GI NO: 27476085 NR Description: Hypothetical protein
  misc_feature (1)..(233): NCBI GI NO: 18182309 NR Description: GT-2 factor [Glycine max]
  misc_feature (1)..(236): NCBI GI NO: 15223770 NR Description: GT-like trihelix DNA-binding protein, putative
  misc_feature (66)..(296): NCBI GI NO: 37536070 NR Description: putative transcription factor
  misc_feature (1)..(293): NCBI GI NO: 2664202 NR Description: GT2 [Arabidopsis thaliana]
  misc_feature (1)..(293): NCBI GI NO: 15223771 NR Description: trihelix DNA-binding protein
  misc_feature (1)..(293): NCBI GI NO: 21592726 NR Description: trihelix DNA-binding protein (GT2)
MQRVFLETLERCEAERTAREEAWRRQEVARMNREREQLARERAAAASRDAALIAFLQRVGGGQGEPARLPPHGAGVVPAPPMPDCAPPSPRRDAAAASLQQLVPAPPKAVEALARAGGEGGGSTPSRWPKEEVEALIQMRNEKGEKYHDAGAKGPLWEDIAAAMRGIGYSRSAKRCKEKWENINKYYKKVKESNKRRPEDSKTCPYFHQLDAMYRNKHRGGTGGRTAPRANMASAVAVAVAANVQDNPSKRELEGKSSNDADNRKNGEQGNVLTSPASGDTAPGGAAKNKTAEGNVDDTDVQHQQRFSADETDSDDEDMYMARNYTVYTEEGNDEDKMKYKMGVQERDVIGSSGQRACATTTSSSSSHGCGTDEFSCPNEQHLPCRSVEGNAAGGGPVPADQHQCITTFCGP

SEQ ID NO: 37909 - protein, 382 aa, Zea mays subsp. mays
  peptide (1)..(382): Ceres Seq. ID no. 12376534
  misc_feature (117)..(154): Pfam Name: Pfam Description:  Myb-like DNA-binding domain
  misc_feature (33)..(345): NCBI GI NO: 38344985 NR Description: OSJNBa0011L07.15
  misc_feature (33)..(345): NCBI GI NO: 283004 NR Description: DNA-binding protein Gt-2 - rice
  misc_feature (36)..(304): NCBI GI NO: 27476085 NR Description: Hypothetical protein
  misc_feature (1)..(60): NCBI GI NO: 27476085 NR Description: Hypothetical protein
  misc_feature (1)..(203): NCBI GI NO: 18182309 NR Description: GT-2 factor [Glycine max]
  misc_feature (1)..(206): NCBI GI NO: 15223770 NR Description: GT-like trihelix DNA-binding protein, putative
  misc_feature (36)..(266): NCBI GI NO: 37536070 NR Description: putative transcription factor
  misc_feature (1)..(263): NCBI GI NO: 2664202 NR Description: GT2 [Arabidopsis thaliana]
  misc_feature (1)..(263): NCBI GI NO: 15223771 NR Description: trihelix DNA-binding protein
  misc_feature (1)..(263): NCBI GI NO: 21592726 NR Description: trihelix DNA-binding protein (GT2)
MNREREQLARERAAAASRDAALIAFLQRVGGGQGEPARLPPHGAGVVPAPPMPDCAPPSPRRDAAAASLQQLVPAPPKAVEALARAGGEGGGSTPSRWPKEEVEALIQMRNEKGEKYHDAGAKGPLWEDIAAAMRGIGYSRSAKRCKEKWENINKYYKKVKESNKRRPEDSKTCPYFHQLDAMYRNKHRGGTGGRTAPRANMASAVAVAVAANVQDNPSKRELEGKSSNDADNRKNGEQGNVLTSPASGDTAPGGAAKNKTAEGNVDDTDVQHQQRFSADETDSDDEDMYMARNYTVYTEEGNDEDKMKYKMGVQERDVIGSSGQRACATTTSSSSSHGCGTDEFSCPNEQHLPCRSVEGNAAGGGPVPADQHQCITTFCGP

SEQ ID NO: 37910 - protein, 377 aa, Zea mays subsp. mays
  peptide (1)..(377): Ceres Seq. ID no. 12376535
  misc_feature (7)..(114): NCBI GI NO: 38344985 NR Description: OSJNBa0011L07.15
  misc_feature (7)..(91): NCBI GI NO: 283004 NR Description: DNA-binding protein Gt-2 - rice
  misc_feature (1)..(57): NCBI GI NO: 283004 NR Description: DNA-binding protein Gt-2 - rice
  misc_feature (1)..(57): NCBI GI NO: 38344985 NR Description: OSJNBa0011L07.15
  misc_feature (1)..(99): NCBI GI NO: 37536070 NR Description: putative transcription factor
  misc_feature (1)..(40): NCBI GI NO: 22655272 NR Description: DNA-binding factor, putative
  misc_feature (42)..(278): NCBI GI NO: 40787930 NR Description: BICP0 immediate-early transactivator protein withzinc finger
KSYRFFSQLEALHASAPPPPPPPSGMTTVQASPHQPMEMAWTAGPTVLGPAAVAGLPDLSFSSMSESDSEYDSDDDSGAGEEGLSGGECDREMMAIFEGMMKQFTEKQDRHAARVPGDAGAVRGRAHGARGGVAAPGGRPHEPRARAARQGARRRGLPRRRADRVPPACRRGAGRARAAPSARRRRRARAADAGLRPSVASARRGGRLASAAGARTAEGGGGLGARWRRGRRVHAVAVAQGGSGGADPDAEREGREVPRRGGQGAPLGGHRRRDAGDRVQPERQAVQGEVGEHQQVLQEGEGEQQEAPRGLQDLSLLPPARRHVPQQTPRRHRRQNGTQSEHGLRRRRRRRSKRAGQPEQARARGKEQQRCRQPEEW

SEQ ID NO: 37911 - DNA, 1740 bp, Zea mays subsp. mays
  misc_feature (1)..(1740): Ceres Seq. ID no. 12372698
gcaacgccgttgcttcaactcgactccagcatccctcgtccccgcatcaccgcgccgccgacactccgctcgctttcgctcccgagacccgggcctgccgagccgccgccatggacgaggagtacgacgtgatcgttctgggcacggggctcaaggagtgcatcctcagcggtctcctctctgtcgacggcctcaaggttctacacatggatagaaatgattactacggaggagattccacctccctaaacctgaaccagctctggaagaggtttaggggggaagacaagccaccggcacatctaggtgcaagcagagattacaatgtagacatggttccaaagtttatgatggcaaacgggactttggttcgcactctcattcacactgatgtgacaaaatatttgtcattcaaagctgttgatggaagctatgtcttcagcaaacggaagattcacaaggttcctgccaccgatatggaggctctaaaatctcctttgatgggtctatttgagaaacgtagagcaaggaacttttttgtttacgtccaaaattacaatgaagctgatccagtgacacatcaggggttggacctcacaaggattacaactagagaattgattttgaaacatggattgagtgatgacactgtggattttattggccatgcactcgctctgcacagggatgatcgttacctaaatgaacctgcccttgatactgtaaaaaggatgaagctttacgctgagtctcttgcacgttttcaaggaggctcgccttatatttatccattatatgggttgggtgagctgccacaggcttttgcacgtctaagtgctgtttatggtggtacatatatgttaaataaaccagagtgcaaggttgaatttgatatcgaagggaaagtgtgtggtgttacttcagaaggtgaaacggcgaaatgcaaaaaggttgtctgtgatccttcttacttgcctagcaaggtaaggaagattggaaaagttgcacgtgcaatcgctattatgagccacccaattccaaacacaaatgagtcccactcgattcagattattttgccgcagaagcaacttgggcgcaagtcagacatgtatgttttctgttgctcatatacacataatgttgcgccaaaagggaagttcattgcatttgtgtctgcggaagctgagaccgataatccacagtccgaactaaagcctggaattgatctacttggtcaagtagatgaactgttttttgatatgtatgacagatacaaacctgtcaatgaaccatctcttgataattgctttgtttcaatgagttatgatgctactacacactttgagacaactgtgacagatgttctcagtatgtacacagcaattactggaaagaccgttgatctcagtgtggacctgagcgctgccagcgcagctgaagaatactagagattttcctattagagataccatactctaaagaagaacggtgttaacacaggccctgcctggtggcttgccaggtttagatctatgctgcagctgcagccaattaaacggacagaacatatcaccctatagcatttacatggcgtttaaacacaagaccgtttaggatgatggtggtggttcctttgttccttgcattattgatcggatggttaacttttaactgtgctcacgtttgctacaacctgctcgttcttgtcagtgatgcattgtgatcgcttttcagatatgc

SEQ ID NO: 37912 - protein, 481 aa, Zea mays subsp. mays
  peptide (1)..(481): Ceres Seq. ID no. 12372699
  misc_feature (37)..(474): Pfam Name: Pfam Description:  GDP dissociation inhibitor
  misc_feature (37)..(481): NCBI GI NO: 7489478 NR Description: GDP dissociation inhibitor protein - rice
  misc_feature (37)..(481): NCBI GI NO: 7489479 NR Description: GDP dissociation inhibitor protein - rice
  misc_feature (37)..(480): NCBI GI NO: 7489133 NR Description: GDP dissociation inhibitor - common tobacco
  misc_feature (37)..(480): NCBI GI NO: 3175990 NR Description: GDP dissociation inhibitor [Cicer arietinum]
  misc_feature (37)..(480): NCBI GI NO: 15224814 NR Description: GDP dissociation inhibitor; protein id:At2g44100
  misc_feature (37)..(480): NCBI GI NO: 15232210 NR Description: Rab GDP dissociation inhibitor
  misc_feature (37)..(480): NCBI GI NO: 1550740 NR Description: GDP-associated inhibitor [Arabidopsis thaliana]
  misc_feature (37)..(480): NCBI GI NO: 33146460 NR Description: putative GDP dissociation inhibitor
  misc_feature (37)..(480): NCBI GI NO: 17473582 NR Description: GDP dissociation inhibitor [Arabidopsis thaliana]
  misc_feature (37)..(480): NCBI GI NO: 21592535 NR Description: GDP dissociation inhibitor [Arabidopsis thaliana]
NAVASTRLQHPSSPHHRAADTPLAFAPETRACRAAAMDEEYDVIVLGTGLKECILSGLLSVDGLKVLHMDRNDYYGGDSTSLNLNQLWKRFRGEDKPPAHLGASRDYNVDMVPKFMMANGTLVRTLIHTDVTKYLSFKAVDGSYVFSKRKIHKVPATDMEALKSPLMGLFEKRRARNFFVYVQNYNEADPVTHQGLDLTRITTRELILKHGLSDDTVDFIGHALALHRDDRYLNEPALDTVKRMKLYAESLARFQGGSPYIYPLYGLGELPQAFARLSAVYGGTYMLNKPECKVEFDIEGKVCGVTSEGETAKCKKVVCDPSYLPSKVRKIGKVARAIAIMSHPIPNTNESHSIQIILPQKQLGRKSDMYVFCCSYTHNVAPKGKFIAFVSAEAETDNPQSELKPGIDLLGQVDELFFDMYDRYKPVNEPSLDNCFVSMSYDATTHFETTVTDVLSMYTAITGKTVDLSVDLSAASAAEEY

SEQ ID NO: 37913 - protein, 445 aa, Zea mays subsp. mays
  peptide (1)..(445): Ceres Seq. ID no. 12372700
  misc_feature (1)..(438): Pfam Name: Pfam Description:  GDP dissociation inhibitor
  misc_feature (1)..(445): NCBI GI NO: 7489478 NR Description: GDP dissociation inhibitor protein - rice
  misc_feature (1)..(445): NCBI GI NO: 7489479 NR Description: GDP dissociation inhibitor protein - rice
  misc_feature (1)..(444): NCBI GI NO: 7489133 NR Description: GDP dissociation inhibitor - common tobacco
  misc_feature (1)..(444): NCBI GI NO: 3175990 NR Description: GDP dissociation inhibitor [Cicer arietinum]
  misc_feature (1)..(444): NCBI GI NO: 15224814 NR Description: GDP dissociation inhibitor; protein id:At2g44100
  misc_feature (1)..(444): NCBI GI NO: 15232210 NR Description: Rab GDP dissociation inhibitor
  misc_feature (1)..(444): NCBI GI NO: 1550740 NR Description: GDP-associated inhibitor [Arabidopsis thaliana]
  misc_feature (1)..(444): NCBI GI NO: 33146460 NR Description: putative GDP dissociation inhibitor
  misc_feature (1)..(444): NCBI GI NO: 17473582 NR Description: GDP dissociation inhibitor [Arabidopsis thaliana]
  misc_feature (1)..(444): NCBI GI NO: 21592535 NR Description: GDP dissociation inhibitor [Arabidopsis thaliana]
MDEEYDVIVLGTGLKECILSGLLSVDGLKVLHMDRNDYYGGDSTSLNLNQLWKRFRGEDKPPAHLGASRDYNVDMVPKFMMANGTLVRTLIHTDVTKYLSFKAVDGSYVFSKRKIHKVPATDMEALKSPLMGLFEKRRARNFFVYVQNYNEADPVTHQGLDLTRITTRELILKHGLSDDTVDFIGHALALHRDDRYLNEPALDTVKRMKLYAESLARFQGGSPYIYPLYGLGELPQAFARLSAVYGGTYMLNKPECKVEFDIEGKVCGVTSEGETAKCKKVVCDPSYLPSKVRKIGKVARAIAIMSHPIPNTNESHSIQIILPQKQLGRKSDMYVFCCSYTHNVAPKGKFIAFVSAEAETDNPQSELKPGIDLLGQVDELFFDMYDRYKPVNEPSLDNCFVSMSYDATTHFETTVTDVLSMYTAITGKTVDLSVDLSAASAAEEY

SEQ ID NO: 37914 - protein, 413 aa, Zea mays subsp. mays
  peptide (1)..(413): Ceres Seq. ID no. 12372701
  misc_feature (1)..(406): Pfam Name: Pfam Description:  GDP dissociation inhibitor
  misc_feature (1)..(413): NCBI GI NO: 7489478 NR Description: GDP dissociation inhibitor protein - rice
  misc_feature (1)..(413): NCBI GI NO: 7489479 NR Description: GDP dissociation inhibitor protein - rice
  misc_feature (1)..(412): NCBI GI NO: 7489133 NR Description: GDP dissociation inhibitor - common tobacco
  misc_feature (1)..(412): NCBI GI NO: 3175990 NR Description: GDP dissociation inhibitor [Cicer arietinum]
  misc_feature (1)..(412): NCBI GI NO: 15224814 NR Description: GDP dissociation inhibitor; protein id:At2g44100
  misc_feature (1)..(412): NCBI GI NO: 15232210 NR Description: Rab GDP dissociation inhibitor
  misc_feature (1)..(412): NCBI GI NO: 1550740 NR Description: GDP-associated inhibitor [Arabidopsis thaliana]
  misc_feature (1)..(412): NCBI GI NO: 33146460 NR Description: putative GDP dissociation inhibitor
  misc_feature (1)..(412): NCBI GI NO: 17473582 NR Description: GDP dissociation inhibitor [Arabidopsis thaliana]
  misc_feature (1)..(412): NCBI GI NO: 21592535 NR Description: GDP dissociation inhibitor [Arabidopsis thaliana]
MDRNDYYGGDSTSLNLNQLWKRFRGEDKPPAHLGASRDYNVDMVPKFMMANGTLVRTLIHTDVTKYLSFKAVDGSYVFSKRKIHKVPATDMEALKSPLMGLFEKRRARNFFVYVQNYNEADPVTHQGLDLTRITTRELILKHGLSDDTVDFIGHALALHRDDRYLNEPALDTVKRMKLYAESLARFQGGSPYIYPLYGLGELPQAFARLSAVYGGTYMLNKPECKVEFDIEGKVCGVTSEGETAKCKKVVCDPSYLPSKVRKIGKVARAIAIMSHPIPNTNESHSIQIILPQKQLGRKSDMYVFCCSYTHNVAPKGKFIAFVSAEAETDNPQSELKPGIDLLGQVDELFFDMYDRYKPVNEPSLDNCFVSMSYDATTHFETTVTDVLSMYTAITGKTVDLSVDLSAASAAEEY

SEQ ID NO: 37915 - DNA, 494 bp, Zea mays subsp. mays
  misc_feature (1)..(494): Ceres Seq. ID no. 3465404
taatcgaaaactcctttttttctctcatccgaattcccaggcaggcaggtcggcgaggagggcaggaagaccgaagaccgagccgtgcgggggctcgggacgggaacgggacaggaccccaaaatctcagatccttcctgcccgcccgcccgtgcccgtcgacgcgtcgttcttgccggccgcgccccacctccgccctctcctcctccagggggatcggatacgccacaggctgcgcgatggtgctgtgggtcttcggctacggctccctcatctggaaccccggcttcgacttcgacgacaaaatcctcggcttcatcaaaggctacaagcgcacctttaatctcgcttgcattgaccacagaggcacaccggagcatccggcgaggacctgcacgcttgaaaccgacgacgaggccatatgctggggaattgcatattgtgtcmagggtggtcccagaaaaagagctaaaagcaatacagtacttggagag

SEQ ID NO: 37916 - protein, 164 aa, Zea mays subsp. mays
  peptide (1)..(164): Ceres Seq. ID no. 3465405
  misc_feature (82)..(154): Pfam Name: Pfam Description:  ChaC-like protein
  misc_feature (80)..(154): NCBI GI NO: 7486662 NR Description: hypothetical protein F8F16
  misc_feature (80)..(154): NCBI GI NO: 18417778 NR Description: unknown protein; protein id: At4g31290
  misc_feature (80)..(154): NCBI GI NO: 21593515 NR Description: unknown [Arabidopsis thaliana]
  misc_feature (80)..(154): NCBI GI NO: 7486723 NR Description: hypothetical protein F9D12
  misc_feature (80)..(154): NCBI GI NO: 15239626 NR Description: putative protein; protein id: At5g26220.1
  misc_feature (80)..(152): NCBI GI NO: 27525010 NR Description: putative cation transporter [Beta procumbens]
  misc_feature (80)..(155): NCBI GI NO: 18401334 NR Description: expressed protein; protein id: At1g44790
  misc_feature (80)..(146): NCBI GI NO: 38344831 NR Description: OSJNBa0064H22.12
  misc_feature (82)..(155): NCBI GI NO: 12083292 NR Description: unknown protein [Arabidopsis thaliana]
  misc_feature (82)..(141): NCBI GI NO: 25349686 NR Description: hypothetical protein T12C22.6
  misc_feature (149)..(149): Xaa is any aa, unknown or other
IENSFFSLIRIPRQAGRRGGQEDRRPSRAGARDGNGTGPQNLRSFLPARPCPSTRRSCRPRPTSALSSSRGIGYATGCAMVLWVFGYGSLIWNPGFDFDDKILGFIKGYKRTFNLACIDHRGTPEHPARTCTLETDDEAICWGIAYCVXGGPRKRAKSNTVLGE

SEQ ID NO: 37917 - protein, 113 aa, Zea mays subsp. mays
  peptide (1)..(113): Ceres Seq. ID no. 3465406
NRKLLFFSHPNSQAGRSARRAGRPKTEPCGGSGRERDRTPKSQILPARPPVPVDASFLPAAPHLRPLLLQGDRIRHRLRDGAVGLRLRLPHLEPRLRLRRQNPRLHQRLQAHL

SEQ ID NO: 37918 - protein, 85 aa, Zea mays subsp. mays
  peptide (1)..(85): Ceres Seq. ID no. 3465407
  misc_feature (3)..(75): Pfam Name: Pfam Description:  ChaC-like protein
  misc_feature (1)..(75): NCBI GI NO: 7486662 NR Description: hypothetical protein F8F16
  misc_feature (1)..(75): NCBI GI NO: 21593515 NR Description: unknown [Arabidopsis thaliana]
  misc_feature (1)..(75): NCBI GI NO: 18417778 NR Description: unknown protein; protein id: At4g31290
  misc_feature (1)..(75): NCBI GI NO: 7486723 NR Description: hypothetical protein F9D12
  misc_feature (1)..(75): NCBI GI NO: 15239626 NR Description: putative protein; protein id: At5g26220.1
  misc_feature (1)..(73): NCBI GI NO: 27525010 NR Description: putative cation transporter [Beta procumbens]
  misc_feature (1)..(76): NCBI GI NO: 18401334 NR Description: expressed protein; protein id: At1g44790
  misc_feature (1)..(67): NCBI GI NO: 38344831 NR Description: OSJNBa0064H22.12
  misc_feature (3)..(76): NCBI GI NO: 12083292 NR Description: unknown protein [Arabidopsis thaliana]
  misc_feature (3)..(62): NCBI GI NO: 25349686 NR Description: hypothetical protein T12C22.6
  misc_feature (70)..(70): Xaa is any aa, unknown or other
MVLWVFGYGSLIWNPGFDFDDKILGFIKGYKRTFNLACIDHRGTPEHPARTCTLETDDEAICWGIAYCVXGGPRKRAKSNTVLGE

SEQ ID NO: 37919 - DNA, 1588 bp, Zea mays subsp. mays
  misc_feature (1)..(1588): Ceres Seq. ID no. 12363408
cccggcttaggaaccctcgaaaagacgcctcaccatctcctttgtgtccttgctaactaactccccattagatccggccttcttcctccccgtctccgtcctttgtgtccagttgcttcataagctacccatcgccaattcgccatatacgcacatacccaacgacgacgcacgcgcgtgcgcaaaccaccaaccggagcgagtaccaaccggccggcccgcccaacaagcaggcggctagccatcgacgaccgagcacatcgagctgcccccggccggtcatatatatatgcagggcggcggcggtgatcaagcaggagggagcctgggcatgggcatgggcgtggggtacgccggcggcggaggcgccgagtgctcgtcgtcctcggtggcggccgcggctgccgccgccgcggcggcggcggaggcggaggagcggcagctgctcaagggggagatcgcggtgcacccgctgtgcgagcagctggtggcggcgcacgtggggtgcctgcgcgtggccacgcccatcgaccacctccccctcatcgacgcccagctcgcgcagtccagcggcctcctccactcctacgccgcccaccacagccccttcctctccccgcacgacaagcacgacctcgactccttcctcgcgcagtacctgatgctgctgtgctcgttccgggagcagctgcagcagcacgtccgggtgcacgccgtggaggccgtcatggcatgccgcgagatcgagcagtccctgcaagacctaactggggtgacgctggaggaagggacgggagcgaccatgtcggaggaggacgaggacgaggcgccgatgctggaggtgggtctggtggacatgggctccgacgggcacgacatgatgggcttcggcccgctcctgcccaccgactccgagcgctcgctcatggatagggtccgacaggagcttaagatcgagctcaagcagggtttcaagtcaagaatagaggatgtgagggaggagattctgaggaaaaggagggccgggaagctgcctggggacaccaccagcatcctcaagcaatggtggcagcagcactccaagtggccataccccacggaggacgataaggcgaggctcgttgaagagaccggcctgcagctgaaacaaatcaacaactggttcatcaaccagaggaagaggaactggcacaacaactcccagacgtcaaccctcaaatcaaagcgtaaaaggtgatggagagctgcgccaccatgtactgcacacctgacacgtataccaattaccaacacgctaatcagacgacgtacggccatgcatggcgactcacaagaaataaagaggatcgatcgattcaactgtatatttctagtcattagtcagagaggtgacaggttcatgacacacacaaacacacgtacactagtctgaccactggcatatttgcttgctgtgattaatattttgagccgatcatttgctcggagcatactttattcttgttattattgtacagccatagtttgtcctcccagcgtacgtacataatctttgaggttgcattcatatatacagtgatctgatctg

SEQ ID NO: 37920 - protein, 315 aa, Zea mays subsp. mays
  peptide (1)..(315): Ceres Seq. ID no. 12363409
  misc_feature (106)..(161): Pfam Name: Pfam Description:  KNOX2 domain
  misc_feature (5)..(315): NCBI GI NO: 14149141 NR Description: KNOX family class 2 homeodomain protein
  misc_feature (35)..(314): NCBI GI NO: 21618231 NR Description: homeodomain-containing protein HD1, putative
  misc_feature (44)..(314): NCBI GI NO: 18407708 NR Description: homeodomain-containing protein HD1, putative
  misc_feature (44)..(314): NCBI GI NO: 25386223 NR Description: hypothetical protein F16P17.16
  misc_feature (44)..(314): NCBI GI NO: 26451690 NR Description: putative homeodomain transcription factor KNAT6
  misc_feature (8)..(315): NCBI GI NO: 4098246 NR Description: homeobox 2 protein [Lycopersicon esculentum]
  misc_feature (43)..(314): NCBI GI NO: 1170191 NR Description: Homeobox protein HD1
  misc_feature (54)..(315): NCBI GI NO: 3023961 NR Description: Homeobox protein knotted-1 like 3 (KNAP3)
  misc_feature (121)..(315): NCBI GI NO: 4887620 NR Description: homeobox gene
  misc_feature (3)..(314): NCBI GI NO: 4098244 NR Description: homeobox 1 protein [Lycopersicon esculentum]
MQGGGGDQAGGSLGMGMGVGYAGGGGAECSSSSVAAAAAAAAAAAEAEERQLLKGEIAVHPLCEQLVAAHVGCLRVATPIDHLPLIDAQLAQSSGLLHSYAAHHSPFLSPHDKHDLDSFLAQYLMLLCSFREQLQQHVRVHAVEAVMACREIEQSLQDLTGVTLEEGTGATMSEEDEDEAPMLEVGLVDMGSDGHDMMGFGPLLPTDSERSLMDRVRQELKIELKQGFKSRIEDVREEILRKRRAGKLPGDTTSILKQWWQQHSKWPYPTEDDKARLVEETGLQLKQINNWFINQRKRNWHNNSQTSTLKSKRKR

SEQ ID NO: 37921 - protein, 301 aa, Zea mays subsp. mays
  peptide (1)..(301): Ceres Seq. ID no. 12363410
  misc_feature (92)..(147): Pfam Name: Pfam Description:  KNOX2 domain
  misc_feature (1)..(301): NCBI GI NO: 14149141 NR Description: KNOX family class 2 homeodomain protein
  misc_feature (21)..(300): NCBI GI NO: 21618231 NR Description: homeodomain-containing protein HD1, putative
  misc_feature (30)..(300): NCBI GI NO: 18407708 NR Description: homeodomain-containing protein HD1, putative
  misc_feature (30)..(300): NCBI GI NO: 26451690 NR Description: putative homeodomain transcription factor KNAT6
  misc_feature (30)..(300): NCBI GI NO: 25386223 NR Description: hypothetical protein F16P17.16
  misc_feature (1)..(301): NCBI GI NO: 4098246 NR Description: homeobox 2 protein [Lycopersicon esculentum]
  misc_feature (29)..(300): NCBI GI NO: 1170191 NR Description: Homeobox protein HD1
  misc_feature (40)..(301): NCBI GI NO: 3023961 NR Description: Homeobox protein knotted-1 like 3 (KNAP3)
  misc_feature (107)..(301): NCBI GI NO: 4887620 NR Description: homeobox gene
  misc_feature (1)..(300): NCBI GI NO: 4098244 NR Description: homeobox 1 protein [Lycopersicon esculentum]
MGMGVGYAGGGGAECSSSSVAAAAAAAAAAAEAEERQLLKGEIAVHPLCEQLVAAHVGCLRVATPIDHLPLIDAQLAQSSGLLHSYAAHHSPFLSPHDKHDLDSFLAQYLMLLCSFREQLQQHVRVHAVEAVMACREIEQSLQDLTGVTLEEGTGATMSEEDEDEAPMLEVGLVDMGSDGHDMMGFGPLLPTDSERSLMDRVRQELKIELKQGFKSRIEDVREEILRKRRAGKLPGDTTSILKQWWQQHSKWPYPTEDDKARLVEETGLQLKQINNWFINQRKRNWHNNSQTSTLKSKRKR

SEQ ID NO: 37922 - protein, 299 aa, Zea mays subsp. mays
  peptide (1)..(299): Ceres Seq. ID no. 12363411
  misc_feature (90)..(145): Pfam Name: Pfam Description:  KNOX2 domain
  misc_feature (1)..(299): NCBI GI NO: 14149141 NR Description: KNOX family class 2 homeodomain protein
  misc_feature (19)..(298): NCBI GI NO: 21618231 NR Description: homeodomain-containing protein HD1, putative
  misc_feature (28)..(298): NCBI GI NO: 18407708 NR Description: homeodomain-containing protein HD1, putative
  misc_feature (28)..(298): NCBI GI NO: 25386223 NR Description: hypothetical protein F16P17.16
  misc_feature (28)..(298): NCBI GI NO: 26451690 NR Description: putative homeodomain transcription factor KNAT6
  misc_feature (1)..(299): NCBI GI NO: 4098246 NR Description: homeobox 2 protein [Lycopersicon esculentum]
  misc_feature (27)..(298): NCBI GI NO: 1170191 NR Description: Homeobox protein HD1
  misc_feature (38)..(299): NCBI GI NO: 3023961 NR Description: Homeobox protein knotted-1 like 3 (KNAP3)
  misc_feature (105)..(299): NCBI GI NO: 4887620 NR Description: homeobox gene
  misc_feature (1)..(298): NCBI GI NO: 4098244 NR Description: homeobox 1 protein [Lycopersicon esculentum]
MGVGYAGGGGAECSSSSVAAAAAAAAAAAEAEERQLLKGEIAVHPLCEQLVAAHVGCLRVATPIDHLPLIDAQLAQSSGLLHSYAAHHSPFLSPHDKHDLDSFLAQYLMLLCSFREQLQQHVRVHAVEAVMACREIEQSLQDLTGVTLEEGTGATMSEEDEDEAPMLEVGLVDMGSDGHDMMGFGPLLPTDSERSLMDRVRQELKIELKQGFKSRIEDVREEILRKRRAGKLPGDTTSILKQWWQQHSKWPYPTEDDKARLVEETGLQLKQINNWFINQRKRNWHNNSQTSTLKSKRKR

SEQ ID NO: 37923 - DNA, 1292 bp, Zea mays subsp. mays
  misc_feature (1)..(1292): Ceres Seq. ID no. 12368161
acccgataagtagcaggggcagggagaacgaagacgacgacgacgtacgccggccgtaagtgagccgagagcccccgatataccagctagctagataaccagccagcgcgagcatggaggcggcggcggcggcggtccggcaccggacggtggaggcgaacggcatctcgatgcacgtggcggagtccggccccgacggcggcgacggcgcgcccgcggtggtgttcctgcacggcttcccggagctctggtactcgtggcgccaccagatggcgcacctggccgcgcggggctaccgctgcgtggcgccggacctccgcggctacggcggcaccgccgcgccgcccgacgtcgcgtcctactccgccttccacgtcgtcggcgacgtcgtcgccctgctcgacgcgatcggcatccacaacaaggtgttcgtggtgggtcacgactggggcgccatcatcgcgtggtacctctgcctgttccggccggaccgggtggcggcgcttgtcaacaccagcgtcgccttcatgcgccacatcttcgtccgcgccgccgccgccgccgtcacgcccatcgactacttccaccgcacctacgggcccacctactacatctgccgcttccaggagcctggtgtcgcagagaaggagttctcgccggccaacgccgggtacctgatgaagcggatcctgtgcaaccgcttcacctcctcggcggccggcgacgacaagccgccggcggcggacgccgccgaggaggagccgctgccgccgtggctgacggaggaggacgtgagccacttcgcgtcggagttcgagcggacaggcttcacggggcccatcaactactaccgcaacatggaccgcaactgggagctggcggcgccgtgggcggacgccaaggtgcgggtgcccaccaggttcatcgtcggcgacggcgacctcacctaccactacccgggcatccaggactacatccacaagggcgggttcgaggccgacgtcccggggctcgagagcgtcgtcgtcatccccggcgccggccacttcgtccagcaggagaaggccgacgaggtcagccagcacatctacgacttcatctccaagttctgatacatgtgcagcttgcttgcttacctgctaaaacctgtaatctcaacctcgatatccgtgctgccaacttgttttgtttgacgaactaagagtaataagtgttcgcatatatatatgtttggtttaatttgtgacttggacatggtatgttcgatgtgaaatggataaaccgtgcgtttc

SEQ ID NO: 37924 - protein, 332 aa, Zea mays subsp. mays
  peptide (1)..(332): Ceres Seq. ID no. 12368162
  misc_feature (61)..(327): Pfam Name: Pfam Description:  alpha/beta hydrolase fold
  misc_feature (3)..(332): NCBI GI NO: 34897298 NR Description: putative hydrolase
  misc_feature (3)..(332): NCBI GI NO: 34897302 NR Description: putative hydrolase
  misc_feature (10)..(332): NCBI GI NO: 25044843 NR Description: epoxide hydrolase [Ananas comosus]
  misc_feature (8)..(332): NCBI GI NO: 15225781 NR Description: epoxide hydrolase (ATsEH); protein id: At2g26740
  misc_feature (8)..(332): NCBI GI NO: 7488671 NR Description: epoxide hydrolase homolog - soybean
  misc_feature (8)..(332): NCBI GI NO: 7489254 NR Description: probable epoxide hydrolase (EC 3
  misc_feature (8)..(332): NCBI GI NO: 2764806 NR Description: epoxide hydrolase [Glycine max]
  misc_feature (4)..(332): NCBI GI NO: 34902880 NR Description: unnamed protein product
  misc_feature (8)..(332): NCBI GI NO: 7489256 NR Description: probable epoxide hydrolase (EC 3
  misc_feature (8)..(332): NCBI GI NO: 22208300 NR Description: soluble epoxide hydrolase [Brassica napus]
MEAAAAAVRHRTVEANGISMHVAESGPDGGDGAPAVVFLHGFPELWYSWRHQMAHLAARGYRCVAPDLRGYGGTAAPPDVASYSAFHVVGDVVALLDAIGIHNKVFVVGHDWGAIIAWYLCLFRPDRVAALVNTSVAFMRHIFVRAAAAAVTPIDYFHRTYGPTYYICRFQEPGVAEKEFSPANAGYLMKRILCNRFTSSAAGDDKPPAADAAEEEPLPPWLTEEDVSHFASEFERTGFTGPINYYRNMDRNWELAAPWADAKVRVPTRFIVGDGDLTYHYPGIQDYIHKGGFEADVPGLESVVVIPGAGHFVQQEKADEVSQHIYDFISKF

SEQ ID NO: 37925 - protein, 313 aa, Zea mays subsp. mays
  peptide (1)..(313): Ceres Seq. ID no. 12368163
  misc_feature (42)..(308): Pfam Name: Pfam Description:  alpha/beta hydrolase fold
  misc_feature (1)..(313): NCBI GI NO: 34897298 NR Description: putative hydrolase
  misc_feature (1)..(313): NCBI GI NO: 34897302 NR Description: putative hydrolase
  misc_feature (1)..(313): NCBI GI NO: 25044843 NR Description: epoxide hydrolase [Ananas comosus]
  misc_feature (1)..(313): NCBI GI NO: 15225781 NR Description: epoxide hydrolase (ATsEH); protein id: At2g26740
  misc_feature (1)..(313): NCBI GI NO: 7488671 NR Description: epoxide hydrolase homolog - soybean
  misc_feature (1)..(313): NCBI GI NO: 7489254 NR Description: probable epoxide hydrolase (EC 3
  misc_feature (1)..(313): NCBI GI NO: 2764806 NR Description: epoxide hydrolase [Glycine max]
  misc_feature (1)..(313): NCBI GI NO: 34902880 NR Description: unnamed protein product
  misc_feature (1)..(313): NCBI GI NO: 7489256 NR Description: probable epoxide hydrolase (EC 3
  misc_feature (1)..(313): NCBI GI NO: 22208300 NR Description: soluble epoxide hydrolase [Brassica napus]
MHVAESGPDGGDGAPAVVFLHGFPELWYSWRHQMAHLAARGYRCVAPDLRGYGGTAAPPDVASYSAFHVVGDVVALLDAIGIHNKVFVVGHDWGAIIAWYLCLFRPDRVAALVNTSVAFMRHIFVRAAAAAVTPIDYFHRTYGPTYYICRFQEPGVAEKEFSPANAGYLMKRILCNRFTSSAAGDDKPPAADAAEEEPLPPWLTEEDVSHFASEFERTGFTGPINYYRNMDRNWELAAPWADAKVRVPTRFIVGDGDLTYHYPGIQDYIHKGGFEADVPGLESVVVIPGAGHFVQQEKADEVSQHIYDFISKF

SEQ ID NO: 37926 - protein, 280 aa, Zea mays subsp. mays
  peptide (1)..(280): Ceres Seq. ID no. 12368164
  misc_feature (9)..(275): Pfam Name: Pfam Description:  alpha/beta hydrolase fold
  misc_feature (1)..(280): NCBI GI NO: 34897298 NR Description: putative hydrolase
  misc_feature (1)..(280): NCBI GI NO: 34897302 NR Description: putative hydrolase
  misc_feature (1)..(280): NCBI GI NO: 25044843 NR Description: epoxide hydrolase [Ananas comosus]
  misc_feature (1)..(280): NCBI GI NO: 15225781 NR Description: epoxide hydrolase (ATsEH); protein id: At2g26740
  misc_feature (1)..(280): NCBI GI NO: 7488671 NR Description: epoxide hydrolase homolog - soybean
  misc_feature (1)..(280): NCBI GI NO: 7489254 NR Description: probable epoxide hydrolase (EC 3
  misc_feature (1)..(280): NCBI GI NO: 2764806 NR Description: epoxide hydrolase [Glycine max]
  misc_feature (1)..(280): NCBI GI NO: 34902880 NR Description: unnamed protein product
  misc_feature (1)..(280): NCBI GI NO: 7489256 NR Description: probable epoxide hydrolase (EC 3
  misc_feature (1)..(280): NCBI GI NO: 22208300 NR Description: soluble epoxide hydrolase [Brassica napus]
MAHLAARGYRCVAPDLRGYGGTAAPPDVASYSAFHVVGDVVALLDAIGIHNKVFVVGHDWGAIIAWYLCLFRPDRVAALVNTSVAFMRHIFVRAAAAAVTPIDYFHRTYGPTYYICRFQEPGVAEKEFSPANAGYLMKRILCNRFTSSAAGDDKPPAADAAEEEPLPPWLTEEDVSHFASEFERTGFTGPINYYRNMDRNWELAAPWADAKVRVPTRFIVGDGDLTYHYPGIQDYIHKGGFEADVPGLESVVVIPGAGHFVQQEKADEVSQHIYDFISKF

SEQ ID NO: 37927 - DNA, 520 bp, Zea mays subsp. mays
  misc_feature (1)..(520): Ceres Seq. ID no. 1556286
  misc_feature (8)..(8): n is a, c, t, g, unknown, or other
gggcaggngctcgtgtcgaacactcgaacagaaccaccgccattctagaggcatccagtattccagcccaatcctatctttgtattcctctccctcgtctcggaagtctggttcgccgaacagtcccgaacccccgattcactgccgctgccccgtctcgtcctcttcgccagcgaaaaccctagtctaggggacgggagcgcaatccacgcacggcaacatggacgccatccgcaagcagctcgaccagctcatgggggccaaccgcaacggcgatgtacgggaggtcagccgcaagtactatgatcgcgacgtctgccgcctctacctcgccggcctctgcccccacgacctcttccagcttaccaagatggacatgggcccgtgcccgaagctgcactcgctgcaactgcgcaaagaatatgaagaagccaaagccaaaggtactgataactatgaccgtgaattggaagaaaccattgaaagactaattgttgagtgtgaaaggagatcmgagagc

SEQ ID NO: 37928 - protein, 100 aa, Zea mays subsp. mays
  peptide (1)..(100): Ceres Seq. ID no. 1556287
  misc_feature (1)..(97): Pfam Name: Pfam Description:  LUC7 N_terminus
  misc_feature (1)..(97): NCBI GI NO: 29367401 NR Description: sarcoplasmic reticulum protein-like protein
  misc_feature (1)..(97): NCBI GI NO: 30678827 NR Description: expressed protein [Arabidopsis thaliana]
  misc_feature (1)..(97): NCBI GI NO: 18418301 NR Description: putative protein; protein id: At5g17440
  misc_feature (1)..(68): NCBI GI NO: 6017114 NR Description: unknown protein [Arabidopsis thaliana]
  misc_feature (1)..(49): NCBI GI NO: 11357938 NR Description: hypothetical protein K3M16_10 - Arabidopsisthaliana
  misc_feature (67)..(97): NCBI GI NO: 11357938 NR Description: hypothetical protein K3M16_10 - Arabidopsisthaliana
  misc_feature (1)..(99): NCBI GI NO: 31222233 NR Description: ENSANGP00000025137 [Anopheles gambiae]
  misc_feature (2)..(99): NCBI GI NO: 31222227 NR Description: ENSANGP00000018276 [Anopheles gambiae]
  misc_feature (2)..(99): NCBI GI NO: 24665973 NR Description: CG7564-PA [Drosophila melanogaster]
  misc_feature (5)..(97): NCBI GI NO: 19075500 NR Description: hypothetical coiled-coil protein
  misc_feature (98)..(98): Xaa is any aa, unknown or other
MDAIRKQLDQLMGANRNGDVREVSRKYYDRDVCRLYLAGLCPHDLFQLTKMDMGPCPKLHSLQLRKEYEEAKAKGTDNYDRELEETIERLIVECERRXES

SEQ ID NO: 37929 - protein, 89 aa, Zea mays subsp. mays
  peptide (1)..(89): Ceres Seq. ID no. 1556288
  misc_feature (1)..(86): Pfam Name: Pfam Description:  LUC7 N_terminus
  misc_feature (1)..(86): NCBI GI NO: 29367401 NR Description: sarcoplasmic reticulum protein-like protein
  misc_feature (1)..(86): NCBI GI NO: 30678827 NR Description: expressed protein [Arabidopsis thaliana]
  misc_feature (1)..(86): NCBI GI NO: 18418301 NR Description: putative protein; protein id: At5g17440
  misc_feature (1)..(57): NCBI GI NO: 6017114 NR Description: unknown protein [Arabidopsis thaliana]
  misc_feature (1)..(38): NCBI GI NO: 11357938 NR Description: hypothetical protein K3M16_10 - Arabidopsisthaliana
  misc_feature (56)..(86): NCBI GI NO: 11357938 NR Description: hypothetical protein K3M16_10 - Arabidopsisthaliana
  misc_feature (1)..(88): NCBI GI NO: 31222233 NR Description: ENSANGP00000025137 [Anopheles gambiae]
  misc_feature (1)..(88): NCBI GI NO: 31222227 NR Description: ENSANGP00000018276 [Anopheles gambiae]
  misc_feature (1)..(88): NCBI GI NO: 24665973 NR Description: CG7564-PA [Drosophila melanogaster]
  misc_feature (1)..(86): NCBI GI NO: 19075500 NR Description: hypothetical coiled-coil protein
  misc_feature (87)..(87): Xaa is any aa, unknown or other
MGANRNGDVREVSRKYYDRDVCRLYLAGLCPHDLFQLTKMDMGPCPKLHSLQLRKEYEEAKAKGTDNYDRELEETIERLIVECERRXES

SEQ ID NO: 37930 - protein, 71 aa, Zea mays subsp. mays
  peptide (1)..(71): Ceres Seq. ID no. 1556289
MYGRSAASTMIATSAASTSPASAPTTSSSLPRWTWARARSCTRCNCAKNMKKPKPKVLITMTVNWKKPLKD

SEQ ID NO: 37931 - DNA, 1321 bp, Zea mays subsp. mays
  misc_feature (1)..(1321): Ceres Seq. ID no. 12373031
tctgcttcaaccaagttacttgttgatattctccttagtgagtgggaggacaggatgactcgaggcttattccgctacgatgtcactgcctgtgagaccaaggtcattcctggcaaccttgggtttgttgcacaactcaatgaagggcgccatcttaagaagcgccctactgagtttcgtgtggaccgtgtgctccagccgtttgaccctgccaaattcaatttcacaaaagttggccaggaagaggttctcttccaatttgagaatagtggtggtgatgacagctatttcctgaacaacgctccaatcattgctgttgatcgggctccaaatgttattgctatcaatgtaagcccaattgaatatggacatgtgcttctcattcctcgtgttctggaccgcctgcctcagaggattgatccagagagcttcttgcttgcactgcaaatggcagccgagggaggtagcccatacttcaggcttggttacaatagcttgggtgcgtttgccaccatcaatcacctccactttcaggcgtactacttgtcagtgcctttccctgttgagaaggcagctacccacaagatcccactctctgaggacacgaagaagaatggggtgaccgtgtccaagctgataaattatcctgtgagaggcctggtatttgagggagggaacaccctggacgacctggccactgtggtttctaatgcttggcatttggctgcaagacaacaatgtgccttacaatgtgctcatttctgactgtggcaagagggttttcctgttcccccagtgctacgcagagaagcaggctctgggtgaagtgagccaggagctgctggacactcaggtgaacccagctgtgtgggagatcagtggacacatggtgctgaaacggaggatggactatgaggaggcatctgaaacctccgcgtggaaactcctcgccgaggtctctctctccgaggagcgcttcgaggaagtgaaggcgtacatcttcagcgctgctggcctggttcagtatgatgaggaagaggaggaagccagcgacggtgagggccctacggcctatgttcctgtcaaggttacccctctgcccgtcgctgaagggtgcctcgtcctcccgtgagtccgtggtcggttaaataaagggccgtatatgattgcgagccctgtgctctgccgctattttcttctcgtttgtgtcttgctgctctcgtggtgaactcgctactccagtactctgcaatattaagcagaagctattgtattgtttgggtcgtttgtcagctaaattgaaatgcgatggacatttact

SEQ ID NO: 37932 - protein, 254 aa, Zea mays subsp. mays
  peptide (1)..(254): Ceres Seq. ID no. 12373032
  misc_feature (7)..(238): NCBI GI NO: 15240467 NR Description: putative protein; protein id: At5g55120
  misc_feature (7)..(237): NCBI GI NO: 18416877 NR Description: putative protein; protein id: At4g26850
  misc_feature (7)..(237): NCBI GI NO: 15810139 NR Description: unknown protein [Arabidopsis thaliana]
  misc_feature (7)..(237): NCBI GI NO: 7452423 NR Description: hypothetical protein F10M23
  misc_feature (7)..(237): NCBI GI NO: 21070346 NR Description: VTC2 [Arabidopsis thaliana]
  misc_feature (34)..(236): NCBI GI NO: 34907712 NR Description: P0035F12.16
  misc_feature (11)..(236): NCBI GI NO: 27677438 NR Description: similar to CG3552-PC
  misc_feature (11)..(236): NCBI GI NO: 22766878 NR Description: Unknown (protein for MGC:47349) [Mus musculus]
  misc_feature (11)..(236): NCBI GI NO: 26351153 NR Description: unnamed protein product [Mus musculus]
  misc_feature (11)..(236): NCBI GI NO: 34527348 NR Description: unnamed protein product [Homo sapiens]
SASTKLLVDILLSEWEDRMTRGLFRYDVTACETKVIPGNLGFVAQLNEGRHLKKRPTEFRVDRVLQPFDPAKFNFTKVGQEEVLFQFENSGGDDSYFLNNAPIIAVDRAPNVIAINVSPIEYGHVLLIPRVLDRLPQRIDPESFLLALQMAAEGGSPYFRLGYNSLGAFATINHLHFQAYYLSVPFPVEKAATHKIPLSEDTKKNGVTVSKLINYPVRGLVFEGGNTLDDLATVVSNAWHLAARQQCALQCAHF

SEQ ID NO: 37933 - protein, 236 aa, Zea mays subsp. mays
  peptide (1)..(236): Ceres Seq. ID no. 12373033
  misc_feature (1)..(220): NCBI GI NO: 15240467 NR Description: putative protein; protein id: At5g55120
  misc_feature (1)..(219): NCBI GI NO: 18416877 NR Description: putative protein; protein id: At4g26850
  misc_feature (1)..(219): NCBI GI NO: 15810139 NR Description: unknown protein [Arabidopsis thaliana]
  misc_feature (1)..(219): NCBI GI NO: 7452423 NR Description: hypothetical protein F10M23
  misc_feature (1)..(219): NCBI GI NO: 21070346 NR Description: VTC2 [Arabidopsis thaliana]
  misc_feature (16)..(218): NCBI GI NO: 34907712 NR Description: P0035F12.16
  misc_feature (1)..(218): NCBI GI NO: 27677438 NR Description: similar to CG3552-PC
  misc_feature (1)..(218): NCBI GI NO: 22766878 NR Description: Unknown (protein for MGC:47349) [Mus musculus]
  misc_feature (1)..(218): NCBI GI NO: 26351153 NR Description: unnamed protein product [Mus musculus]
  misc_feature (1)..(218): NCBI GI NO: 34527348 NR Description: unnamed protein product [Homo sapiens]
MTRGLFRYDVTACETKVIPGNLGFVAQLNEGRHLKKRPTEFRVDRVLQPFDPAKFNFTKVGQEEVLFQFENSGGDDSYFLNNAPIIAVDRAPNVIAINVSPIEYGHVLLIPRVLDRLPQRIDPESFLLALQMAAEGGSPYFRLGYNSLGAFATINHLHFQAYYLSVPFPVEKAATHKIPLSEDTKKNGVTVSKLINYPVRGLVFEGGNTLDDLATVVSNAWHLAARQQCALQCAHF

SEQ ID NO: 37934 - protein, 140 aa, Zea mays subsp. mays
  peptide (1)..(140): Ceres Seq. ID no. 12373034
  misc_feature (4)..(112): NCBI GI NO: 15240467 NR Description: putative protein; protein id: At5g55120
  misc_feature (4)..(111): NCBI GI NO: 18416877 NR Description: putative protein; protein id: At4g26850
  misc_feature (4)..(111): NCBI GI NO: 15810139 NR Description: unknown protein [Arabidopsis thaliana]
  misc_feature (4)..(111): NCBI GI NO: 7452423 NR Description: hypothetical protein F10M23
  misc_feature (4)..(111): NCBI GI NO: 21070346 NR Description: VTC2 [Arabidopsis thaliana]
  misc_feature (4)..(97): NCBI GI NO: 34907712 NR Description: P0035F12.16
MLGIWLQDNNVPYNVLISDCGKRVFLFPQCYAEKQALGEVSQELLDTQVNPAVWEISGHMVLKRRMDYEEASETSAWKLLAEVSLSEERFEEVKAYIFSAAGLVQYDEEEEEASDGEGPTAYVPVKVTPLPVAEGCLVLP

SEQ ID NO: 37935 - DNA, 1181 bp, Zea mays subsp. mays
  misc_feature (1)..(1181): Ceres Seq. ID no. 12566272
acacacacacatccatcaaagaaacaagcgcacaagatcaaatacctcgccgccaataatggcctccaggtcctccatcctgctcgccatggtgatgctggctgcgctattcgccgttggtttgtgcaccacccccctcaccttccaggtcggcaagggatccaagcctggccacctgatcctcacccccaatgttgccaccatatccgacgtggagatcaaagagcacggtggcgatgacttctcctttacgctcaaggagggcccgactggcacctggacgctcgacaccaaggccccgctcaagtaccccctttgcatccgctttgctgtcaagtccggcggctaccgcatcgccgacgacgtcatccctgccgatttcaaggccggcaccacctataagaccacactcagcatctaatcaatctctggtgatgaattagatgctgagtgtggtcttataggtggcggcgcctacgggagctccccgacgccggcttacggcgacgccccctcgcacggcggcatagggacctcgtcgccgacgccgttcgacccccacagcttcggctctctcccgggctcctgcgactactggaggtcgcacccgatggagatctggtcggcgatcggcgggcggttcccgggcacgtcgtcgtcgatggggacgatgggccacttcttcggcgcggctggcagggtaggcgggacggacgtgagcatccaggacgcgctggcgaacacgcggtcggacggcgcgggcgcgctgctgcgcgagggcgccgccgcgctgctcaactccatgacccgttcgggcttcccctacacgacggagcaggtgcgcgacacgttcgccgcggcggcggcggcggcggcgggcgggtccgacggcgcggccgcggcgcaggcggccgccttcaggatggccaacgaggggaaggcgtagagatcgagcatgtgtacgtacgtgcatggtaaactggagtgtgtgctccggagcacggtacattcttggctgctgctgttgctttcatgcatggctacgacgtaatacgtgccttggttgtgtgcgtttgtgtgtgtgtgtgtgtttgagtgtttcatcggtgaagaagacaccgagctagacctagcttattctggtgtgtagtcgctcgctcttgctattttttgtcgtttgg

SEQ ID NO: 37936 - protein, 139 aa, Zea mays subsp. mays
  peptide (1)..(139): Ceres Seq. ID no. 12566273
  misc_feature (46)..(124): Pfam Name: Pfam Description:  Pollen allergen
  misc_feature (20)..(139): NCBI GI NO: 33188338 NR Description: group 3 pollen allergen [Zea mays]
  misc_feature (20)..(139): NCBI GI NO: 38345096 NR Description: OSJNBa0050F15.7
  misc_feature (20)..(139): NCBI GI NO: 21740569 NR Description: OSJNBa0050F15.7
  misc_feature (20)..(139): NCBI GI NO: 38345097 NR Description: OSJNBa0050F15.8
  misc_feature (20)..(133): NCBI GI NO: 4006978 NR Description: pollen allergen (group II) [Cynodon dactylon]
  misc_feature (21)..(133): NCBI GI NO: 1171009 NR Description: Pollen allergen Phl p 2 precursor (Phl p II)
  misc_feature (20)..(133): NCBI GI NO: 4007040 NR Description: pollen allergen (group II) [Dactylis glomerata]
  misc_feature (45)..(134): NCBI GI NO: 126386 NR Description: POLLEN ALLERGEN LOL P 2-A (LOL P II-A)
  misc_feature (45)..(134): NCBI GI NO: 1093120 NR Description: allergen Dac g II
  misc_feature (44)..(137): NCBI GI NO: 10314021 NR Description: acidic Cyn d 1 isoallergen isoform 1 precursor
HTHIHQRNKRTRSNTSPPIMASRSSILLAMVMLAALFAVGLCTTPLTFQVGKGSKPGHLILTPNVATISDVEIKEHGGDDFSFTLKEGPTGTWTLDTKAPLKYPLCIRFAVKSGGYRIADDVIPADFKAGTTYKTTLSI

SEQ ID NO: 37937 - protein, 120 aa, Zea mays subsp. mays
  peptide (1)..(120): Ceres Seq. ID no. 12566274
  misc_feature (27)..(105): Pfam Name: Pfam Description:  Pollen allergen
  misc_feature (1)..(120): NCBI GI NO: 33188338 NR Description: group 3 pollen allergen [Zea mays]
  misc_feature (1)..(120): NCBI GI NO: 38345096 NR Description: OSJNBa0050F15.7
  misc_feature (1)..(120): NCBI GI NO: 21740569 NR Description: OSJNBa0050F15.7
  misc_feature (1)..(120): NCBI GI NO: 38345097 NR Description: OSJNBa0050F15.8
  misc_feature (1)..(114): NCBI GI NO: 4006978 NR Description: pollen allergen (group II) [Cynodon dactylon]
  misc_feature (2)..(114): NCBI GI NO: 1171009 NR Description: Pollen allergen Phl p 2 precursor (Phl p II)
  misc_feature (1)..(114): NCBI GI NO: 4007040 NR Description: pollen allergen (group II) [Dactylis glomerata]
  misc_feature (26)..(115): NCBI GI NO: 126386 NR Description: POLLEN ALLERGEN LOL P 2-A (LOL P II-A)
  misc_feature (26)..(115): NCBI GI NO: 1093120 NR Description: allergen Dac g II
  misc_feature (25)..(118): NCBI GI NO: 10314021 NR Description: acidic Cyn d 1 isoallergen isoform 1 precursor
MASRSSILLAMVMLAALFAVGLCTTPLTFQVGKGSKPGHLILTPNVATISDVEIKEHGGDDFSFTLKEGPTGTWTLDTKAPLKYPLCIRFAVKSGGYRIADDVIPADFKAGTTYKTTLSI

SEQ ID NO: 37938 - protein, 111 aa, Zea mays subsp. mays
  peptide (1)..(111): Ceres Seq. ID no. 12566275
  misc_feature (1)..(109): NCBI GI NO: 34903682 NR Description: B1015E06.26
  misc_feature (1)..(109): NCBI GI NO: 34910776 NR Description: VsaA -like protein
  misc_feature (1)..(110): NCBI GI NO: 15228010 NR Description: En/Spm-like transposon protein
MEIWSAIGGRFPGTSSSMGTMGHFFGAAGRVGGTDVSIQDALANTRSDGAGALLREGAAALLNSMTRSGFPYTTEQVRDTFAAAAAAAAGGSDGAAAAQAAAFRMANEGKA

SEQ ID NO: 37939 - DNA, 1320 bp, Zea mays subsp. mays
  misc_feature (1)..(1320): Ceres Seq. ID no. 13577760
actaggtcgacaagaaaatggtggtagcgtcgagtggtggcgcgggaggcgtggagggtggcagcggctgcggtgtctcggcgtcggtgccgccggtggtgtcgtcgagcggtggcgcgggagaggtggagggtggcgacggcggctcggctgcggtgtcggggtcccgccggagggtgaaggggtcgtggacgccggaggaggacgagctgctgcggcgcgcgatcacgcggcacgggccgcggaactggaccgtgatcagctccgagatccccggccggtccggcaagtcgtgccgcctgcggtggtgcaaccagctcagccccagcgtggagcgccgcgccttcacgcccgaggaggacgccatcatcgtcgccgcgcacgcgcagcacggcaacaggtgggccaccatcgcgcggatgctccacggccgcaccgacaactccgtcaagaaccactggaactccacgctgctccgccagcgcagggcggcggccgcccacgccagcgccgccgggtgcgccctccagctgcggccggcaaccacggcctccgtcccgctccgccatctgctggatcgtcctaaggaggcggcggcatccgtttcgttccgtcgtctggacccaaaggcggaggaggaggaggacgaggacatggacgaaggcggcagcagcagcgaggattcggcgcatcggcatcgttcgctgtcacccgcgccggtcgagccgctcacactcaatctatttagcgacggagcccacgggctccctacccccgcccccgcacccgcaccgcagggtacggcagccagaacggagggtgccgccatgaggaggaaggcgaagctggagcaggacccgtggttgagcggcggagtccacggggcccccgcacccgcgccgcagagtgcggcagcgagaacggaaggtgccgtcgtcacgaggatgaagacgaagctggagcatgacccgtggttggtgaccttggtgcggcagatgatatctgtggaggtggagcggcagatgcatggagtgggcccgcaggccagaagcagcgccggtggtggtggtggtgcagacggcgacggcgtgaacggccaggacacgtcgatggacgtggacccgtgacggaatggcggcggtggcgttgggcttaccgagttccttctaccctgtttgtcccgttcgctaatcgcgcgcttgaaccattaacgtccgtcacaccatccgttgatacgtaggtattctagcttgtggttcagtattactttcactctagctgtgatcatcctatagattgaagcttctatttttttcttgg

SEQ ID NO: 37940 - protein, 369 aa, Zea mays subsp. mays
  peptide (1)..(369): Ceres Seq. ID no. 13577761
  misc_feature (55)..(101): Pfam Name: Pfam Description:  Myb-like DNA-binding domain
  misc_feature (53)..(223): NCBI GI NO: 9954112 NR Description: tuber-specific and sucrose-responsive elementbinding factor
  misc_feature (53)..(155): NCBI GI NO: 9954114 NR Description: tuber-specific and sucrose-responsive elementbinding factor
  misc_feature (53)..(155): NCBI GI NO: 2129648 NR Description: myb-related protein, 33.3K - Arabidopsis thaliana
  misc_feature (53)..(155): NCBI GI NO: 15450393 NR Description: AT5g67300/K8K14_2 [Arabidopsis thaliana]
  misc_feature (53)..(155): NCBI GI NO: 15240708 NR Description: myb family transcription factor
  misc_feature (53)..(155): NCBI GI NO: 21592897 NR Description: myb-related protein, 33.3K [Arabidopsis thaliana]
  misc_feature (53)..(155): NCBI GI NO: 27529846 NR Description: Myb-like protein [Nicotiana tabacum]
  misc_feature (47)..(155): NCBI GI NO: 15227806 NR Description: MYB family transcription factor
  misc_feature (47)..(155): NCBI GI NO: 21593586 NR Description: putative MYB family transcription factor
  misc_feature (53)..(155): NCBI GI NO: 15235484 NR Description: myb DNA-binding protein (AtMYB73)
MVVASSGGAGGVEGGSGCGVSASVPPVVSSSGGAGEVEGGDGGSAAVSGSRRRVKGSWTPEEDELLRRAITRHGPRNWTVISSEIPGRSGKSCRLRWCNQLSPSVERRAFTPEEDAIIVAAHAQHGNRWATIARMLHGRTDNSVKNHWNSTLLRQRRAAAAHASAAGCALQLRPATTASVPLRHLLDRPKEAAASVSFRRLDPKAEEEEDEDMDEGGSSSEDSAHRHRSLSPAPVEPLTLNLFSDGAHGLPTPAPAPAPQGTAARTEGAAMRRKAKLEQDPWLSGGVHGAPAPAPQSAAARTEGAVVTRMKTKLEHDPWLVTLVRQMISVEVERQMHGVGPQARSSAGGGGGADGDGVNGQDTSMDVDP

SEQ ID NO: 37941 - protein, 235 aa, Zea mays subsp. mays
  peptide (1)..(235): Ceres Seq. ID no. 13577762
  misc_feature (1)..(89): NCBI GI NO: 9954112 NR Description: tuber-specific and sucrose-responsive elementbinding factor
  misc_feature (1)..(21): NCBI GI NO: 9954114 NR Description: tuber-specific and sucrose-responsive elementbinding factor
  misc_feature (1)..(21): NCBI GI NO: 2129648 NR Description: myb-related protein, 33.3K - Arabidopsis thaliana
  misc_feature (1)..(21): NCBI GI NO: 21592897 NR Description: myb-related protein, 33.3K [Arabidopsis thaliana]
  misc_feature (1)..(21): NCBI GI NO: 15450393 NR Description: AT5g67300/K8K14_2 [Arabidopsis thaliana]
  misc_feature (1)..(21): NCBI GI NO: 15240708 NR Description: myb family transcription factor
  misc_feature (1)..(21): NCBI GI NO: 27529846 NR Description: Myb-like protein [Nicotiana tabacum]
  misc_feature (1)..(21): NCBI GI NO: 15227806 NR Description: MYB family transcription factor
  misc_feature (1)..(21): NCBI GI NO: 21593586 NR Description: putative MYB family transcription factor
  misc_feature (1)..(21): NCBI GI NO: 15235484 NR Description: myb DNA-binding protein (AtMYB73)
MLHGRTDNSVKNHWNSTLLRQRRAAAAHASAAGCALQLRPATTASVPLRHLLDRPKEAAASVSFRRLDPKAEEEEDEDMDEGGSSSEDSAHRHRSLSPAPVEPLTLNLFSDGAHGLPTPAPAPAPQGTAARTEGAAMRRKAKLEQDPWLSGGVHGAPAPAPQSAAARTEGAVVTRMKTKLEHDPWLVTLVRQMISVEVERQMHGVGPQARSSAGGGGGADGDGVNGQDTSMDVDP

SEQ ID NO: 37942 - protein, 194 aa, Zea mays subsp. mays
  peptide (1)..(194): Ceres Seq. ID no. 13577763
LGRQENGGSVEWWRGRRGGWQRLRCLGVGAAGGVVERWRGRGGGWRRRLGCGVGVPPEGEGVVDAGGGRAAAARDHAARAAELDRDQLRDPRPVRQVVPPAVVQPAQPQRGAPRLHARGGRHHRRRARAARQQVGHHRADAPRPHRQLRQEPLELHAAPPAQGGGRPRQRRRVRPPAAAGNHGLRPAPPSAGSS

SEQ ID NO: 37943 - DNA, 1449 bp, Zea mays subsp. mays
  misc_feature (1)..(1449): Ceres Seq. ID no. 12349549
actcggaaaccgtaagccgtgcaaacaacaggcgacgcaccggcgccgcgcgcgcacgcctatttctagctcgatcgtgtcctctcgccgcgctccggagtcgtcaatccacacgcttgggcgagcgagccttgttgcggaagcgcgcggacgacatgctgatgctgcacccgaggctggtgtcgtcgagcgccgtggacgacgaggaccactgcgagagctgcgcctgctactgcgccatggtgtcctgcgtctcgctgctgctcttcatcgtgctggctgccgcggtcagcatcccgagggcctgcgccatcgccggcgtcatgctgctcctgctggggctcgtcggctggctcgtgcccacggggaatggagccggtccggcggcgcagcagcagcagggccaggctgctgccgatcctggggcgcggcggctggtggtgcaccaccggtgcgcgtgcgggctaacggacgccgctatcgccgcgctgccggcggcgttcacgtactacgaggcgcccgcggtgaagaatggagtcgggagcgaggacgagaagcagccgcgcggcagctccttgctgtgcgcggtttgtctggacgacgtgcggggcggcgagatggtgcggcagctgccggcgtgccgccacctgttccacgtcgactgcgtcgacgcctggttgcgcgctcaccggacgtgcccgctctgccgctgccagctctccccgaggaacgacgtcagcacaaagcgggccgccacggtcgtcggggagtcatccgtcgacgcgttgccgccggtgtgagtgtcactcactcatcaatcctccgaagctggccggcgcattggtaaactgtattggaccagattcttcatttcttaacaccacataatagaacatatttctgcccgaataaagaaaacttcggcacgatttcgagggcgcgcagcagacttgtgtctctactctctaggcatgagcacgagcctcaacatcgatcgagtggttccaaccacatcgcccgacccgacgcttccagcagcagtcgcgaaagaagggaaaaaaatttggtgcatgcagctcctcacaaaaaagaggatagaccccacccgcagcaacaaaaatgttatctggtggatctgcaggtggggtccatccacctttttgtgagaggctgcaaaccactctggtttgcagcagtgctgcaccaaatttttttccgaaagaaggagcatctcgccgatggggacgggtaccagaccgtacggaccagggagtctacaacttgacacgcttcagttctgccgctaccagacaggcaatcgagtctatcatgtcagtgccagcttttgtactgtatgctccgttgcaccgttacatttttgtgagttgtaaaaccagaacaaatacccgtgtttcttaggaaactgaaggcttttgggctcttggatcc

SEQ ID NO: 37944 - protein, 281 aa, Zea mays subsp. mays
  peptide (1)..(281): Ceres Seq. ID no. 12349550
LGNRKPCKQQATHRRRARTPISSSIVSSRRAPESSIHTLGRASLVAEARGRHADAAPEAGVVERRGRRGPLRELRLLLRHGVLRLAAALHRAGCRGQHPEGLRHRRRHAAPAGARRLARAHGEWSRSGGAAAAGPGCCRSWGAAAGGAPPVRVRANGRRYRRAAGGVHVLRGARGEEWSRERGREAAARQLLAVRGLSGRRAGRRDGAAAAGVPPPVPRRLRRRLVARSPDVPALPLPALPEERRQHKAGRHGRRGVIRRRVAAGVSVTHSSILRSWPAHW

SEQ ID NO: 37945 - protein, 265 aa, Zea mays subsp. mays
  peptide (1)..(265): Ceres Seq. ID no. 12349551
  misc_feature (194)..(235): Pfam Name: RING finger Pfam Description: Zinc finger, C3HC4 type
  misc_feature (91)..(265): NCBI GI NO: 34903936 NR Description: OSJNBa0038J17.13
  misc_feature (154)..(265): NCBI GI NO: 34903920 NR Description: OSJNBa0038J17.5
  misc_feature (136)..(259): NCBI GI NO: 34907968 NR Description: P0446G04.15
  misc_feature (163)..(236): NCBI GI NO: 37536572 NR Description: hypothetical protein
  misc_feature (154)..(253): NCBI GI NO: 34903930 NR Description: OSJNBa0038J17.10
  misc_feature (154)..(244): NCBI GI NO: 7487705 NR Description: hypothetical protein T5J17
  misc_feature (136)..(264): NCBI GI NO: 34903928 NR Description: OSJNBa0038J17.9
  misc_feature (154)..(242): NCBI GI NO: 8698835 NR Description: RING finger 1
  misc_feature (154)..(237): NCBI GI NO: 30017522 NR Description: putative ring-H2 zinc finger protein
  misc_feature (183)..(261): NCBI GI NO: 25408427 NR Description: probable RING zinc finger protein
SETVSRANNRRRTGAARARLFLARSCPLAALRSRQSTRLGERALLRKRADDMLMLHPRLVSSSAVDDEDHCESCACYCAMVSCVSLLLFIVLAAAVSIPRACAIAGVMLLLLGLVGWLVPTGNGAGPAAQQQQGQAAADPGARRLVVHHRCACGLTDAAIAALPAAFTYYEAPAVKNGVGSEDEKQPRGSSLLCAVCLDDVRGGEMVRQLPACRHLFHVDCVDAWLRAHRTCPLCRCQLSPRNDVSTKRAATVVGESSVDALPPV

SEQ ID NO: 37946 - protein, 214 aa, Zea mays subsp. mays
  peptide (1)..(214): Ceres Seq. ID no. 12349552
  misc_feature (143)..(184): Pfam Name: RING finger Pfam Description: Zinc finger, C3HC4 type
  misc_feature (40)..(214): NCBI GI NO: 34903936 NR Description: OSJNBa0038J17.13
  misc_feature (103)..(214): NCBI GI NO: 34903920 NR Description: OSJNBa0038J17.5
  misc_feature (85)..(208): NCBI GI NO: 34907968 NR Description: P0446G04.15
  misc_feature (112)..(185): NCBI GI NO: 37536572 NR Description: hypothetical protein
  misc_feature (103)..(202): NCBI GI NO: 34903930 NR Description: OSJNBa0038J17.10
  misc_feature (103)..(193): NCBI GI NO: 7487705 NR Description: hypothetical protein T5J17
  misc_feature (85)..(213): NCBI GI NO: 34903928 NR Description: OSJNBa0038J17.9
  misc_feature (103)..(191): NCBI GI NO: 8698835 NR Description: RING finger 1
  misc_feature (103)..(186): NCBI GI NO: 30017522 NR Description: putative ring-H2 zinc finger protein
  misc_feature (132)..(210): NCBI GI NO: 25408427 NR Description: probable RING zinc finger protein
MLMLHPRLVSSSAVDDEDHCESCACYCAMVSCVSLLLFIVLAAAVSIPRACAIAGVMLLLLGLVGWLVPTGNGAGPAAQQQQGQAAADPGARRLVVHHRCACGLTDAAIAALPAAFTYYEAPAVKNGVGSEDEKQPRGSSLLCAVCLDDVRGGEMVRQLPACRHLFHVDCVDAWLRAHRTCPLCRCQLSPRNDVSTKRAATVVGESSVDALPPV

SEQ ID NO: 37947 - DNA, 507 bp, Zea mays subsp. mays
  misc_feature (1)..(507): Ceres Seq. ID no. 12340841
ttcacacaatattattattaatcaagttatatttgatgaggaagctgtcgagtcaaaactgctaaaagcacggatgaaaatgcaacaaaaatacattgatcagttccatatgttatacgatgacttcaacatcaccaagcttcccttgctttcagaagaggtttgtggtgttcaagctctccaaaacttttcccagcacttccttacaccatacaagtctactcttaaaaggggcaccgtcgaggagctcgaacagagaataactatattaaaatctgcactgcaagaagctgagacagagttagatagggttaggaaagggaagcagtcagtgtgattttttttccacaggtcaagtgtgtaaaaccagagagacgatcaattttttcgtgtcattacactcttgttgatttcactatcatgtttcctcatcgaggagtttagacttgtaatagctatcggcagagaagtgtttgattcacacaagatatatagatccattctttt

SEQ ID NO: 37948 - protein, 111 aa, Zea mays subsp. mays
  peptide (1)..(111): Ceres Seq. ID no. 12340842
  misc_feature (1)..(69): Pfam Name: Pfam Description:  Anion-transporting ATPase
  misc_feature (1)..(107): NCBI GI NO: 18378897 NR Description: arsA homolog
  misc_feature (1)..(107): NCBI GI NO: 25290846 NR Description: hypothetical protein F22M8.4
  misc_feature (1)..(72): NCBI GI NO: 17391018 NR Description: Unknown (protein for MGC:28999) [Mus musculus]
  misc_feature (1)..(72): NCBI GI NO: 26358207 NR Description: unnamed protein product [Mus musculus]
  misc_feature (1)..(71): NCBI GI NO: 31214034 NR Description: ENSANGP00000018739 [Anopheles gambiae]
  misc_feature (1)..(72): NCBI GI NO: 4757796 NR Description: arsA arsenite transporter, ATP-binding, homolog 1
  misc_feature (2)..(71): NCBI GI NO: 19717679 NR Description: arsenite transport subunit A
  misc_feature (2)..(71): NCBI GI NO: 24586297 NR Description: CG1598-PA [Drosophila melanogaster]
  misc_feature (1)..(72): NCBI GI NO: 2905657 NR Description: arsenite translocating ATPase [Homo sapiens]
  misc_feature (1)..(72): NCBI GI NO: 12025542 NR Description: arsA
SHNIIINQVIFDEEAVESKLLKARMKMQQKYIDQFHMLYDDFNITKLPLLSEEVCGVQALQNFSQHFLTPYKSTLKRGTVEELEQRITILKSALQEAETELDRVRKGKQSV

SEQ ID NO: 37949 - protein, 87 aa, Zea mays subsp. mays
  peptide (1)..(87): Ceres Seq. ID no. 12340843
  misc_feature (1)..(83): NCBI GI NO: 18378897 NR Description: arsA homolog
  misc_feature (1)..(83): NCBI GI NO: 25290846 NR Description: hypothetical protein F22M8.4
  misc_feature (1)..(48): NCBI GI NO: 17391018 NR Description: Unknown (protein for MGC:28999) [Mus musculus]
  misc_feature (1)..(48): NCBI GI NO: 26358207 NR Description: unnamed protein product [Mus musculus]
  misc_feature (1)..(47): NCBI GI NO: 31214034 NR Description: ENSANGP00000018739 [Anopheles gambiae]
  misc_feature (1)..(48): NCBI GI NO: 4757796 NR Description: arsA arsenite transporter, ATP-binding, homolog 1
  misc_feature (1)..(47): NCBI GI NO: 19717679 NR Description: arsenite transport subunit A
  misc_feature (1)..(47): NCBI GI NO: 24586297 NR Description: CG1598-PA [Drosophila melanogaster]
  misc_feature (1)..(48): NCBI GI NO: 2905657 NR Description: arsenite translocating ATPase [Homo sapiens]
  misc_feature (1)..(48): NCBI GI NO: 6647417 NR Description: Arsenical pump-driving ATPase
MKMQQKYIDQFHMLYDDFNITKLPLLSEEVCGVQALQNFSQHFLTPYKSTLKRGTVEELEQRITILKSALQEAETELDRVRKGKQSV

SEQ ID NO: 37950 - protein, 85 aa, Zea mays subsp. mays
  peptide (1)..(85): Ceres Seq. ID no. 12340844
  misc_feature (1)..(81): NCBI GI NO: 18378897 NR Description: arsA homolog
  misc_feature (1)..(81): NCBI GI NO: 25290846 NR Description: hypothetical protein F22M8.4
  misc_feature (1)..(46): NCBI GI NO: 17391018 NR Description: Unknown (protein for MGC:28999) [Mus musculus]
  misc_feature (1)..(46): NCBI GI NO: 26358207 NR Description: unnamed protein product [Mus musculus]
  misc_feature (1)..(45): NCBI GI NO: 31214034 NR Description: ENSANGP00000018739 [Anopheles gambiae]
  misc_feature (1)..(46): NCBI GI NO: 4757796 NR Description: arsA arsenite transporter, ATP-binding, homolog 1
  misc_feature (1)..(45): NCBI GI NO: 19717679 NR Description: arsenite transport subunit A
  misc_feature (1)..(45): NCBI GI NO: 24586297 NR Description: CG1598-PA [Drosophila melanogaster]
  misc_feature (1)..(46): NCBI GI NO: 2905657 NR Description: arsenite translocating ATPase [Homo sapiens]
  misc_feature (1)..(46): NCBI GI NO: 12025542 NR Description: arsA
MQQKYIDQFHMLYDDFNITKLPLLSEEVCGVQALQNFSQHFLTPYKSTLKRGTVEELEQRITILKSALQEAETELDRVRKGKQSV

SEQ ID NO: 37951 - DNA, 1329 bp, Zea mays subsp. mays
  misc_feature (1)..(1329): Ceres Seq. ID no. 12588709
gcacgagaccattacctagaacatcctaatcgaaaacccacactcccctgcacacccaacccatccacatccactcgcccaagccggccttcgtccctgcccaacgctgcttcactctctccagcgatagatagcatcatcctctccacctgcacaggagacgacgaagcagcaccatcgtccgcggtcctttgcttcttctggcgccatgacgtcgccggtgccggagacgttcagcctgcaggaccagcagccgccgccgccgccgccagcggagcaggagcagatctgctacgtgcactgcagctactgcgacaccatcctcgcggtgggcgtgccgtgcagcagcctgttccagacggtcaccgtgcggtgcggccactgcgccaacctgctctacgtcaacctccgcgccctcctgctgccgccggcgacggcgcccgcggccgccaaccatctaccgcccttcggccaggctctcctctccccgacctcaccgcacggtctactcgatgctgagacgatgtcgtcgtcgtcgttccaagcgccgagcctgccgagcgctgaaccgccgagcgccgcctgcgtgagcggcatcacgagcatcaacaacaccgcctgcggtggcaacaacgccgcgtcggccatggcgccgccaccggccaaacctgcactgcacgagccgccgcagctgcccaggagcgcagcgtcagcgaacaagacttcagagaagcggcagagagttccttccgcatacaaccgtttcatcaaagatgagatccagcgcattaaggccagcaatcccgacatcactcacagggaagctttcagcgcggctgccaagaattgggcccatttcccacacatccatttcggcctcatgcccgatcagggtctgaagaagcaccccatgcaaactcaggagggagctgaatgcatgcttttcaaggacggtctatacgccgccgccgccgccgccacagcggcgtccagcatgggcatctctccattctgatgacttcagctccaccgcggaatggtctatagcgttctgcctctctgtgcgcgcctagccgcttagggttctgatgtctcagttccctcgttatctcccggttgcttgagtgagagatagcttcaatgtctatcccagccggagaatctcgaaatgtctctcagtacccatatatctctaatagttctcctcagtttccagcttcttactttgttaatttgttattatgcaacctctagagaggttgttatgtgtatgacgatgtgcggcctcttatctttatatggacataattcgagctggatattcggctg

SEQ ID NO: 37952 - protein, 268 aa, Zea mays subsp. mays
  peptide (1)..(268): Ceres Seq. ID no. 12588710
  misc_feature (22)..(224): Pfam Name: Pfam Description:  YABBY protein
  misc_feature (1)..(268): NCBI GI NO: 32330675 NR Description: yabby14 protein [Zea mays]
  misc_feature (3)..(268): NCBI GI NO: 38605890 NR Description: OSJNBb0020O11.2
  misc_feature (21)..(268): NCBI GI NO: 32330677 NR Description: yabby15 protein [Zea mays]
  misc_feature (22)..(268): NCBI GI NO: 37535908 NR Description: hypothetical protein
  misc_feature (6)..(268): NCBI GI NO: 37551421 NR Description: FIL-like protein [Triticum aestivum]
  misc_feature (161)..(268): NCBI GI NO: 27804377 NR Description: MADS-box transcription factor CDM51
  misc_feature (25)..(84): NCBI GI NO: 27804377 NR Description: MADS-box transcription factor CDM51
  misc_feature (142)..(268): NCBI GI NO: 18406725 NR Description: expressed protein; protein id: At2g45190
  misc_feature (25)..(73): NCBI GI NO: 18406725 NR Description: expressed protein; protein id: At2g45190
  misc_feature (25)..(124): NCBI GI NO: 30683176 NR Description: expressed protein [Arabidopsis thaliana]
MTSPVPETFSLQDQQPPPPPPAEQEQICYVHCSYCDTILAVGVPCSSLFQTVTVRCGHCANLLYVNLRALLLPPATAPAAANHLPPFGQALLSPTSPHGLLDAETMSSSSFQAPSLPSAEPPSAACVSGITSINNTACGGNNAASAMAPPPAKPALHEPPQLPRSAASANKTSEKRQRVPSAYNRFIKDEIQRIKASNPDITHREAFSAAAKNWAHFPHIHFGLMPDQGLKKHPMQTQEGAECMLFKDGLYAAAAAATAASSMGISPF

SEQ ID NO: 37953 - protein, 172 aa, Zea mays subsp. mays
  peptide (1)..(172): Ceres Seq. ID no. 12588711
ARDHYLEHPNRKPTLPCTPNPSTSTRPSRPSSLPNAASLSPAIDSIILSTCTGDDEAAPSSAVLCFFWRHDVAGAGDVQPAGPAAAAAAASGAGADLLRALQLLRHHPRGGRAVQQPVPDGHRAVRPLRQPALRQPPRPPAAAGDGARGRQPSTALRPGSPLPDLTARSTRC

SEQ ID NO: 37954 - protein, 163 aa, Zea mays subsp. mays
  peptide (1)..(163): Ceres Seq. ID no. 12588712
  misc_feature (1)..(119): Pfam Name: Pfam Description:  YABBY protein
  misc_feature (1)..(163): NCBI GI NO: 32330675 NR Description: yabby14 protein [Zea mays]
  misc_feature (1)..(163): NCBI GI NO: 38605890 NR Description: OSJNBb0020O11.2
  misc_feature (1)..(163): NCBI GI NO: 32330677 NR Description: yabby15 protein [Zea mays]
  misc_feature (1)..(163): NCBI GI NO: 37535908 NR Description: hypothetical protein
  misc_feature (1)..(163): NCBI GI NO: 37551421 NR Description: FIL-like protein [Triticum aestivum]
  misc_feature (56)..(163): NCBI GI NO: 27804377 NR Description: MADS-box transcription factor CDM51
  misc_feature (37)..(163): NCBI GI NO: 18406725 NR Description: expressed protein; protein id: At2g45190
  misc_feature (1)..(19): NCBI GI NO: 30683176 NR Description: expressed protein [Arabidopsis thaliana]
  misc_feature (65)..(120): NCBI GI NO: 30683176 NR Description: expressed protein [Arabidopsis thaliana]
  misc_feature (1)..(17): NCBI GI NO: 4928751 NR Description: YABBY2 [Arabidopsis thaliana]
MSSSSFQAPSLPSAEPPSAACVSGITSINNTACGGNNAASAMAPPPAKPALHEPPQLPRSAASANKTSEKRQRVPSAYNRFIKDEIQRIKASNPDITHREAFSAAAKNWAHFPHIHFGLMPDQGLKKHPMQTQEGAECMLFKDGLYAAAAAATAASSMGISPF

SEQ ID NO: 37955 - DNA, 1253 bp, Zea mays subsp. mays
  misc_feature (1)..(1253): Ceres Seq. ID no. 12407485
ctctgctcagctcgaacgaacaaaaagaactcccctcggccctctcctcttgtgcttctgcttccccaccgagtctcctcaaccccaggcactcgccctctgtcggtctgtcccctcccttcctcgcctccgatgccgccgccgccgccgcttctcgagccgcgcgactacctcggcgccggcgccacctcgtcgtgctgctcgtcgtcctgctcctccggccgcgagggcgcggggccccacctcgcgctgcggctcgggcttccggggtccgacgactcccccggccgcaggcgcggacgcggagcacgccggcgcccacgtcgacgccgcgctcaccctcggccccgcccccgcccccgcgcctcccaggggcagcgccaagcgcgggttcgccgactccctcgaccggtccgcgaagcgggacggcgttgccgcggatgacgctgctgggggcgtcacgcgggtagctggagctgctgccggagctccgcccgctgccaaggcacaagttgttggatggccgcctgttaggagctaccggaagaataccctagctgccagtgccacaaagacaaatgggggagatgaaggtaggagtgaggcgggatgctgttatgtcaaggtcagcatggatggagccccatacctaaggaaggtggacctcaagacctattcaagctatgaggatctctcgcttggtctggagaaaatgttcagttgcttcatcactggtcaaaacagttcatgcaagacatcaagaagggataggcttactgatggttctagggctgatgcccttcaggaccaagaatatgtccttacttacgaagataaagatgctgactggatgctcgttggtgatctgccctgggacttgttcaccacattttgccggaaacttaggatcatgagaggctctgatgctgctggcatggctcctccaagaccaccggaacagacagttcggaacaaatgagggcgggcagcttacttacctggcgctgaactgaagggagagcgacgctgccttggtcaggccttctttcacttgtgcagtgggatctgcgtcctgctgtctcggacgcccattttgcccacgagctggtcgtcacgtgctgtcgctttttgtctgggaaagatagcgtactgcttgctgtatgatactttcatctgtgttcggaagtttgtagcgcttcatatcctggaagggagtaaagaaaatgtccatgtgtccggtgagaatttctttc

SEQ ID NO: 37956 - protein, 325 aa, Zea mays subsp. mays
  peptide (1)..(325): Ceres Seq. ID no. 12407486
  misc_feature (108)..(314): Pfam Name: Pfam Description:  AUX/IAA family
  misc_feature (55)..(325): NCBI GI NO: 34911088 NR Description: OJ1117_G01.11
  misc_feature (128)..(314): NCBI GI NO: 15227275 NR Description: auxin-regulated protein
  misc_feature (164)..(324): NCBI GI NO: 20257219 NR Description: auxin-regulated protein [Zinnia elegans]
  misc_feature (159)..(314): NCBI GI NO: 25989504 NR Description: Aux/IAA protein [Solanum tuberosum]
  misc_feature (114)..(314): NCBI GI NO: 7442237 NR Description: GH1 protein - soybean (fragment)
  misc_feature (149)..(314): NCBI GI NO: 16610193 NR Description: IAA9 protein [Nicotiana tabacum]
  misc_feature (128)..(312): NCBI GI NO: 30681782 NR Description: auxin-responsive protein IAA8
  misc_feature (58)..(324): NCBI GI NO: 34904314 NR Description: unnamed protein product
  misc_feature (117)..(314): NCBI GI NO: 20269051 NR Description: aux/IAA protein
  misc_feature (161)..(314): NCBI GI NO: 30698145 NR Description: auxin-responsive protein IAA9
SAQLERTKRTPLGPLLLCFCFPTESPQPQALALCRSVPSLPRLRCRRRRRFSSRATTSAPAPPRRAARRPAPPAARARGPTSRCGSGFRGPTTPPAAGADAEHAGAHVDAALTLGPAPAPAPPRGSAKRGFADSLDRSAKRDGVAADDAAGGVTRVAGAAAGAPPAAKAQVVGWPPVRSYRKNTLAASATKTNGGDEGRSEAGCCYVKVSMDGAPYLRKVDLKTYSSYEDLSLGLEKMFSCFITGQNSSCKTSRRDRLTDGSRADALQDQEYVLTYEDKDADWMLVGDLPWDLFTTFCRKLRIMRGSDAAGMAPPRPPEQTVRNK

SEQ ID NO: 37957 - DNA, 1726 bp, Zea mays subsp. mays
  misc_feature (1)..(1726): Ceres Seq. ID no. 12406291
acctcccttcccccactctcttctctccccgcggcccgtgactcatccacccacagtccactcgccactccccccggaacggcggcggcggcgacggcggaggagtaacgcaagatggcgaggaaacctctcgactacgaggagctgaacgagaacgtcaagagggtgcagtacgcggtgcgcggggagctgtacctccgcgcctccgagctgcagaaggagggcaagaagatcatcttcaccaacgtcggcaacccgcacgccctcggccagaaaccgctcaccttcccgcgccaggtggtggcgctgtgccaggctccgttcctcctcgacgatccccacgtcggcctcatgttcccggcggacgccatcgctagggccaagcactatctcgccatggcgcccggcggtctaggtgcgtacagtgactcccgcggcatcccgggaatcaggaaggaagttgccgacttcatccacaagcgtgatggatatcccagtgatccggaactcatctacctcacagacggtgccagcaaaggtgtgatgcagatcctgaacaccatcattagaaacgagatggatgggatcttggtccctgttcctcagtacccactttattccgccaccatttccctctatggtggttctctggtcccgtactacttggaagaagaggctaactggagcctcgactttgtgaatatccggcaaacagtggcggaggcacggtccaagggaatctctgttcgagcgatggtgatgataaatccaggaaatcccactggccaatgccttagtgaagcgaatataaaggaacttctgcaattttgctaccatgaaaacttagttctgctagcagatgaagtgtatcaacagaacatttatcaagatgaacggccatttataagcgcaagaaaggttatgttcgacatgggtccaccaataagcagtgagcttcaggttgtttctttccacactgtgtcgaaagggtactggggagagtgcggacaacgtggtggatacttcgaaatgacaaatcttcctcccaagacagtagatgagatctacaaggttgcatcgatagcactgagtccaaacgttcctgggcaaatttttatgggagtaatggttaaccctcctaaacctggagatatctcgtacctgaagttcgctgctgaaagcaagtccatccatgaatctttgaggaggagagcacgcatgatgacagatggtttcaacagttgccgaaacgtcgtgtgcaatttcactgaaggagctatgtactctttcccccaaatacgtctgccaccgagagctattgaggcggcaagaagagccggcaaatcagcggacgtcttctactgcctcaagctcctggaggcgacaggaatctccactgttccgggctctggttttgggcaaaaggaaggggtgttccaccttcggaccactatccttccagcggaggaagacttccctgccatcatgtcgagcttcaagaagttcaacgactcgttcatggagcagtacgagggctactccaggctgtgagcaggaagagaaacaagagtttacagatctgaagaagagattattgattggaagcttattagttattgtaactcccttgaaaagcaggttgtgcggggattattgtttattgaataaaaagtccgccatttgattctactgccataccagtatatataattgtgaattggcttgt

SEQ ID NO: 37958 - protein, 478 aa, Zea mays subsp. mays
  peptide (1)..(478): Ceres Seq. ID no. 12406292
  misc_feature (118)..(465): Pfam Name: Pfam Description:  Aminotransferase class I and II
  misc_feature (3)..(478): NCBI GI NO: 29569153 NR Description: alanine aminotransferase
  misc_feature (3)..(478): NCBI GI NO: 34899390 NR Description: putative alanine aminotransferase
  misc_feature (1)..(478): NCBI GI NO: 30688330 NR Description: alanine aminotransferase -related
  misc_feature (1)..(478): NCBI GI NO: 15223186 NR Description: putative alanine aminotransferase
  misc_feature (1)..(478): NCBI GI NO: 16604499 NR Description: At1g23310/F26F24_4 [Arabidopsis thaliana]
  misc_feature (1)..(478): NCBI GI NO: 21537112 NR Description: putative alanine aminotransferase
  misc_feature (1)..(478): NCBI GI NO: 13430566 NR Description: putative alanine aminotransferase
  misc_feature (103)..(478): NCBI GI NO: 14596229 NR Description: alanine aminotransferase-like protein
  misc_feature (11)..(472): NCBI GI NO: 7434113 NR Description: alanine transaminase (EC 2
  misc_feature (1)..(472): NCBI GI NO: 37533928 NR Description: putative alanine aminotransferase
MARKPLDYEELNENVKRVQYAVRGELYLRASELQKEGKKIIFTNVGNPHALGQKPLTFPRQVVALCQAPFLLDDPHVGLMFPADAIARAKHYLAMAPGGLGAYSDSRGIPGIRKEVADFIHKRDGYPSDPELIYLTDGASKGVMQILNTIIRNEMDGILVPVPQYPLYSATISLYGGSLVPYYLEEEANWSLDFVNIRQTVAEARSKGISVRAMVMINPGNPTGQCLSEANIKELLQFCYHENLVLLADEVYQQNIYQDERPFISARKVMFDMGPPISSELQVVSFHTVSKGYWGECGQRGGYFEMTNLPPKTVDEIYKVASIALSPNVPGQIFMGVMVNPPKPGDISYLKFAAESKSIHESLRRRARMMTDGFNSCRNVVCNFTEGAMYSFPQIRLPPRAIEAARRAGKSADVFYCLKLLEATGISTVPGSGFGQKEGVFHLRTTILPAEEDFPAIMSSFKKFNDSFMEQYEGYSRL

SEQ ID NO: 37959 - protein, 399 aa, Zea mays subsp. mays
  peptide (1)..(399): Ceres Seq. ID no. 12406293
  misc_feature (39)..(386): Pfam Name: Pfam Description:  Aminotransferase class I and II
  misc_feature (1)..(399): NCBI GI NO: 29569153 NR Description: alanine aminotransferase
  misc_feature (1)..(399): NCBI GI NO: 34899390 NR Description: putative alanine aminotransferase
  misc_feature (1)..(399): NCBI GI NO: 30688330 NR Description: alanine aminotransferase -related
  misc_feature (1)..(399): NCBI GI NO: 15223186 NR Description: putative alanine aminotransferase
  misc_feature (1)..(399): NCBI GI NO: 16604499 NR Description: At1g23310/F26F24_4 [Arabidopsis thaliana]
  misc_feature (1)..(399): NCBI GI NO: 21537112 NR Description: putative alanine aminotransferase
  misc_feature (1)..(399): NCBI GI NO: 13430566 NR Description: putative alanine aminotransferase
  misc_feature (24)..(399): NCBI GI NO: 14596229 NR Description: alanine aminotransferase-like protein
  misc_feature (1)..(393): NCBI GI NO: 7434113 NR Description: alanine transaminase (EC 2
  misc_feature (1)..(393): NCBI GI NO: 37533928 NR Description: putative alanine aminotransferase
MFPADAIARAKHYLAMAPGGLGAYSDSRGIPGIRKEVADFIHKRDGYPSDPELIYLTDGASKGVMQILNTIIRNEMDGILVPVPQYPLYSATISLYGGSLVPYYLEEEANWSLDFVNIRQTVAEARSKGISVRAMVMINPGNPTGQCLSEANIKELLQFCYHENLVLLADEVYQQNIYQDERPFISARKVMFDMGPPISSELQVVSFHTVSKGYWGECGQRGGYFEMTNLPPKTVDEIYKVASIALSPNVPGQIFMGVMVNPPKPGDISYLKFAAESKSIHESLRRRARMMTDGFNSCRNVVCNFTEGAMYSFPQIRLPPRAIEAARRAGKSADVFYCLKLLEATGISTVPGSGFGQKEGVFHLRTTILPAEEDFPAIMSSFKKFNDSFMEQYEGYSRL

SEQ ID NO: 37960 - protein, 384 aa, Zea mays subsp. mays
  peptide (1)..(384): Ceres Seq. ID no. 12406294
  misc_feature (24)..(371): Pfam Name: Pfam Description:  Aminotransferase class I and II
  misc_feature (1)..(384): NCBI GI NO: 29569153 NR Description: alanine aminotransferase
  misc_feature (1)..(384): NCBI GI NO: 34899390 NR Description: putative alanine aminotransferase
  misc_feature (1)..(384): NCBI GI NO: 30688330 NR Description: alanine aminotransferase -related
  misc_feature (1)..(384): NCBI GI NO: 15223186 NR Description: putative alanine aminotransferase
  misc_feature (1)..(384): NCBI GI NO: 16604499 NR Description: At1g23310/F26F24_4 [Arabidopsis thaliana]
  misc_feature (1)..(384): NCBI GI NO: 21537112 NR Description: putative alanine aminotransferase
  misc_feature (1)..(384): NCBI GI NO: 13430566 NR Description: putative alanine aminotransferase
  misc_feature (9)..(384): NCBI GI NO: 14596229 NR Description: alanine aminotransferase-like protein
  misc_feature (1)..(378): NCBI GI NO: 7434113 NR Description: alanine transaminase (EC 2
  misc_feature (1)..(378): NCBI GI NO: 37533928 NR Description: putative alanine aminotransferase
MAPGGLGAYSDSRGIPGIRKEVADFIHKRDGYPSDPELIYLTDGASKGVMQILNTIIRNEMDGILVPVPQYPLYSATISLYGGSLVPYYLEEEANWSLDFVNIRQTVAEARSKGISVRAMVMINPGNPTGQCLSEANIKELLQFCYHENLVLLADEVYQQNIYQDERPFISARKVMFDMGPPISSELQVVSFHTVSKGYWGECGQRGGYFEMTNLPPKTVDEIYKVASIALSPNVPGQIFMGVMVNPPKPGDISYLKFAAESKSIHESLRRRARMMTDGFNSCRNVVCNFTEGAMYSFPQIRLPPRAIEAARRAGKSADVFYCLKLLEATGISTVPGSGFGQKEGVFHLRTTILPAEEDFPAIMSSFKKFNDSFMEQYEGYSRL

SEQ ID NO: 37961 - DNA, 972 bp, Zea mays subsp. mays
  misc_feature (1)..(972): Ceres Seq. ID no. 12366045
actatggaccaggccttcgtgcaggcccccgagcaccgccccaagcccatcgtcaccgaggccaccggcatccctctcatcgacctctcgcctctggccgccagcggcggcgccgtggacgcgctggccgccgaggtgggcgcggcgagccgccgccgccggcagccgtggccgacggcgagcttgtgttcgataacaagtggccccaggatctaccgggcttcagagaggcgctggaggagtacgcgaaagcgatggaagagctggcgttcaagctgctggagctgatcgcccggagcctgaagctgaggcccgaccggctgcacggcttcttcaaggaccagacgaccttcatccggctgaaccactaccctccttgcccgagccccgacctggccctcggcgtggggcggcacaaggacgccggcgccctgaccatcctgtaccaggacgacgtcggggggctcgacgtccggcggcggctccgacggcgagtgggtccgcgtcaggcccgtgcccgactcgttcatcatcaacgtcggcgacctcatccaggtacgagagcgcggagcaccgggcgtcggtgaactcggcgagggagaggttctccatgccctacttcttcaacccggcgacctacaccatggtggagccggtggaggagctggtgagcaaggacgatccgcccaggtacgacgcctacaactggggcgacttcttcagcaccaggaagaacagcaacttcaagaagctcaacgtggagaacattcagatcgcgcatttcaagaagagcctcgtcctcgcctaactactgctactgctaggatccatgccattgccatgtcgtcttcagattcagagcacgccatgtcgtcgctagcttcgtggtagaacaaataatgatgtgcgtgctgtgtgtaagcatggatatggatgtgaatatgtaatatgatgagcactcctactttggtg

SEQ ID NO: 37962 - protein, 194 aa, Zea mays subsp. mays
  peptide (1)..(194): Ceres Seq. ID no. 12366046
  misc_feature (140)..(160): NCBI GI NO: 40253917 NR Description: putative Isopenicillin N synthase and relateddioxygenases
  misc_feature (58)..(160): NCBI GI NO: 18402079 NR Description: expressed protein; protein id: At3g19000
  misc_feature (61)..(160): NCBI GI NO: 21593702 NR Description: unknown [Arabidopsis thaliana]
  misc_feature (61)..(160): NCBI GI NO: 18402081 NR Description: expressed protein; protein id: At3g19010
  misc_feature (61)..(160): NCBI GI NO: 30685157 NR Description: flavonol synthase family [Arabidopsis thaliana]
  misc_feature (61)..(160): NCBI GI NO: 18103924 NR Description: putative oxylase protein [Pinus pinaster]
  misc_feature (63)..(157): NCBI GI NO: 15235124 NR Description: putative flavanone 3-beta-hydroxylase
  misc_feature (65)..(159): NCBI GI NO: 15239179 NR Description: leucoanthocyanidin dioxygenase-like protein
  misc_feature (65)..(159): NCBI GI NO: 21537324 NR Description: leucoanthocyanidin dioxygenase-like protein
  misc_feature (66)..(158): NCBI GI NO: 15228785 NR Description: leucoanthocyanidin dioxygenase -like protein
YGPGLRAGPRAPPQAHRHRGHRHPSHRPLASGRQRRRRGRAGRRGGRGEPPPPAAVADGELVFDNKWPQDLPGFREALEEYAKAMEELAFKLLELIARSLKLRPDRLHGFFKDQTTFIRLNHYPPCPSPDLALGVGRHKDAGALTILYQDDVGGLDVRRRLRRRVGPRQARARLVHHQRRRPHPGTRARSTGRR

SEQ ID NO: 37963 - protein, 110 aa, Zea mays subsp. mays
  peptide (1)..(110): Ceres Seq. ID no. 12366047
  misc_feature (56)..(76): NCBI GI NO: 40253917 NR Description: putative Isopenicillin N synthase and relateddioxygenases
  misc_feature (1)..(76): NCBI GI NO: 18402079 NR Description: expressed protein; protein id: At3g19000
  misc_feature (1)..(76): NCBI GI NO: 21593702 NR Description: unknown [Arabidopsis thaliana]
  misc_feature (1)..(76): NCBI GI NO: 18402081 NR Description: expressed protein; protein id: At3g19010
  misc_feature (1)..(76): NCBI GI NO: 30685157 NR Description: flavonol synthase family [Arabidopsis thaliana]
  misc_feature (1)..(76): NCBI GI NO: 18103924 NR Description: putative oxylase protein [Pinus pinaster]
  misc_feature (1)..(73): NCBI GI NO: 15235124 NR Description: putative flavanone 3-beta-hydroxylase
  misc_feature (1)..(75): NCBI GI NO: 15239179 NR Description: leucoanthocyanidin dioxygenase-like protein
  misc_feature (1)..(75): NCBI GI NO: 21537324 NR Description: leucoanthocyanidin dioxygenase-like protein
  misc_feature (1)..(74): NCBI GI NO: 15228785 NR Description: leucoanthocyanidin dioxygenase -like protein
MEELAFKLLELIARSLKLRPDRLHGFFKDQTTFIRLNHYPPCPSPDLALGVGRHKDAGALTILYQDDVGGLDVRRRLRRRVGPRQARARLVHHQRRRPHPGTRARSTGRR

SEQ ID NO: 37964 - DNA, 495 bp, Zea mays subsp. mays
  misc_feature (1)..(495): Ceres Seq. ID no. 5759922
gtaccaacaggaaaaaaggcccagaggcagtgccgtgaccgattcgagacgcaagagaaggatcgagacgaggcggcggttttccggggcagcatcgtctcggccacgaagatgtcttactcaaggggctcaagtgaaaggtatggatctcgctcaccttactcgagaagcacaaggtaccgaagtcgctctaggagtgtcgactctagtgatgctgaaaaccctgggaacaacctgtatgtgactggtttgtcggctcgtgtaacggatcgagatctggagaagcacttctccactgagggtgaggtgattgatgcaagcgttgtgtatgatccttggacaagggaatcacgggggtttggttttgttaccatggctgctgttaaagatgcagatcgctgcatcaaatatctggaccgttctgtgttgcaaggtcgggtcataactgttgagaaggtaaaatcataagattgggagcatctaactttcttattt

SEQ ID NO: 37965 - protein, 155 aa, Zea mays subsp. mays
  peptide (1)..(155): Ceres Seq. ID no. 5759923
  misc_feature (79)..(150): Pfam Name: a.k.a. RRM, RBD, or RNP domain Pfam Description: RNA recognition motif.
  misc_feature (60)..(154): NCBI GI NO: 34902002 NR Description: putative transformer serine/arginine-richribonucleoprotein
  misc_feature (38)..(154): NCBI GI NO: 18390758 NR Description: transformer serine/arginine-rich ribonucleoprotein
  misc_feature (38)..(154): NCBI GI NO: 28973767 NR Description: putative transformer-SR ribonucleoprotein
  misc_feature (38)..(152): NCBI GI NO: 30680096 NR Description: transformer serine/arginine-rich ribonucleoprotein
  misc_feature (36)..(154): NCBI GI NO: 11275253 NR Description: transformer-2-like protein - liverwort
  misc_feature (65)..(154): NCBI GI NO: 8778550 NR Description: F22G5.31 [Arabidopsis thaliana]
  misc_feature (37)..(154): NCBI GI NO: 40253470 NR Description: putative transformer-SR ribonucleoprotein
  misc_feature (37)..(152): NCBI GI NO: 7489207 NR Description: transformer-SR ribonucleoprotein - common tobacco
  misc_feature (45)..(154): NCBI GI NO: 40738429 NR Description: hypothetical protein AN6676.2
  misc_feature (13)..(154): NCBI GI NO: 16944647 NR Description: conserved hypothetical protein [Neurospora crassa]
VPTGKKAQRQCRDRFETQEKDRDEAAVFRGSIVSATKMSYSRGSSERYGSRSPYSRSTRYRSRSRSVDSSDAENPGNNLYVTGLSARVTDRDLEKHFSTEGEVIDASVVYDPWTRESRGFGFVTMAAVKDADRCIKYLDRSVLQGRVITVEKVKS

SEQ ID NO: 37966 - protein, 118 aa, Zea mays subsp. mays
  peptide (1)..(118): Ceres Seq. ID no. 5759924
  misc_feature (42)..(113): Pfam Name: a.k.a. RRM, RBD, or RNP domain Pfam Description: RNA recognition motif.
  misc_feature (23)..(117): NCBI GI NO: 34902002 NR Description: putative transformer serine/arginine-richribonucleoprotein
  misc_feature (1)..(117): NCBI GI NO: 18390758 NR Description: transformer serine/arginine-rich ribonucleoprotein
  misc_feature (1)..(117): NCBI GI NO: 28973767 NR Description: putative transformer-SR ribonucleoprotein
  misc_feature (1)..(115): NCBI GI NO: 30680096 NR Description: transformer serine/arginine-rich ribonucleoprotein
  misc_feature (1)..(117): NCBI GI NO: 11275253 NR Description: transformer-2-like protein - liverwort
  misc_feature (28)..(117): NCBI GI NO: 8778550 NR Description: F22G5.31 [Arabidopsis thaliana]
  misc_feature (1)..(117): NCBI GI NO: 40253470 NR Description: putative transformer-SR ribonucleoprotein
  misc_feature (1)..(115): NCBI GI NO: 7489207 NR Description: transformer-SR ribonucleoprotein - common tobacco
  misc_feature (8)..(117): NCBI GI NO: 40738429 NR Description: hypothetical protein AN6676.2
  misc_feature (1)..(117): NCBI GI NO: 16944647 NR Description: conserved hypothetical protein [Neurospora crassa]
MSYSRGSSERYGSRSPYSRSTRYRSRSRSVDSSDAENPGNNLYVTGLSARVTDRDLEKHFSTEGEVIDASVVYDPWTRESRGFGFVTMAAVKDADRCIKYLDRSVLQGRVITVEKVKS

SEQ ID NO: 37967 - protein, 80 aa, Zea mays subsp. mays
  peptide (1)..(80): Ceres Seq. ID no. 5759925
YQQEKRPRGSAVTDSRRKRRIETRRRFSGAASSRPRRCLTQGAQVKGMDLAHLTREAQGTEVALGVSTLVMLKTLGTTCM

SEQ ID NO: 37968 - DNA, 1316 bp, Zea mays subsp. mays
  misc_feature (1)..(1316): Ceres Seq. ID no. 12349557
gtctagatcgctcgtccggtgtggtctctggacttgcttgccgttcacttctcttcagcggcagcgtggcaaggcaacgagagcaacgaagagtattcaaaccgaaaacaatggatccggtgcggaagagcgtgtgcgtgaccggcgctggcggcttcgtcgcgtcggagctggtgaagctcctcctctcccggggccaatacgcggtccgcggcaccgtgcgcgaccctggtgctagcaagaatgcccatctcaaggtgctggaaggagctgaggaaaggttgcagcttctcaaggctgatctgatggactacgacagcattgcatcagcagttgccggctgtgagggtgtcttccatgtagctagccctgtcctttcccatcgaccctccaaccctgaggtggaggtcatagctcccgctgtaataggtacaaccaatgtgttaaaggcttgctatgaggcaaaagttaggcgagttgtggtggtgtcttcatgtggagctgtgtatgctaatcctatttatccgaagggtaaggtgtttgatgaagactgctggtcagatgaggattactgcaggaagaaggaggattggtatttagtttccaaaacactgtcggaacgagaggctcttgcttttgcagcaaaaacagggctggacgttgtaactgtttgtccgtcattagtatttggacccttgatgcagcctacagtaaatttgagcagcgaaatgatccttaaatatttcaaagatctcgagactgttgaaaatgtactcagtaatatggtggatattcgtgatgttgctgatgctcttcttctgacttacgaaaagccagaagcgtctggacgatacatctgcagttcacatgcaataaaaatttctgatatgataaacatactgaagaccatgtatccgtcttacccttatcccaaaaattttgtggaagatgatgtcaactctgtatacagctctgagaaactgcagaagctggggtggagcttcaagcctatagaggaatccctccgtgacactgttgaatcctacaaggcatttggcatcctgaattgaacatcgaactaggattgtttccatctgctgttgcctccgaactcctcctgaataatgtaggcgcagtgacaacagcactgccgttctctttatttttcaacactattatgtagtggttcaggccaaataagtaggcccggtgctgactgttgtatggtttgtggcctattgtcgttgctaaaaactagaaatatgcgtactaatgttgcattgctgcacttgatttgcttgtcgtcattctgatgc

SEQ ID NO: 37969 - protein, 355 aa, Zea mays subsp. mays
  peptide (1)..(355): Ceres Seq. ID no. 12349558
  misc_feature (40)..(310): Pfam Name: Pfam Description:  3-beta hydroxysteroid dehydrogenase/ isomerase family
  misc_feature (37)..(349): NCBI GI NO: 15226134 NR Description: putative cinnamoyl-CoA reductase
  misc_feature (37)..(349): NCBI GI NO: 15226135 NR Description: putative cinnamoyl-CoA reductase
  misc_feature (40)..(354): NCBI GI NO: 15223068 NR Description: putative cinnamoyl-CoA reductase
  misc_feature (40)..(354): NCBI GI NO: 6554472 NR Description: putative cinnamoyl-CoA reductase; 14056-15506
  misc_feature (42)..(352): NCBI GI NO: 17978649 NR Description: cinnamoyl-CoA reductase [Pinus taeda]
  misc_feature (42)..(354): NCBI GI NO: 31414896 NR Description: cinnamoyl CoA reductase [Fragaria x ananassa]
  misc_feature (42)..(354): NCBI GI NO: 9998901 NR Description: cinnamoyl-CoA reductase
  misc_feature (42)..(354): NCBI GI NO: 9964087 NR Description: cinnamoyl CoA reductase [Lolium perenne]
  misc_feature (42)..(354): NCBI GI NO: 25140434 NR Description: cinnamoyl CoA reductase [Solanum tuberosum]
  misc_feature (42)..(354): NCBI GI NO: 40233135 NR Description: cinnamoyl CoA reductase [Populus tomentosa]
LDRSSGVVSGLACRSLLFSGSVARQREQRRVFKPKTMDPVRKSVCVTGAGGFVASELVKLLLSRGQYAVRGTVRDPGASKNAHLKVLEGAEERLQLLKADLMDYDSIASAVAGCEGVFHVASPVLSHRPSNPEVEVIAPAVIGTTNVLKACYEAKVRRVVVVSSCGAVYANPIYPKGKVFDEDCWSDEDYCRKKEDWYLVSKTLSEREALAFAAKTGLDVVTVCPSLVFGPLMQPTVNLSSEMILKYFKDLETVENVLSNMVDIRDVADALLLTYEKPEASGRYICSSHAIKISDMINILKTMYPSYPYPKNFVEDDVNSVYSSEKLQKLGWSFKPIEESLRDTVESYKAFGILN

SEQ ID NO: 37970 - protein, 319 aa, Zea mays subsp. mays
  peptide (1)..(319): Ceres Seq. ID no. 12349559
  misc_feature (4)..(274): Pfam Name: Pfam Description:  3-beta hydroxysteroid dehydrogenase/ isomerase family
  misc_feature (1)..(313): NCBI GI NO: 15226134 NR Description: putative cinnamoyl-CoA reductase
  misc_feature (1)..(313): NCBI GI NO: 15226135 NR Description: putative cinnamoyl-CoA reductase
  misc_feature (4)..(318): NCBI GI NO: 15223068 NR Description: putative cinnamoyl-CoA reductase
  misc_feature (4)..(318): NCBI GI NO: 6554472 NR Description: putative cinnamoyl-CoA reductase; 14056-15506
  misc_feature (6)..(316): NCBI GI NO: 17978649 NR Description: cinnamoyl-CoA reductase [Pinus taeda]
  misc_feature (6)..(318): NCBI GI NO: 31414896 NR Description: cinnamoyl CoA reductase [Fragaria x ananassa]
  misc_feature (6)..(318): NCBI GI NO: 9998901 NR Description: cinnamoyl-CoA reductase
  misc_feature (6)..(318): NCBI GI NO: 9964087 NR Description: cinnamoyl CoA reductase [Lolium perenne]
  misc_feature (6)..(318): NCBI GI NO: 25140434 NR Description: cinnamoyl CoA reductase [Solanum tuberosum]
  misc_feature (6)..(318): NCBI GI NO: 40233135 NR Description: cinnamoyl CoA reductase [Populus tomentosa]
MDPVRKSVCVTGAGGFVASELVKLLLSRGQYAVRGTVRDPGASKNAHLKVLEGAEERLQLLKADLMDYDSIASAVAGCEGVFHVASPVLSHRPSNPEVEVIAPAVIGTTNVLKACYEAKVRRVVVVSSCGAVYANPIYPKGKVFDEDCWSDEDYCRKKEDWYLVSKTLSEREALAFAAKTGLDVVTVCPSLVFGPLMQPTVNLSSEMILKYFKDLETVENVLSNMVDIRDVADALLLTYEKPEASGRYICSSHAIKISDMINILKTMYPSYPYPKNFVEDDVNSVYSSEKLQKLGWSFKPIEESLRDTVESYKAFGILN

SEQ ID NO: 37971 - protein, 254 aa, Zea mays subsp. mays
  peptide (1)..(254): Ceres Seq. ID no. 12349560
  misc_feature (1)..(209): Pfam Name: Pfam Description:  3-beta hydroxysteroid dehydrogenase/ isomerase family
  misc_feature (1)..(248): NCBI GI NO: 15226134 NR Description: putative cinnamoyl-CoA reductase
  misc_feature (1)..(248): NCBI GI NO: 15226135 NR Description: putative cinnamoyl-CoA reductase
  misc_feature (1)..(253): NCBI GI NO: 15223068 NR Description: putative cinnamoyl-CoA reductase
  misc_feature (1)..(253): NCBI GI NO: 6554472 NR Description: putative cinnamoyl-CoA reductase; 14056-15506
  misc_feature (1)..(251): NCBI GI NO: 17978649 NR Description: cinnamoyl-CoA reductase [Pinus taeda]
  misc_feature (1)..(253): NCBI GI NO: 31414896 NR Description: cinnamoyl CoA reductase [Fragaria x ananassa]
  misc_feature (1)..(253): NCBI GI NO: 9998901 NR Description: cinnamoyl-CoA reductase
  misc_feature (1)..(253): NCBI GI NO: 9964087 NR Description: cinnamoyl CoA reductase [Lolium perenne]
  misc_feature (1)..(253): NCBI GI NO: 25140434 NR Description: cinnamoyl CoA reductase [Solanum tuberosum]
  misc_feature (1)..(253): NCBI GI NO: 40233135 NR Description: cinnamoyl CoA reductase [Populus tomentosa]
MDYDSIASAVAGCEGVFHVASPVLSHRPSNPEVEVIAPAVIGTTNVLKACYEAKVRRVVVVSSCGAVYANPIYPKGKVFDEDCWSDEDYCRKKEDWYLVSKTLSEREALAFAAKTGLDVVTVCPSLVFGPLMQPTVNLSSEMILKYFKDLETVENVLSNMVDIRDVADALLLTYEKPEASGRYICSSHAIKISDMINILKTMYPSYPYPKNFVEDDVNSVYSSEKLQKLGWSFKPIEESLRDTVESYKAFGILN

SEQ ID NO: 37972 - DNA, 662 bp, Zea mays subsp. mays
  misc_feature (1)..(662): Ceres Seq. ID no. 12349561
actagttgctagtgctaccaagaacaggaaggaaacaccgccgccgccgcgccttccattccagtactcgcggaggaaaggaacaccagccagcgccatggtcacgtcgacgaccgccgccgccgtgctgtccccgccgtccgtggccgggcttcgcctggcgccgtctccccgggcgcgcgtggcgttccgcgcggcgcgggcgcggcggtccgtggcggcgcgcgcggagctgagcccgtcgctggtgatcagcctgagcacgggcgtgtcgctcttcctgggccgcttcgtcttcttcaacttccagcgggagaacgtggcgaagcaggtgcccgagcagaacggcaagacgcacttcgacgccggcgacgagcgcgccaaggagttctcgggcctgctcaagtccaacgaccccgtgggcttcaacctcgtcgacgtcctcgcctggggctcgctcggccacatcgtcgcctactacatcctcgccacctcaagcaacggatacgaccccaacttcttctgagcggccggctgcgggcatgttcttgagcctgcctgtattctactccgtgtgtgttgagccatatatctgatgctcaaggattggttaatttgaacaagtggtgcaactgcgcgtgtacatggatttgctcttcccc

SEQ ID NO: 37973 - protein, 174 aa, Zea mays subsp. mays
  peptide (1)..(174): Ceres Seq. ID no. 12349562
  misc_feature (78)..(171): Pfam Name: Pfam Description:  Photosystem I psaG / psaK
  misc_feature (33)..(174): NCBI GI NO: 131192 NR Description: Photosystem I reaction center subunit V
  misc_feature (28)..(174): NCBI GI NO: 15222757 NR Description: photosystem I subunit V precursor, putative
  misc_feature (68)..(174): NCBI GI NO: 131194 NR Description: Photosystem I reaction center subunit V
  misc_feature (81)..(170): NCBI GI NO: 17369611 NR Description: Photosystem I reaction center subunit V
  misc_feature (53)..(166): NCBI GI NO: 131191 NR Description: Photosystem I reaction center subunit V
  misc_feature (77)..(114): NCBI GI NO: 131193 NR Description: Photosystem I reaction center subunit V
  misc_feature (67)..(162): NCBI GI NO: 12831160 NR Description: PsaG-like protein [Dunaliella salina]
  misc_feature (40)..(167): NCBI GI NO: 548605 NR Description: Photosystem I reaction center subunit psaK
LVASATKNRKETPPPPRLPFQYSRRKGTPASAMVTSTTAAAVLSPPSVAGLRLAPSPRARVAFRAARARRSVAARAELSPSLVISLSTGVSLFLGRFVFFNFQRENVAKQVPEQNGKTHFDAGDERAKEFSGLLKSNDPVGFNLVDVLAWGSLGHIVAYYILATSSNGYDPNFF

SEQ ID NO: 37974 - protein, 142 aa, Zea mays subsp. mays
  peptide (1)..(142): Ceres Seq. ID no. 12349563
  misc_feature (46)..(139): Pfam Name: Pfam Description:  Photosystem I psaG / psaK
  misc_feature (1)..(142): NCBI GI NO: 131192 NR Description: Photosystem I reaction center subunit V
  misc_feature (1)..(142): NCBI GI NO: 15222757 NR Description: photosystem I subunit V precursor, putative
  misc_feature (36)..(142): NCBI GI NO: 131194 NR Description: Photosystem I reaction center subunit V
  misc_feature (49)..(138): NCBI GI NO: 17369611 NR Description: Photosystem I reaction center subunit V
  misc_feature (21)..(134): NCBI GI NO: 131191 NR Description: Photosystem I reaction center subunit V
  misc_feature (45)..(82): NCBI GI NO: 131193 NR Description: Photosystem I reaction center subunit V
  misc_feature (35)..(130): NCBI GI NO: 12831160 NR Description: PsaG-like protein [Dunaliella salina]
  misc_feature (8)..(135): NCBI GI NO: 548605 NR Description: Photosystem I reaction center subunit psaK
MVTSTTAAAVLSPPSVAGLRLAPSPRARVAFRAARARRSVAARAELSPSLVISLSTGVSLFLGRFVFFNFQRENVAKQVPEQNGKTHFDAGDERAKEFSGLLKSNDPVGFNLVDVLAWGSLGHIVAYYILATSSNGYDPNFF

SEQ ID NO: 37975 - DNA, 1366 bp, Zea mays subsp. mays
  misc_feature (1)..(1366): Ceres Seq. ID no. 12406423
ctcctctcaactgttctctcgccgccgttctagttccgttttgccttgaggtgcacgtggcggtggaagcttcccgggcggtggcggttgttggttcatgtcgatggcgcaggtgtgctgcgactcggccgcagcggcgacaccggtggccggaccggaggcggaggccagggccagggcgcgcgccgagaggcgccgccgggccgcggaggccgggaggtggaagcacgcggcggctgctggcactggcacggcagccgcagatgccacgaggaagcggagcctcgaggccggggagctgctcgtcgcgcggaagcacggggccgcgtcggtggccggccgccggagggagatggaggacgccgtgtccgtgcgcgagtccttcgccgcggagggcgaggccgacggcggccggaggcgcgacttctacggggtgttcgacggccacggctgctcgcacgtggccgaggcgtgccgggaccggatgcacgacctgctcgccgaggagctcgccgctgccgtcgccgccgacggctccgcggcgacctggaccgccgcgatggaacgcagcttcgcgcggatggacgccgaggcgatgtcggccggcgggagcgccgcctgccgctgcgacccgcacaagtgcgaccacgtgggctccaccgccgtggtggccgtcgtggaggagcgccgcgtcgtggtggccaactgtggcgacagccgcgcgctgctgtgccgcgggggcggcgcgccgccgctgccgctgtcgtcggaccacaagcccgaccgccccgacgagctggagcggatcgaggccgcgggcggccgcgtcatcttctgggagggcgcgcgcgtgctgggcgtcctcgccatgtcccgcgccatcggggacggctacctcaagccgtacgtctcgtccgtgcccgaggtcacgctcaccgaccgctccgacgccgacgagtgcctcatcctcgccagcgacggcctctgggacgtggttagcaacgaggccgcgtgcgaggtggcgcgcgcctgcctccgccgggggcgggccaggtggtgcgccgaggccgccgcgctgctcaccaagctggccctcgccaggcgcagctccgacaacgtctcggtggtcgtcgtcgatctccggaagagggatcgctagctagctctgtgccgttagtactaatacagtagtaggatggtgcacaaaaggatctcgcgggtgtctactaattgtttctctttgtcgtcaacagttattttgctgctctccctgaatcaaaaaagttcagaggagcccttagattaattgttgtggtggaaccggaatttgacccggataccatttgggatgaatggaaccttgcat

SEQ ID NO: 37976 - protein, 386 aa, Zea mays subsp. mays
  peptide (1)..(386): Ceres Seq. ID no. 12406424
  misc_feature (91)..(386): Pfam Name: Pfam Description:  Equine herpesvirus glycoprotein gp2
  misc_feature (61)..(370): NCBI GI NO: 30984464 NR Description: very large tegument protein
  misc_feature (58)..(373): NCBI GI NO: 34014801 NR Description: MUC19 [Mus musculus]
PLNCSLAAVLVPFCLEVHVAVEASRAVAVVGSCRWRRCAATRPQRRHRWPDRRRRPGPGRAPRGAAGPRRPGGGSTRRLLALARQPQMPRGSGASRPGSCSSRGSTGPRRWPAAGGRWRTPCPCASPSPRRARPTAAGGATSTGCSTATAARTWPRRAGTGCTTCSPRSSPLPSPPTAPRRPGPPRWNAASRGWTPRRCRPAGAPPAAATRTSATTWAPPPWWPSWRSAASWWPTVATAARCCAAGAARRRCRCRRTTSPTAPTSWSGSRPRAAASSSGRARACWASSPCPAPSGTATSSRTSRPCPRSRSPTAPTPTSASSSPATASGTWLATRPRARWRAPASAGGGPGGAPRPPRCSPSWPSPGAAPTTSRWSSSISGRGIAS

SEQ ID NO: 37977 - protein, 353 aa, Zea mays subsp. mays
  peptide (1)..(353): Ceres Seq. ID no. 12406425
  misc_feature (73)..(312): Pfam Name: Pfam Description:  Protein phosphatase 2C
  misc_feature (3)..(317): NCBI GI NO: 34902050 NR Description: putative Serine/threonine phosphatases
  misc_feature (321)..(351): NCBI GI NO: 34902050 NR Description: putative Serine/threonine phosphatases
  misc_feature (10)..(312): NCBI GI NO: 34908256 NR Description: putative protein phosphatase 2C
  misc_feature (321)..(350): NCBI GI NO: 34908256 NR Description: putative protein phosphatase 2C
  misc_feature (3)..(350): NCBI GI NO: 15227078 NR Description: protein phosphatase 2C
  misc_feature (73)..(319): NCBI GI NO: 15222398 NR Description: protein phosphatase 2C
  misc_feature (321)..(351): NCBI GI NO: 15222398 NR Description: protein phosphatase 2C
  misc_feature (73)..(314): NCBI GI NO: 15237839 NR Description: protein phosphatase 2C
  misc_feature (73)..(314): NCBI GI NO: 16226419 NR Description: AT5g59220/mnc17_110 [Arabidopsis thaliana]
  misc_feature (321)..(350): NCBI GI NO: 15237839 NR Description: protein phosphatase 2C
MSMAQVCCDSAAAATPVAGPEAEARARARAERRRRAAEAGRWKHAAAAGTGTAAADATRKRSLEAGELLVARKHGAASVAGRRREMEDAVSVRESFAAEGEADGGRRRDFYGVFDGHGCSHVAEACRDRMHDLLAEELAAAVAADGSAATWTAAMERSFARMDAEAMSAGGSAACRCDPHKCDHVGSTAVVAVVEERRVVVANCGDSRALLCRGGGAPPLPLSSDHKPDRPDELERIEAAGGRVIFWEGARVLGVLAMSRAIGDGYLKPYVSSVPEVTLTDRSDADECLILASDGLWDVVSNEAACEVARACLRRGRARWCAEAAALLTKLALARRSSDNVSVVVVDLRKRDR

SEQ ID NO: 37978 - protein, 351 aa, Zea mays subsp. mays
  peptide (1)..(351): Ceres Seq. ID no. 12406426
  misc_feature (71)..(310): Pfam Name: Pfam Description:  Protein phosphatase 2C
  misc_feature (1)..(315): NCBI GI NO: 34902050 NR Description: putative Serine/threonine phosphatases
  misc_feature (319)..(349): NCBI GI NO: 34902050 NR Description: putative Serine/threonine phosphatases
  misc_feature (8)..(310): NCBI GI NO: 34908256 NR Description: putative protein phosphatase 2C
  misc_feature (319)..(348): NCBI GI NO: 34908256 NR Description: putative protein phosphatase 2C
  misc_feature (1)..(348): NCBI GI NO: 15227078 NR Description: protein phosphatase 2C
  misc_feature (71)..(317): NCBI GI NO: 15222398 NR Description: protein phosphatase 2C
  misc_feature (319)..(349): NCBI GI NO: 15222398 NR Description: protein phosphatase 2C
  misc_feature (71)..(312): NCBI GI NO: 15237839 NR Description: protein phosphatase 2C
  misc_feature (71)..(312): NCBI GI NO: 16226419 NR Description: AT5g59220/mnc17_110 [Arabidopsis thaliana]
  misc_feature (319)..(348): NCBI GI NO: 15237839 NR Description: protein phosphatase 2C
MAQVCCDSAAAATPVAGPEAEARARARAERRRRAAEAGRWKHAAAAGTGTAAADATRKRSLEAGELLVARKHGAASVAGRRREMEDAVSVRESFAAEGEADGGRRRDFYGVFDGHGCSHVAEACRDRMHDLLAEELAAAVAADGSAATWTAAMERSFARMDAEAMSAGGSAACRCDPHKCDHVGSTAVVAVVEERRVVVANCGDSRALLCRGGGAPPLPLSSDHKPDRPDELERIEAAGGRVIFWEGARVLGVLAMSRAIGDGYLKPYVSSVPEVTLTDRSDADECLILASDGLWDVVSNEAACEVARACLRRGRARWCAEAAALLTKLALARRSSDNVSVVVVDLRKRDR

SEQ ID NO: 37979 - DNA, 1271 bp, Zea mays subsp. mays
  misc_feature (1)..(1271): Ceres Seq. ID no. 12358434
ctctctccatccccagcccacgaccctccgccaccagccatcgtctgcatcagatctcccgcccgtccgttacatcccagggcgacgcggccgcggccatgacgccatcctcagctctcgccctcgcgcaccacgccgcggtatccccgctcccgtcctccacgccgcggccctcccccaggtccagctctctgagcctgggcccgggctccgccgggctcgggccgcgccggctcgtcgcggcggcgcccccacgggcgttcttctcctcgtccccctaccagccgccccagccggaggggttctcgcagcaccgcgagtacggtctggtccccatggtcatcgagaccacctcccgcggggagcgcgcctacgacatcttctcgcgcctgctcaaggagcgcatcgtctgcatccacgggcccatcgccgacgacacggcctcgcttgtcgtcgcgcagctgctcttcctcgagtccgagaacccgctcaagcccgtccacctctacatcaactcccccgggggcgtcgtcaccgcggggctcgccatctacgacaccatgcagtacatccgctgccccgtcaccaccctctgcatcggccaggcggcctccatgggctcgctcctcctcgcggctggggcgccgggtgagaggcgcgcgcttcccaacgccagggtcatgatccaccagccctcgggcggcgcgcaggggcaagccaccgacatcgccatccaggccaaggagatcctcaaaatgcgcgaccgcctcaacaagatctaccagaagcacacgcgccagcccatcgataagattgagcagtgcatggagagggacctcttcatggaccctgaagaggcgcgcgactggggcctcatcgacgaggtcatcgagaatcgacctgcctcgttcatgcccgacgtaatcggtggaggcctcgatgtgcccaggctcggtggcgttggcggcggacgggggagggacgtcgaggaaccttccgcggtgtgaggattggcctcaaaggtgaaatccttcctcatccggtggatgtgttgtttgttgttagatccaaaggttcaattcttactatacaaggttaaccttgttattatggttatggaaacgtccggctccccattgtccttgttgcttaaattgcttcaattgagctattggggatataattattgcaactctaaggaaattctgcactgttgatactgataaattgacacagtattgtgtatgttgtactatatttgtatcaattcc

SEQ ID NO: 37980 - protein, 334 aa, Zea mays subsp. mays
  peptide (1)..(334): Ceres Seq. ID no. 12358435
  misc_feature (118)..(299): Pfam Name: Pfam Description:  Clp protease
  misc_feature (76)..(332): NCBI GI NO: 38344435 NR Description: OSJNBa0038O10.7
  misc_feature (105)..(309): NCBI GI NO: 18420643 NR Description: ATP-dependent Clp protease proteolytic subunit
  misc_feature (1)..(300): NCBI GI NO: 34882298 NR Description: similar to ClpP protease [Rattus norvegicus]
  misc_feature (69)..(300): NCBI GI NO: 8393156 NR Description: caseinolytic protease
  misc_feature (109)..(302): NCBI GI NO: 6685315 NR Description: ATP-dependent Clp protease proteolytic subunit
  misc_feature (105)..(300): NCBI GI NO: 5174419 NR Description: endopeptidase Clp precursor
  misc_feature (109)..(302): NCBI GI NO: 23014984 NR Description: hypothetical protein
  misc_feature (105)..(300): NCBI GI NO: 20129427 NR Description: CG5045-PA [Drosophila melanogaster]
  misc_feature (109)..(302): NCBI GI NO: 22967580 NR Description: hypothetical protein [Rhodospirillum rubrum]
  misc_feature (110)..(299): NCBI GI NO: 23474550 NR Description: hypothetical protein
LSIPSPRPSATSHRLHQISRPSVTSQGDAAAAMTPSSALALAHHAAVSPLPSSTPRPSPRSSSLSLGPGSAGLGPRRLVAAAPPRAFFSSSPYQPPQPEGFSQHREYGLVPMVIETTSRGERAYDIFSRLLKERIVCIHGPIADDTASLVVAQLLFLESENPLKPVHLYINSPGGVVTAGLAIYDTMQYIRCPVTTLCIGQAASMGSLLLAAGAPGERRALPNARVMIHQPSGGAQGQATDIAIQAKEILKMRDRLNKIYQKHTRQPIDKIEQCMERDLFMDPEEARDWGLIDEVIENRPASFMPDVIGGGLDVPRLGGVGGGRGRDVEEPSAV

SEQ ID NO: 37981 - protein, 302 aa, Zea mays subsp. mays
  peptide (1)..(302): Ceres Seq. ID no. 12358436
  misc_feature (86)..(267): Pfam Name: Pfam Description:  Clp protease
  misc_feature (44)..(300): NCBI GI NO: 38344435 NR Description: OSJNBa0038O10.7
  misc_feature (73)..(277): NCBI GI NO: 18420643 NR Description: ATP-dependent Clp protease proteolytic subunit
  misc_feature (1)..(268): NCBI GI NO: 34882298 NR Description: similar to ClpP protease [Rattus norvegicus]
  misc_feature (37)..(268): NCBI GI NO: 8393156 NR Description: caseinolytic protease
  misc_feature (77)..(270): NCBI GI NO: 6685315 NR Description: ATP-dependent Clp protease proteolytic subunit
  misc_feature (73)..(268): NCBI GI NO: 5174419 NR Description: endopeptidase Clp precursor
  misc_feature (77)..(270): NCBI GI NO: 23014984 NR Description: hypothetical protein
  misc_feature (73)..(268): NCBI GI NO: 20129427 NR Description: CG5045-PA [Drosophila melanogaster]
  misc_feature (77)..(270): NCBI GI NO: 22967580 NR Description: hypothetical protein [Rhodospirillum rubrum]
  misc_feature (78)..(267): NCBI GI NO: 23474550 NR Description: hypothetical protein
MTPSSALALAHHAAVSPLPSSTPRPSPRSSSLSLGPGSAGLGPRRLVAAAPPRAFFSSSPYQPPQPEGFSQHREYGLVPMVIETTSRGERAYDIFSRLLKERIVCIHGPIADDTASLVVAQLLFLESENPLKPVHLYINSPGGVVTAGLAIYDTMQYIRCPVTTLCIGQAASMGSLLLAAGAPGERRALPNARVMIHQPSGGAQGQATDIAIQAKEILKMRDRLNKIYQKHTRQPIDKIEQCMERDLFMDPEEARDWGLIDEVIENRPASFMPDVIGGGLDVPRLGGVGGGRGRDVEEPSAV

SEQ ID NO: 37982 - protein, 223 aa, Zea mays subsp. mays
  peptide (1)..(223): Ceres Seq. ID no. 12358437
  misc_feature (7)..(188): Pfam Name: Pfam Description:  Clp protease
  misc_feature (1)..(221): NCBI GI NO: 38344435 NR Description: OSJNBa0038O10.7
  misc_feature (1)..(198): NCBI GI NO: 18420643 NR Description: ATP-dependent Clp protease proteolytic subunit
  misc_feature (1)..(189): NCBI GI NO: 34882298 NR Description: similar to ClpP protease [Rattus norvegicus]
  misc_feature (1)..(189): NCBI GI NO: 8393156 NR Description: caseinolytic protease
  misc_feature (1)..(191): NCBI GI NO: 6685315 NR Description: ATP-dependent Clp protease proteolytic subunit
  misc_feature (1)..(189): NCBI GI NO: 5174419 NR Description: endopeptidase Clp precursor
  misc_feature (1)..(191): NCBI GI NO: 23014984 NR Description: hypothetical protein
  misc_feature (1)..(189): NCBI GI NO: 20129427 NR Description: CG5045-PA [Drosophila melanogaster]
  misc_feature (1)..(191): NCBI GI NO: 22967580 NR Description: hypothetical protein [Rhodospirillum rubrum]
  misc_feature (1)..(188): NCBI GI NO: 23474550 NR Description: hypothetical protein
MVIETTSRGERAYDIFSRLLKERIVCIHGPIADDTASLVVAQLLFLESENPLKPVHLYINSPGGVVTAGLAIYDTMQYIRCPVTTLCIGQAASMGSLLLAAGAPGERRALPNARVMIHQPSGGAQGQATDIAIQAKEILKMRDRLNKIYQKHTRQPIDKIEQCMERDLFMDPEEARDWGLIDEVIENRPASFMPDVIGGGLDVPRLGGVGGGRGRDVEEPSAV

SEQ ID NO: 37983 - DNA, 1883 bp, Zea mays subsp. mays
  misc_feature (1)..(1883): Ceres Seq. ID no. 12369615
cttgactcactcacttggccactcttcttcctcctcatcaatccgctctccagcacttgttcggaagaaaaagaagctagaacacgctaacaagacaacaaggatcatggggcgcgggcgcggccacctcctgctgccggcagcagccgcctgcctgtgggcgctgtcgtgcgcgctgctgctgcgcgcgtcccctcaccgcgctggcgccggcgccggcgggctgctgagggtcgggctcagcaggcgcggcggcgggctcgaccagcgcgcgctggcggcggccaaggccgcgaggcagcaggaggcaagccgtctcggggcctccggcggcggcgacgtccctctcgtcgactacctcaacacccagtactatggggtcgtcggcatcggcacaccgccgcagaacttcaccgtcatcttcgacaccggcagctccaacctctgggtcccctcctccagatgctacttctcgattgcctgctacctgcaccacagatacaagtcggccaagtctagcacgtacaaggcggacggcgagacctgcaagatcacctacggctccggctcgatcgccgggttcttcagcgacgacgacgtgctggtcggggacctgaccgtcaaaaaccagaagttcatcgagacaacgcgcgaaagcagcgtaacgttcataatcggcaagttcgacggcatcctcggtctcggataccccgagatctccgtcggcaaggctcctccgatctggcagagcatgcaggagcaggagctgctggcggaggacgtcttctccttctggctgaaccggagcccggacgcggacgcagcgtccggcggcgagctcgtcttcggcggcgtcgaccctgcgcacttcagcgggaaccacacctacgtccccgtctcccgcaagggatactggcagttcgacatgggggaccttctcatcgacggccactccaccggtttctgcgccaaggggtgcgctgccatcgtcgactccgggacttccttgctcgctggcccaacggccataattgcccaggtgaacgaagcgatcggggcagacgggatcatcagcacggagtgcaaggaagttgtgagccagtacggagagatgatcctcgacatgctcatcgcacagacggatccacagagggtgtgcagccaggttggtctgtgcgtgttcgatggcgctcgatctgtcagcgaggggattgaatctgttgtcgggaaagaaaacctgggctcagatgtcatgtgctcggcctgtcagatggctgtcgtgtggatagagaaccagctccgcgaaaacaagaccaaggagctcatactgcagtacgctaaccagctgtgtgagcgtctgccgagccccaacggagagtcaacagtcagctgccaggagatctccaagatgcccagccttgcgtttcaccatcgcaaacaagaccttcaccctaacacccgagcagtacattgtgaagctggagcaaggaggccaaaccgtctgcatcagtgggttcatggcgtatgacgtgccaccgccgcgtggtcctctctggattcttggggacgtcttcatgggagcttaccacacggtgttcgacttcggcaacgacaggattggcttcgcggaatctgcatgagtgtggagagcactctcatctttataaagacgataccctatgtattagggatgtgtagtttattgtctatccactacatgccaacagtacgctgcaaataaatcggtggccaaaattgctgaaaccagaaacgtgaacagtactgctttctttgtttctggagaagagcaaatggatgcttcaagacatgcatgtccgatgtgtattgagaaatagagcgatgagtgctgctcgatcgtctcg

SEQ ID NO: 37984 - protein, 508 aa, Zea mays subsp. mays
  peptide (1)..(508): Ceres Seq. ID no. 12369616
  misc_feature (75)..(400): Pfam Name: Pfam Description:  Eukaryotic aspartyl protease
  misc_feature (42)..(496): NCBI GI NO: 1168537 NR Description: Aspartic proteinase precursor
  misc_feature (55)..(475): NCBI GI NO: 2499819 NR Description: Aspartic proteinase oryzasin 1 precursor
  misc_feature (54)..(475): NCBI GI NO: 1168536 NR Description: Phytepsin precursor (Aspartic proteinase)
  misc_feature (75)..(475): NCBI GI NO: 21616051 NR Description: aspartic proteinase [Theobroma cacao]
  misc_feature (48)..(475): NCBI GI NO: 7435839 NR Description: aspartic proteinase precursor
  misc_feature (79)..(475): NCBI GI NO: 5822248 NR Description: Chain A
  misc_feature (74)..(475): NCBI GI NO: 22330379 NR Description: aspartic protease, putative; protein id:At1g62290
  misc_feature (49)..(475): NCBI GI NO: 13897888 NR Description: putative aspartic protease [Ipomoea batatas]
  misc_feature (80)..(484): NCBI GI NO: 20800441 NR Description: aspartic proteinase [Vigna unguiculata]
  misc_feature (106)..(360): NCBI GI NO: 17549909 NR Description: Aspartic protease ASP-4 (49.3 kD) (asp-4)
LTHSLGHSSSSSSIRSPALVRKKKKLEHANKTTRIMGRGRGHLLLPAAAACLWALSCALLLRASPHRAGAGAGGLLRVGLSRRGGGLDQRALAAAKAARQQEASRLGASGGGDVPLVDYLNTQYYGVVGIGTPPQNFTVIFDTGSSNLWVPSSRCYFSIACYLHHRYKSAKSSTYKADGETCKITYGSGSIAGFFSDDDVLVGDLTVKNQKFIETTRESSVTFIIGKFDGILGLGYPEISVGKAPPIWQSMQEQELLAEDVFSFWLNRSPDADAASGGELVFGGVDPAHFSGNHTYVPVSRKGYWQFDMGDLLIDGHSTGFCAKGCAAIVDSGTSLLAGPTAIIAQVNEAIGADGIISTECKEVVSQYGEMILDMLIAQTDPQRVCSQVGLCVFDGARSVSEGIESVVGKENLGSDVMCSACQMAVVWIENQLRENKTKELILQYANQLCERLPSPNGESTVSCQEISKMPSLAFHHRKQDLHPNTRAVHCEAGARRPNRLHQWVHGV

SEQ ID NO: 37985 - protein, 473 aa, Zea mays subsp. mays
  peptide (1)..(473): Ceres Seq. ID no. 12369617
  misc_feature (40)..(365): Pfam Name: Pfam Description:  Eukaryotic aspartyl protease
  misc_feature (7)..(461): NCBI GI NO: 1168537 NR Description: Aspartic proteinase precursor
  misc_feature (20)..(440): NCBI GI NO: 2499819 NR Description: Aspartic proteinase oryzasin 1 precursor
  misc_feature (19)..(440): NCBI GI NO: 1168536 NR Description: Phytepsin precursor (Aspartic proteinase)
  misc_feature (40)..(440): NCBI GI NO: 21616051 NR Description: aspartic proteinase [Theobroma cacao]
  misc_feature (13)..(440): NCBI GI NO: 7435839 NR Description: aspartic proteinase precursor
  misc_feature (44)..(440): NCBI GI NO: 5822248 NR Description: Chain A
  misc_feature (39)..(440): NCBI GI NO: 22330379 NR Description: aspartic protease, putative; protein id:At1g62290
  misc_feature (14)..(440): NCBI GI NO: 13897888 NR Description: putative aspartic protease [Ipomoea batatas]
  misc_feature (45)..(449): NCBI GI NO: 20800441 NR Description: aspartic proteinase [Vigna unguiculata]
  misc_feature (71)..(325): NCBI GI NO: 17549909 NR Description: Aspartic protease ASP-4 (49.3 kD) (asp-4)
MGRGRGHLLLPAAAACLWALSCALLLRASPHRAGAGAGGLLRVGLSRRGGGLDQRALAAAKAARQQEASRLGASGGGDVPLVDYLNTQYYGVVGIGTPPQNFTVIFDTGSSNLWVPSSRCYFSIACYLHHRYKSAKSSTYKADGETCKITYGSGSIAGFFSDDDVLVGDLTVKNQKFIETTRESSVTFIIGKFDGILGLGYPEISVGKAPPIWQSMQEQELLAEDVFSFWLNRSPDADAASGGELVFGGVDPAHFSGNHTYVPVSRKGYWQFDMGDLLIDGHSTGFCAKGCAAIVDSGTSLLAGPTAIIAQVNEAIGADGIISTECKEVVSQYGEMILDMLIAQTDPQRVCSQVGLCVFDGARSVSEGIESVVGKENLGSDVMCSACQMAVVWIENQLRENKTKELILQYANQLCERLPSPNGESTVSCQEISKMPSLAFHHRKQDLHPNTRAVHCEAGARRPNRLHQWVHGV

SEQ ID NO: 37986 - protein, 258 aa, Zea mays subsp. mays
  peptide (1)..(258): Ceres Seq. ID no. 12369618
  misc_feature (1)..(150): Pfam Name: Pfam Description:  Eukaryotic aspartyl protease
  misc_feature (1)..(246): NCBI GI NO: 1168537 NR Description: Aspartic proteinase precursor
  misc_feature (1)..(225): NCBI GI NO: 2499819 NR Description: Aspartic proteinase oryzasin 1 precursor
  misc_feature (1)..(225): NCBI GI NO: 1168536 NR Description: Phytepsin precursor (Aspartic proteinase)
  misc_feature (1)..(225): NCBI GI NO: 21616051 NR Description: aspartic proteinase [Theobroma cacao]
  misc_feature (1)..(225): NCBI GI NO: 7435839 NR Description: aspartic proteinase precursor
  misc_feature (1)..(225): NCBI GI NO: 5822248 NR Description: Chain A
  misc_feature (1)..(225): NCBI GI NO: 22330379 NR Description: aspartic protease, putative; protein id:At1g62290
  misc_feature (1)..(225): NCBI GI NO: 13897888 NR Description: putative aspartic protease [Ipomoea batatas]
  misc_feature (1)..(234): NCBI GI NO: 20800441 NR Description: aspartic proteinase [Vigna unguiculata]
  misc_feature (1)..(110): NCBI GI NO: 17549909 NR Description: Aspartic protease ASP-4 (49.3 kD) (asp-4)
MQEQELLAEDVFSFWLNRSPDADAASGGELVFGGVDPAHFSGNHTYVPVSRKGYWQFDMGDLLIDGHSTGFCAKGCAAIVDSGTSLLAGPTAIIAQVNEAIGADGIISTECKEVVSQYGEMILDMLIAQTDPQRVCSQVGLCVFDGARSVSEGIESVVGKENLGSDVMCSACQMAVVWIENQLRENKTKELILQYANQLCERLPSPNGESTVSCQEISKMPSLAFHHRKQDLHPNTRAVHCEAGARRPNRLHQWVHGV

SEQ ID NO: 37987 - DNA, 1384 bp, Zea mays subsp. mays
  misc_feature (1)..(1384): Ceres Seq. ID no. 12368172
attacatccgagggcactccatctcttgcgtcccttaacccctccaccaatccaatccaatcccttaaccccgcaccgaatccagccttcgaagcttcctcttcctcccggccccggtcccggtcccggtcccggagccctgttcttggtacttaggacaagacgctccgagaccctcgagattgagagctcgctcgctcgctcggtgtcttcgccagctgcccaccctccttcctgctcgtccccccgctcgcgcctcctcttcctcggactgatgggcgaccatctcgcgttgatcgtggaccggctgctgacagagtcgacgctggaggcggcgatcggcggtgggaagcacatggtcgatctgcgtcaggagacggtggacgtcgagtactgccatcgcgggctaggcggcggctcggcgacgaaggtggtggagtgcaggatttgccaggaggaggactgggacacctgcatggaggccccctgcgcctgttgtggcagcctcaagtatgcgcatcggaaatgcattcagcgctggtgcaatgagaaaggcgacactatgtgtgaaatatgcctgcagcaattcaggccaggttatacttctccacaacagctgtttcactatggaagtataccaatgaatttcagagggaactgggagattgccaggcaagatctcaatgattcccagataataacaatgatgcccacggagcgtgattttatggacaattacgatgactactttcctatcaggacaagaagcagcaccttgtgttgccggacaattgccataattttcatgtcactcctggtccttcgccacactcttcctcttgtgattggtgacaatggggagtactcattggccttattctcgcttctggtgctgagaactgcgggaatcctctttccaatcctggtgatggtgagagcattggcaagcttccatcatcgacggcggcagcaggaaagccaggaagcatatatatcttcatcagagagcgaggaggaagaggaagagtatacagttgccaattctgcacaaacaaactactcgcaaccgcgcttcataccagtctactgacatggccaagaacaagccttccaacctcacatctgacagggaattccagcgcctgagtttagctgacagatgcaaggatgaatggatgatcacaaggggggaaattacaaaattgtgaatgtggtgacatagtaagatagcctgaagccactcgcttctatgcccatagagaagaatgtagtggccctgctacttgtacataggagagagtacagcagcagagtgctgacaaacccggatactgtgactcgagtctctactgcagtaacccttgtgcactgctctccccgtccc

SEQ ID NO: 37988 - protein, 362 aa, Zea mays subsp. mays
  peptide (1)..(362): Ceres Seq. ID no. 12368173
  misc_feature (147)..(192): Pfam Name: RING finger Pfam Description: Zinc finger, C3HC4 type
  misc_feature (92)..(343): NCBI GI NO: 22325409 NR Description: similar to nucleoside triphosphatase, putative
  misc_feature (92)..(335): NCBI GI NO: 15240828 NR Description: putative protein; protein id: At5g38070.1
  misc_feature (92)..(335): NCBI GI NO: 15232824 NR Description: putative protein; protein id: At3g47550.1
  misc_feature (92)..(324): NCBI GI NO: 30692888 NR Description: expressed protein [Arabidopsis thaliana]
  misc_feature (145)..(335): NCBI GI NO: 18424590 NR Description: expressed protein; protein id: At5g62460
  misc_feature (146)..(328): NCBI GI NO: 15223693 NR Description: nucleoside triphosphatase, putative
  misc_feature (146)..(328): NCBI GI NO: 26451292 NR Description: unknown protein [Arabidopsis thaliana]
  misc_feature (146)..(328): NCBI GI NO: 21537046 NR Description: nucleoside triphosphatase, putative
  misc_feature (146)..(326): NCBI GI NO: 15227065 NR Description: unknown protein; protein id: At2g02960
  misc_feature (146)..(328): NCBI GI NO: 25365878 NR Description: F14L17.2 protein - Arabidopsis thaliana
LHPRALHLLRPLTPPPIQSNPLTPHRIQPSKLPLPPGPGPGPGPGALFLVLRTRRSETLEIESSLARSVSSPAAHPPSCSSPRSRLLFLGLMGDHLALIVDRLLTESTLEAAIGGGKHMVDLRQETVDVEYCHRGLGGGSATKVVECRICQEEDWDTCMEAPCACCGSLKYAHRKCIQRWCNEKGDTMCEICLQQFRPGYTSPQQLFHYGSIPMNFRGNWEIARQDLNDSQIITMMPTERDFMDNYDDYFPIRTRSSTLCCRTIAIIFMSLLVLRHTLPLVIGDNGEYSLALFSLLVLRTAGILFPILVMVRALASFHHRRRQQESQEAYISSSESEEEEEEYTVANSAQTNYSQPRFIPVY

SEQ ID NO: 37989 - protein, 271 aa, Zea mays subsp. mays
  peptide (1)..(271): Ceres Seq. ID no. 12368174
  misc_feature (56)..(101): Pfam Name: RING finger Pfam Description: Zinc finger, C3HC4 type
  misc_feature (1)..(252): NCBI GI NO: 22325409 NR Description: similar to nucleoside triphosphatase, putative
  misc_feature (1)..(244): NCBI GI NO: 15240828 NR Description: putative protein; protein id: At5g38070.1
  misc_feature (1)..(244): NCBI GI NO: 15232824 NR Description: putative protein; protein id: At3g47550.1
  misc_feature (1)..(233): NCBI GI NO: 30692888 NR Description: expressed protein [Arabidopsis thaliana]
  misc_feature (54)..(244): NCBI GI NO: 18424590 NR Description: expressed protein; protein id: At5g62460
  misc_feature (55)..(237): NCBI GI NO: 15223693 NR Description: nucleoside triphosphatase, putative
  misc_feature (55)..(237): NCBI GI NO: 26451292 NR Description: unknown protein [Arabidopsis thaliana]
  misc_feature (55)..(237): NCBI GI NO: 21537046 NR Description: nucleoside triphosphatase, putative
  misc_feature (55)..(235): NCBI GI NO: 15227065 NR Description: unknown protein; protein id: At2g02960
  misc_feature (55)..(237): NCBI GI NO: 25365878 NR Description: F14L17.2 protein - Arabidopsis thaliana
MGDHLALIVDRLLTESTLEAAIGGGKHMVDLRQETVDVEYCHRGLGGGSATKVVECRICQEEDWDTCMEAPCACCGSLKYAHRKCIQRWCNEKGDTMCEICLQQFRPGYTSPQQLFHYGSIPMNFRGNWEIARQDLNDSQIITMMPTERDFMDNYDDYFPIRTRSSTLCCRTIAIIFMSLLVLRHTLPLVIGDNGEYSLALFSLLVLRTAGILFPILVMVRALASFHHRRRQQESQEAYISSSESEEEEEEYTVANSAQTNYSQPRFIPVY

SEQ ID NO: 37990 - protein, 244 aa, Zea mays subsp. mays
  peptide (1)..(244): Ceres Seq. ID no. 12368175
  misc_feature (29)..(74): Pfam Name: RING finger Pfam Description: Zinc finger, C3HC4 type
  misc_feature (1)..(225): NCBI GI NO: 22325409 NR Description: similar to nucleoside triphosphatase, putative
  misc_feature (1)..(217): NCBI GI NO: 15240828 NR Description: putative protein; protein id: At5g38070.1
  misc_feature (1)..(217): NCBI GI NO: 15232824 NR Description: putative protein; protein id: At3g47550.1
  misc_feature (1)..(206): NCBI GI NO: 30692888 NR Description: expressed protein [Arabidopsis thaliana]
  misc_feature (27)..(217): NCBI GI NO: 18424590 NR Description: expressed protein; protein id: At5g62460
  misc_feature (28)..(210): NCBI GI NO: 15223693 NR Description: nucleoside triphosphatase, putative
  misc_feature (28)..(210): NCBI GI NO: 21537046 NR Description: nucleoside triphosphatase, putative
  misc_feature (28)..(210): NCBI GI NO: 26451292 NR Description: unknown protein [Arabidopsis thaliana]
  misc_feature (28)..(208): NCBI GI NO: 15227065 NR Description: unknown protein; protein id: At2g02960
  misc_feature (28)..(210): NCBI GI NO: 25365878 NR Description: F14L17.2 protein - Arabidopsis thaliana
MVDLRQETVDVEYCHRGLGGGSATKVVECRICQEEDWDTCMEAPCACCGSLKYAHRKCIQRWCNEKGDTMCEICLQQFRPGYTSPQQLFHYGSIPMNFRGNWEIARQDLNDSQIITMMPTERDFMDNYDDYFPIRTRSSTLCCRTIAIIFMSLLVLRHTLPLVIGDNGEYSLALFSLLVLRTAGILFPILVMVRALASFHHRRRQQESQEAYISSSESEEEEEEYTVANSAQTNYSQPRFIPVY

SEQ ID NO: 37991 - DNA, 1582 bp, Zea mays subsp. mays
  misc_feature (1)..(1582): Ceres Seq. ID no. 12376690
aaagcaccagctaagctaaagacgacactagcattgcacacactaactacatatatagctaaatacactagcatacccccccaaaaaaatgtccgcgtcacgggttcctcctcgccgtcctcgtggtgggcagcgtactgtgcaccgccgccgctccccgcgcgctcgcggcggcggctcgcgagctggccggggacgacgaggccgccgccgcgatggcgtcgcggcacgagaagtggatggcggagcacgggcgcgcgtacaaggatgaggccgagaaggcgcggcggctggaggtgttccgggccaacgcggagctgatcgactcgttcaacgccgcagggacgcacagccaccggctggcgaccaacaggttcgccgacctcaccgtcgaggagttccgcgcggccaggaccgggctccggcagcgcccggcgccgtccgcgggcgccggccggttcaggtacgagaacttcagcctggcggacgcggcgcagagcgtggactggcgggccatgggtgccgtcaccggcgtcaaggaccagggagcgtgcggctgctgctgggcgttctcggcggtggcggcggtggaagggctaaacaagatccggacggggcggctggtgtcgctgtcggagcaggagctggtggactgcgacgtcagcggcgtggaccagggctgcgacggcggcctcatggacaacgccttccagttcgtcgcgcgccgcggcgggctggcctcggagtcgggctacccgtaccagggccggggacgggccctgccgctcgtccgccgccgccgccgcgtccatccggggccacgaggacgtgccgcgcaacaacgaggccgcgctcgcggccgccgtggccaaccagcccgtgtccgtggccatcaacggcgaggacatggcgttccgcttctacgacagcggcgtgctgggcggggcctgcggcacggacctcaaccacgccatcacggccgtcgggtacggcacggcgaacgacggcacaaggtactggctgatgaagaactcctggggcgcgtcgtggggcgagggcggatacgtccgcatccgccgcggcgtccgtggggagggcgtctgcggtctcgccaagctgccgtcctacccggtctagaggccaggcccagcggatcggagcaccgatcgcgtccaccaacgtaaccatcgcacagcatacagtacgcatgatgctgttacgtcatccaagacaagcgtgcacgtgcatggcatttatatttgactagctacgaatttaccgttctttttatttgtagccgacgataaatattggagaacagagatattactatttataagattgtatataatcatacgattcatggttatatatatgtatagtggtatagtcgaaatcacgacccacgccaagcattatgtattgtactcccagccataagaatgtcgctgaggtattagttggaccttacgtgtgatggtcacgtattgtaatgtacagattgcgttgaatgcaaccagtttagtgtaaacaaatacattcatactagaatgtgtgatttttaaaaaaaaaatatatgctc

SEQ ID NO: 37992 - protein, 322 aa, Zea mays subsp. mays
  peptide (1)..(322): Ceres Seq. ID no. 12376691
  misc_feature (92)..(184): Pfam Name: Pfam Description:  Papain family cysteine protease
  misc_feature (1)..(184): NCBI GI NO: 7435799 NR Description: cysteine proteinase (EC 3.4.22.-) - barley
  misc_feature (1)..(184): NCBI GI NO: 21070926 NR Description: putative cysteine proteinase
  misc_feature (1)..(182): NCBI GI NO: 38345008 NR Description: OSJNBa0052O21.11
  misc_feature (1)..(182): NCBI GI NO: 38346007 NR Description: OSJNBa0035O13.9
  misc_feature (1)..(182): NCBI GI NO: 38346003 NR Description: OSJNBa0035O13.5
  misc_feature (1)..(184): NCBI GI NO: 13491750 NR Description: cysteine protease [Ipomoea batatas]
  misc_feature (1)..(184): NCBI GI NO: 24285904 NR Description: cysteine proteinase precursor [Ipomoea batatas]
  misc_feature (1)..(184): NCBI GI NO: 535454 NR Description: cysteine proteinase
  misc_feature (1)..(183): NCBI GI NO: 40806498 NR Description: putative cysteine protease 1 [Iris hollandica]
  misc_feature (1)..(184): NCBI GI NO: 37780045 NR Description: cysteine protease 5 [Trifolium repens]
MASRHEKWMAEHGRAYKDEAEKARRLEVFRANAELIDSFNAAGTHSHRLATNRFADLTVEEFRAARTGLRQRPAPSAGAGRFRYENFSLADAAQSVDWRAMGAVTGVKDQGACGCCWAFSAVAAVEGLNKIRTGRLVSLSEQELVDCDVSGVDQGCDGGLMDNAFQFVARRGGLASESGYPYQGRGRALPLVRRRRRVHPGPRGRAAQQRGRARGRRGQPARVRGHQRRGHGVPLLRQRRAGRGLRHGPQPRHHGRRVRHGERRHKVLADEELLGRVVGRGRIRPHPPRRPWGGRLRSRQAAVLPGLEARPSGSEHRSRPPT

SEQ ID NO: 37993 - protein, 314 aa, Zea mays subsp. mays
  peptide (1)..(314): Ceres Seq. ID no. 12376692
  misc_feature (84)..(176): Pfam Name: Pfam Description:  Papain family cysteine protease
  misc_feature (1)..(176): NCBI GI NO: 7435799 NR Description: cysteine proteinase (EC 3.4.22.-) - barley
  misc_feature (1)..(176): NCBI GI NO: 21070926 NR Description: putative cysteine proteinase
  misc_feature (1)..(174): NCBI GI NO: 38345008 NR Description: OSJNBa0052O21.11
  misc_feature (1)..(174): NCBI GI NO: 38346007 NR Description: OSJNBa0035O13.9
  misc_feature (1)..(174): NCBI GI NO: 38346003 NR Description: OSJNBa0035O13.5
  misc_feature (1)..(176): NCBI GI NO: 13491750 NR Description: cysteine protease [Ipomoea batatas]
  misc_feature (1)..(176): NCBI GI NO: 24285904 NR Description: cysteine proteinase precursor [Ipomoea batatas]
  misc_feature (1)..(176): NCBI GI NO: 535454 NR Description: cysteine proteinase
  misc_feature (1)..(175): NCBI GI NO: 40806498 NR Description: putative cysteine protease 1 [Iris hollandica]
  misc_feature (1)..(176): NCBI GI NO: 37780045 NR Description: cysteine protease 5 [Trifolium repens]
MAEHGRAYKDEAEKARRLEVFRANAELIDSFNAAGTHSHRLATNRFADLTVEEFRAARTGLRQRPAPSAGAGRFRYENFSLADAAQSVDWRAMGAVTGVKDQGACGCCWAFSAVAAVEGLNKIRTGRLVSLSEQELVDCDVSGVDQGCDGGLMDNAFQFVARRGGLASESGYPYQGRGRALPLVRRRRRVHPGPRGRAAQQRGRARGRRGQPARVRGHQRRGHGVPLLRQRRAGRGLRHGPQPRHHGRRVRHGERRHKVLADEELLGRVVGRGRIRPHPPRRPWGGRLRSRQAAVLPGLEARPSGSEHRSRPPT

SEQ ID NO: 37994 - protein, 222 aa, Zea mays subsp. mays
  peptide (1)..(222): Ceres Seq. ID no. 12376693
  misc_feature (1)..(84): Pfam Name: Pfam Description:  Papain family cysteine protease
  misc_feature (1)..(84): NCBI GI NO: 7435799 NR Description: cysteine proteinase (EC 3.4.22.-) - barley
  misc_feature (1)..(84): NCBI GI NO: 21070926 NR Description: putative cysteine proteinase
  misc_feature (1)..(82): NCBI GI NO: 38345008 NR Description: OSJNBa0052O21.11
  misc_feature (1)..(82): NCBI GI NO: 38346007 NR Description: OSJNBa0035O13.9
  misc_feature (1)..(82): NCBI GI NO: 38346003 NR Description: OSJNBa0035O13.5
  misc_feature (1)..(84): NCBI GI NO: 13491750 NR Description: cysteine protease [Ipomoea batatas]
  misc_feature (1)..(84): NCBI GI NO: 24285904 NR Description: cysteine proteinase precursor [Ipomoea batatas]
  misc_feature (1)..(84): NCBI GI NO: 535454 NR Description: cysteine proteinase
  misc_feature (1)..(83): NCBI GI NO: 40806498 NR Description: putative cysteine protease 1 [Iris hollandica]
  misc_feature (1)..(84): NCBI GI NO: 37780045 NR Description: cysteine protease 5 [Trifolium repens]
MGAVTGVKDQGACGCCWAFSAVAAVEGLNKIRTGRLVSLSEQELVDCDVSGVDQGCDGGLMDNAFQFVARRGGLASESGYPYQGRGRALPLVRRRRRVHPGPRGRAAQQRGRARGRRGQPARVRGHQRRGHGVPLLRQRRAGRGLRHGPQPRHHGRRVRHGERRHKVLADEELLGRVVGRGRIRPHPPRRPWGGRLRSRQAAVLPGLEARPSGSEHRSRPPT

SEQ ID NO: 37995 - DNA, 1474 bp, Zea mays subsp. mays
  misc_feature (1)..(1474): Ceres Seq. ID no. 12353165
aacctttgttcttagcttcgaagctgtctgcatcctcgttcagatgactatttgatttctcagtattttatgtagtgtaactgttacagcactagcccacgaaggcaatcagaacaattgccaagagccccatgtttgctcgtgatccaaggcatcttcaatttgaagctgatgtgaatcgtttgtttctctatacaagctattatcgtctcggggagaatgctgacgagaaggacgctgaggagattattgacttggctagcaaagcttctattgctgatcagcagaaacaagtgcaggataatgttcattatgaacttacgcatatgtgccaagcaatggatagcattttatgtcctgatacaataaacgacccatcaaaaggaccttcagaagcacataatcattctcagcgtagtggcttaagttttgccgttggtggtgctgcatctgcaaacaagcaaagtgcaattatccctgctacacgacctttaactcgagcagaattgtcaaagaaattcagggatcattttgggtacacacttgacatcggaccatctggaattcctcataaagacgcaggtcaaggtttattcttatcaggacaagcaaatgccggtgctgtcctagccatctatcctggtgttatatattcacctgcttactatcgatatatacctggatacccaagaattgatgtttgcaacaactatctaatcacaagatatgatgggacaataattgatgcaaaaccatggtgttttggtggtgaaacaagagcattatgggatggttcagatttggtggattacaatgctatggcacctaaaggctcagagaacaactctgatcgggtgtggagaatgctaagcaagcctctagaaaaaggtgtaagggaaaattttggtgaagtgcttgaacgacgaaatccccttgcttttggtcattttgcaaatcatccacccaaaggttcaagtcctaatgtcatgatctgcccatacgattttcctttgacagagaaggacatgagagtatacatccctaacattacgtttggtggtcaagagaccattaggatgaagaggtttggctccttctatttcaagtctggaggttctgataatcaggctggtgattctctagtactgaagacgctagtgctggtgagcacaaggtccatatgtgatgaagagctctttcttaattaccgttacagtaactcaaaaagacgaccagagtggtacagccctgtcgatgaagaagaggataagaggagatggagctagtttagcacttctgtatcattctggttgtgcatttttttggctaacttttttagttctttcccccctggaaattgcaactgagcattggtaagctcctgagatcgagatgacagttttgacttaattcgtcatttggtattacatactttggtgtcccaattaccatcatgataaaagttaagctactc

SEQ ID NO: 37996 - protein, 384 aa, Zea mays subsp. mays
  peptide (1)..(384): Ceres Seq. ID no. 12353166
  misc_feature (1)..(384): NCBI GI NO: 10177809 NR Description: gene_id:MKD15.6~unknown protein
  misc_feature (1)..(384): NCBI GI NO: 22327005 NR Description: unknown protein; protein id: At5g23200
  misc_feature (1)..(376): NCBI GI NO: 15241572 NR Description: hypothetical protein
  misc_feature (1)..(376): NCBI GI NO: 26453064 NR Description: unknown protein [Arabidopsis thaliana]
  misc_feature (1)..(309): NCBI GI NO: 11358190 NR Description: hypothetical protein T22D6
MFARDPRHLQFEADVNRLFLYTSYYRLGENADEKDAEEIIDLASKASIADQQKQVQDNVHYELTHMCQAMDSILCPDTINDPSKGPSEAHNHSQRSGLSFAVGGAASANKQSAIIPATRPLTRAELSKKFRDHFGYTLDIGPSGIPHKDAGQGLFLSGQANAGAVLAIYPGVIYSPAYYRYIPGYPRIDVCNNYLITRYDGTIIDAKPWCFGGETRALWDGSDLVDYNAMAPKGSENNSDRVWRMLSKPLEKGVRENFGEVLERRNPLAFGHFANHPPKGSSPNVMICPYDFPLTEKDMRVYIPNITFGGQETIRMKRFGSFYFKSGGSDNQAGDSLVLKTLVLVSTRSICDEELFLNYRYSNSKRRPEWYSPVDEEEDKRRWS

SEQ ID NO: 37997 - protein, 319 aa, Zea mays subsp. mays
  peptide (1)..(319): Ceres Seq. ID no. 12353167
  misc_feature (1)..(319): NCBI GI NO: 10177809 NR Description: gene_id:MKD15.6~unknown protein
  misc_feature (1)..(319): NCBI GI NO: 22327005 NR Description: unknown protein; protein id: At5g23200
  misc_feature (1)..(311): NCBI GI NO: 15241572 NR Description: hypothetical protein
  misc_feature (1)..(311): NCBI GI NO: 26453064 NR Description: unknown protein [Arabidopsis thaliana]
  misc_feature (1)..(244): NCBI GI NO: 11358190 NR Description: hypothetical protein T22D6
MCQAMDSILCPDTINDPSKGPSEAHNHSQRSGLSFAVGGAASANKQSAIIPATRPLTRAELSKKFRDHFGYTLDIGPSGIPHKDAGQGLFLSGQANAGAVLAIYPGVIYSPAYYRYIPGYPRIDVCNNYLITRYDGTIIDAKPWCFGGETRALWDGSDLVDYNAMAPKGSENNSDRVWRMLSKPLEKGVRENFGEVLERRNPLAFGHFANHPPKGSSPNVMICPYDFPLTEKDMRVYIPNITFGGQETIRMKRFGSFYFKSGGSDNQAGDSLVLKTLVLVSTRSICDEELFLNYRYSNSKRRPEWYSPVDEEEDKRRWS

SEQ ID NO: 37998 - protein, 315 aa, Zea mays subsp. mays
  peptide (1)..(315): Ceres Seq. ID no. 12353168
  misc_feature (1)..(315): NCBI GI NO: 10177809 NR Description: gene_id:MKD15.6~unknown protein
  misc_feature (1)..(315): NCBI GI NO: 22327005 NR Description: unknown protein; protein id: At5g23200
  misc_feature (1)..(307): NCBI GI NO: 15241572 NR Description: hypothetical protein
  misc_feature (1)..(307): NCBI GI NO: 26453064 NR Description: unknown protein [Arabidopsis thaliana]
  misc_feature (1)..(240): NCBI GI NO: 11358190 NR Description: hypothetical protein T22D6
MDSILCPDTINDPSKGPSEAHNHSQRSGLSFAVGGAASANKQSAIIPATRPLTRAELSKKFRDHFGYTLDIGPSGIPHKDAGQGLFLSGQANAGAVLAIYPGVIYSPAYYRYIPGYPRIDVCNNYLITRYDGTIIDAKPWCFGGETRALWDGSDLVDYNAMAPKGSENNSDRVWRMLSKPLEKGVRENFGEVLERRNPLAFGHFANHPPKGSSPNVMICPYDFPLTEKDMRVYIPNITFGGQETIRMKRFGSFYFKSGGSDNQAGDSLVLKTLVLVSTRSICDEELFLNYRYSNSKRRPEWYSPVDEEEDKRRWS

SEQ ID NO: 37999 - DNA, 1681 bp, Zea mays subsp. mays
  misc_feature (1)..(1681): Ceres Seq. ID no. 12353169
aaaccccgtcccaacccccactacggccttccccccatggctcccctggcctcccttcctctcccgcccagtactgccgtcaccgctcgcttcctcgccgcccccgccatccgcgtgatcagcccatcgcggcccgcgctgccgctcctctcatccgcctccgcaggcggcttccctcacgcctctcgcgctccctgcagtgccgcccgcgagcaccgccgcggcaccgtgcgggaatgctctcgagctgatgctgctggagcagctccattatcaaagacactgttagacctcaaggattcctgctggagatttttaaggccacatacaatccgaggaactgctttaggatccatagcattggttgcgagagccttgatagagaattcccatctgataaactggtggttgatattcaaagcattctatggacttggggcattgatatttggcaatggttacatagttgggattaatcagatctatgatgttgctattgacaagataaacaagccatatttacccattgctgctggtgatctctcaattcagtcagcatggttgttggtgatattatttgcagctgcaggtttttcaattgttatatcaaactttggacctttcattacctctctatactgccttggcctatttcttggcactatatattctgttcctccattcagactgaagagatatccggttgctgcttttcttatcattgcaacggttcgtggtttccttctcaactttggcgtgtactatgctactagggctgcactaggtcttacattccaatggagctcccctgttgctttcattacatgcttcgtgacactatttgctttggtcattgctataaccaaagatctccctgatgttgaaggagatcgcaagtatcaaatatcaactttggcaacaaagcttggtgtcagaaatattgcattccttggatctggtttattattagcaaactatattgctgctattgctgtagcttttaccatgcctcaggctttcaggtgcactgtaatggttcctgtgcatgctgtccttgctggtggtttaattttccagacatgggttctggagcaagcgaagtacagaaaggatgctatttcgcagtactatcggttcatctggaatctcttctatgctgaatatatcttcttcccgttaatatagagagatcttgtagttcatcttgatcttgggctacagcctaattcatggtgaaaagagggagaagttggcaaagtgaggtctgtcgtgcatattttcaacggaaacaatggagtagcaatattgctatgctagggttctgaagttgtaggagcttttctaagcttttacgatgttgaaggcgttgttggagctgtggaagctgttttccttttttttccttttgtatcaacagtgtcgcgttctgtacggtcttacttggaagtgctttgacctttgagcacatgggttgaagcttgagatctggtcccgaacaggtggcggtggaacggccaagacaagcttgtttcatgccactcgaggtcgaggctaaaccactacggcgtgctcttccatgaaacgcagaaaactagggaaatgactatatatatggtgcaatacgttgtatattttctgagtttcagctcgtatatatagtaggaacctcaacttttacctc

SEQ ID NO: 38000 - protein, 394 aa, Zea mays subsp. mays
  peptide (1)..(394): Ceres Seq. ID no. 12353170
  misc_feature (112)..(357): Pfam Name: Pfam Description:  UbiA prenyltransferase family
  misc_feature (13)..(394): NCBI GI NO: 34393498 NR Description: putative tocopherol polyprenyltransferase
  misc_feature (87)..(394): NCBI GI NO: 30681973 NR Description: UbiA prenyltransferase family
  misc_feature (10)..(370): NCBI GI NO: 10998133 NR Description: dbj|BAA17774
  misc_feature (103)..(393): NCBI GI NO: 23125851 NR Description: hypothetical protein [Nostoc punctiforme]
  misc_feature (101)..(254): NCBI GI NO: 23039416 NR Description: hypothetical protein
  misc_feature (274)..(393): NCBI GI NO: 23039416 NR Description: hypothetical protein
  misc_feature (103)..(393): NCBI GI NO: 16330366 NR Description: unknown protein [Synechocystis sp. PCC 6803]
  misc_feature (103)..(393): NCBI GI NO: 17230940 NR Description: hypothetical protein [Nostoc sp. PCC 7120]
  misc_feature (103)..(393): NCBI GI NO: 37519852 NR Description: unknown protein [Gloeobacter violaceus]
  misc_feature (93)..(394): NCBI GI NO: 30680535 NR Description: tocopherol polyprenyltransferase
KPRPNPHYGLPPMAPLASLPLPPSTAVTARFLAAPAIRVISPSRPALPLLSSASAGGFPHASRAPCSAAREHRRGTVRECSRADAAGAAPLSKTLLDLKDSCWRFLRPHTIRGTALGSIALVARALIENSHLINWWLIFKAFYGLGALIFGNGYIVGINQIYDVAIDKINKPYLPIAAGDLSIQSAWLLVILFAAAGFSIVISNFGPFITSLYCLGLFLGTIYSVPPFRLKRYPVAAFLIIATVRGFLLNFGVYYATRAALGLTFQWSSPVAFITCFVTLFALVIAITKDLPDVEGDRKYQISTLATKLGVRNIAFLGSGLLLANYIAAIAVAFTMPQAFRCTVMVPVHAVLAGGLIFQTWVLEQAKYRKDAISQYYRFIWNLFYAEYIFFPLI

SEQ ID NO: 38001 - protein, 382 aa, Zea mays subsp. mays; identical to SEQ ID NO: 33683
  peptide (1)..(382): Ceres Seq. ID no. 12353171
  misc_feature (100)..(345): Pfam Name: Pfam Description:  UbiA prenyltransferase family
  misc_feature (1)..(382): NCBI GI NO: 34393498 NR Description: putative tocopherol polyprenyltransferase
  misc_feature (75)..(382): NCBI GI NO: 30681973 NR Description: UbiA prenyltransferase family
  misc_feature (1)..(358): NCBI GI NO: 10998133 NR Description: dbj|BAA17774
  misc_feature (91)..(381): NCBI GI NO: 23125851 NR Description: hypothetical protein [Nostoc punctiforme]
  misc_feature (89)..(242): NCBI GI NO: 23039416 NR Description: hypothetical protein
  misc_feature (262)..(381): NCBI GI NO: 23039416 NR Description: hypothetical protein
  misc_feature (91)..(381): NCBI GI NO: 16330366 NR Description: unknown protein [Synechocystis sp. PCC 6803]
  misc_feature (91)..(381): NCBI GI NO: 17230940 NR Description: hypothetical protein [Nostoc sp. PCC 7120]
  misc_feature (91)..(381): NCBI GI NO: 37519852 NR Description: unknown protein [Gloeobacter violaceus]
  misc_feature (81)..(382): NCBI GI NO: 30680535 NR Description: tocopherol polyprenyltransferase

SEQ ID NO: 38002 - DNA, 1539 bp, Zea mays subsp. mays
  misc_feature (1)..(1539): Ceres Seq. ID no. 12352768
ataccggatgtgcagcgcagggtcaacttcgtcaggtttcttggctccaacaaccttcctgggtcactctaaattgtaaagagatggggtgtggcccatcgatccccgacaagtacacgataggtgggaaggggcgcaagcgccggagcgtcatacaggaggttgccgtgttcgtgcccaccatccgcatcccagtggcctctgacatagctcatccactcaggggaatagtttccaaggatcttgtcgaccgactctccacactccgtgcccatgtcgcctcgctggctgaagaaatctatcacgcggacgtatcagctgttcaggaactgcagcatgcgttagaggagtacttgccagttgttcttggtttaacaacgaaatagagccgtcttgaatcgtcagtacagttcagatggaagaccttagacgacgaccaggagtgttgtctggcgagcgcgtggtatgaggtgctctcggtggtccacatgatggccatgcttgcgttgtttcaggctaacctattgctcatcccaaagagcagccaaggtggtggtgaaaggaaggtagcagaagacgcaaagaaggatgtcgtcgattcgttgctccgggcgtcgggatgcttagactactccgtgcatcgcatacttgttcagatacctgcgcaagtcaagaagagttttcccagttacttgcaggagggcatgcttgaggccatctcaattcaggcattggctcagtgtgtggaaatacagcttggcttggcttctgaatgtgagaaggcaacgctgtcagtaaagaggaggctagcttgtgagcaagtcagctatttttctcaggctcactattgtctgtcgggatgcgatacaagtgactcgtacgggaagaagcttctgctgttcctcaagtggaagtggatggaggccaaggctgtagcgtattactaccatggtctggtgctcgacaagggcggcgaaccggcaaaccatatcagtgcagtctgctgcctctctgcagctgatgacctgctctcagacagcaaaagggcttgcttgagtttttgcttggcaaatcctgtcacgagggtgcctcctccttggggtgtcatgaaaaacatgcacaaaaagatcccagatgtcgcttacaagaagttccaagcgcacgggcatctgtttgagcaaaacaagaacagcgcactccaatccgttcctgacctaccagagtttgcgctgtcgctgagaccggatggatacgagttgccaatcactgattcgatctgggagaatgttgatggccaacctcagattcagagcctcaaggagcatatgatagatgacgaagatgaagtaggcacaaaatgatagttctcacttccaaatgcttcttttcattgtaccaccaaaagtagcagagttcaaaaacgcttaatccaaaatgttttggattcagcaaatggctcaactgaaaaaggaatcgcgatctctgtattattgcaagtattaccatatggtatagtaaagtcttatgtgtaatagaatc

SEQ ID NO: 38003 - protein, 290 aa, Zea mays subsp. mays
  peptide (1)..(290): Ceres Seq. ID no. 12352769
  misc_feature (1)..(263): NCBI GI NO: 30684716 NR Description: expressed protein [Arabidopsis thaliana]
  misc_feature (1)..(270): NCBI GI NO: 38344447 NR Description: OSJNBa0038O10.19
  misc_feature (1)..(264): NCBI GI NO: 15219459 NR Description: hypothetical protein; protein id: At1g73390
  misc_feature (1)..(262): NCBI GI NO: 25372891 NR Description: protein F2H15.16 [imported] - Arabidopsis thaliana
  misc_feature (1)..(262): NCBI GI NO: 15220908 NR Description: hypothetical protein; protein id: At1g17940.1
MMAMLALFQANLLLIPKSSQGGGERKVAEDAKKDVVDSLLRASGCLDYSVHRILVQIPAQVKKSFPSYLQEGMLEAISIQALAQCVEIQLGLASECEKATLSVKRRLACEQVSYFSQAHYCLSGCDTSDSYGKKLLLFLKWKWMEAKAVAYYYHGLVLDKGGEPANHISAVCCLSAADDLLSDSKRACLSFCLANPVTRVPPPWGVMKNMHKKIPDVAYKKFQAHGHLFEQNKNSALQSVPDLPEFALSLRPDGYELPITDSIWENVDGQPQIQSLKEHMIDDEDEVGTK

SEQ ID NO: 38004 - protein, 289 aa, Zea mays subsp. mays
  peptide (1)..(289): Ceres Seq. ID no. 12352770
  misc_feature (1)..(262): NCBI GI NO: 30684716 NR Description: expressed protein [Arabidopsis thaliana]
  misc_feature (1)..(269): NCBI GI NO: 38344447 NR Description: OSJNBa0038O10.19
  misc_feature (1)..(263): NCBI GI NO: 15219459 NR Description: hypothetical protein; protein id: At1g73390
  misc_feature (1)..(261): NCBI GI NO: 25372891 NR Description: protein F2H15.16 [imported] - Arabidopsis thaliana
  misc_feature (1)..(261): NCBI GI NO: 15220908 NR Description: hypothetical protein; protein id: At1g17940.1
MAMLALFQANLLLIPKSSQGGGERKVAEDAKKDVVDSLLRASGCLDYSVHRILVQIPAQVKKSFPSYLQEGMLEAISIQALAQCVEIQLGLASECEKATLSVKRRLACEQVSYFSQAHYCLSGCDTSDSYGKKLLLFLKWKWMEAKAVAYYYHGLVLDKGGEPANHISAVCCLSAADDLLSDSKRACLSFCLANPVTRVPPPWGVMKNMHKKIPDVAYKKFQAHGHLFEQNKNSALQSVPDLPEFALSLRPDGYELPITDSIWENVDGQPQIQSLKEHMIDDEDEVGTK

SEQ ID NO: 38005 - protein, 287 aa, Zea mays subsp. mays
  peptide (1)..(287): Ceres Seq. ID no. 12352771
  misc_feature (1)..(260): NCBI GI NO: 30684716 NR Description: expressed protein [Arabidopsis thaliana]
  misc_feature (1)..(267): NCBI GI NO: 38344447 NR Description: OSJNBa0038O10.19
  misc_feature (1)..(261): NCBI GI NO: 15219459 NR Description: hypothetical protein; protein id: At1g73390
  misc_feature (1)..(259): NCBI GI NO: 25372891 NR Description: protein F2H15.16 [imported] - Arabidopsis thaliana
  misc_feature (1)..(259): NCBI GI NO: 15220908 NR Description: hypothetical protein; protein id: At1g17940.1
MLALFQANLLLIPKSSQGGGERKVAEDAKKDVVDSLLRASGCLDYSVHRILVQIPAQVKKSFPSYLQEGMLEAISIQALAQCVEIQLGLASECEKATLSVKRRLACEQVSYFSQAHYCLSGCDTSDSYGKKLLLFLKWKWMEAKAVAYYYHGLVLDKGGEPANHISAVCCLSAADDLLSDSKRACLSFCLANPVTRVPPPWGVMKNMHKKIPDVAYKKFQAHGHLFEQNKNSALQSVPDLPEFALSLRPDGYELPITDSIWENVDGQPQIQSLKEHMIDDEDEVGTK

SEQ ID NO: 38006 - DNA, 1761 bp, Zea mays subsp. mays
  misc_feature (1)..(1761): Ceres Seq. ID no. 12362401
gcgtcgcttccagatccagcgggcggaggagggggtgcggtgcggccgtgaccatgaagcagccgaggggccggcaggagccgcgccgggtgggcaacgccgccatggtcgtcaccatggtcgtctccctctgcgtcctcacgtacatcaaggcgcgatactgctccaaccctttccccaaggcggtggcggaggtggaggtggacgaggactacgacagcacgcggtacaagctgacgggccccgtgggcgaggaggacttcgacccgtcccgccccacctgctacaacaccagcaagcggtcggagcggtgcgccgccgtgggcgacatccgcgtggacggcaaccactcgcggatctacatcagcccgctgtcccgcgagtggcggaccaagccgtacgcgcggcggcacgacgccgtggccatggacgacgtgcgcgagttcacgctggtccccttcggcggccccaacgacacggccgtgccgccgctctgcacgcgcacccactccgtcccgggcttcctcttctccagcggcgggttcgcgggcaacctgtaccacgactacgccgacgtgctggtgccgctcttcgccagcaccaaccacctgggcggggaggtccagttcctgctggccgacatcaaggactggtgggccgacaagttccgcccggtcttccgccagctctcccgctacgacgtcatcgacgtgaacaacgaccgcgaggtgcactgcttcccgcggaccatcatcggctccaccttccaccgcgccatgggcatcgacccctcgcgctcgcccggcggcgtcacggtggccgacttcaagcgcctgctccgccgcgcgttccggctggagcgcgccgtcgcgtcgcggtcgggggcgccccggcgccgggaccggccccgcctcctcatcatctcgcgcaagagctcgcgccgcttcgtcaacgagcgcgccatggcgcgcgccgcggcggccgcccggttcgacgtgcggatcgccgagcccgacaaccacacggacatgcccaacttcgcgaggctggtgaactcggcggacgtgatgatgggcgtgcacggcgccgggctcaccaacatggtgttcctgcccagccgcgccgtgctggtgcaggtggtgccgttcggcgggctggagtggctcacccgcgtcaccttcaaggaccccgcaagggacatggacgtcacgtacatggagtacaacgtgtcgctggaggagagctcgctcagggacctctacccggaggaccacttctacctgaagcacccctacgacgtgcacaagaaggggtgggacgccatcaagacggtgtacctggacaagcagaacgtcaggctcaacctcactaggttcaccaggacgctggagcaggcgcgagatctcttgccgacgccatgactgatgatgaccccccctctttcctctgctctgctgcaggtttcattcacttcagatcagctgctcacctcacttcacgccgtgtctctcttttttttttctgttgttgttctatacatatacttgtttcctcttctcctttcccctctctctctagtctctccctctccactcttgtggcggcaagattcatttctttcattgttttgtttttttgttgttgttgaggaaggataggaacaaaaacaaggtattgtcgtgtccaaggttaatctacacaaacacacactgtaaatgatcgattgattgctgtcagtagaggcgaacacaaggaataggt

SEQ ID NO: 38007 - protein, 472 aa, Zea mays subsp. mays
  peptide (1)..(472): Ceres Seq. ID no. 12362402
  misc_feature (90)..(470): NCBI GI NO: 37535628 NR Description: unknown protein
  misc_feature (91)..(465): NCBI GI NO: 34895350 NR Description: P0494A10.29
  misc_feature (60)..(469): NCBI GI NO: 34895346 NR Description: P0494A10.27
  misc_feature (59)..(465): NCBI GI NO: 31296712 NR Description: HGA1 [Hordeum vulgare]
  misc_feature (90)..(469): NCBI GI NO: 34896984 NR Description: unknown protein [Oryza sativa]
  misc_feature (91)..(469): NCBI GI NO: 9294073 NR Description: emb|CAB68144
  misc_feature (91)..(469): NCBI GI NO: 30684813 NR Description: expressed protein [Arabidopsis thaliana]
  misc_feature (64)..(469): NCBI GI NO: 34895342 NR Description: P0494A10.25
  misc_feature (24)..(469): NCBI GI NO: 15229594 NR Description: hypothetical protein; protein id: At3g18180.1
  misc_feature (91)..(471): NCBI GI NO: 34895336 NR Description: P0494A10.22
VASRSSGRRRGCGAAVTMKQPRGRQEPRRVGNAAMVVTMVVSLCVLTYIKARYCSNPFPKAVAEVEVDEDYDSTRYKLTGPVGEEDFDPSRPTCYNTSKRSERCAAVGDIRVDGNHSRIYISPLSREWRTKPYARRHDAVAMDDVREFTLVPFGGPNDTAVPPLCTRTHSVPGFLFSSGGFAGNLYHDYADVLVPLFASTNHLGGEVQFLLADIKDWWADKFRPVFRQLSRYDVIDVNNDREVHCFPRTIIGSTFHRAMGIDPSRSPGGVTVADFKRLLRRAFRLERAVASRSGAPRRRDRPRLLIISRKSSRRFVNERAMARAAAAARFDVRIAEPDNHTDMPNFARLVNSADVMMGVHGAGLTNMVFLPSRAVLVQVVPFGGLEWLTRVTFKDPARDMDVTYMEYNVSLEESSLRDLYPEDHFYLKHPYDVHKKGWDAIKTVYLDKQNVRLNLTRFTRTLEQARDLLPTP

SEQ ID NO: 38008 - protein, 456 aa, Zea mays subsp. mays
  peptide (1)..(456): Ceres Seq. ID no. 12362403
  misc_feature (25)..(456): NCBI GI NO: 34495553 NR Description: conserved hypothetical protein
RRFQIQRAEEGVRCGRDHEAAEGPAGAAPGGQRRHGRHHGRLPLRPHVHQGAILLQPFPQGGGGGGGGRGLRQHAVQADGPRGRGGLRPVPPHLLQHQQAVGAVRRRGRHPRGRQPLADLHQPAVPRVADQAVRAAARRRGHGRRARVHAGPLRRPQRHGRAAALHAHPLRPGLPLLQRRVRGQPVPRLRRRAGAALRQHQPPGRGGPVPAGRHQGLVGRQVPPGLPPALPLRRHRREQRPRGALLPADHHRLHLPPRHGHRPLALARRRHGGRLQAPAPPRVPAGARRRVAVGGAPAPGPAPPPHHLAQELAPLRQRARHGARRGGRPVRRADRRARQPHGHAQLREAGELGGRDDGRARRRAHQHGVPAQPRRAGAGGAVRRAGVAHPRHLQGPRKGHGRHVHGVQRVAGGELAQGPLPGGPLLPEAPLRRAQEGVGRHQDGVPGQAERQAQPH

SEQ ID NO: 38009 - protein, 455 aa, Zea mays subsp. mays
  peptide (1)..(455): Ceres Seq. ID no. 12362404
  misc_feature (73)..(453): NCBI GI NO: 37535628 NR Description: unknown protein
  misc_feature (74)..(448): NCBI GI NO: 34895350 NR Description: P0494A10.29
  misc_feature (43)..(452): NCBI GI NO: 34895346 NR Description: P0494A10.27
  misc_feature (42)..(448): NCBI GI NO: 31296712 NR Description: HGA1 [Hordeum vulgare]
  misc_feature (73)..(452): NCBI GI NO: 34896984 NR Description: unknown protein [Oryza sativa]
  misc_feature (74)..(452): NCBI GI NO: 9294073 NR Description: emb|CAB68144
  misc_feature (74)..(452): NCBI GI NO: 30684813 NR Description: expressed protein [Arabidopsis thaliana]
  misc_feature (47)..(452): NCBI GI NO: 34895342 NR Description: P0494A10.25
  misc_feature (7)..(452): NCBI GI NO: 15229594 NR Description: hypothetical protein; protein id: At3g18180.1
  misc_feature (74)..(454): NCBI GI NO: 34895336 NR Description: P0494A10.22
MKQPRGRQEPRRVGNAAMVVTMVVSLCVLTYIKARYCSNPFPKAVAEVEVDEDYDSTRYKLTGPVGEEDFDPSRPTCYNTSKRSERCAAVGDIRVDGNHSRIYISPLSREWRTKPYARRHDAVAMDDVREFTLVPFGGPNDTAVPPLCTRTHSVPGFLFSSGGFAGNLYHDYADVLVPLFASTNHLGGEVQFLLADIKDWWADKFRPVFRQLSRYDVIDVNNDREVHCFPRTIIGSTFHRAMGIDPSRSPGGVTVADFKRLLRRAFRLERAVASRSGAPRRRDRPRLLIISRKSSRRFVNERAMARAAAAARFDVRIAEPDNHTDMPNFARLVNSADVMMGVHGAGLTNMVFLPSRAVLVQVVPFGGLEWLTRVTFKDPARDMDVTYMEYNVSLEESSLRDLYPEDHFYLKHPYDVHKKGWDAIKTVYLDKQNVRLNLTRFTRTLEQARDLLPTP

SEQ ID NO: 38010 - DNA, 1314 bp, Zea mays subsp. mays
  misc_feature (1)..(1314): Ceres Seq. ID no. 12358866
acctcacacaaacacataccgaatccagccccgcacccaccgttgcgcccgccgcccgagtcgccgtggccaccgcggcagcgccctcccggcggtgagcgcggcccagcgcgcgcgccgcggccaccgccgcgctcgaggcgcccagatctgggccctagcaccccctccctcctataggcctttccccgctgcatcgccatggcgcggcgactgctgtggtggacagcgctgctcctcccttccctcctcgccggcgttggtcccgccgccgccgccgccgccgcatccccgccccacgatgcgtgcctggtgcctaccatcgcggaatccgtccttaggactcccgacacgtgctcgacgctggatcgccgccttggcgacccggtcggcgtcatcgagggagatgaggtgacgttggcaagggcagttaatcttctacacgcaaacaaggatgactacattgccgtacttttctatgcctcgtggtgcccattctcacaggaatgcaaaccgaattttgagacactggcttacttattcccagctatccggcattttgcatttgaggaatctgcaattaggccaagcataatttcgagatacggcatccatggtttcccaacactctttctcttgaactcgaccatgagagtacgatatcatggaccaaggactgttaaatcacttgcagctttctacactgatgtctcaggtatcaatgcatcggtgaagtcaactgcaggggaggccatggtacatcccttggatgatattgagcataaaaaggacgctgaacaggaaaattgcccattctggtgggctcggtcaccagagaatatacttcagcaggatacttatctagcattggcgaccgtatttgtaattttgaggttgctgtatcgtatttttccaaagatagattcctttaccagatgggcatggaggaggcacaatatgtttgcaaaattgatgggagcacatgaatatttcctcacctaccttgagcaagcaagacagaagtttcataggctatacccttcaagttcaaagcgaggaaatctgcaggagggcgcaatgaacgctaccgcttgggcttccaaatcattagcatcagtttcaattggagaaccaagtgcaattggaaggacaaactctacaagtgagctaagatgaaatctgatcttttttgtccccagggattatatgtacagtacagtagagcgatcaggatatgaacacccagaaactgttgtaacggctatattactctttgtatcctccttagaataaatacatccatgatttggctcc

SEQ ID NO: 38011 - protein, 324 aa, Zea mays subsp. mays
  peptide (1)..(324): Ceres Seq. ID no. 12358867
  misc_feature (1)..(324): NCBI GI NO: 29367467 NR Description: disulfide isomerase-like protein
  misc_feature (36)..(322): NCBI GI NO: 18399435 NR Description: expressed protein; protein id: At1g34780
  misc_feature (198)..(322): NCBI GI NO: 15236643 NR Description: putative protein disulfide isomerase
  misc_feature (62)..(171): NCBI GI NO: 15236643 NR Description: putative protein disulfide isomerase
  misc_feature (62)..(313): NCBI GI NO: 18396691 NR Description: expressed protein; protein id: At3g03860
  misc_feature (62)..(313): NCBI GI NO: 6006856 NR Description: unknown protein [Arabidopsis thaliana]
  misc_feature (9)..(313): NCBI GI NO: 30103009 NR Description: unknown protein
  misc_feature (62)..(313): NCBI GI NO: 9758894 NR Description: contains similarity to protein disulfide isomerase-related protein~gene_id:MRG7
  misc_feature (62)..(313): NCBI GI NO: 18418521 NR Description: putative protein; protein id: At5g18120
  misc_feature (62)..(313): NCBI GI NO: 21536613 NR Description: contains similarity to protein disulfide isomerase-related protein
MARRLLWWTALLLPSLLAGVGPAAAAAAASPPHDACLVPTIAESVLRTPDTCSTLDRRLGDPVGVIEGDEVTLARAVNLLHANKDDYIAVLFYASWCPFSQECKPNFETLAYLFPAIRHFAFEESAIRPSIISRYGIHGFPTLFLLNSTMRVRYHGPRTVKSLAAFYTDVSGINASVKSTAGEAMVHPLDDIEHKKDAEQENCPFWWARSPENILQQDTYLALATVFVILRLLYRIFPKIDSFTRWAWRRHNMFAKLMGAHEYFLTYLEQARQKFHRLYPSSSKRGNLQEGAMNATAWASKSLASVSIGEPSAIGRTNSTSELR

SEQ ID NO: 38012 - protein, 175 aa, Zea mays subsp. mays
  peptide (1)..(175): Ceres Seq. ID no. 12358868
  misc_feature (1)..(175): NCBI GI NO: 29367467 NR Description: disulfide isomerase-like protein
  misc_feature (1)..(173): NCBI GI NO: 18399435 NR Description: expressed protein; protein id: At1g34780
  misc_feature (49)..(173): NCBI GI NO: 15236643 NR Description: putative protein disulfide isomerase
  misc_feature (1)..(22): NCBI GI NO: 15236643 NR Description: putative protein disulfide isomerase
  misc_feature (1)..(164): NCBI GI NO: 18396691 NR Description: expressed protein; protein id: At3g03860
  misc_feature (1)..(164): NCBI GI NO: 6006856 NR Description: unknown protein [Arabidopsis thaliana]
  misc_feature (1)..(164): NCBI GI NO: 30103009 NR Description: unknown protein
  misc_feature (1)..(164): NCBI GI NO: 9758894 NR Description: contains similarity to protein disulfide isomerase-related protein~gene_id:MRG7
  misc_feature (1)..(164): NCBI GI NO: 18418521 NR Description: putative protein; protein id: At5g18120
  misc_feature (1)..(164): NCBI GI NO: 21536613 NR Description: contains similarity to protein disulfide isomerase-related protein
MRVRYHGPRTVKSLAAFYTDVSGINASVKSTAGEAMVHPLDDIEHKKDAEQENCPFWWARSPENILQQDTYLALATVFVILRLLYRIFPKIDSFTRWAWRRHNMFAKLMGAHEYFLTYLEQARQKFHRLYPSSSKRGNLQEGAMNATAWASKSLASVSIGEPSAIGRTNSTSELR

SEQ ID NO: 38013 - DNA, 1637 bp, Zea mays subsp. mays
  misc_feature (1)..(1637): Ceres Seq. ID no. 12349722
aaggtcaccaaccacgcacccgcctccgcctgcccgctctcccgccatgaagcagctccacaagtcttcccctacccacgcgccatcgccggcgcacgcaccggctcccaaggccgccaagccggcgcgccctgggccgcgctcctggatcggctacgtcctccgcgagcagcgcctcctcttcgtcctgctcggtgcgctcatcgcctccaccttcttcctcctccggccctacctctcgctctccccgtcttcccacctccccgacgcccgcccgctcttctccttcgccacccgctccggtgttcccgccggcttccgcccgccgcagcgccgcgtcgtcgtaacaggcggggcagggttcgtcggcagccatctcgtcgaccggcttctggagcagggggacagcgtgatcgtggtcgacaacttcttcaccggcaggaaggagaacgtcgcgcaccacctccggaaccccaggttcgagctgctccgccacgatgtagtcgagccaatcctcctcgaggtggaccggatctaccacctcgcgtgccccgcgtcgcctgtgcactacaagtacaacccaatcaagacgatcaagacaaatgtcatgggaactttgaatatgttgggtctggcgaagcgaattggtgcaaggtttttgttgactagcacaagtgaagtttatggtgatccgcttgagcatccacagaaggagtcatactgggggcacgttaatcctataggtgttaggagctgttacgatgaggggaagagaacagcagagactttaactatggactatcatcgtggtggtggtgttgaggtgcgtattgcccgtattttcaatacatatggtcctcgtatgtgcctcgacgatggtcgtgtggtcagcaattttgttgcacaggcactgcgaaggcaaccgatgacagtctatggtgacggaaaacaaactcgaagtttccaatatgttgctgatctggttgctggactgatggctctaatggagagtgatcatattggtcctttcaacttgggaaacccaggagagtttaccatgttggagctagcacaggttgtgaaggaaacaattgacccaatggcaaccattgaattcaaacccaacacagctgatgatccccatatgagaaagccagatatcaccaaggctaagcaactgctacattgggagccaaaggtctctctcaaagaaggccttccgctaatggttcaagatttccgtcaaaggatctcggatgagtaatcaaagcaattcttttttccccgaatgtgccatgcacgtgtttgtaatcagagcaatcgtatgatactggtgaccggtttgattctgaacgatgctgcaactacagtcaggagctcttcaccaactggaggcctggagccctgcagtacgatgtactgtgtacacaacagactgtagaatcacgcaggccccatttggagtgtggggattccatagtatttctacgacatagtactatttctgtgaaatagctgaaaagttcatgggttcgtgtcgatgttttatatatatatcttggtgaggcagaacagaagcaatcaattgttttttgtgcatgtgtgaaattcctgaattgtgggtggtgagagatagg

SEQ ID NO: 38014 - protein, 420 aa, Zea mays subsp. mays
  peptide (1)..(420): Ceres Seq. ID no. 12349723
  misc_feature (113)..(417): Pfam Name: Pfam Description:  NAD dependent epimerase/dehydratase family
  misc_feature (16)..(420): NCBI GI NO: 25396402 NR Description: UDP-glucuronic acid decarboxylase
  misc_feature (200)..(420): NCBI GI NO: 34908082 NR Description: P0506B12.30
  misc_feature (16)..(158): NCBI GI NO: 34908082 NR Description: P0506B12.30
  misc_feature (99)..(420): NCBI GI NO: 17473549 NR Description: dTDP-glucose 4-6-dehydratase-like protein
  misc_feature (16)..(120): NCBI GI NO: 17473549 NR Description: dTDP-glucose 4-6-dehydratase-like protein
  misc_feature (99)..(420): NCBI GI NO: 11270116 NR Description: dTDP-glucose 4-6-dehydratase-like protein -Arabidopsis thaliana
  misc_feature (16)..(120): NCBI GI NO: 11270116 NR Description: dTDP-glucose 4-6-dehydratase-like protein -Arabidopsis thaliana
  misc_feature (97)..(417): NCBI GI NO: 2129578 NR Description: dTDP-glucose 4-6-dehydratase homolog D18 -Arabidopsis thaliana
  misc_feature (97)..(417): NCBI GI NO: 15229334 NR Description: dTDP-glucose 4-6-dehydratase homolog D18
  misc_feature (15)..(118): NCBI GI NO: 2129578 NR Description: dTDP-glucose 4-6-dehydratase homolog D18 -Arabidopsis thaliana
RSPTTHPPPPARSPAMKQLHKSSPTHAPSPAHAPAPKAAKPARPGPRSWIGYVLREQRLLFVLLGALIASTFFLLRPYLSLSPSSHLPDARPLFSFATRSGVPAGFRPPQRRVVVTGGAGFVGSHLVDRLLEQGDSVIVVDNFFTGRKENVAHHLRNPRFELLRHDVVEPILLEVDRIYHLACPASPVHYKYNPIKTIKTNVMGTLNMLGLAKRIGARFLLTSTSEVYGDPLEHPQKESYWGHVNPIGVRSCYDEGKRTAETLTMDYHRGGGVEVRIARIFNTYGPRMCLDDGRVVSNFVAQALRRQPMTVYGDGKQTRSFQYVADLVAGLMALMESDHIGPFNLGNPGEFTMLELAQVVKETIDPMATIEFKPNTADDPHMRKPDITKAKQLLHWEPKVSLKEGLPLMVQDFRQRISDE

SEQ ID NO: 38015 - protein, 405 aa, Zea mays subsp. mays
  peptide (1)..(405): Ceres Seq. ID no. 12349724
  misc_feature (98)..(402): Pfam Name: Pfam Description:  NAD dependent epimerase/dehydratase family
  misc_feature (1)..(405): NCBI GI NO: 25396402 NR Description: UDP-glucuronic acid decarboxylase
  misc_feature (185)..(405): NCBI GI NO: 34908082 NR Description: P0506B12.30
  misc_feature (1)..(143): NCBI GI NO: 34908082 NR Description: P0506B12.30
  misc_feature (84)..(405): NCBI GI NO: 17473549 NR Description: dTDP-glucose 4-6-dehydratase-like protein
  misc_feature (1)..(105): NCBI GI NO: 17473549 NR Description: dTDP-glucose 4-6-dehydratase-like protein
  misc_feature (84)..(405): NCBI GI NO: 11270116 NR Description: dTDP-glucose 4-6-dehydratase-like protein -Arabidopsis thaliana
  misc_feature (1)..(105): NCBI GI NO: 11270116 NR Description: dTDP-glucose 4-6-dehydratase-like protein -Arabidopsis thaliana
  misc_feature (82)..(402): NCBI GI NO: 2129578 NR Description: dTDP-glucose 4-6-dehydratase homolog D18 -Arabidopsis thaliana
  misc_feature (82)..(402): NCBI GI NO: 15229334 NR Description: dTDP-glucose 4-6-dehydratase homolog D18
  misc_feature (1)..(103): NCBI GI NO: 2129578 NR Description: dTDP-glucose 4-6-dehydratase homolog D18 -Arabidopsis thaliana
MKQLHKSSPTHAPSPAHAPAPKAAKPARPGPRSWIGYVLREQRLLFVLLGALIASTFFLLRPYLSLSPSSHLPDARPLFSFATRSGVPAGFRPPQRRVVVTGGAGFVGSHLVDRLLEQGDSVIVVDNFFTGRKENVAHHLRNPRFELLRHDVVEPILLEVDRIYHLACPASPVHYKYNPIKTIKTNVMGTLNMLGLAKRIGARFLLTSTSEVYGDPLEHPQKESYWGHVNPIGVRSCYDEGKRTAETLTMDYHRGGGVEVRIARIFNTYGPRMCLDDGRVVSNFVAQALRRQPMTVYGDGKQTRSFQYVADLVAGLMALMESDHIGPFNLGNPGEFTMLELAQVVKETIDPMATIEFKPNTADDPHMRKPDITKAKQLLHWEPKVSLKEGLPLMVQDFRQRISDE

SEQ ID NO: 38016 - protein, 222 aa, Zea mays subsp. mays
  peptide (1)..(222): Ceres Seq. ID no. 12349725
  misc_feature (7)..(190): NCBI GI NO: 29788822 NR Description: hypothetical protein
KVTNHAPASACPLSRHEAAPQVFPYPRAIAGARTGSQGRQAGAPWAALLDRLRPPRAAPPLRPARCAHRLHLLPPPALPLALPVFPPPRRPPALLLRHPLRCSRRLPPAAAPRRRNRRGRVRRQPSRRPASGAGGQRDRGRQLLHRQEGERRAPPPEPQVRAAPPRCSRANPPRGGPDLPPRVPRVACALQVQPNQDDQDKCHGNFEYVGSGEANWCKVFVD

SEQ ID NO: 38017 - DNA, 1614 bp, Zea mays subsp. mays
  misc_feature (1)..(1614): Ceres Seq. ID no. 12354523
ctcgcaactcgcgattcccaaatcccgatgcgccctcgcgcctagcccctccgccgccgccgccgccaacatcaccttccctgtcacgggacgggccccccccctccaccgcgtcctatgacgtcgccgacctcgcaccacccggactcctccaccccgcacgcggggatcggcaacggcaacggcggcaaccaccacctccacccgccgtctctgaccccggccgctccccccgcgcaggcgcacgggggcccacaggtgcgtctcatgtgcagcttcggcggccgcatcctgccgcgcccgggggaccgccagctgcgctacgtcggcggggagacccgcatcgtgtccttcccgcgcgccgcggcctccttcgccgccctcgtcgccgcgctcgccaaggccgcgcccgcgctcttcgcgcccggaacgcccaggccgtccctcaagtaccagctgccccaggacgacctcgactccctcatctccgtcacctccgacgacgacgtcgaccacctcgtcgacgagctcgaccgcatccacgatctctccgccaacgtcgcccggccgccacgcctccgcgtcttcctcttcgcgcccgcgcccgcgcccgacgccgccttcggctccgtcctctccggcaccgccggcgacgccgcccccagcgaccagtggttcgtcgacgcgctcaacgcccccgcgcctcaccccatcgagcgcgtccgatccgagtcctcctcgatcgtctccgacgtccccgactacctcttcagcctcgacagcccgtccgacgaccccggccccggcccctcgccggctcgcgccaagtccgacgccgcggagactccgcaccaccacggcgacgacgtgccgccttccgctcgacagataccgcacgtcgcaggaggagcgtcatcgtggcccgccccgccgccgccgtacatggcacagcctatgtactacttccccgtgccgccaccggtccactacctcgaccagtctgcgcagagtggctacatgcctcgcccgatctaccacattgtcggtggcggaggaagcgaggcgcctggcggagatcttcacgcggccggcggagtctacggcgtctcgcaccacatgcaggggttcccgccgatgatgtacgcgccgccgcgcgcggtcatctacaactacaagtcggaggggatgccatcgctgcctccggaaggtggggcacactcttcctaggcgcatcggctacttcacatctctgaatcctgattattgttgcagatgcctaagctaaggagttttgcgtggtaatttttttatcgattcgtctaagtcttgttcgttgttttgtatagatggaggggttgatggtgatggatagatattaatgcagctttcgtctagtggaaatatattcgtgaaatgtatatcatactaaatagtatagtatttggtgtgattaattagtattctagttaatgtaatgtgggattcatataatctaggtggttctggtcttatagaaaccatttttgggcattttatatttacataaactggatgttgggtgaatgttctaagcagtatgtgctgtgttgaacctcaatcacttatgagtggttt

SEQ ID NO: 38018 - protein, 416 aa, Zea mays subsp. mays
  peptide (1)..(416): Ceres Seq. ID no. 12354524
  misc_feature (7)..(104): Pfam Name: Pfam Description:  Extensin-like region
  misc_feature (6)..(104): NCBI GI NO: 6523547 NR Description: hydroxyproline-rich glycoprotein DZ-HRGP
  misc_feature (6)..(104): NCBI GI NO: 21322711 NR Description: pherophorin-dz1 protein
  misc_feature (7)..(104): NCBI GI NO: 21322711 NR Description: pherophorin-dz1 protein
  misc_feature (6)..(104): NCBI GI NO: 21322711 NR Description: pherophorin-dz1 protein
  misc_feature (6)..(104): NCBI GI NO: 21322711 NR Description: pherophorin-dz1 protein
  misc_feature (6)..(104): NCBI GI NO: 21322711 NR Description: pherophorin-dz1 protein
  misc_feature (6)..(104): NCBI GI NO: 21322711 NR Description: pherophorin-dz1 protein
  misc_feature (6)..(104): NCBI GI NO: 21322711 NR Description: pherophorin-dz1 protein
  misc_feature (8)..(330): NCBI GI NO: 23018055 NR Description: hypothetical protein [Thermobifida fusca]
  misc_feature (6)..(104): NCBI GI NO: 21322711 NR Description: pherophorin-dz1 protein
RNSRFPNPDAPSRLAPPPPPPPTSPSLSRDGPPPSTASYDVADLAPPGLLHPARGDRQRQRRQPPPPPAVSDPGRSPRAGARGPTGASHVQLRRPHPAAPGGPPAALRRRGDPHRVLPARRGLLRRPRRRARQGRARALRARNAQAVPQVPAAPGRPRLPHLRHLRRRRRPPRRRARPHPRSLRQRRPAATPPRLPLRARARARRRLRLRPLRHRRRRRPQRPVVRRRAQRPRASPHRARPIRVLLDRLRRPRLPLQPRQPVRRPRPRPLAGSRQVRRRGDSAPPRRRRAAFRSTDTARRRRSVIVARPAAAVHGTAYVLLPRAATGPLPRPVCAEWLHASPDLPHCRWRRKRGAWRRSSRGRRSLRRLAPHAGVPADDVRAAARGHLQLQVGGDAIAASGRWGTLFLGASATSHL

SEQ ID NO: 38019 - protein, 369 aa, Zea mays subsp. mays
  peptide (1)..(369): Ceres Seq. ID no. 12354525
  misc_feature (62)..(162): Pfam Name: Pfam Description:  PB1 domain
  misc_feature (30)..(288): NCBI GI NO: 18412822 NR Description: putative protein; protein id: At4g05150
  misc_feature (30)..(288): NCBI GI NO: 25407315 NR Description: hypothetical protein AT4g05150
  misc_feature (23)..(311): NCBI GI NO: 34895646 NR Description: P0480E02.2
  misc_feature (1)..(193): NCBI GI NO: 21553908 NR Description: unknown [Arabidopsis thaliana]
  misc_feature (1)..(193): NCBI GI NO: 18379168 NR Description: expressed protein; protein id: At2g01190
  misc_feature (1)..(209): NCBI GI NO: 15229599 NR Description: unknown protein; protein id: At3g18230.1
  misc_feature (48)..(164): NCBI GI NO: 9293928 NR Description: gb|AAF04880
  misc_feature (48)..(164): NCBI GI NO: 15231568 NR Description: unknown protein; protein id: At3g26510.1
  misc_feature (51)..(193): NCBI GI NO: 25410886 NR Description: hypothetical protein At2g01190
  misc_feature (30)..(244): NCBI GI NO: 15237703 NR Description: putative protein; protein id: At5g64430
MTSPTSHHPDSSTPHAGIGNGNGGNHHLHPPSLTPAAPPAQAHGGPQVRLMCSFGGRILPRPGDRQLRYVGGETRIVSFPRAAASFAALVAALAKAAPALFAPGTPRPSLKYQLPQDDLDSLISVTSDDDVDHLVDELDRIHDLSANVARPPRLRVFLFAPAPAPDAAFGSVLSGTAGDAAPSDQWFVDALNAPAPHPIERVRSESSSIVSDVPDYLFSLDSPSDDPGPGPSPARAKSDAAETPHHHGDDVPPSARQIPHVAGGASSWPAPPPPYMAQPMYYFPVPPPVHYLDQSAQSGYMPRPIYHIVGGGGSEAPGGDLHAAGGVYGVSHHMQGFPPMMYAPPRAVIYNYKSEGMPSLPPEGGAHSS

SEQ ID NO: 38020 - protein, 319 aa, Zea mays subsp. mays
  peptide (1)..(319): Ceres Seq. ID no. 12354526
  misc_feature (12)..(112): Pfam Name: Pfam Description:  PB1 domain
  misc_feature (1)..(238): NCBI GI NO: 18412822 NR Description: putative protein; protein id: At4g05150
  misc_feature (1)..(238): NCBI GI NO: 25407315 NR Description: hypothetical protein AT4g05150
  misc_feature (1)..(261): NCBI GI NO: 34895646 NR Description: P0480E02.2
  misc_feature (1)..(143): NCBI GI NO: 21553908 NR Description: unknown [Arabidopsis thaliana]
  misc_feature (1)..(143): NCBI GI NO: 18379168 NR Description: expressed protein; protein id: At2g01190
  misc_feature (1)..(159): NCBI GI NO: 15229599 NR Description: unknown protein; protein id: At3g18230.1
  misc_feature (1)..(114): NCBI GI NO: 9293928 NR Description: gb|AAF04880
  misc_feature (1)..(114): NCBI GI NO: 15231568 NR Description: unknown protein; protein id: At3g26510.1
  misc_feature (1)..(143): NCBI GI NO: 25410886 NR Description: hypothetical protein At2g01190
  misc_feature (1)..(194): NCBI GI NO: 15237703 NR Description: putative protein; protein id: At5g64430
MCSFGGRILPRPGDRQLRYVGGETRIVSFPRAAASFAALVAALAKAAPALFAPGTPRPSLKYQLPQDDLDSLISVTSDDDVDHLVDELDRIHDLSANVARPPRLRVFLFAPAPAPDAAFGSVLSGTAGDAAPSDQWFVDALNAPAPHPIERVRSESSSIVSDVPDYLFSLDSPSDDPGPGPSPARAKSDAAETPHHHGDDVPPSARQIPHVAGGASSWPAPPPPYMAQPMYYFPVPPPVHYLDQSAQSGYMPRPIYHIVGGGGSEAPGGDLHAAGGVYGVSHHMQGFPPMMYAPPRAVIYNYKSEGMPSLPPEGGAHSS

SEQ ID NO: 38021 - DNA, 1602 bp, Zea mays subsp. mays
  misc_feature (1)..(1602): Ceres Seq. ID no. 12381160
  misc_feature (301)..(301): n is a, c, t, g, unknown, or other
gcacgagaccattacctagaacatcctaatcgaaaagatactgatacacggctcagtggctcacccaagccaagaccaagaaccccgggcggacgaaaagatggccgccgatgccgcacgcacgccggcgccgcacgcgctgctgctcccttacccagcgcagggccacgtgatcccgttcatggagctggccgaccgcctcctcgacaggggcttcgccgtcaccttcgtcaacaccgagttcaaccaccgccgcgtcgtcgtggccgccgccggcggccgggcgcccgatggccggctncggctcgttggtgtcgctgacgggatgggcgacggcgaggaccgcgacaacttcgtccgcctcaacgcctgcatgaaggaggccatgccgctgcggctcgacgcgctcctcgacgccgacgacgagcgcctcggcagggtcacgtgcgtcgtggtcgacgtcggcatgtcctgggcgctggacgcggtcaagcggcgtgggctcccggccgccgcactctggcccgcgtcggcggccgtgctcgccgtcctgttcggcgccaagaagctcatacgcgatggcgtcatcgatgacgacggagctccagtgaagctggagaaccactcgttccggctggccgagtcgatgccccccatggacgccgtcttcctggcgtggaactacatgggcaaccgcgacgtcgagcgcatggtcttccactacctgaccaccactgcgtgggccgccgtggctaaggcggacgtcgtcctctgcaacaccttcgaggacctcgagccggacatcttcggcgcccactccccggcggccgcctccatcctcccgatcggcccgctgcgcacctggcagcgccggacgagcgaggcgccggccgggcacttttggcgcgccgacgacgaggcctgcgcgtccttcctggacgcgcagccccgtgggtccgtgacgtacgtggcgttcgggagcctgacggtcatgagccccgcgcagctccaggagctcgcgctggccctgctggcctccgcccgccccttcctgtgggtgttccggccagggctggcggccgagctcccgcccgcgttcacggatctcctgccacgccatgcgaggggcaaggtggtggagtgggcgccgcaggagaaagtgctcgcgcaccctgctgtcggctgcttcctgacgcattgcgggtggaactcgacgctggagggcgtccgccatggcgtgcctttgctttgttggccctactttagcgaccagttcacgaaccaggcatacatttgtgatatctggaaggtggggttaagggtggtgcccgacggtggtgatggcattgtcgccaaggaaaggatcatggagaggttgacgagcctaatgggtgacagtggtgtgaaggaaagggtgaaaagattgaaggaattggcagagaggagcatggggcctgagggcaaatctttgaagaacatcaacgccttcatggaatccatgacgaagtgattgttattgtgttattgttttattttcgggaatgactaccactgatgtccaacgcatgttccaacatccaacaagatcatacaagatatctg

SEQ ID NO: 38022 - protein, 469 aa, Zea mays subsp. mays
  peptide (1)..(469): Ceres Seq. ID no. 12381161
  misc_feature (11)..(465): Pfam Name: Pfam Description:  UDP-glucoronosyl and UDP-glucosyl transferase
  misc_feature (186)..(469): NCBI GI NO: 37532704 NR Description: putative glucosyltransferase
  misc_feature (10)..(465): NCBI GI NO: 21326125 NR Description: putative glucosyl transferase [Sorghum bicolor]
  misc_feature (10)..(465): NCBI GI NO: 21326124 NR Description: putative glucosyl transferase [Sorghum bicolor]
  misc_feature (12)..(465): NCBI GI NO: 13236658 NR Description: putative glucosyltransferase [Oryza sativa]
  misc_feature (51)..(467): NCBI GI NO: 37532896 NR Description: putative glucosyltransferase
  misc_feature (12)..(469): NCBI GI NO: 13236659 NR Description: putative glucosyltransferase [Oryza sativa]
  misc_feature (12)..(469): NCBI GI NO: 21326123 NR Description: putative glucosyl transferase [Sorghum bicolor]
  misc_feature (12)..(469): NCBI GI NO: 13236656 NR Description: putative glucosyltransferase [Oryza sativa]
  misc_feature (1)..(464): NCBI GI NO: 13236653 NR Description: putative glucosyltransferase [Oryza sativa]
  misc_feature (9)..(465): NCBI GI NO: 21326127 NR Description: putative glucosyl transferase [Sorghum bicolor]
  misc_feature (67)..(67): Xaa is any aa, unknown or other
MAADAARTPAPHALLLPYPAQGHVIPFMELADRLLDRGFAVTFVNTEFNHRRVVVAAAGGRAPDGRXRLVGVADGMGDGEDRDNFVRLNACMKEAMPLRLDALLDADDERLGRVTCVVVDVGMSWALDAVKRRGLPAAALWPASAAVLAVLFGAKKLIRDGVIDDDGAPVKLENHSFRLAESMPPMDAVFLAWNYMGNRDVERMVFHYLTTTAWAAVAKADVVLCNTFEDLEPDIFGAHSPAAASILPIGPLRTWQRRTSEAPAGHFWRADDEACASFLDAQPRGSVTYVAFGSLTVMSPAQLQELALALLASARPFLWVFRPGLAAELPPAFTDLLPRHARGKVVEWAPQEKVLAHPAVGCFLTHCGWNSTLEGVRHGVPLLCWPYFSDQFTNQAYICDIWKVGLRVVPDGGDGIVAKERIMERLTSLMGDSGVKERVKRLKELAERSMGPEGKSLKNINAFMESMTK

SEQ ID NO: 38023 - protein, 442 aa, Zea mays subsp. mays
  peptide (1)..(442): Ceres Seq. ID no. 12381162
  misc_feature (1)..(438): Pfam Name: Pfam Description:  UDP-glucoronosyl and UDP-glucosyl transferase
  misc_feature (159)..(442): NCBI GI NO: 37532704 NR Description: putative glucosyltransferase
  misc_feature (1)..(438): NCBI GI NO: 21326125 NR Description: putative glucosyl transferase [Sorghum bicolor]
  misc_feature (1)..(438): NCBI GI NO: 21326124 NR Description: putative glucosyl transferase [Sorghum bicolor]
  misc_feature (1)..(438): NCBI GI NO: 13236658 NR Description: putative glucosyltransferase [Oryza sativa]
  misc_feature (24)..(440): NCBI GI NO: 37532896 NR Description: putative glucosyltransferase
  misc_feature (1)..(442): NCBI GI NO: 13236659 NR Description: putative glucosyltransferase [Oryza sativa]
  misc_feature (1)..(442): NCBI GI NO: 21326123 NR Description: putative glucosyl transferase [Sorghum bicolor]
  misc_feature (1)..(442): NCBI GI NO: 13236656 NR Description: putative glucosyltransferase [Oryza sativa]
  misc_feature (1)..(437): NCBI GI NO: 13236653 NR Description: putative glucosyltransferase [Oryza sativa]
  misc_feature (1)..(438): NCBI GI NO: 21326127 NR Description: putative glucosyl transferase [Sorghum bicolor]
  misc_feature (40)..(40): Xaa is any aa, unknown or other
MELADRLLDRGFAVTFVNTEFNHRRVVVAAAGGRAPDGRXRLVGVADGMGDGEDRDNFVRLNACMKEAMPLRLDALLDADDERLGRVTCVVVDVGMSWALDAVKRRGLPAAALWPASAAVLAVLFGAKKLIRDGVIDDDGAPVKLENHSFRLAESMPPMDAVFLAWNYMGNRDVERMVFHYLTTTAWAAVAKADVVLCNTFEDLEPDIFGAHSPAAASILPIGPLRTWQRRTSEAPAGHFWRADDEACASFLDAQPRGSVTYVAFGSLTVMSPAQLQELALALLASARPFLWVFRPGLAAELPPAFTDLLPRHARGKVVEWAPQEKVLAHPAVGCFLTHCGWNSTLEGVRHGVPLLCWPYFSDQFTNQAYICDIWKVGLRVVPDGGDGIVAKERIMERLTSLMGDSGVKERVKRLKELAERSMGPEGKSLKNINAFMESMTK

SEQ ID NO: 38024 - protein, 394 aa, Zea mays subsp. mays
  peptide (1)..(394): Ceres Seq. ID no. 12381163
  misc_feature (1)..(390): Pfam Name: Pfam Description:  UDP-glucoronosyl and UDP-glucosyl transferase
  misc_feature (111)..(394): NCBI GI NO: 37532704 NR Description: putative glucosyltransferase
  misc_feature (1)..(390): NCBI GI NO: 21326125 NR Description: putative glucosyl transferase [Sorghum bicolor]
  misc_feature (1)..(390): NCBI GI NO: 21326124 NR Description: putative glucosyl transferase [Sorghum bicolor]
  misc_feature (1)..(390): NCBI GI NO: 13236658 NR Description: putative glucosyltransferase [Oryza sativa]
  misc_feature (1)..(392): NCBI GI NO: 37532896 NR Description: putative glucosyltransferase
  misc_feature (1)..(394): NCBI GI NO: 13236659 NR Description: putative glucosyltransferase [Oryza sativa]
  misc_feature (1)..(394): NCBI GI NO: 21326123 NR Description: putative glucosyl transferase [Sorghum bicolor]
  misc_feature (1)..(394): NCBI GI NO: 13236656 NR Description: putative glucosyltransferase [Oryza sativa]
  misc_feature (1)..(389): NCBI GI NO: 13236653 NR Description: putative glucosyltransferase [Oryza sativa]
  misc_feature (1)..(390): NCBI GI NO: 21326127 NR Description: putative glucosyl transferase [Sorghum bicolor]
MGDGEDRDNFVRLNACMKEAMPLRLDALLDADDERLGRVTCVVVDVGMSWALDAVKRRGLPAAALWPASAAVLAVLFGAKKLIRDGVIDDDGAPVKLENHSFRLAESMPPMDAVFLAWNYMGNRDVERMVFHYLTTTAWAAVAKADVVLCNTFEDLEPDIFGAHSPAAASILPIGPLRTWQRRTSEAPAGHFWRADDEACASFLDAQPRGSVTYVAFGSLTVMSPAQLQELALALLASARPFLWVFRPGLAAELPPAFTDLLPRHARGKVVEWAPQEKVLAHPAVGCFLTHCGWNSTLEGVRHGVPLLCWPYFSDQFTNQAYICDIWKVGLRVVPDGGDGIVAKERIMERLTSLMGDSGVKERVKRLKELAERSMGPEGKSLKNINAFMESMTK

SEQ ID NO: 38025 - DNA, 1282 bp, Zea mays subsp. mays
  misc_feature (1)..(1282): Ceres Seq. ID no. 12352776
acccagacgggtcctggttcctccccctccaagccggctctgaaatttgaggcccatagccccgtcggcccccatcgccacgccgccggccacgccccagacgaccccgcccgccgccgccgcctcccgctccctccgcgcgcagccctcgtccggccgcccgggtccgagcccgctcgctcctcctccccacgttggacagtttaagtgtggcttcattgcatgagtagttgcagttagcgtggcttttctccgtgcttgctcctggtcgtgctttgccttgcaaaggaaggaatcatgacatctgttgttcacagtgtttcaggtgaccacagggctgaggatcaaaatcaacagaagaagcaagctgaacctggggaccagcaagaagccccagttactagttcagatagccaaccaacagtaggcacaccatcaacagattatgtggcaccctatgcccctcatgacatgagccatgcaatgggtcaatacgcttatccaaatattgacccatactatggaagcctttatgcagcagcttacggtggacagccattgatgcatccaccgttagttggaatgcatccggctggcttacctttgcctaccgatgcaattgaagagcctgtgtatgtaaatgcaaagcaatacaatgccatattaagacggcgtcaatctcgggctaaagctgaatcagaacgaaagcttatcaaggggcgtaagccctatctccatgagtcacgtcatcagcatgccttgaaaagggccaggggagctggaggtcggtttctcaactcaaagtcagatgacaaggaagagaactccgactcgagtcacaaagagaatcagaacggagttgcgccccacaggagcggccaaccgtcaacccctccgtctcccaacggtgcatcgtcagctaatcagggcaggcagtcgtgaatgatgattcaaaactcacagctgaagagatttcagcccctgagctagatatggcagcagttttgtacagaaaacgctagtgggcagcagcaacatggtgtcgatcggtcggtgggtcggttgttgtaggacatgttccatagaaaaagcatagacgagtctacaggttttggagccttggtttggtcctctgtgtattcacctttctgtacaatcttagtagcgttgtgtaccttcccctggaaggatagcttcagttagcgcttcagaaagtcaagtgtgtagcatattggcttattgtttgctttgcttggacaatggagatttgggagtggagttc

SEQ ID NO: 38026 - protein, 214 aa, Zea mays subsp. mays
  peptide (1)..(214): Ceres Seq. ID no. 12352777
  misc_feature (109)..(165): Pfam Name: CBF-B/NF-YA Pfam Description: CCAAT-binding transcription factor
  misc_feature (1)..(186): NCBI GI NO: 30691872 NR Description: transcription factor -related
  misc_feature (27)..(190): NCBI GI NO: 38637163 NR Description: putative CCAAT box binding factor/transcriptionfactor Hap2a
  misc_feature (1)..(186): NCBI GI NO: 30691791 NR Description: transcription factor -related
  misc_feature (21)..(186): NCBI GI NO: 25511727 NR Description: F26G16.12 protein - Arabidopsis thaliana
  misc_feature (42)..(207): NCBI GI NO: 38640734 NR Description: transcription factor WAPB [Triticum aestivum]
  misc_feature (1)..(206): NCBI GI NO: 30686189 NR Description: CCAAT-binding transcription factor subunit -related
  misc_feature (10)..(200): NCBI GI NO: 27552556 NR Description: putative CCAAT-binding transcription factor
  misc_feature (2)..(188): NCBI GI NO: 7489565 NR Description: probable transcription factor - rice
  misc_feature (1)..(214): NCBI GI NO: 1173618 NR Description: CCAAT-binding factor B subunit homolog
  misc_feature (1)..(214): NCBI GI NO: 1586551 NR Description: CCAAT-binding factor:SUBUNIT=B
MTSVVHSVSGDHRAEDQNQQKKQAEPGDQQEAPVTSSDSQPTVGTPSTDYVAPYAPHDMSHAMGQYAYPNIDPYYGSLYAAAYGGQPLMHPPLVGMHPAGLPLPTDAIEEPVYVNAKQYNAILRRRQSRAKAESERKLIKGRKPYLHESRHQHALKRARGAGGRFLNSKSDDKEENSDSSHKENQNGVAPHRSGQPSTPPSPNGASSANQGRQS

SEQ ID NO: 38027 - protein, 156 aa, Zea mays subsp. mays
  peptide (1)..(156): Ceres Seq. ID no. 12352778
  misc_feature (51)..(107): Pfam Name: CBF-B/NF-YA Pfam Description: CCAAT-binding transcription factor
  misc_feature (1)..(128): NCBI GI NO: 30691872 NR Description: transcription factor -related
  misc_feature (1)..(132): NCBI GI NO: 38637163 NR Description: putative CCAAT box binding factor/transcriptionfactor Hap2a
  misc_feature (1)..(128): NCBI GI NO: 30691791 NR Description: transcription factor -related
  misc_feature (1)..(128): NCBI GI NO: 25511727 NR Description: F26G16.12 protein - Arabidopsis thaliana
  misc_feature (1)..(149): NCBI GI NO: 38640734 NR Description: transcription factor WAPB [Triticum aestivum]
  misc_feature (1)..(148): NCBI GI NO: 30686189 NR Description: CCAAT-binding transcription factor subunit -related
  misc_feature (1)..(142): NCBI GI NO: 27552556 NR Description: putative CCAAT-binding transcription factor
  misc_feature (1)..(130): NCBI GI NO: 7489565 NR Description: probable transcription factor - rice
  misc_feature (1)..(156): NCBI GI NO: 1173618 NR Description: CCAAT-binding factor B subunit homolog
  misc_feature (1)..(156): NCBI GI NO: 7488444 NR Description: CCAAT-binding factor B chain homolog
MSHAMGQYAYPNIDPYYGSLYAAAYGGQPLMHPPLVGMHPAGLPLPTDAIEEPVYVNAKQYNAILRRRQSRAKAESERKLIKGRKPYLHESRHQHALKRARGAGGRFLNSKSDDKEENSDSSHKENQNGVAPHRSGQPSTPPSPNGASSANQGRQS

SEQ ID NO: 38028 - protein, 152 aa, Zea mays subsp. mays
  peptide (1)..(152): Ceres Seq. ID no. 12352779
  misc_feature (47)..(103): Pfam Name: CBF-B/NF-YA Pfam Description: CCAAT-binding transcription factor
  misc_feature (1)..(124): NCBI GI NO: 30691872 NR Description: transcription factor -related
  misc_feature (1)..(128): NCBI GI NO: 38637163 NR Description: putative CCAAT box binding factor/transcriptionfactor Hap2a
  misc_feature (1)..(124): NCBI GI NO: 30691791 NR Description: transcription factor -related
  misc_feature (1)..(124): NCBI GI NO: 25511727 NR Description: F26G16.12 protein - Arabidopsis thaliana
  misc_feature (1)..(145): NCBI GI NO: 38640734 NR Description: transcription factor WAPB [Triticum aestivum]
  misc_feature (1)..(144): NCBI GI NO: 30686189 NR Description: CCAAT-binding transcription factor subunit -related
  misc_feature (1)..(138): NCBI GI NO: 27552556 NR Description: putative CCAAT-binding transcription factor
  misc_feature (1)..(126): NCBI GI NO: 7489565 NR Description: probable transcription factor - rice
  misc_feature (1)..(152): NCBI GI NO: 1173618 NR Description: CCAAT-binding factor B subunit homolog
  misc_feature (1)..(152): NCBI GI NO: 1586551 NR Description: CCAAT-binding factor:SUBUNIT=B
MGQYAYPNIDPYYGSLYAAAYGGQPLMHPPLVGMHPAGLPLPTDAIEEPVYVNAKQYNAILRRRQSRAKAESERKLIKGRKPYLHESRHQHALKRARGAGGRFLNSKSDDKEENSDSSHKENQNGVAPHRSGQPSTPPSPNGASSANQGRQS

SEQ ID NO: 38029 - DNA, 1680 bp, Zea mays subsp. mays
  misc_feature (1)..(1680): Ceres Seq. ID no. 12360613
  misc_feature (1019)..(1019): n is a, c, t, g, unknown, or other
aaggcctccactcattcctgcccccgacactcccactgccaccagtcctctcaccgccaggcgccagccacagcggcacaatgcagccgcctactacccttctcccgctaggcgccgtcgtggtcgccatcctcctgctcgccaccgccccgagccccgccgtctcccgccaccgccactcgtccgccgcggacacggagacgctcgatgtagccgcctcgctctcccgcgcccgcgccgcgctctccaccgacgccgtctcgctgcaccagtccgcggccgccgccgccgccggggcgaagcgctccccgcgagcgcgggagggcggcctcacgttgcggctccactcccgggacttcctgcccgaggagcaggggcggcacgagacgtaccgctcgctcctgctctcccgcctccgccgcgactcggcgcgcgccgcggcggtgtcggcccgcgcgacgctggcggcggacgccgtgacccggctggacctgcgccccgcgaacgggtcggcggtgttcgcggcgtccgcggcgatccagggccccgtggtgtccggcgtcgggcagggcagcggcgagtacttctcccgcgtgggcatcggcagccccgcgcggcagctgtacatggtgctggacaccggcagcgacgtcacctgggtgcagtgccagccctgcgccgactgctaccagcagtccgacccggtgttcgacccgtccctctccgcctcctacgccgccgtctcctgcgactcccagcgctgccgggacctggacaccgcggcgtgccgcaacgccacgggcgcctgcctctacgaggtggcctacggcgacggctcctacaccgttgggcgacttcgccaccgagacgctcacgctgggggactccaccccggtcggcaacgtcgccatcgggtgcggccacgacaacgagggccttttcgtcggcgccgcggggctgctggcgctgggcggcgggccgctctccttcccgtcccagatctccgcgtccaccttctnctactgcctcgtggaccgcgactccccggccgcgtccacgctccagttcggcgacggcgccgccgaggcgggcaccgtgacggcgcctctcgtgcgcagcccgcgcacgagcaccttctactacgtggcgctgtcgggcatctcggtgggcgggcagccgctgtccatcccggcatccgccttcgccatggacgccacgtcgggctcgggcggcgtcatcgtggactccggcaccaccgtgacgcggctccagtccgccgcctacgcggcgctccgcgacgccttcgtccagggcgcgccgtcgctgccccggacctccggggtgtcgctgttcgacacgtgctacgacctgtcggaccggacgagcgtggaggtgcccgcggtgtcgctgcggttcgagggcggcggcgcgctgcggctgccggcgaagaactacctgatccccgtggacggagccggcacctactgcctggccttcgcgccgacgaacgcggccgtgtccatcatcgggaacgtgcagcagcagggcacccgcgtcagcttcgacaccgccaggggcgccgtcggcttcacccccaacaagtgctagcctagcctagcctaagcctgccttctggccctgttagccacggttgtcagtagtaatgacaagccggtgttt

SEQ ID NO: 38030 - protein, 536 aa, Zea mays subsp. mays
  peptide (1)..(536): Ceres Seq. ID no. 12360614
  misc_feature (142)..(283): Pfam Name: Pfam Description:  Eukaryotic aspartyl protease
  misc_feature (27)..(283): NCBI GI NO: 34895664 NR Description: nucleoid DNA-binding protein cnd41-like protein
  misc_feature (44)..(283): NCBI GI NO: 15222611 NR Description: hypothetical protein; protein id: At1g25510
  misc_feature (34)..(285): NCBI GI NO: 15229656 NR Description: putative chloroplast nucleoid DNA-binding protein
  misc_feature (34)..(285): NCBI GI NO: 19424106 NR Description: putative chloroplast nucleoid DNA-binding protein
  misc_feature (35)..(283): NCBI GI NO: 15290061 NR Description: nucleoid DNA-binding protein cnd41-like protein
  misc_feature (111)..(285): NCBI GI NO: 28392860 NR Description: unknown protein [Arabidopsis thaliana]
  misc_feature (110)..(283): NCBI GI NO: 15223368 NR Description: chloroplast nucleoid DNA binding protein, putative
  misc_feature (110)..(283): NCBI GI NO: 21594980 NR Description: chloroplast nucleoid DNA binding protein, putative
  misc_feature (138)..(285): NCBI GI NO: 15231010 NR Description: hypothetical protein, 5' partial
  misc_feature (137)..(283): NCBI GI NO: 15228618 NR Description: putative protein; protein id: At3g61820
  misc_feature (339)..(339): Xaa is any aa, unknown or other
GLHSFLPPTLPLPPVLSPPGASHSGTMQPPTTLLPLGAVVVAILLLATAPSPAVSRHRHSSAADTETLDVAASLSRARAALSTDAVSLHQSAAAAAAGAKRSPRAREGGLTLRLHSRDFLPEEQGRHETYRSLLLSRLRRDSARAAAVSARATLAADAVTRLDLRPANGSAVFAASAAIQGPVVSGVGQGSGEYFSRVGIGSPARQLYMVLDTGSDVTWVQCQPCADCYQQSDPVFDPSLSASYAAVSCDSQRCRDLDTAACRNATGACLYEVAYGDGSYTVGRLRHRDAHAGGLHPGRQRRHRVRPRQRGPFRRRRGAAGAGRRAALLPVPDLRVHLXLLPRGPRLPGRVHAPVRRRRRRGGHRDGASRAQPAHEHLLLRGAVGHLGGRAAAVHPGIRLRHGRHVGLGRRHRGLRHHRDAAPVRRLRGAPRRLRPGRAVAAPDLRGVAVRHVLRPVGPDERGGARGVAAVRGRRRAAAAGEELPDPRGRSRHLLPGLRADERGRVHHRERAAAGHPRQLRHRQGRRRLHPQQVLA

SEQ ID NO: 38031 - protein, 510 aa, Zea mays subsp. mays
  peptide (1)..(510): Ceres Seq. ID no. 12360615
  misc_feature (116)..(257): Pfam Name: Pfam Description:  Eukaryotic aspartyl protease
  misc_feature (1)..(257): NCBI GI NO: 34895664 NR Description: nucleoid DNA-binding protein cnd41-like protein
  misc_feature (18)..(257): NCBI GI NO: 15222611 NR Description: hypothetical protein; protein id: At1g25510
  misc_feature (8)..(259): NCBI GI NO: 15229656 NR Description: putative chloroplast nucleoid DNA-binding protein
  misc_feature (8)..(259): NCBI GI NO: 19424106 NR Description: putative chloroplast nucleoid DNA-binding protein
  misc_feature (9)..(257): NCBI GI NO: 15290061 NR Description: nucleoid DNA-binding protein cnd41-like protein
  misc_feature (85)..(259): NCBI GI NO: 28392860 NR Description: unknown protein [Arabidopsis thaliana]
  misc_feature (84)..(257): NCBI GI NO: 15223368 NR Description: chloroplast nucleoid DNA binding protein, putative
  misc_feature (84)..(257): NCBI GI NO: 21594980 NR Description: chloroplast nucleoid DNA binding protein, putative
  misc_feature (112)..(259): NCBI GI NO: 15231010 NR Description: hypothetical protein, 5' partial
  misc_feature (111)..(257): NCBI GI NO: 15228618 NR Description: putative protein; protein id: At3g61820
  misc_feature (313)..(313): Xaa is any aa, unknown or other
MQPPTTLLPLGAVVVAILLLATAPSPAVSRHRHSSAADTETLDVAASLSRARAALSTDAVSLHQSAAAAAAGAKRSPRAREGGLTLRLHSRDFLPEEQGRHETYRSLLLSRLRRDSARAAAVSARATLAADAVTRLDLRPANGSAVFAASAAIQGPVVSGVGQGSGEYFSRVGIGSPARQLYMVLDTGSDVTWVQCQPCADCYQQSDPVFDPSLSASYAAVSCDSQRCRDLDTAACRNATGACLYEVAYGDGSYTVGRLRHRDAHAGGLHPGRQRRHRVRPRQRGPFRRRRGAAGAGRRAALLPVPDLRVHLXLLPRGPRLPGRVHAPVRRRRRRGGHRDGASRAQPAHEHLLLRGAVGHLGGRAAAVHPGIRLRHGRHVGLGRRHRGLRHHRDAAPVRRLRGAPRRLRPGRAVAAPDLRGVAVRHVLRPVGPDERGGARGVAAVRGRRRAAAAGEELPDPRGRSRHLLPGLRADERGRVHHRERAAAGHPRQLRHRQGRRRLHPQQVLA

SEQ ID NO: 38032 - protein, 365 aa, Zea mays subsp. mays
  peptide (1)..(365): Ceres Seq. ID no. 12360616
  misc_feature (284)..(365): NCBI GI NO: 11360494 NR Description: antifreeze glycopeptide AFGP polyprotein precursor
  misc_feature (290)..(365): NCBI GI NO: 28574875 NR Description: CG13731-PA [Drosophila melanogaster]
  misc_feature (286)..(365): NCBI GI NO: 20138131 NR Description: Vegetative cell wall protein gp1 precursor
  misc_feature (35)..(365): NCBI GI NO: 29247944 NR Description: GLP_26_54603_52153 [Giardia lamblia ATCC 50803]
  misc_feature (310)..(365): NCBI GI NO: 23274133 NR Description: Similar to serine/arginine repetitive matrix 1
  misc_feature (5)..(365): NCBI GI NO: 25989119 NR Description: unknown [Streptomyces aureofaciens]
  misc_feature (3)..(365): NCBI GI NO: 5821145 NR Description: RNA binding protein [Homo sapiens]
  misc_feature (8)..(365): NCBI GI NO: 6649242 NR Description: splicing coactivator subunit SRm300 [Homo sapiens]
  misc_feature (3)..(365): NCBI GI NO: 5821143 NR Description: RNA binding protein [Homo sapiens]
  misc_feature (3)..(365): NCBI GI NO: 19923466 NR Description: splicing coactivator subunit SRm300
  misc_feature (340)..(340): Xaa is any aa, unknown or other
RPPLIPAPDTPTATSPLTARRQPQRHNAAAYYPSPARRRRGRHPPARHRPEPRRLPPPPLVRRGHGDARCSRLALPRPRRALHRRRLAAPVRGRRRRRGEALPASAGGRPHVAAPLPGLPARGAGAARDVPLAPALPPPPRLGARRGGVGPRDAGGGRRDPAGPAPRERVGGVRGVRGDPGPRGVRRRAGQRRVLLPRGHRQPRAAAVHGAGHRQRRHLGAVPALRRLLPAVRPGVRPVPLRLLRRRLLRLPALPGPGHRGVPQRHGRLPLRGGLRRRLLHRWATSPPRRSRWGTPPRSATSPSGAATTTRAFSSAPRGCWRWAAGRSPSRPRSPRPPSXTASWTATPRPRPRSSSATAPPRRAP

SEQ ID NO: 38033 - DNA, 1590 bp, Zea mays subsp. mays
  misc_feature (1)..(1590): Ceres Seq. ID no. 12367781
agctttctaagtccagtctcccgggcagaagaggcacgagaggaaggtgggaaaggaaaccacagccgcttctggcgggcgctcaccgtgccccttccgcctcgcctcgcaatggaggtttccaggtggaccccggcggccggcctcctgctcctgttgctcctcccgctcgcggccaccccgtcacgcgccgccacgatggcgagatcgccgtcgtcgtccaccgccgtgttccagctccagggagacgtataccccaccggccactactatgtcacgatgaacattgggaacccagcgaagccctacttcctggacgtggacactggcagcgatctcacctggctgcagtgcgacgcaccctgtcggagttgcaacaaggtgccacatcccttgtatcgaccaacggcaaaccgccttgtaccgtgtgcaaacgcactctgcactgcacttcacagcggacagggctctaataacaagtgcccttcaccaaaacaatgcgactatcagataaagtacaccgacagtgcatcttctcagggtgtgctgatcaacgacagcttctcactgcccatgagatcctccaacattcgtcctggcctcacatttggctgtggatatgaccagcaagtggggaaaaatggcgctgtgcaggcagcgattgacggcatgcttgggctcgggaggggatcagttagccttgtttcacagctcaagcagcaagggatcaccaaaaatgtcgtcggccattgcctaagcacgaatggaggggggttcctcttctttggggatgatgttgtgccttcatcacgtgtaacttgggtgccgatggctcagaggacatctgggaactactactcacctggctcaggaacactgtacttcgatagacgttcactaggcgtgaagccaatggaggtggtatttgacagtggtagcacgtatacttattttactgctcaaccataccaagctgttgtttctgcgctcaaaggtggtctcagcaaatcacttaaacaggtgtcagatcccactctgcctctgtgctggaaagggcagaaagcattcaaatctgtgtttgacgtcaagaatgaattcaagtcaatgtttctgagcttttccagtgccaagaatgccgccatggagatcccacctgaaaactacctcattgtcacaaaaaatggaaatgtgtgcctgggcattcttgatggaacggctgccaagctgagtttcaacgtaattggagacatcacgatgcaggatcagatggtgatctatgacaacgagaaatcgcagctgggatgggcgcgtggggcatgcactaggagcgccaagtctattctgtcttcctttccctgagctcagttctatgtacttctgatagagtttaagaaaatcactatatcaaacctcctcgcaatgcatgaatttcctaactgaagagggagggagggagggagggagagagagagagagaatgttcctgtttatgtagagatggagtccaaaatttgtgtgcctgatgagttcttccccatatgatattaactgaaatagtatatcaattgagtgtattccattttaagtttc

SEQ ID NO: 38034 - protein, 452 aa, Zea mays subsp. mays
  peptide (1)..(452): Ceres Seq. ID no. 12367782
  misc_feature (96)..(438): Pfam Name: Pfam Description:  Eukaryotic aspartyl protease
  misc_feature (96)..(452): NCBI GI NO: 21805926 NR Description: nucellin-like aspartic protease [Zea mays]
  misc_feature (57)..(446): NCBI GI NO: 33340111 NR Description: nucellin-like protein [Oryza sativa]
  misc_feature (74)..(444): NCBI GI NO: 18418224 NR Description: nucellin -like protein; protein id: At4g33490
  misc_feature (74)..(444): NCBI GI NO: 26452545 NR Description: putative nucellin [Arabidopsis thaliana]
  misc_feature (50)..(446): NCBI GI NO: 15219354 NR Description: nucellin, putative; protein id: At1g44130.1
  misc_feature (73)..(451): NCBI GI NO: 30699263 NR Description: nucellin protein, putative [Arabidopsis thaliana]
  misc_feature (73)..(451): NCBI GI NO: 25350204 NR Description: nucellin-like protein, 27671-25467
  misc_feature (73)..(442): NCBI GI NO: 30699261 NR Description: nucellin protein, putative [Arabidopsis thaliana]
  misc_feature (74)..(392): NCBI GI NO: 7484812 NR Description: aspartic proteinase homolog F17M5
  misc_feature (43)..(450): NCBI GI NO: 7489412 NR Description: probable aspartic proteinase (EC 3
SFLSPVSRAEEAREEGGKGNHSRFWRALTVPLPPRLAMEVSRWTPAAGLLLLLLLPLAATPSRAATMARSPSSSTAVFQLQGDVYPTGHYYVTMNIGNPAKPYFLDVDTGSDLTWLQCDAPCRSCNKVPHPLYRPTANRLVPCANALCTALHSGQGSNNKCPSPKQCDYQIKYTDSASSQGVLINDSFSLPMRSSNIRPGLTFGCGYDQQVGKNGAVQAAIDGMLGLGRGSVSLVSQLKQQGITKNVVGHCLSTNGGGFLFFGDDVVPSSRVTWVPMAQRTSGNYYSPGSGTLYFDRRSLGVKPMEVVFDSGSTYTYFTAQPYQAVVSALKGGLSKSLKQVSDPTLPLCWKGQKAFKSVFDVKNEFKSMFLSFSSAKNAAMEIPPENYLIVTKNGNVCLGILDGTAAKLSFNVIGDITMQDQMVIYDNEKSQLGWARGACTRSAKSILSSFP

SEQ ID NO: 38035 - protein, 415 aa, Zea mays subsp. mays
  peptide (1)..(415): Ceres Seq. ID no. 12367783
  misc_feature (59)..(401): Pfam Name: Pfam Description:  Eukaryotic aspartyl protease
  misc_feature (59)..(415): NCBI GI NO: 21805926 NR Description: nucellin-like aspartic protease [Zea mays]
  misc_feature (20)..(409): NCBI GI NO: 33340111 NR Description: nucellin-like protein [Oryza sativa]
  misc_feature (37)..(407): NCBI GI NO: 18418224 NR Description: nucellin -like protein; protein id: At4g33490
  misc_feature (37)..(407): NCBI GI NO: 26452545 NR Description: putative nucellin [Arabidopsis thaliana]
  misc_feature (13)..(409): NCBI GI NO: 15219354 NR Description: nucellin, putative; protein id: At1g44130.1
  misc_feature (36)..(414): NCBI GI NO: 30699263 NR Description: nucellin protein, putative [Arabidopsis thaliana]
  misc_feature (36)..(414): NCBI GI NO: 25350204 NR Description: nucellin-like protein, 27671-25467
  misc_feature (36)..(405): NCBI GI NO: 30699261 NR Description: nucellin protein, putative [Arabidopsis thaliana]
  misc_feature (37)..(355): NCBI GI NO: 7484812 NR Description: aspartic proteinase homolog F17M5
  misc_feature (6)..(413): NCBI GI NO: 7489412 NR Description: probable aspartic proteinase (EC 3
MEVSRWTPAAGLLLLLLLPLAATPSRAATMARSPSSSTAVFQLQGDVYPTGHYYVTMNIGNPAKPYFLDVDTGSDLTWLQCDAPCRSCNKVPHPLYRPTANRLVPCANALCTALHSGQGSNNKCPSPKQCDYQIKYTDSASSQGVLINDSFSLPMRSSNIRPGLTFGCGYDQQVGKNGAVQAAIDGMLGLGRGSVSLVSQLKQQGITKNVVGHCLSTNGGGFLFFGDDVVPSSRVTWVPMAQRTSGNYYSPGSGTLYFDRRSLGVKPMEVVFDSGSTYTYFTAQPYQAVVSALKGGLSKSLKQVSDPTLPLCWKGQKAFKSVFDVKNEFKSMFLSFSSAKNAAMEIPPENYLIVTKNGNVCLGILDGTAAKLSFNVIGDITMQDQMVIYDNEKSQLGWARGACTRSAKSILSSFP

SEQ ID NO: 38036 - protein, 386 aa, Zea mays subsp. mays
  peptide (1)..(386): Ceres Seq. ID no. 12367784
  misc_feature (30)..(372): Pfam Name: Pfam Description:  Eukaryotic aspartyl protease
  misc_feature (30)..(386): NCBI GI NO: 21805926 NR Description: nucellin-like aspartic protease [Zea mays]
  misc_feature (1)..(380): NCBI GI NO: 33340111 NR Description: nucellin-like protein [Oryza sativa]
  misc_feature (8)..(378): NCBI GI NO: 18418224 NR Description: nucellin -like protein; protein id: At4g33490
  misc_feature (8)..(378): NCBI GI NO: 26452545 NR Description: putative nucellin [Arabidopsis thaliana]
  misc_feature (1)..(380): NCBI GI NO: 15219354 NR Description: nucellin, putative; protein id: At1g44130.1
  misc_feature (7)..(385): NCBI GI NO: 30699263 NR Description: nucellin protein, putative [Arabidopsis thaliana]
  misc_feature (7)..(385): NCBI GI NO: 25350204 NR Description: nucellin-like protein, 27671-25467
  misc_feature (7)..(376): NCBI GI NO: 30699261 NR Description: nucellin protein, putative [Arabidopsis thaliana]
  misc_feature (8)..(326): NCBI GI NO: 7484812 NR Description: aspartic proteinase homolog F17M5
  misc_feature (1)..(384): NCBI GI NO: 7489412 NR Description: probable aspartic proteinase (EC 3
MARSPSSSTAVFQLQGDVYPTGHYYVTMNIGNPAKPYFLDVDTGSDLTWLQCDAPCRSCNKVPHPLYRPTANRLVPCANALCTALHSGQGSNNKCPSPKQCDYQIKYTDSASSQGVLINDSFSLPMRSSNIRPGLTFGCGYDQQVGKNGAVQAAIDGMLGLGRGSVSLVSQLKQQGITKNVVGHCLSTNGGGFLFFGDDVVPSSRVTWVPMAQRTSGNYYSPGSGTLYFDRRSLGVKPMEVVFDSGSTYTYFTAQPYQAVVSALKGGLSKSLKQVSDPTLPLCWKGQKAFKSVFDVKNEFKSMFLSFSSAKNAAMEIPPENYLIVTKNGNVCLGILDGTAAKLSFNVIGDITMQDQMVIYDNEKSQLGWARGACTRSAKSILSSFP

SEQ ID NO: 38037 - DNA, 1050 bp, Zea mays subsp. mays
  misc_feature (1)..(1050): Ceres Seq. ID no. 12361897
gacatttatggcaaaagagaggtcatacagaagctaagacagcacctcaagaaacgtgatgagatgatcatggagatgcaaactcagattgctgatcttaagaactctcttaacattcaggtgacacagtccagcaatctgcagtctcaattggatgctgccaatcgtgatctgtttgaatctgaacgagagattcagcatctaaggaagattattgcagatcattgtgtcacagaagcactctctcatgataaacctttgcaagctgcgcattggcagccagatgccgcaaatgggcattctaatggctatggtgatggttgtgttgatgatgctgacctgcattgtattagcatcgagaagaggaaggtagaagtagagagggtggagatgctcaagaaagaggtggttgaactgaaggaagtcattgagggaaaggactttgtgcttcagagctacaaggaacagaaggtggaactcttctcaaagatcagggagttgcaggaaaagctctcagcacaagtgccaatcatcttgtaggatctatctgtgatactttttagaagattgaatctaagcataatgttgccatgtcccatgagcagcagagggggtcccgcttcagtgaagattgcagaaggtcttggcatttggcaatcgtcacgcatgccaaacaccatgctaggatctttgtggaatgcttctcttttcctttgaggggagctttgcataatgttaggttgatttgtttctttcttggttgtcataatgttaggttggtttgctttcttccttcttcaatatctagcccttggttgctcaaagtttacaaagggattctttttttcagttgctaggcctcaggtaactcaattgaacttcatactcaagttgctgtacaggttctcagatttcaggagacacagaagtctgtactgtgcctctgcctcctgtttcatgcttttttttttgttaagtgatctttggaatgttaggtccatgacatttctactatgagatttgaagactatggcattgcccttttttgtg

SEQ ID NO: 38038 - protein, 179 aa, Zea mays subsp. mays
  peptide (1)..(179): Ceres Seq. ID no. 12361898
  misc_feature (1)..(179): NCBI GI NO: 7487505 NR Description: hypothetical protein T29A15
  misc_feature (1)..(179): NCBI GI NO: 30687652 NR Description: expressed protein [Arabidopsis thaliana]
  misc_feature (1)..(164): NCBI GI NO: 7487506 NR Description: hypothetical protein T29A15
  misc_feature (1)..(164): NCBI GI NO: 18417030 NR Description: expressed protein; protein id: At4g27620
  misc_feature (1)..(164): NCBI GI NO: 21536672 NR Description: unknown [Arabidopsis thaliana]
  misc_feature (95)..(179): NCBI GI NO: 7487506 NR Description: hypothetical protein T29A15
  misc_feature (95)..(179): NCBI GI NO: 18417030 NR Description: expressed protein; protein id: At4g27620
  misc_feature (95)..(179): NCBI GI NO: 21536672 NR Description: unknown [Arabidopsis thaliana]
DIYGKREVIQKLRQHLKKRDEMIMEMQTQIADLKNSLNIQVTQSSNLQSQLDAANRDLFESEREIQHLRKIIADHCVTEALSHDKPLQAAHWQPDAANGHSNGYGDGCVDDADLHCISIEKRKVEVERVEMLKKEVVELKEVIEGKDFVLQSYKEQKVELFSKIRELQEKLSAQVPIIL

SEQ ID NO: 38039 - protein, 158 aa, Zea mays subsp. mays
  peptide (1)..(158): Ceres Seq. ID no. 12361899
  misc_feature (1)..(158): NCBI GI NO: 7487505 NR Description: hypothetical protein T29A15
  misc_feature (1)..(158): NCBI GI NO: 30687652 NR Description: expressed protein [Arabidopsis thaliana]
  misc_feature (1)..(143): NCBI GI NO: 7487506 NR Description: hypothetical protein T29A15
  misc_feature (1)..(143): NCBI GI NO: 21536672 NR Description: unknown [Arabidopsis thaliana]
  misc_feature (1)..(143): NCBI GI NO: 18417030 NR Description: expressed protein; protein id: At4g27620
  misc_feature (74)..(158): NCBI GI NO: 7487506 NR Description: hypothetical protein T29A15
  misc_feature (74)..(158): NCBI GI NO: 18417030 NR Description: expressed protein; protein id: At4g27620
  misc_feature (74)..(158): NCBI GI NO: 21536672 NR Description: unknown [Arabidopsis thaliana]
MIMEMQTQIADLKNSLNIQVTQSSNLQSQLDAANRDLFESEREIQHLRKIIADHCVTEALSHDKPLQAAHWQPDAANGHSNGYGDGCVDDADLHCISIEKRKVEVERVEMLKKEVVELKEVIEGKDFVLQSYKEQKVELFSKIRELQEKLSAQVPIIL

SEQ ID NO: 38040 - protein, 156 aa, Zea mays subsp. mays
  peptide (1)..(156): Ceres Seq. ID no. 12361900
  misc_feature (1)..(156): NCBI GI NO: 7487505 NR Description: hypothetical protein T29A15
  misc_feature (1)..(156): NCBI GI NO: 30687652 NR Description: expressed protein [Arabidopsis thaliana]
  misc_feature (1)..(141): NCBI GI NO: 7487506 NR Description: hypothetical protein T29A15
  misc_feature (1)..(141): NCBI GI NO: 21536672 NR Description: unknown [Arabidopsis thaliana]
  misc_feature (1)..(141): NCBI GI NO: 18417030 NR Description: expressed protein; protein id: At4g27620
  misc_feature (72)..(156): NCBI GI NO: 7487506 NR Description: hypothetical protein T29A15
  misc_feature (72)..(156): NCBI GI NO: 18417030 NR Description: expressed protein; protein id: At4g27620
  misc_feature (72)..(156): NCBI GI NO: 21536672 NR Description: unknown [Arabidopsis thaliana]
MEMQTQIADLKNSLNIQVTQSSNLQSQLDAANRDLFESEREIQHLRKIIADHCVTEALSHDKPLQAAHWQPDAANGHSNGYGDGCVDDADLHCISIEKRKVEVERVEMLKKEVVELKEVIEGKDFVLQSYKEQKVELFSKIRELQEKLSAQVPIIL

SEQ ID NO: 38041 - DNA, 916 bp, Zea mays subsp. mays
  misc_feature (1)..(916): Ceres Seq. ID no. 12382210
  misc_feature (519)..(519): n is a, c, t, g, unknown, or other
  misc_feature (660)..(660): n is a, c, t, g, unknown, or other
  misc_feature (654)..(654): n is a, c, t, g, unknown, or other
  misc_feature (540)..(540): n is a, c, t, g, unknown, or other
  misc_feature (528)..(528): n is a, c, t, g, unknown, or other
  misc_feature (666)..(666): n is a, c, t, g, unknown, or other
  misc_feature (642)..(642): n is a, c, t, g, unknown, or other
aacacagcacgcaagcacacacaacaaccacacttgcaccgagctagcagccaagatggcgaccaaacacttggctctttgcctccttgttctccttagcataggcatgggcatggccaccgctgctgcaaaccgcaaactgggttatggccccgggggaggaggtggcggtggtggtagcggtggaggcggtggttacggaggaccaggctatgggtccggatcagggtatggtgagggcggtggcagcggaggtgctgctggagggtatggacatggtggcggcggcggtggcggtggtggtgagggcgcgggagctggtggctctgggtacgggtccgggcaaggatctggctacggagctggcagcggtgctgccggtggatatgggagtggcggaggtggtggaggtggaggtggcggtggccagggtggtggttccggatatggccatggaggtggtgaaggatacggctctgggtctggctttggtggtggtgctgctggcggcggcggtgnacatggtgncggtggtggcgncggccaaggtgggtctggctatggctctggctctggctctggctcgggatatggatcaggtgaaggatacggacaaggtggtgctcatggaggaggctatgnaagcggtggtgncggtgnaggtgncggtggtcaaggtggtggtggctctggctatgggtctggatccggctccggttatggaggtggcaacgacaacggacattactaggctctttttcagagctaggaacatgttatacaaatatgtcaccagacatgagtaggtcttgctgcatgggatgctagttgtgtccatcgtgtgtgtaacaccgcaaggcttgtaatttgtcctgtaaactgcttgctgctttacattactggcaacaactaagtg

SEQ ID NO: 38042 - protein, 249 aa, Zea mays subsp. mays
  peptide (1)..(249): Ceres Seq. ID no. 12382211
  misc_feature (48)..(248): Pfam Name: Pfam Description:  Dehydrin
  misc_feature (21)..(249): NCBI GI NO: 37534900 NR Description: putative glycine-rich protein
  misc_feature (21)..(203): NCBI GI NO: 232183 NR Description: Glycine-rich cell wall structural protein 2precursor
  misc_feature (21)..(206): NCBI GI NO: 37534902 NR Description: putative glycine-rich protein
  misc_feature (19)..(249): NCBI GI NO: 121628 NR Description: GLYCINE-RICH CELL WALL STRUCTURAL PROTEIN 1
  misc_feature (21)..(248): NCBI GI NO: 37534920 NR Description: putative glycine-rich protein
  misc_feature (48)..(247): NCBI GI NO: 322647 NR Description: glycine-rich protein GRP22 - rape
  misc_feature (47)..(247): NCBI GI NO: 30679126 NR Description: expressed protein [Arabidopsis thaliana]
  misc_feature (47)..(243): NCBI GI NO: 30679122 NR Description: expressed protein [Arabidopsis thaliana]
  misc_feature (47)..(243): NCBI GI NO: 30679122 NR Description: expressed protein [Arabidopsis thaliana]
  misc_feature (37)..(247): NCBI GI NO: 121627 NR Description: GLYCINE-RICH CELL WALL STRUCTURAL PROTEIN 1PRECURSOR
  misc_feature (173)..(173): Xaa is any aa, unknown or other
  misc_feature (176)..(176): Xaa is any aa, unknown or other
  misc_feature (180)..(180): Xaa is any aa, unknown or other
  misc_feature (214)..(214): Xaa is any aa, unknown or other
  misc_feature (218)..(218): Xaa is any aa, unknown or other
  misc_feature (220)..(220): Xaa is any aa, unknown or other
  misc_feature (222)..(222): Xaa is any aa, unknown or other
TQHASTHNNHTCTELAAKMATKHLALCLLVLLSIGMGMATAAANRKLGYGPGGGGGGGGSGGGGGYGGPGYGSGSGYGEGGGSGGAAGGYGHGGGGGGGGGEGAGAGGSGYGSGQGSGYGAGSGAAGGYGSGGGGGGGGGGGQGGGSGYGHGGGEGYGSGSGFGGGAAGGGGXHGXGGGXGQGGSGYGSGSGSGSGYGSGEGYGQGGAHGGGYXSGGXGXGXGGQGGGGSGYGSGSGSGYGGGNDNGHY

SEQ ID NO: 38043 - protein, 231 aa, Zea mays subsp. mays
  peptide (1)..(231): Ceres Seq. ID no. 12382212
  misc_feature (30)..(230): Pfam Name: Pfam Description:  Dehydrin
  misc_feature (3)..(231): NCBI GI NO: 37534900 NR Description: putative glycine-rich protein
  misc_feature (3)..(185): NCBI GI NO: 232183 NR Description: Glycine-rich cell wall structural protein 2precursor
  misc_feature (3)..(188): NCBI GI NO: 37534902 NR Description: putative glycine-rich protein
  misc_feature (1)..(231): NCBI GI NO: 121628 NR Description: GLYCINE-RICH CELL WALL STRUCTURAL PROTEIN 1
  misc_feature (3)..(230): NCBI GI NO: 37534920 NR Description: putative glycine-rich protein
  misc_feature (30)..(229): NCBI GI NO: 322647 NR Description: glycine-rich protein GRP22 - rape
  misc_feature (29)..(229): NCBI GI NO: 30679126 NR Description: expressed protein [Arabidopsis thaliana]
  misc_feature (29)..(225): NCBI GI NO: 30679122 NR Description: expressed protein [Arabidopsis thaliana]
  misc_feature (29)..(225): NCBI GI NO: 30679122 NR Description: expressed protein [Arabidopsis thaliana]
  misc_feature (19)..(229): NCBI GI NO: 121627 NR Description: GLYCINE-RICH CELL WALL STRUCTURAL PROTEIN 1PRECURSOR
  misc_feature (155)..(155): Xaa is any aa, unknown or other
  misc_feature (158)..(158): Xaa is any aa, unknown or other
  misc_feature (162)..(162): Xaa is any aa, unknown or other
  misc_feature (196)..(196): Xaa is any aa, unknown or other
  misc_feature (200)..(200): Xaa is any aa, unknown or other
  misc_feature (202)..(202): Xaa is any aa, unknown or other
  misc_feature (204)..(204): Xaa is any aa, unknown or other
MATKHLALCLLVLLSIGMGMATAAANRKLGYGPGGGGGGGGSGGGGGYGGPGYGSGSGYGEGGGSGGAAGGYGHGGGGGGGGGEGAGAGGSGYGSGQGSGYGAGSGAAGGYGSGGGGGGGGGGGQGGGSGYGHGGGEGYGSGSGFGGGAAGGGGXHGXGGGXGQGGSGYGSGSGSGSGYGSGEGYGQGGAHGGGYXSGGXGXGXGGQGGGGSGYGSGSGSGYGGGNDNGHY

SEQ ID NO: 38044 - protein, 219 aa, Zea mays subsp. mays
  peptide (1)..(219): Ceres Seq. ID no. 12382213
  misc_feature (125)..(125): Xaa is any aa, unknown or other
  misc_feature (128)..(128): Xaa is any aa, unknown or other
  misc_feature (132)..(132): Xaa is any aa, unknown or other
  misc_feature (166)..(166): Xaa is any aa, unknown or other
  misc_feature (170)..(170): Xaa is any aa, unknown or other
  misc_feature (172)..(172): Xaa is any aa, unknown or other
  misc_feature (174)..(174): Xaa is any aa, unknown or other
MAPGEEVAVVVAVEAVVTEDQAMGPDQGMVRAVAAEVLLEGMDMVAAAVAVVVRARELVALGTGPGKDLATELAAVLPVDMGVAEVVEVEVAVARVVVPDMAMEVVKDTALGLALVVVLLAAAVXMVXVVAXAKVGLAMALALALARDMDQVKDTDKVVLMEEAMXAVVXVXVXVVKVVVALAMGLDPAPVMEVATTTDITRLFFRARNMLYKYVTRHE

SEQ ID NO: 38045 - DNA, 1622 bp, Zea mays subsp. mays
  misc_feature (1)..(1622): Ceres Seq. ID no. 12381158
gcacgagaccattacctagaacatcctaatcgaaaaaaaacccaccaccacaaggaagggaagcgtatcagtatcaccagttcaccatcctcggatccttcgccttaatcgcccgcgtcagccatctcacgtaccggtcctccagtttcctcccatctttcacacacaccacgccacgacccggccccggggtataaaagcactagggcgaagccgcgcaacgactcgatcggctgcagccagggctcgcctcgggggaccgcgtgttgctagcgagctcggtgtcggtgctaccggctgccgccccagtgcgaggcgatggggaggaggctggacgtgctgctggggcggacgacgaagcagacggcgcggctcaagtcgctgctggggctggcggcgacgcgcctcggcgtggtgcggggccaccgccaggtgcggtgcgggcaggcgcgcggggacgtcgagcagctgctccgcctcggccacgcggaccgcgcgctggcccgcgccgagcacgtcgtgcgggagcagaacgcgctcgacgtcctcgccgagctcgaggcctgctgcaacctcatcgccgagcgggccgcgctcgtcgaccacgcgcacaggggggagtgccccgaggagctgcgggaggcggcggcggggctggtatacgccgcggccaggtgcggggaccttccggagctgcaagaggtccgggccatcctcgccgccaagttcggcagggagttcgtctccgccgcgtccaacctccgcagcgggtgcggggtcaaccccaagatcgtgcagaagctgtcgaccaagcagccgagcctggagagccgacagctggtgctacaggagatcgccgccgacaaagggatcgccgtgcgcatctacgagccgcctcctccctacgaggactcggggagctccaaccacagccataggaagacggagcacgatggcgagaggatcagtaggacgccaccagttgatggccgcgacgaagacatctccggccactcggcgcagaggtacaaggacgtggaagcggcagctcaggccgcgttcgagtcggccgcctcggcagccgccgccgcgaaggcggccatggagctctcgcgtggggagcccagggggcccggtgacaggaggagggcagggaggacgcaaatggatgatcctgagatcgagaaacaagatgaggtgcttcatggaaacaaacccgagaagattgggcatggccggaattacagttcagatgttgagatcacgccggaggacgacgaggcaaaccacggcaacgttgcagtggacgaaccgaaacagcgggagcctgccaggggaaagccggcatcggtcagaacaaagtggggattttagcggcatccagatcgcaacggaggagatggtttcttcgtcttgtcaatatattggcatggaagttgttttttttcactgtagtagtatgtaattaacgacggttaccaaaaaaacacatgagcgatttgatttattgccaacagtttgcacactagtacactatgcctgtactaatgctatgttctgttaatgtgtagcgttaattgtagtacatgttctttggaggaaaaatattgatgttgcaatcc

SEQ ID NO: 38046 - protein, 351 aa, Zea mays subsp. mays
  peptide (1)..(351): Ceres Seq. ID no. 12381159
  misc_feature (25)..(148): Pfam Name: Pfam Description:  Eukaryotic protein of unknown function, DUF292
  misc_feature (1)..(348): NCBI GI NO: 13702817 NR Description: unknown protein [Oryza sativa]
  misc_feature (1)..(321): NCBI GI NO: 15222251 NR Description: hypothetical protein; protein id: At1g13340.1
  misc_feature (25)..(265): NCBI GI NO: 15237108 NR Description: putative protein; protein id: At4g35730.1
  misc_feature (17)..(269): NCBI GI NO: 40253290 NR Description: unknown protein
  misc_feature (5)..(182): NCBI GI NO: 15218545 NR Description: hypothetical protein; protein id: At1g34220.1
  misc_feature (65)..(274): NCBI GI NO: 34911298 NR Description: P0519D04.18
  misc_feature (17)..(261): NCBI GI NO: 21595428 NR Description: unknown [Arabidopsis thaliana]
  misc_feature (17)..(242): NCBI GI NO: 18395668 NR Description: expressed protein; protein id: At1g25420
  misc_feature (5)..(176): NCBI GI NO: 33589706 NR Description: At1g34220 [Arabidopsis thaliana]
  misc_feature (18)..(272): NCBI GI NO: 34910388 NR Description: P0692C11.15
MGRRLDVLLGRTTKQTARLKSLLGLAATRLGVVRGHRQVRCGQARGDVEQLLRLGHADRALARAEHVVREQNALDVLAELEACCNLIAERAALVDHAHRGECPEELREAAAGLVYAAARCGDLPELQEVRAILAAKFGREFVSAASNLRSGCGVNPKIVQKLSTKQPSLESRQLVLQEIAADKGIAVRIYEPPPPYEDSGSSNHSHRKTEHDGERISRTPPVDGRDEDISGHSAQRYKDVEAAAQAAFESAASAAAAAKAAMELSRGEPRGPGDRRRAGRTQMDDPEIEKQDEVLHGNKPEKIGHGRNYSSDVEITPEDDEANHGNVAVDEPKQREPARGKPASVRTKWGF

SEQ ID NO: 38047 - DNA, 1224 bp, Zea mays subsp. mays
  misc_feature (1)..(1224): Ceres Seq. ID no. 12406219
gttcgcgttgcccgcgactctctccgtcctcctactctcacacgcttggcgcgcgcgtgcttccacacgtccgtcgcctcgcctggctgattggtttgggacctggctccagcaatggcggtgcaggcgcattatcaccaccaccaccaccaccaccaccgcgagtcccctttcctcgtcagcggcggcgcgccggagggcagccggttggcggcggcgatggagctgcatcaggcgcagaaggaggctactacggcgcagcagcacgctccgcccgacttctcgcatggaggttgcggcggcgggaagaagcggcagcgcgaggcggaccccgtgtcccggcagctcttgtcgttgcagcagcagcaaccacaggcgcagggggcccaagttcatcaacctggcgcaactgcacaagcggccggcgaacgggcctccggctcgacttggacgagggctcggagcacgtgccgtgcacgtcctcggcctcggcgtcgtgtctcctcctctccgaagagctcgccgcgcagcgcgaccagcacaaggacgagatggaacggctgatccaggagcacgcggagaggctccggcgcgcgctggccgacacccggcggcggcactaccgttcgctcgtcggcgcggccgaggcggctgctgctcggcggataagggagaaggagtcggaggcctgggaggccgcgcggcgccgcgccgacctggaggatcgggtcgcgcggctgagggcggaggcggcggcgtggcaggcaaaggagctcgcggaccagtccacggccgcggcgctccacgcgcagctgcagcaggcgaggggcaaggccaccgacgccgaggaagggggcaacgcggcggacgacgccgggtcgtgcttcgtcgacccggacagggtggtggagatcgccccgccgccggccaggccgtgccgggcgtgcaggcggcggtcggcctccgtcgtgctgctcccttgccgccacctctgcgtctgcgccgagtgcgagcccgccgtccccgccgccccctttgccgccgcagctgtcgccgctgcctgccccgtgtgccgtggcgcggtcaccggcacggtgcaagtgttcgtctcgtagcgggagggaaaggttaaaaaaaatggtgctcctgccaaaaggaatggcaggtgaaaatggggaatgaacgatggcaaattgtgtagtggagtggagcgcattacttttt

SEQ ID NO: 38048 - protein, 376 aa, Zea mays subsp. mays
  peptide (1)..(376): Ceres Seq. ID no. 12406220
  misc_feature (141)..(277): NCBI GI NO: 17538706 NR Description: Predicted CDS, cuticle collagen family member
  misc_feature (126)..(376): NCBI GI NO: 23105035 NR Description: hypothetical protein [Azotobacter vinelandii]
  misc_feature (126)..(318): NCBI GI NO: 13562004 NR Description: major ampullate spidroin 2-like protein
  misc_feature (150)..(363): NCBI GI NO: 9625624 NR Description: nuclear antigen EBNA1 [Human herpesvirus 4]
  misc_feature (126)..(318): NCBI GI NO: 13562004 NR Description: major ampullate spidroin 2-like protein
  misc_feature (141)..(320): NCBI GI NO: 465445 NR Description: PROBABLE NUCLEAR ANTIGEN
  misc_feature (99)..(329): NCBI GI NO: 13562004 NR Description: major ampullate spidroin 2-like protein
  misc_feature (99)..(318): NCBI GI NO: 13562004 NR Description: major ampullate spidroin 2-like protein
  misc_feature (99)..(318): NCBI GI NO: 13562004 NR Description: major ampullate spidroin 2-like protein
  misc_feature (99)..(329): NCBI GI NO: 13562004 NR Description: major ampullate spidroin 2-like protein
FALPATLSVLLLSHAWRARASTRPSPRLADWFGTWLQQWRCRRIITTTTTTTTASPLSSSAAARRRAAGWRRRWSCIRRRRRLLRRSSTLRPTSRMEVAAAGRSGSARRTPCPGSSCRCSSSNHRRRGPKFINLAQLHKRPANGPPARLGRGLGARAVHVLGLGVVSPPLRRARRAARPAQGRDGTADPGARGEAPARAGRHPAAALPFARRRGRGGCCSADKGEGVGGLGGRAAPRRPGGSGRAAEGGGGGVAGKGARGPVHGRGAPRAAAAGEGQGHRRRGRGQRGGRRRVVLRRPGQGGGDRPAAGQAVPGVQAAVGLRRAAPLPPPLRLRRVRARRPRRPLCRRSCRRCLPRVPWRGHRHGASVRLVAGGKG

SEQ ID NO: 38049 - protein, 370 aa, Zea mays subsp. mays
  peptide (1)..(370): Ceres Seq. ID no. 12406221
  misc_feature (312)..(344): Pfam Name: RING finger Pfam Description: Zinc finger, C3HC4 type
  misc_feature (97)..(303): NCBI GI NO: 37536932 NR Description: hypothetical protein
  misc_feature (143)..(367): NCBI GI NO: 7485189 NR Description: hypothetical protein - Arabidopsis thaliana
  misc_feature (143)..(367): NCBI GI NO: 30684141 NR Description: conserved hypothetical protein
  misc_feature (169)..(370): NCBI GI NO: 15238000 NR Description: putative protein; protein id: At5g47050
  misc_feature (169)..(344): NCBI GI NO: 18398566 NR Description: expressed protein; protein id: At1g32740
  misc_feature (169)..(356): NCBI GI NO: 21740631 NR Description: OSJNBb0012E08.13
  misc_feature (169)..(344): NCBI GI NO: 6714275 NR Description: F6N18.12 [Arabidopsis thaliana]
  misc_feature (47)..(367): NCBI GI NO: 31126717 NR Description: unknown protein
  misc_feature (143)..(370): NCBI GI NO: 21536706 NR Description: S-ribonuclease binding protein SBP1, putative
  misc_feature (143)..(349): NCBI GI NO: 15220096 NR Description: S-ribonuclease binding protein SBP1, putative
SRCPRLSPSSYSHTLGARVLPHVRRLAWLIGLGPGSSNGGAGALSPPPPPPPPRVPFPRQRRRAGGQPVGGGDGAASGAEGGYYGAAARSARLLAWRLRRREEAAARGGPRVPAALVVAAAATTGAGGPSSSTWRNCTSGRRTGLRLDLDEGSEHVPCTSSASASCLLLSEELAAQRDQHKDEMERLIQEHAERLRRALADTRRRHYRSLVGAAEAAAARRIREKESEAWEAARRRADLEDRVARLRAEAAAWQAKELADQSTAAALHAQLQQARGKATDAEEGGNAADDAGSCFVDPDRVVEIAPPPARPCRACRRRSASVVLLPCRHLCVCAECEPAVPAAPFAAAAVAAACPVCRGAVTGTVQVFVS

SEQ ID NO: 38050 - protein, 281 aa, Zea mays subsp. mays
  peptide (1)..(281): Ceres Seq. ID no. 12406222
  misc_feature (46)..(182): NCBI GI NO: 17538706 NR Description: Predicted CDS, cuticle collagen family member
  misc_feature (31)..(281): NCBI GI NO: 23105035 NR Description: hypothetical protein [Azotobacter vinelandii]
  misc_feature (31)..(223): NCBI GI NO: 13562004 NR Description: major ampullate spidroin 2-like protein
  misc_feature (55)..(268): NCBI GI NO: 9625624 NR Description: nuclear antigen EBNA1 [Human herpesvirus 4]
  misc_feature (31)..(223): NCBI GI NO: 13562004 NR Description: major ampullate spidroin 2-like protein
  misc_feature (46)..(225): NCBI GI NO: 465445 NR Description: PROBABLE NUCLEAR ANTIGEN
  misc_feature (4)..(234): NCBI GI NO: 13562004 NR Description: major ampullate spidroin 2-like protein
  misc_feature (4)..(223): NCBI GI NO: 13562004 NR Description: major ampullate spidroin 2-like protein
  misc_feature (4)..(223): NCBI GI NO: 13562004 NR Description: major ampullate spidroin 2-like protein
  misc_feature (4)..(234): NCBI GI NO: 13562004 NR Description: major ampullate spidroin 2-like protein
MEVAAAGRSGSARRTPCPGSSCRCSSSNHRRRGPKFINLAQLHKRPANGPPARLGRGLGARAVHVLGLGVVSPPLRRARRAARPAQGRDGTADPGARGEAPARAGRHPAAALPFARRRGRGGCCSADKGEGVGGLGGRAAPRRPGGSGRAAEGGGGGVAGKGARGPVHGRGAPRAAAAGEGQGHRRRGRGQRGGRRRVVLRRPGQGGGDRPAAGQAVPGVQAAVGLRRAAPLPPPLRLRRVRARRPRRPLCRRSCRRCLPRVPWRGHRHGASVRLVAGGKG

SEQ ID NO: 38051 - DNA, 1242 bp, Zea mays subsp. mays
  misc_feature (1)..(1242): Ceres Seq. ID no. 12405303
  misc_feature (775)..(775): n is a, c, t, g, unknown, or other
aactcccatatggacgccaagccgcgcaacctgggcggctcgctgccggtgcccaacgtgcaggacctggccgcgcgccccggcgacgaactcacgccgcccgtgctaagccgctacctccgcgacgacgtcgacggcgcagacgccaacggcgacgcggcctcctcggtgccggtagttgacctcgcgaggctcctggacccgtcgtcgcacggagacgaggagtccgccaaactgaaggcggcctgcgaggagtggggcttcttccaggtgatcaaccacggggtgcccgacgcggtggtcgcggacgtgaagcagacctgcaggccttcttccgcctcccgctcgccgacaagcgcgcggtggcgcaggagcccggcgggatcgaggggtacgggcaggccttcgtggtctccgaggaccagaagctggactgggccgacatgcttttcctgtccacgcagccgcccgagtaccgggccccgcgcttcttgccggcgcgcccggccacgttcggggactcgctggcgcgctactctgccgaggtgcagcgcgtggccgcccgcctgctggcgtccatggccgcgaacctgggcgtggcggacgccgcgaggctggccagggtcgccgacgcgcaggccgtgcgcgtcaactactacccggcgtgcccgcacggcaggggcagggtgctgggcctgtcgccgcactcggacgccgccggcctcacgctgctgctccaggtcagcgccgtcccggggctgcagatcaggaggcncggcgcgtggatcagcgtcgaccccatccccggagcgctggtggccaacgtcggcgacgtcgtcgaggtgctcaccaacggcaggtacaagagcatcgagcaccgggcgctggttagccccacccaccaccgggtgtccgtcgcagccttccactccgccaggttcggcgacacttacgcgccgcttgaggagacgatggtcgatggtgatgagccagcgaggtacaggagcattggcgtcgaggactacgtccgcctggtgctgtctagtaagctccaaggaaagaacataatggacgccatgaagatcaatccggtcactgaatgaatgagtgaatcagaggatttgggaacaaaagttctgatttgtgtgtgtcgttttgaatcgtctttacatttacaataagagcagcgggcggattgctcttggtcaaacttgaagtaaaccatgaacatgttccgaattg

SEQ ID NO: 38052 - protein, 355 aa, Zea mays subsp. mays
  peptide (1)..(355): Ceres Seq. ID no. 12405304
  misc_feature (13)..(134): NCBI GI NO: 37536796 NR Description: putative dioxygenase
  misc_feature (14)..(106): NCBI GI NO: 37536792 NR Description: putative dioxygenase
  misc_feature (38)..(105): NCBI GI NO: 37536820 NR Description: putative ethylene-forming enzyme
  misc_feature (14)..(109): NCBI GI NO: 34895204 NR Description: P0463A02.24
  misc_feature (13)..(134): NCBI GI NO: 37536802 NR Description: putative ethylene-forming enzyme
  misc_feature (14)..(105): NCBI GI NO: 15235017 NR Description: SRG1-like protein; protein id: At4g25310.1
  misc_feature (14)..(105): NCBI GI NO: 15235014 NR Description: SRG1-like protein; protein id: At4g25300.1
  misc_feature (4)..(105): NCBI GI NO: 15219988 NR Description: SRG1-like protein; protein id: At1g17020
  misc_feature (24)..(107): NCBI GI NO: 40736992 NR Description: putative oxidoreductase
  misc_feature (20)..(109): NCBI GI NO: 34898470 NR Description: ESTs D47168
  misc_feature (259)..(259): Xaa is any aa, unknown or other
NSHMDAKPRNLGGSLPVPNVQDLAARPGDELTPPVLSRYLRDDVDGADANGDAASSVPVVDLARLLDPSSHGDEESAKLKAACEEWGFFQVINHGVPDAVVADVKQTCRPSSASRSPTSARWRRSPAGSRGTGRPSWSPRTRSWTGPTCFSCPRSRPSTGPRASCRRARPRSGTRWRATLPRCSAWPPACWRPWPRTWAWRTPRGWPGSPTRRPCASTTTRRARTAGAGCWACRRTRTPPASRCCSRSAPSRGCRSGGXARGSASTPSPERWWPTSATSSRCSPTAGTRASSTGRWLAPPTTGCPSQPSTPPGSATLTRRLRRRWSMVMSQRGTGALASRTTSAWCCLVSSKERT

SEQ ID NO: 38053 - protein, 352 aa, Zea mays subsp. mays
  peptide (1)..(352): Ceres Seq. ID no. 12405305
  misc_feature (10)..(131): NCBI GI NO: 37536796 NR Description: putative dioxygenase
  misc_feature (11)..(103): NCBI GI NO: 37536792 NR Description: putative dioxygenase
  misc_feature (35)..(102): NCBI GI NO: 37536820 NR Description: putative ethylene-forming enzyme
  misc_feature (11)..(106): NCBI GI NO: 34895204 NR Description: P0463A02.24
  misc_feature (10)..(131): NCBI GI NO: 37536802 NR Description: putative ethylene-forming enzyme
  misc_feature (11)..(102): NCBI GI NO: 15235017 NR Description: SRG1-like protein; protein id: At4g25310.1
  misc_feature (11)..(102): NCBI GI NO: 15235014 NR Description: SRG1-like protein; protein id: At4g25300.1
  misc_feature (1)..(102): NCBI GI NO: 15219988 NR Description: SRG1-like protein; protein id: At1g17020
  misc_feature (21)..(104): NCBI GI NO: 40736992 NR Description: putative oxidoreductase
  misc_feature (17)..(106): NCBI GI NO: 34898470 NR Description: ESTs D47168
  misc_feature (256)..(256): Xaa is any aa, unknown or other
MDAKPRNLGGSLPVPNVQDLAARPGDELTPPVLSRYLRDDVDGADANGDAASSVPVVDLARLLDPSSHGDEESAKLKAACEEWGFFQVINHGVPDAVVADVKQTCRPSSASRSPTSARWRRSPAGSRGTGRPSWSPRTRSWTGPTCFSCPRSRPSTGPRASCRRARPRSGTRWRATLPRCSAWPPACWRPWPRTWAWRTPRGWPGSPTRRPCASTTTRRARTAGAGCWACRRTRTPPASRCCSRSAPSRGCRSGGXARGSASTPSPERWWPTSATSSRCSPTAGTRASSTGRWLAPPTTGCPSQPSTPPGSATLTRRLRRRWSMVMSQRGTGALASRTTSAWCCLVSSKERT

SEQ ID NO: 38054 - protein, 219 aa, Zea mays subsp. mays
  peptide (1)..(219): Ceres Seq. ID no. 12405306
  misc_feature (65)..(163): Pfam Name: II Pfam Description: 2OG-Fe
  misc_feature (1)..(214): NCBI GI NO: 37536796 NR Description: putative dioxygenase
  misc_feature (1)..(214): NCBI GI NO: 37536792 NR Description: putative dioxygenase
  misc_feature (1)..(214): NCBI GI NO: 37536820 NR Description: putative ethylene-forming enzyme
  misc_feature (1)..(213): NCBI GI NO: 34895204 NR Description: P0463A02.24
  misc_feature (1)..(215): NCBI GI NO: 37536802 NR Description: putative ethylene-forming enzyme
  misc_feature (1)..(214): NCBI GI NO: 15235017 NR Description: SRG1-like protein; protein id: At4g25310.1
  misc_feature (1)..(214): NCBI GI NO: 15235014 NR Description: SRG1-like protein; protein id: At4g25300.1
  misc_feature (1)..(214): NCBI GI NO: 15219988 NR Description: SRG1-like protein; protein id: At1g17020
  misc_feature (1)..(214): NCBI GI NO: 40736992 NR Description: putative oxidoreductase
  misc_feature (1)..(187): NCBI GI NO: 34898470 NR Description: ESTs D47168
  misc_feature (111)..(111): Xaa is any aa, unknown or other
MLFLSTQPPEYRAPRFLPARPATFGDSLARYSAEVQRVAARLLASMAANLGVADAARLARVADAQAVRVNYYPACPHGRGRVLGLSPHSDAAGLTLLLQVSAVPGLQIRRXGAWISVDPIPGALVANVGDVVEVLTNGRYKSIEHRALVSPTHHRVSVAAFHSARFGDTYAPLEETMVDGDEPARYRSIGVEDYVRLVLSSKLQGKNIMDAMKINPVTE

SEQ ID NO: 38055 - DNA, 1228 bp, Zea mays subsp. mays
  misc_feature (1)..(1228): Ceres Seq. ID no. 12386860
aaatctccatcaccatcgccttcaactcaagcgactacagcaaacttgctgagactgcagctgatcatggggtcgacgacatggttggcggccgtgctggcggcactcgtggtcgccgcctcctcaacggtggcatcacacgcctcgctgccggggaaacttgaggtcggtttctacgagcactcgtgcccacaggcggaggacatcgtgcgcaacgccgtccgccgcggcatagcccgcgagcccggcgtcggcgcggggctcatccgcatgcacttccacgactgcttcgtccggggctgcgacggctccatcctcatcaactccacgccgggcaacaaggccgagaaggactccgtggccaacaaccccagcatgcgcggcttcgacgtcatcgacgacgccaaggccgtcctcgaggcgcactgcccgcgcaccgtctcctgcgctgatatcgtcgcgctcgcggcccgtgacagcacctacctcgccggcggcctggactacaaggtcccgtcgggccgccgtgacggccgcgtgtccaaagaggaggaggtgctcgacaacaatgtccccgccccgactgacgaggtcgacgagctcatcgagagcttcaagcgcaaggggctcaacgccgacgacatggtcacgctctctggcgcgcacaccatcggccgctcccactgctcctccttcacgcagcggctctacaacttcagcgggcagctggggcagacagacccgtccctcgaccccgcctacgccgggcacctcaaggcgcggtgcccttggccgtccagcgacgaccagatggatcccacggtggttccgcttgacccagtcacgccggcgaccttcgacaaccagtactacaagaacgtgctggcgcacaaggtcctgttcatctccgacaacacactgctcgacaacccatggacggccggaatggtccacttcaacgccgcagtcgagaaggcatggcaggtcaagttcgccaaggccatggttaagatgggcaaggtccaggtgctcaccggcgaggagggagagatcagggagaagtgcttcgccgtcaacccacactactagtcaagtttaattatctaattaccccgcgcgtgttatgtttgtttatacgttccatacatcaacattatgtagagtgtttttcgttctcttcaaggctgtgaaatcaaacaagtttatcaagtaaaatggtgttatttgc

SEQ ID NO: 38056 - protein, 362 aa, Zea mays subsp. mays
  peptide (1)..(362): Ceres Seq. ID no. 12386861
  misc_feature (70)..(321): Pfam Name: Pfam Description:  Peroxidase
  misc_feature (52)..(359): NCBI GI NO: 34902236 NR Description: Putative peroxidase
  misc_feature (48)..(359): NCBI GI NO: 34894388 NR Description: unnamed protein product
  misc_feature (50)..(359): NCBI GI NO: 7453849 NR Description: peroxidase prx12 precursor [Spinacia oleracea]
  misc_feature (53)..(359): NCBI GI NO: 4760700 NR Description: peroxidase 1 [Scutellaria baicalensis]
  misc_feature (35)..(360): NCBI GI NO: 34894748 NR Description: putative peroxidase
  misc_feature (51)..(362): NCBI GI NO: 12056448 NR Description: peroxidase [Zea mays]
  misc_feature (32)..(359): NCBI GI NO: 34894758 NR Description: putative peroxidase
  misc_feature (48)..(359): NCBI GI NO: 34894766 NR Description: putative peroxidase
  misc_feature (29)..(359): NCBI GI NO: 34902232 NR Description: Putative peroxidase
  misc_feature (23)..(359): NCBI GI NO: 12039355 NR Description: putative peroxidase [Oryza sativa]
KSPSPSPSTQATTANLLRLQLIMGSTTWLAAVLAALVVAASSTVASHASLPGKLEVGFYEHSCPQAEDIVRNAVRRGIAREPGVGAGLIRMHFHDCFVRGCDGSILINSTPGNKAEKDSVANNPSMRGFDVIDDAKAVLEAHCPRTVSCADIVALAARDSTYLAGGLDYKVPSGRRDGRVSKEEEVLDNNVPAPTDEVDELIESFKRKGLNADDMVTLSGAHTIGRSHCSSFTQRLYNFSGQLGQTDPSLDPAYAGHLKARCPWPSSDDQMDPTVVPLDPVTPATFDNQYYKNVLAHKVLFISDNTLLDNPWTAGMVHFNAAVEKAWQVKFAKAMVKMGKVQVLTGEEGEIREKCFAVNPHY

SEQ ID NO: 38057 - protein, 340 aa, Zea mays subsp. mays
  peptide (1)..(340): Ceres Seq. ID no. 12386862
  misc_feature (48)..(299): Pfam Name: Pfam Description:  Peroxidase
  misc_feature (30)..(337): NCBI GI NO: 34902236 NR Description: Putative peroxidase
  misc_feature (26)..(337): NCBI GI NO: 34894388 NR Description: unnamed protein product
  misc_feature (28)..(337): NCBI GI NO: 7453849 NR Description: peroxidase prx12 precursor [Spinacia oleracea]
  misc_feature (31)..(337): NCBI GI NO: 4760700 NR Description: peroxidase 1 [Scutellaria baicalensis]
  misc_feature (13)..(338): NCBI GI NO: 34894748 NR Description: putative peroxidase
  misc_feature (29)..(340): NCBI GI NO: 12056448 NR Description: peroxidase [Zea mays]
  misc_feature (10)..(337): NCBI GI NO: 34894758 NR Description: putative peroxidase
  misc_feature (26)..(337): NCBI GI NO: 34894766 NR Description: putative peroxidase
  misc_feature (7)..(337): NCBI GI NO: 34902232 NR Description: Putative peroxidase
  misc_feature (1)..(337): NCBI GI NO: 12039355 NR Description: putative peroxidase [Oryza sativa]
MGSTTWLAAVLAALVVAASSTVASHASLPGKLEVGFYEHSCPQAEDIVRNAVRRGIAREPGVGAGLIRMHFHDCFVRGCDGSILINSTPGNKAEKDSVANNPSMRGFDVIDDAKAVLEAHCPRTVSCADIVALAARDSTYLAGGLDYKVPSGRRDGRVSKEEEVLDNNVPAPTDEVDELIESFKRKGLNADDMVTLSGAHTIGRSHCSSFTQRLYNFSGQLGQTDPSLDPAYAGHLKARCPWPSSDDQMDPTVVPLDPVTPATFDNQYYKNVLAHKVLFISDNTLLDNPWTAGMVHFNAAVEKAWQVKFAKAMVKMGKVQVLTGEEGEIREKCFAVNPHY

SEQ ID NO: 38058 - protein, 272 aa, Zea mays subsp. mays
  peptide (1)..(272): Ceres Seq. ID no. 12386863
  misc_feature (1)..(231): Pfam Name: Pfam Description:  Peroxidase
  misc_feature (1)..(269): NCBI GI NO: 34902236 NR Description: Putative peroxidase
  misc_feature (1)..(269): NCBI GI NO: 34894388 NR Description: unnamed protein product
  misc_feature (1)..(269): NCBI GI NO: 7453849 NR Description: peroxidase prx12 precursor [Spinacia oleracea]
  misc_feature (1)..(269): NCBI GI NO: 4760700 NR Description: peroxidase 1 [Scutellaria baicalensis]
  misc_feature (1)..(270): NCBI GI NO: 34894748 NR Description: putative peroxidase
  misc_feature (1)..(272): NCBI GI NO: 12056448 NR Description: peroxidase [Zea mays]
  misc_feature (1)..(269): NCBI GI NO: 34894758 NR Description: putative peroxidase
  misc_feature (1)..(269): NCBI GI NO: 34894766 NR Description: putative peroxidase
  misc_feature (1)..(269): NCBI GI NO: 34902232 NR Description: Putative peroxidase
  misc_feature (1)..(269): NCBI GI NO: 12039355 NR Description: putative peroxidase [Oryza sativa]
MHFHDCFVRGCDGSILINSTPGNKAEKDSVANNPSMRGFDVIDDAKAVLEAHCPRTVSCADIVALAARDSTYLAGGLDYKVPSGRRDGRVSKEEEVLDNNVPAPTDEVDELIESFKRKGLNADDMVTLSGAHTIGRSHCSSFTQRLYNFSGQLGQTDPSLDPAYAGHLKARCPWPSSDDQMDPTVVPLDPVTPATFDNQYYKNVLAHKVLFISDNTLLDNPWTAGMVHFNAAVEKAWQVKFAKAMVKMGKVQVLTGEEGEIREKCFAVNPHY

SEQ ID NO: 38059 - DNA, 1397 bp, Zea mays subsp. mays
  misc_feature (1)..(1397): Ceres Seq. ID no. 12366678
aactcactcatcgtcagtcagtcgtcacagtactcgatcgagcgcgatctgatctctttccgagcaatcatccgttctagcgtagtagagcgcatggacatggcctcgtcctctgcatcagcagctctcctcctggctgtctccctcgccgctctgcacttgtgctgccgccatgggcacggtgccggcgacgccgccggcaacggcatcactgccatctacagcctcggcgactccatcactgacaccgggaacctcgtcaaggaggcgcctccgggcatgttcgagaccatcaagcacctcccctacggcgtcacgttcgggtacccgaccgggcggtgctccgacggcctcctcatgatcgacttcctggctcaggacctgggtctcccgttcctgaacccgtacctgggcaagaacaagagcttcgaccacggcgtcaacttcgccgtcgccggagccaccgccgtggacccggccgaccagttcaacctccccgccgtccccgtgccgttcgcctccaagtccctcaaggtgcagctccggtggttcaaggacttcctcaagtacaccttcggcaccgatgaagagattcgcagacggcttcaagcttctctggttttggtcggggagatcggcgggaacgactacaactacgccttcttccaggccaagcctgtggccgaggtggagaagctcatcccaggggtcgtgaagaccatcgtcggcgccgccaaggaggtgctggacatgggcgccaccagggtcatcgtcccgggcaacttccccatcggctgcgtgccgggctacctggccatgaacgccgcctcgtcggagccggcggactacgactcggcggggtgcctccgggagctcaacgacttcgccgccaagcacaactcgcggctccggcgcgccgtcgccgacctgcaggcgtcgtacccgggcgccgccgtcgcctacgccgactacttcgactccttcctcaccctcctccacaacgcctcctcgttcggtttcgacgccgcgagcacgcgcaaggcctgctgcggcgccggtgccggcgagtacaacttcgactggcggcggatgtgcggcttcccggggacggcggcgtgcgctgacccgtccacgtacctgagctgggacggcatacacatgacgcaggcggcgtacagggccatgtccaggctcatctaccacggcaagtacctgcagccacagatactgagcttcccggagaaaaacgggcagacataaactcacgtcgtcatcatatatagaacttagttagaaaatatactcgaaacaccggctacaaataagctgtcagtagtcagctgtatcggtaagtacatgcgcgctgttcaactaatgctatcatcaagctgtgagcc

SEQ ID NO: 38060 - protein, 419 aa, Zea mays subsp. mays
  peptide (1)..(419): Ceres Seq. ID no. 12366679
  misc_feature (73)..(399): Pfam Name: Pfam Description:  GDSL-like Lipase/Acylhydrolase
  misc_feature (34)..(410): NCBI GI NO: 34903978 NR Description: unnamed protein product
  misc_feature (36)..(418): NCBI GI NO: 34903986 NR Description: unnamed protein product
  misc_feature (32)..(411): NCBI GI NO: 34903994 NR Description: unnamed protein product
  misc_feature (45)..(410): NCBI GI NO: 34903958 NR Description: OSJNBa0038J17.24
  misc_feature (72)..(407): NCBI GI NO: 10764858 NR Description: F1K23.17 [Arabidopsis thaliana]
  misc_feature (72)..(407): NCBI GI NO: 15218728 NR Description: lipase, putative; protein id: At1g28590.1
  misc_feature (52)..(411): NCBI GI NO: 34903996 NR Description: unnamed protein product
  misc_feature (72)..(407): NCBI GI NO: 21593234 NR Description: lipase, putative [Arabidopsis thaliana]
  misc_feature (72)..(407): NCBI GI NO: 10764858 NR Description: F1K23.17 [Arabidopsis thaliana]
  misc_feature (72)..(407): NCBI GI NO: 15218731 NR Description: lipase, putative; protein id: At1g28600
NSLIVSQSSQYSIERDLISFRAIIRSSVVERMDMASSSASAALLLAVSLAALHLCCRHGHGAGDAAGNGITAIYSLGDSITDTGNLVKEAPPGMFETIKHLPYGVTFGYPTGRCSDGLLMIDFLAQDLGLPFLNPYLGKNKSFDHGVNFAVAGATAVDPADQFNLPAVPVPFASKSLKVQLRWFKDFLKYTFGTDEEIRRRLQASLVLVGEIGGNDYNYAFFQAKPVAEVEKLIPGVVKTIVGAAKEVLDMGATRVIVPGNFPIGCVPGYLAMNAASSEPADYDSAGCLRELNDFAAKHNSRLRRAVADLQASYPGAAVAYADYFDSFLTLLHNASSFGFDAASTRKACCGAGAGEYNFDWRRMCGFPGTAACADPSTYLSWDGIHMTQAAYRAMSRLIYHGKYLQPQILSFPEKNGQT

SEQ ID NO: 38061 - protein, 388 aa, Zea mays subsp. mays
  peptide (1)..(388): Ceres Seq. ID no. 12366680
  misc_feature (42)..(368): Pfam Name: Pfam Description:  GDSL-like Lipase/Acylhydrolase
  misc_feature (3)..(379): NCBI GI NO: 34903978 NR Description: unnamed protein product
  misc_feature (5)..(387): NCBI GI NO: 34903986 NR Description: unnamed protein product
  misc_feature (1)..(380): NCBI GI NO: 34903994 NR Description: unnamed protein product
  misc_feature (14)..(379): NCBI GI NO: 34903958 NR Description: OSJNBa0038J17.24
  misc_feature (41)..(376): NCBI GI NO: 10764858 NR Description: F1K23.17 [Arabidopsis thaliana]
  misc_feature (41)..(376): NCBI GI NO: 15218728 NR Description: lipase, putative; protein id: At1g28590.1
  misc_feature (21)..(380): NCBI GI NO: 34903996 NR Description: unnamed protein product
  misc_feature (41)..(376): NCBI GI NO: 21593234 NR Description: lipase, putative [Arabidopsis thaliana]
  misc_feature (41)..(376): NCBI GI NO: 10764858 NR Description: F1K23.17 [Arabidopsis thaliana]
  misc_feature (41)..(376): NCBI GI NO: 15218731 NR Description: lipase, putative; protein id: At1g28600
MDMASSSASAALLLAVSLAALHLCCRHGHGAGDAAGNGITAIYSLGDSITDTGNLVKEAPPGMFETIKHLPYGVTFGYPTGRCSDGLLMIDFLAQDLGLPFLNPYLGKNKSFDHGVNFAVAGATAVDPADQFNLPAVPVPFASKSLKVQLRWFKDFLKYTFGTDEEIRRRLQASLVLVGEIGGNDYNYAFFQAKPVAEVEKLIPGVVKTIVGAAKEVLDMGATRVIVPGNFPIGCVPGYLAMNAASSEPADYDSAGCLRELNDFAAKHNSRLRRAVADLQASYPGAAVAYADYFDSFLTLLHNASSFGFDAASTRKACCGAGAGEYNFDWRRMCGFPGTAACADPSTYLSWDGIHMTQAAYRAMSRLIYHGKYLQPQILSFPEKNGQT

SEQ ID NO: 38062 - protein, 386 aa, Zea mays subsp. mays
  peptide (1)..(386): Ceres Seq. ID no. 12366681
  misc_feature (40)..(366): Pfam Name: Pfam Description:  GDSL-like Lipase/Acylhydrolase
  misc_feature (1)..(377): NCBI GI NO: 34903978 NR Description: unnamed protein product
  misc_feature (3)..(385): NCBI GI NO: 34903986 NR Description: unnamed protein product
  misc_feature (1)..(378): NCBI GI NO: 34903994 NR Description: unnamed protein product
  misc_feature (12)..(377): NCBI GI NO: 34903958 NR Description: OSJNBa0038J17.24
  misc_feature (39)..(374): NCBI GI NO: 10764858 NR Description: F1K23.17 [Arabidopsis thaliana]
  misc_feature (39)..(374): NCBI GI NO: 15218728 NR Description: lipase, putative; protein id: At1g28590.1
  misc_feature (19)..(378): NCBI GI NO: 34903996 NR Description: unnamed protein product
  misc_feature (39)..(374): NCBI GI NO: 21593234 NR Description: lipase, putative [Arabidopsis thaliana]
  misc_feature (39)..(374): NCBI GI NO: 10764858 NR Description: F1K23.17 [Arabidopsis thaliana]
  misc_feature (39)..(374): NCBI GI NO: 15218731 NR Description: lipase, putative; protein id: At1g28600
MASSSASAALLLAVSLAALHLCCRHGHGAGDAAGNGITAIYSLGDSITDTGNLVKEAPPGMFETIKHLPYGVTFGYPTGRCSDGLLMIDFLAQDLGLPFLNPYLGKNKSFDHGVNFAVAGATAVDPADQFNLPAVPVPFASKSLKVQLRWFKDFLKYTFGTDEEIRRRLQASLVLVGEIGGNDYNYAFFQAKPVAEVEKLIPGVVKTIVGAAKEVLDMGATRVIVPGNFPIGCVPGYLAMNAASSEPADYDSAGCLRELNDFAAKHNSRLRRAVADLQASYPGAAVAYADYFDSFLTLLHNASSFGFDAASTRKACCGAGAGEYNFDWRRMCGFPGTAACADPSTYLSWDGIHMTQAAYRAMSRLIYHGKYLQPQILSFPEKNGQT

SEQ ID NO: 38063 - DNA, 1680 bp, Zea mays subsp. mays
  misc_feature (1)..(1680): Ceres Seq. ID no. 12366104
atattagtattaatccgggttttttcccctcgaagaaacggaagctcgtttgtaggagtgacttgtaggtagtagcgctcactgcataaaattggattggattggattatgctcttctatactagtagacccagccagagcttatactagcactgtagcatgaacagggaccgggacagctggacagtggcagaggagaggagatgagccgatcctttgctaccttttcctcccttttcaatgaatctccatcttcctcctccctggtcttggctgtttggttcgttccagaggagggctgggacccggacctcttcatactcctctgatgatgatgatccattaatggtacagctcatgtgtggtgtggctgtgacttgtgatgagtgagcgtgccccttcttcctcctccagcctccagctccaggtgcggtgtgaggtcccgctcctgctcctgtcctaccagcgtactactccagtagtacagtggagtagccgagcgcatttaatagctggacaaggtgagaggaggaagctctagccacacacacacagcacagcacagcacagagggaccgcaacggagcagagaactgggccaccaaactgaaccaaccgcgggaaggagaaagggaacccgaacccttttcctccgcgtgcattaaaacccttcacatgggcatgggcatgtcagctgctgccccttcgtcctcgcccctgcttgctggctggctggtctgctctgtcccgtccgtcctactcctacgaggagtcgacggtggagacggaggtgcgcgcggcgcacaacgtgctggaggcgtgcgcgcagacggacgccatggagcgggtcgtcttcacctcctccgtcaccgccgtcgtctggagcggcgccggcgccggcgtcggcgcccacagggaggaggtcgccgacgagaggagctggagcgacctcgccttctgcaggaagttcaagctgtggcacgccctggccaagacgctgtcggagaagacggcgtgggcgctggccatggaccggggcgtcgacatggtggccatcaacgccggcctgctgctgtccgcccccgggcccgggctcgggctcaccgccgcgcacccctacctcaagggcgcccccgacatgtacgacggcggcgtcctcgccaccgtcgacgtcggcttcctggccgacgcgcacgtcgccgcctacgagtcccccaccgcctacggccgctacctctgcttcagcgacgccgtctgccgtcccgaggacgccgtcaagctcgcccagatgctctcgccggccgcgccacgctcgccgccgccaagcgacgaactgaaggtgataccacagaggatccagggcaagaaactgaacaagctcatgctggagttcgccagcggggtatacggggagctggactaggaaggaactgccaggccacagatgatgcgatgcgactagggctgttgtattcttttgtacgtagtactatttgtagttttcgcccccctcacaaaaaaaaggagggaaatctgtttggttggccaaaatgtgccatacgctcgctgtacatggccaaacacgccacgtgtgtagcccctgccagcagcaggggtgggtggggagagcatttcagtgatcggttgccaaagaaataccatatcgtatctaggttcgtg

SEQ ID NO: 38064 - protein, 335 aa, Zea mays subsp. mays
  peptide (1)..(335): Ceres Seq. ID no. 12366105
  misc_feature (43)..(255): NCBI GI NO: 23018055 NR Description: hypothetical protein [Thermobifida fusca]
MGMGMSAAAPSSSPLLAGWLVCSVPSVLLLRGVDGGDGGARGAQRAGGVRADGRHGAGRLHLLRHRRRLERRRRRRRRPQGGGRRREELERPRLLQEVQAVARPGQDAVGEDGVGAGHGPGRRHGGHQRRPAAVRPRARARAHRRAPLPQGRPRHVRRRRPRHRRRRLPGRRARRRLRVPHRLRPLPLLQRRRLPSRGRRQARPDALAGRATLAAAKRRTEGDTTEDPGQETEQAHAGVRQRGIRGAGLGRNCQATDDAMRLGLLYSFVRSTICSFRPPHKKKEGNLFGWPKCAIRSLYMAKHATCVAPASSRGGWGEHFSDRLPKKYHIVSRFV

SEQ ID NO: 38065 - protein, 333 aa, Zea mays subsp. mays
  peptide (1)..(333): Ceres Seq. ID no. 12366106
  misc_feature (41)..(253): NCBI GI NO: 23018055 NR Description: hypothetical protein [Thermobifida fusca]
MGMSAAAPSSSPLLAGWLVCSVPSVLLLRGVDGGDGGARGAQRAGGVRADGRHGAGRLHLLRHRRRLERRRRRRRRPQGGGRRREELERPRLLQEVQAVARPGQDAVGEDGVGAGHGPGRRHGGHQRRPAAVRPRARARAHRRAPLPQGRPRHVRRRRPRHRRRRLPGRRARRRLRVPHRLRPLPLLQRRRLPSRGRRQARPDALAGRATLAAAKRRTEGDTTEDPGQETEQAHAGVRQRGIRGAGLGRNCQATDDAMRLGLLYSFVRSTICSFRPPHKKKEGNLFGWPKCAIRSLYMAKHATCVAPASSRGGWGEHFSDRLPKKYHIVSRFV

SEQ ID NO: 38066 - protein, 331 aa, Zea mays subsp. mays
  peptide (1)..(331): Ceres Seq. ID no. 12366107
  misc_feature (39)..(251): NCBI GI NO: 23018055 NR Description: hypothetical protein [Thermobifida fusca]
MSAAAPSSSPLLAGWLVCSVPSVLLLRGVDGGDGGARGAQRAGGVRADGRHGAGRLHLLRHRRRLERRRRRRRRPQGGGRRREELERPRLLQEVQAVARPGQDAVGEDGVGAGHGPGRRHGGHQRRPAAVRPRARARAHRRAPLPQGRPRHVRRRRPRHRRRRLPGRRARRRLRVPHRLRPLPLLQRRRLPSRGRRQARPDALAGRATLAAAKRRTEGDTTEDPGQETEQAHAGVRQRGIRGAGLGRNCQATDDAMRLGLLYSFVRSTICSFRPPHKKKEGNLFGWPKCAIRSLYMAKHATCVAPASSRGGWGEHFSDRLPKKYHIVSRFV

SEQ ID NO: 38067 - DNA, 1351 bp, Zea mays subsp. mays
  misc_feature (1)..(1351): Ceres Seq. ID no. 12382032
aagccacggcccaatcgccggccgacactcacaagaacctgcctccctctggatcgctatctcttttctagtgcccagggaaagctagctagctcacagctgagctgagggaagaaagcaaggagagggagccagggaggaaggggaaaaacacgcggagagggtgagcaagaaagaaccgaggcggatcgccttctgttcctcctgccggctccgcgagaggaggcactgctcagtcccgtgattcctacaggggggaagaaagaggtggaacaacgccccggggcagagcagagatgatgcgggagacgtacatggacgtgctgccgccggtggaccacatagccgcacggagcaactggttcccggcggcggcgcgtctgtggacggcggcggagaacaagcagttcgagcgggcgctcgccgggctcgacctctgccgcccggactgggaggaggtggcgcgggccatcccccggccggacggtgcgcgaggtcgtcagccacttcaagcacctcgaggtcgacgtccagcagatcgagagcgggcaggtgcccttgccggcctacggcggcggggccagctcgttcaccctgcagtgggacggctacggccccggtccgggggacttcaggcacgggtaccgcttcgccggaggctgcgggaggcggcaccacggccgcacgccggagcaggagcggaagaagggcgtgccatggacggaggaggagcacaggttgttcctcctaggcctgaagaaatacggcaagggtgactggaggaacatttcgcgcaacttcgtccagaccaggacgcccacccaggtggccagccacgcgcagaagtacttcatcaggctcaactccggcggcaaggacaagaggaggtccagcatccacgacatcaccacggtcaacctgacggacgaccagccgccctcgccgtcccagtcctccctaatcaccagccaatcgaacgcaccagctccagctccggccgcggggatatgccaggtcccattggcggccgacgccaagcgacacggtgccggaactctgcccttcagctcaccgaaccggacctctgcggcgccggcctacaggatggagtttcatgaccaacaaggcctgcagtgtggccctctgcatgatcagttgctcgccagccagagcgtcctgttctaggcgcggtggcagcccaccctgcggcatggatcgaccaggtgcctagtgtataatacttgtggtatcgctctagcttcagcgcctgtattgaagggattagccttttgggagcataacagaaaggaggtcttcatttcatggtggtccataatttgttggagaatgc

SEQ ID NO: 38068 - protein, 159 aa, Zea mays subsp. mays
  peptide (1)..(159): Ceres Seq. ID no. 12382033
  misc_feature (1)..(60): NCBI GI NO: 34895714 NR Description: putative myb-related transcription activator
  misc_feature (1)..(61): NCBI GI NO: 34908386 NR Description: P0529E05.19
MMRETYMDVLPPVDHIAARSNWFPAAARLWTAAENKQFERALAGLDLCRPDWEEVARAIPRPDGARGRQPLQAPRGRRPADRERAGALAGLRRRGQLVHPAVGRLRPRSGGLQARVPLRRRLREAAPRPHAGAGAEEGRAMDGGGAQVVPPRPEEIRQG

SEQ ID NO: 38069 - protein, 158 aa, Zea mays subsp. mays
  peptide (1)..(158): Ceres Seq. ID no. 12382034
  misc_feature (1)..(59): NCBI GI NO: 34895714 NR Description: putative myb-related transcription activator
  misc_feature (1)..(60): NCBI GI NO: 34908386 NR Description: P0529E05.19
MRETYMDVLPPVDHIAARSNWFPAAARLWTAAENKQFERALAGLDLCRPDWEEVARAIPRPDGARGRQPLQAPRGRRPADRERAGALAGLRRRGQLVHPAVGRLRPRSGGLQARVPLRRRLREAAPRPHAGAGAEEGRAMDGGGAQVVPPRPEEIRQG

SEQ ID NO: 38070 - protein, 153 aa, Zea mays subsp. mays
  peptide (1)..(153): Ceres Seq. ID no. 12382035
  misc_feature (1)..(54): NCBI GI NO: 34895714 NR Description: putative myb-related transcription activator
  misc_feature (1)..(55): NCBI GI NO: 34908386 NR Description: P0529E05.19
MDVLPPVDHIAARSNWFPAAARLWTAAENKQFERALAGLDLCRPDWEEVARAIPRPDGARGRQPLQAPRGRRPADRERAGALAGLRRRGQLVHPAVGRLRPRSGGLQARVPLRRRLREAAPRPHAGAGAEEGRAMDGGGAQVVPPRPEEIRQG

SEQ ID NO: 38071 - DNA, 1312 bp, Zea mays subsp. mays
  misc_feature (1)..(1312): Ceres Seq. ID no. 12372672
aagcagagccaagcctactcttccaatccctgtcagggtggttagtctttgagctggtgggatcatggttgccaagacgaggacgaggcgacagctcgccaagctcgcgctgcttctactcgccctgctgctcctgctcgccgccatcctgctgtgcgtcttcttgatcccgcgccaccacaggaggccgctgccccccgcctcgccgccgggggcggggaacgcctcgaatcccgacgacagcatcgtggcgttcgacttctccccgtacctcatcatgtacaagagcggccgcgtgcaccggctggacggcaccgcccggtgctcggccggcgtggacgaggccacgggggtgacctccaaggacgtcgtgatcgacagcgggaccaggctcgcggcacggatgtacctgccgccggcgccccgcgggacgcaaagcaagggcctcggcaggcggcacccggtgctggtgttctaccacggcggcgcgttcgtcatcgagtcggcgttcacgccgctgtaccacgcctacctgaacggcgtggcggcgaaggcgcgcgtggtggcggtgtccgtggagtaccgcctggcgccggagcaccggctgccgacggcgtacgacgactcgtggcaggcgctcaactgggtggccaggaacgccggatccgggccggagccgtggctgcgggaccggggcaacctgtcccggctgttcgtcgccggggacagcgccggcgccaacatcgcgcacgacatggccatgcgcgcgggcacggggggcgggctggacggcggcgcggccatcgcgggcctcctgctcctggacccctacttctgggggaagaagccggtggccggggagacgacggacccggccaggcggcgccagtacgaggcgacgtggtcgttcatctgcggcgggcggtacggcatcgacgacccgctggtggacccgctgtcgatgccggcgtccgagtggcggaagctggcgtgcctcgcgcgtggcggtgacgtcgtcgggcctcgacgacttccggccgcgcgggctggcgtacgtggcggcgctccgcgacagcgggtgggacggggagacggagcagtacgagacgcccggcgagcggcacgtctacttcttggataggcccaaggaccccaattccgtcaaggagctggccttcgtcaccggattcctgagccgggagtaggtaggtagccatcacggcgagggcgtacagtttaggtgcaatcgtgaggattgcttgctgatcgaggcacgtgaatacgtgattgattaatagagactattatttct

SEQ ID NO: 38072 - protein, 358 aa, Zea mays subsp. mays
  peptide (1)..(358): Ceres Seq. ID no. 12372673
  misc_feature (129)..(177): Pfam Name: Pfam Description:  Carboxylesterase
  misc_feature (59)..(310): NCBI GI NO: 15228425 NR Description: putative protein; protein id: At3g48690
  misc_feature (59)..(310): NCBI GI NO: 18086341 NR Description: AT3g48690/T8P19_200 [Arabidopsis thaliana]
  misc_feature (62)..(310): NCBI GI NO: 18401743 NR Description: expressed protein; protein id: At1g47480
  misc_feature (62)..(310): NCBI GI NO: 21536771 NR Description: unknown [Arabidopsis thaliana]
  misc_feature (59)..(310): NCBI GI NO: 15227669 NR Description: putative esterase; protein id: At2g03550.1
  misc_feature (62)..(310): NCBI GI NO: 28393060 NR Description: putative esterase [Arabidopsis thaliana]
  misc_feature (59)..(310): NCBI GI NO: 15222795 NR Description: unknown protein; protein id: At1g49660.1
  misc_feature (59)..(318): NCBI GI NO: 15221975 NR Description: hypothetical protein; protein id: At1g19190.1
  misc_feature (55)..(293): NCBI GI NO: 18402731 NR Description: expressed protein; protein id: At1g49650
  misc_feature (59)..(310): NCBI GI NO: 15228426 NR Description: putative protein; protein id: At3g48700.1
MVAKTRTRRQLAKLALLLLALLLLLAAILLCVFLIPRHHRRPLPPASPPGAGNASNPDDSIVAFDFSPYLIMYKSGRVHRLDGTARCSAGVDEATGVTSKDVVIDSGTRLAARMYLPPAPRGTQSKGLGRRHPVLVFYHGGAFVIESAFTPLYHAYLNGVAAKARVVAVSVEYRLAPEHRLPTAYDDSWQALNWVARNAGSGPEPWLRDRGNLSRLFVAGDSAGANIAHDMAMRAGTGGGLDGGAAIAGLLLLDPYFWGKKPVAGETTDPARRRQYEATWSFICGGRYGIDDPLVDPLSMPASEWRKLACLARGGDVVGPRRLPAARAGVRGGAPRQRVGRGDGAVRDARRAARLLLG

SEQ ID NO: 38073 - protein, 287 aa, Zea mays subsp. mays
  peptide (1)..(287): Ceres Seq. ID no. 12372674
  misc_feature (58)..(106): Pfam Name: Pfam Description:  Carboxylesterase
  misc_feature (1)..(239): NCBI GI NO: 15228425 NR Description: putative protein; protein id: At3g48690
  misc_feature (1)..(239): NCBI GI NO: 18086341 NR Description: AT3g48690/T8P19_200 [Arabidopsis thaliana]
  misc_feature (1)..(239): NCBI GI NO: 18401743 NR Description: expressed protein; protein id: At1g47480
  misc_feature (1)..(239): NCBI GI NO: 21536771 NR Description: unknown [Arabidopsis thaliana]
  misc_feature (1)..(239): NCBI GI NO: 15227669 NR Description: putative esterase; protein id: At2g03550.1
  misc_feature (1)..(239): NCBI GI NO: 28393060 NR Description: putative esterase [Arabidopsis thaliana]
  misc_feature (1)..(239): NCBI GI NO: 15222795 NR Description: unknown protein; protein id: At1g49660.1
  misc_feature (1)..(247): NCBI GI NO: 15221975 NR Description: hypothetical protein; protein id: At1g19190.1
  misc_feature (1)..(222): NCBI GI NO: 18402731 NR Description: expressed protein; protein id: At1g49650
  misc_feature (1)..(239): NCBI GI NO: 15228426 NR Description: putative protein; protein id: At3g48700.1
MYKSGRVHRLDGTARCSAGVDEATGVTSKDVVIDSGTRLAARMYLPPAPRGTQSKGLGRRHPVLVFYHGGAFVIESAFTPLYHAYLNGVAAKARVVAVSVEYRLAPEHRLPTAYDDSWQALNWVARNAGSGPEPWLRDRGNLSRLFVAGDSAGANIAHDMAMRAGTGGGLDGGAAIAGLLLLDPYFWGKKPVAGETTDPARRRQYEATWSFICGGRYGIDDPLVDPLSMPASEWRKLACLARGGDVVGPRRLPAARAGVRGGAPRQRVGRGDGAVRDARRAARLLLG

SEQ ID NO: 38074 - protein, 245 aa, Zea mays subsp. mays
  peptide (1)..(245): Ceres Seq. ID no. 12372675
  misc_feature (16)..(64): Pfam Name: Pfam Description:  Carboxylesterase
  misc_feature (1)..(197): NCBI GI NO: 15228425 NR Description: putative protein; protein id: At3g48690
  misc_feature (1)..(197): NCBI GI NO: 18086341 NR Description: AT3g48690/T8P19_200 [Arabidopsis thaliana]
  misc_feature (1)..(197): NCBI GI NO: 18401743 NR Description: expressed protein; protein id: At1g47480
  misc_feature (1)..(197): NCBI GI NO: 21536771 NR Description: unknown [Arabidopsis thaliana]
  misc_feature (1)..(197): NCBI GI NO: 15227669 NR Description: putative esterase; protein id: At2g03550.1
  misc_feature (1)..(197): NCBI GI NO: 28393060 NR Description: putative esterase [Arabidopsis thaliana]
  misc_feature (1)..(197): NCBI GI NO: 15222795 NR Description: unknown protein; protein id: At1g49660.1
  misc_feature (1)..(205): NCBI GI NO: 15221975 NR Description: hypothetical protein; protein id: At1g19190.1
  misc_feature (1)..(180): NCBI GI NO: 18402731 NR Description: expressed protein; protein id: At1g49650
  misc_feature (1)..(197): NCBI GI NO: 15228426 NR Description: putative protein; protein id: At3g48700.1
MYLPPAPRGTQSKGLGRRHPVLVFYHGGAFVIESAFTPLYHAYLNGVAAKARVVAVSVEYRLAPEHRLPTAYDDSWQALNWVARNAGSGPEPWLRDRGNLSRLFVAGDSAGANIAHDMAMRAGTGGGLDGGAAIAGLLLLDPYFWGKKPVAGETTDPARRRQYEATWSFICGGRYGIDDPLVDPLSMPASEWRKLACLARGGDVVGPRRLPAARAGVRGGAPRQRVGRGDGAVRDARRAARLLLG

SEQ ID NO: 38075 - DNA, 1667 bp, Zea mays subsp. mays
  misc_feature (1)..(1667): Ceres Seq. ID no. 12363303
acgggagcggacggagaaaattttgaaacgcgggcgaggccgccaccaccgcgccaaatcgagccatccagattccattcgacggccggaagtcagatccgtgcatctataatacttccaggaattctctcctctcccaagacccgcaccgcaccacgcgaaatcaagtcctgcaaaagcctcgcggctacctcacgtggatcggcgacggcgatgacggcgtccttctcttccgtcgccgaggtagcggttcccgctgctgcggcggtgatggcatcagctttgccgcaggagcagcagcaggcgcggccgcggccgcggccgatgcacgctggtggtggtggtggtggcggcggcggcgccaatggccgccaccacgcgtacagccgcaaggacaagtcactcggcctcctctgctccaacttcgtggttctctacaaccgcgacgacgtggagtccatcgggctggacgaagcggccaaatgcctcggcgtggagaggcgccggatctacgacattgtcaacgtgctcgagagcgttggaattcttgtgaggaaagccaagaatcgctacacctggataggtttcggcggagtctcaatatccttgcgagaactcaaggaaagggcgttaagggagaagtctggcttggctcctctgcaaaccgagcagcaatctgctgccacaatttctgaagacgaagatgatgatacattggccaatccgggtgcttatatcgagactgagagattgagtcaaactgtggacaaaccttctggcaaaccgggcgcatccggttgccgccttagatctgatcataggaaggaaaagtcacttgggctgctcacacagaatttcgtgaagctcttcctcaccatggaggttgacacgatctcactcgatgaagctgcaaaactgctccttggagaaggccacgaggagaccaatatgagaactaaagttcggaggttatatgacattgccaatgtcctgtcttcactgaatctaattgagaagatacatcaaggggactcgagaaagcctgcgtttcgttggttgggtagggcaacgctgaacacagaaaatggtgtcacagttgctgtgcccccaccagggaagatcgcatcaaagaaaagagcgtttggaacagaactcactaacattgacatgcatagaagtaatctagattcaaaaaataagaagaaagcaaaacttgtacagagtagtggtgatgtcttgacgaattgcaaattagctgtgcgtagtcggctggggcagggtaaacaaagtggctttgtttatggtcctttccacccttctggcgcaaggaaacatggacttgatggcggcaataagcctgggcaaagggagagggctgaggactgggagagcctttctgcttcatttcgaccacagtaccagaaccaagcactcagtgatctatttgtccattatgtcgacgcgtggaagacatggtattctgaatttgctcaaggcagcagcatcatgcaacaacactttggtcatcctgttaaccattttttgtaggcaaattttagggccaagcattgcagttcttagtgcatgcttgtgtattttacctgtacaatctgttaaaacggaggaaacaaagacatgattgagcctagggttcattgtatttaccc

SEQ ID NO: 38076 - protein, 515 aa, Zea mays subsp. mays
  peptide (1)..(515): Ceres Seq. ID no. 12363304
  misc_feature (129)..(195): Pfam Name: TDP Pfam Description: Transcription factor E2F/dimerisation partner
  misc_feature (125)..(506): NCBI GI NO: 22331664 NR Description: DP-E2F-like protein 1; protein id: At3g48160
  misc_feature (125)..(482): NCBI GI NO: 30692988 NR Description: DP-E2F-related protein 1 [Arabidopsis thaliana]
  misc_feature (270)..(498): NCBI GI NO: 15242176 NR Description: DP-E2F-like 2; protein id: At5g14960
  misc_feature (128)..(240): NCBI GI NO: 15242176 NR Description: DP-E2F-like 2; protein id: At5g14960
  misc_feature (154)..(482): NCBI GI NO: 7487385 NR Description: hypothetical protein T24C20
  misc_feature (378)..(495): NCBI GI NO: 22330789 NR Description: DP-E2F-like protein 3; protein id: At3g01330
  misc_feature (128)..(216): NCBI GI NO: 22330789 NR Description: DP-E2F-like protein 3; protein id: At3g01330
  misc_feature (129)..(408): NCBI GI NO: 38505226 NR Description: FLJ23311 protein [Homo sapiens]
  misc_feature (129)..(354): NCBI GI NO: 26334515 NR Description: unnamed protein product [Mus musculus]
  misc_feature (129)..(382): NCBI GI NO: 29741773 NR Description: similar to Transcription factor E2F dimerisationpartner
TGADGENFETRARPPPPRQIEPSRFHSTAGSQIRASIILPGILSSPKTRTAPREIKSCKSLAATSRGSATAMTASFSSVAEVAVPAAAAVMASALPQEQQQARPRPRPMHAGGGGGGGGGANGRHHAYSRKDKSLGLLCSNFVVLYNRDDVESIGLDEAAKCLGVERRRIYDIVNVLESVGILVRKAKNRYTWIGFGGVSISLRELKERALREKSGLAPLQTEQQSAATISEDEDDDTLANPGAYIETERLSQTVDKPSGKPGASGCRLRSDHRKEKSLGLLTQNFVKLFLTMEVDTISLDEAAKLLLGEGHEETNMRTKVRRLYDIANVLSSLNLIEKIHQGDSRKPAFRWLGRATLNTENGVTVAVPPPGKIASKKRAFGTELTNIDMHRSNLDSKNKKKAKLVQSSGDVLTNCKLAVRSRLGQGKQSGFVYGPFHPSGARKHGLDGGNKPGQRERAEDWESLSASFRPQYQNQALSDLFVHYVDAWKTWYSEFAQGSSIMQQHFGHPVNHFL

SEQ ID NO: 38077 - protein, 444 aa, Zea mays subsp. mays
  peptide (1)..(444): Ceres Seq. ID no. 12363305
  misc_feature (58)..(124): Pfam Name: TDP Pfam Description: Transcription factor E2F/dimerisation partner
  misc_feature (54)..(435): NCBI GI NO: 22331664 NR Description: DP-E2F-like protein 1; protein id: At3g48160
  misc_feature (54)..(411): NCBI GI NO: 30692988 NR Description: DP-E2F-related protein 1 [Arabidopsis thaliana]
  misc_feature (199)..(427): NCBI GI NO: 15242176 NR Description: DP-E2F-like 2; protein id: At5g14960
  misc_feature (57)..(169): NCBI GI NO: 15242176 NR Description: DP-E2F-like 2; protein id: At5g14960
  misc_feature (83)..(411): NCBI GI NO: 7487385 NR Description: hypothetical protein T24C20
  misc_feature (307)..(424): NCBI GI NO: 22330789 NR Description: DP-E2F-like protein 3; protein id: At3g01330
  misc_feature (57)..(145): NCBI GI NO: 22330789 NR Description: DP-E2F-like protein 3; protein id: At3g01330
  misc_feature (58)..(337): NCBI GI NO: 38505226 NR Description: FLJ23311 protein [Homo sapiens]
  misc_feature (58)..(283): NCBI GI NO: 26334515 NR Description: unnamed protein product [Mus musculus]
  misc_feature (58)..(311): NCBI GI NO: 29741773 NR Description: similar to Transcription factor E2F dimerisationpartner
MTASFSSVAEVAVPAAAAVMASALPQEQQQARPRPRPMHAGGGGGGGGGANGRHHAYSRKDKSLGLLCSNFVVLYNRDDVESIGLDEAAKCLGVERRRIYDIVNVLESVGILVRKAKNRYTWIGFGGVSISLRELKERALREKSGLAPLQTEQQSAATISEDEDDDTLANPGAYIETERLSQTVDKPSGKPGASGCRLRSDHRKEKSLGLLTQNFVKLFLTMEVDTISLDEAAKLLLGEGHEETNMRTKVRRLYDIANVLSSLNLIEKIHQGDSRKPAFRWLGRATLNTENGVTVAVPPPGKIASKKRAFGTELTNIDMHRSNLDSKNKKKAKLVQSSGDVLTNCKLAVRSRLGQGKQSGFVYGPFHPSGARKHGLDGGNKPGQRERAEDWESLSASFRPQYQNQALSDLFVHYVDAWKTWYSEFAQGSSIMQQHFGHPVNHFL

SEQ ID NO: 38078 - protein, 425 aa, Zea mays subsp. mays
  peptide (1)..(425): Ceres Seq. ID no. 12363306
  misc_feature (39)..(105): Pfam Name: TDP Pfam Description: Transcription factor E2F/dimerisation partner
  misc_feature (35)..(416): NCBI GI NO: 22331664 NR Description: DP-E2F-like protein 1; protein id: At3g48160
  misc_feature (35)..(392): NCBI GI NO: 30692988 NR Description: DP-E2F-related protein 1 [Arabidopsis thaliana]
  misc_feature (180)..(408): NCBI GI NO: 15242176 NR Description: DP-E2F-like 2; protein id: At5g14960
  misc_feature (38)..(150): NCBI GI NO: 15242176 NR Description: DP-E2F-like 2; protein id: At5g14960
  misc_feature (64)..(392): NCBI GI NO: 7487385 NR Description: hypothetical protein T24C20
  misc_feature (288)..(405): NCBI GI NO: 22330789 NR Description: DP-E2F-like protein 3; protein id: At3g01330
  misc_feature (38)..(126): NCBI GI NO: 22330789 NR Description: DP-E2F-like protein 3; protein id: At3g01330
  misc_feature (39)..(318): NCBI GI NO: 38505226 NR Description: FLJ23311 protein [Homo sapiens]
  misc_feature (39)..(264): NCBI GI NO: 26334515 NR Description: unnamed protein product [Mus musculus]
  misc_feature (39)..(292): NCBI GI NO: 29741773 NR Description: similar to Transcription factor E2F dimerisationpartner
MASALPQEQQQARPRPRPMHAGGGGGGGGGANGRHHAYSRKDKSLGLLCSNFVVLYNRDDVESIGLDEAAKCLGVERRRIYDIVNVLESVGILVRKAKNRYTWIGFGGVSISLRELKERALREKSGLAPLQTEQQSAATISEDEDDDTLANPGAYIETERLSQTVDKPSGKPGASGCRLRSDHRKEKSLGLLTQNFVKLFLTMEVDTISLDEAAKLLLGEGHEETNMRTKVRRLYDIANVLSSLNLIEKIHQGDSRKPAFRWLGRATLNTENGVTVAVPPPGKIASKKRAFGTELTNIDMHRSNLDSKNKKKAKLVQSSGDVLTNCKLAVRSRLGQGKQSGFVYGPFHPSGARKHGLDGGNKPGQRERAEDWESLSASFRPQYQNQALSDLFVHYVDAWKTWYSEFAQGSSIMQQHFGHPVNHFL

SEQ ID NO: 38079 - DNA, 1485 bp, Zea mays subsp. mays
  misc_feature (1)..(1485): Ceres Seq. ID no. 15180769
atctcggttttattcaaatgctcaacacgcttgtttcccgcaggagcgtggtcagatcctccacaggttcgcggacctgatcgacgagcacgtggaggagctggcggcgctggacacggtggacgccggcaagctgttcgccgtgggcaaggcgcgggacatcccgggcgccgcgcacctgctgcgctactacgccggcgccgccgacaaggtgcacggcgcgacgctcaagatggcgcagcggatgcacgggtacacgctcaaggagcccgtgggcgtggtgggccacatcgtgccctggaactaccccaccaccatgttcttcttcaaggtagggcccgcgctcgccgcaggctgcgccgtcgtcgtcaagcccgccgagcagacgccgctgtccgcgctcttctacgcgcacctcgccagggaggccggcgtccccgccggcgtgctcaacgtcgtgccgggattcgggcccacggccggggccgccgtcgccgcccacatggacgtcgacaaggtcagcttcaccgggtccacggaggtcggccgcctcgtcatgagggccgcggccgagagcaacctcaagcccgtgtcgctcgagctgggcggcaagtctcccgtcatcgtcttcgatgacgccgacctcgacatggccgtcaacctcgtcaacttcgccacctacaccaacaagggcgagatctgtgtggccggcacgcgcatctacgtgcaggaagggatctacgacgagttcgtgaagaaggccgccgagctcgccagcaagtccgtggtcggagacccgttcaacccgagtgtcagccaaggcccccaggttgacaaggaccagtacgagaaggtcctcaggtacattgacatcggaaagcgcgaaggcgccacgctggtcaccggagggaagccctgcggcgacaataagggctactacatcgagcccaccatcttcacggacgtcaaggacgacatgacgatcgcacaggatgaaatctttgggccggtgatggctctcatgaaattcaagaccgtggaggaggtgatccagaaagcgaacaacacccggtacggcctggccgccggcatcgtgaccaagaacatcgacgtcgccaacaccgtgtcgcggtccatccgcgccggcgccatctggatcaactgctacttcgcgttcgacccggacgcgccgttcggcgggtacaagatgagcgggttcggcaaggacatgggcatggacgcgctcgacaagtacctgcagaccaagaccgtggtcactccgctgtacaacactccatggctctgaccgaccgacctcatccctgtccgatgaacagttcaacatcacaaaacaagaagaaacatgtcttgtaagatactccaaaggatcggttgcctgcagtagctgtactcttacacctgcatggattgatgatgtcgtagtgcaatgtaacattcagaacaataaagacatgtttcggactg

SEQ ID NO: 38080 - protein, 434 aa, Zea mays subsp. mays
  peptide (1)..(434): Ceres Seq. ID no. 15180770
  misc_feature (15)..(434): NCBI GI NO: 19850243 NR Description: cytosolic aldehyde dehydrogenase RF2C [Zea mays]
  misc_feature (15)..(434): NCBI GI NO: 19850241 NR Description: cytosolic aldehyde dehydrogenase RF2C [Zea mays]
  misc_feature (16)..(434): NCBI GI NO: 34912248 NR Description: cytosolic aldehyde dehydrogenase
  misc_feature (8)..(433): NCBI GI NO: 19850245 NR Description: cytosolic aldehyde dehydrogenase RF2D [Zea mays]
  misc_feature (8)..(433): NCBI GI NO: 19850247 NR Description: cytosolic aldehyde dehydrogenase RF2D [Zea mays]
  misc_feature (8)..(433): NCBI GI NO: 34912252 NR Description: putative cytosolic aldehyde dehydrogenase
  misc_feature (15)..(434): NCBI GI NO: 18404212 NR Description: aldehyde dehydrogenase (ALDH1a)
  misc_feature (15)..(434): NCBI GI NO: 8163730 NR Description: aldehyde dehydrogenase [Oryza sativa]
  misc_feature (15)..(434): NCBI GI NO: 20530127 NR Description: mitochondrial aldehyde dehydrogenase
  misc_feature (15)..(434): NCBI GI NO: 7431451 NR Description: rf2 nuclear restorer protein - maize
SRFYSNAQHACFPQERGQILHRFADLIDEHVEELAALDTVDAGKLFAVGKARDIPGAAHLLRYYAGAADKVHGATLKMAQRMHGYTLKEPVGVVGHIVPWNYPTTMFFFKVGPALAAGCAVVVKPAEQTPLSALFYAHLAREAGVPAGVLNVVPGFGPTAGAAVAAHMDVDKVSFTGSTEVGRLVMRAAAESNLKPVSLELGGKSPVIVFDDADLDMAVNLVNFATYTNKGEICVAGTRIYVQEGIYDEFVKKAAELASKSVVGDPFNPSVSQGPQVDKDQYEKVLRYIDIGKREGATLVTGGKPCGDNKGYYIEPTIFTDVKDDMTIAQDEIFGPVMALMKFKTVEEVIQKANNTRYGLAAGIVTKNIDVANTVSRSIRAGAIWINCYFAFDPDAPFGGYKMSGFGKDMGMDALDKYLQTKTVVTPLYNTPWL

SEQ ID NO: 38081 - protein, 357 aa, Zea mays subsp. mays
  peptide (1)..(357): Ceres Seq. ID no. 15180771
  misc_feature (1)..(357): NCBI GI NO: 19850243 NR Description: cytosolic aldehyde dehydrogenase RF2C [Zea mays]
  misc_feature (1)..(357): NCBI GI NO: 19850241 NR Description: cytosolic aldehyde dehydrogenase RF2C [Zea mays]
  misc_feature (1)..(357): NCBI GI NO: 34912248 NR Description: cytosolic aldehyde dehydrogenase
  misc_feature (1)..(356): NCBI GI NO: 19850245 NR Description: cytosolic aldehyde dehydrogenase RF2D [Zea mays]
  misc_feature (1)..(356): NCBI GI NO: 19850247 NR Description: cytosolic aldehyde dehydrogenase RF2D [Zea mays]
  misc_feature (1)..(356): NCBI GI NO: 34912252 NR Description: putative cytosolic aldehyde dehydrogenase
  misc_feature (1)..(357): NCBI GI NO: 18404212 NR Description: aldehyde dehydrogenase (ALDH1a)
  misc_feature (1)..(357): NCBI GI NO: 8163730 NR Description: aldehyde dehydrogenase [Oryza sativa]
  misc_feature (1)..(357): NCBI GI NO: 20530127 NR Description: mitochondrial aldehyde dehydrogenase
  misc_feature (1)..(357): NCBI GI NO: 7431451 NR Description: rf2 nuclear restorer protein - maize
MAQRMHGYTLKEPVGVVGHIVPWNYPTTMFFFKVGPALAAGCAVVVKPAEQTPLSALFYAHLAREAGVPAGVLNVVPGFGPTAGAAVAAHMDVDKVSFTGSTEVGRLVMRAAAESNLKPVSLELGGKSPVIVFDDADLDMAVNLVNFATYTNKGEICVAGTRIYVQEGIYDEFVKKAAELASKSVVGDPFNPSVSQGPQVDKDQYEKVLRYIDIGKREGATLVTGGKPCGDNKGYYIEPTIFTDVKDDMTIAQDEIFGPVMALMKFKTVEEVIQKANNTRYGLAAGIVTKNIDVANTVSRSIRAGAIWINCYFAFDPDAPFGGYKMSGFGKDMGMDALDKYLQTKTVVTPLYNTPWL

SEQ ID NO: 38082 - protein, 353 aa, Zea mays subsp. mays
  peptide (1)..(353): Ceres Seq. ID no. 15180772
  misc_feature (1)..(353): NCBI GI NO: 19850243 NR Description: cytosolic aldehyde dehydrogenase RF2C [Zea mays]
  misc_feature (1)..(353): NCBI GI NO: 19850241 NR Description: cytosolic aldehyde dehydrogenase RF2C [Zea mays]
  misc_feature (1)..(353): NCBI GI NO: 34912248 NR Description: cytosolic aldehyde dehydrogenase
  misc_feature (1)..(352): NCBI GI NO: 19850245 NR Description: cytosolic aldehyde dehydrogenase RF2D [Zea mays]
  misc_feature (1)..(352): NCBI GI NO: 19850247 NR Description: cytosolic aldehyde dehydrogenase RF2D [Zea mays]
  misc_feature (1)..(352): NCBI GI NO: 34912252 NR Description: putative cytosolic aldehyde dehydrogenase
  misc_feature (1)..(353): NCBI GI NO: 18404212 NR Description: aldehyde dehydrogenase (ALDH1a)
  misc_feature (1)..(353): NCBI GI NO: 8163730 NR Description: aldehyde dehydrogenase [Oryza sativa]
  misc_feature (1)..(353): NCBI GI NO: 20530127 NR Description: mitochondrial aldehyde dehydrogenase
  misc_feature (1)..(353): NCBI GI NO: 7431451 NR Description: rf2 nuclear restorer protein - maize
MHGYTLKEPVGVVGHIVPWNYPTTMFFFKVGPALAAGCAVVVKPAEQTPLSALFYAHLAREAGVPAGVLNVVPGFGPTAGAAVAAHMDVDKVSFTGSTEVGRLVMRAAAESNLKPVSLELGGKSPVIVFDDADLDMAVNLVNFATYTNKGEICVAGTRIYVQEGIYDEFVKKAAELASKSVVGDPFNPSVSQGPQVDKDQYEKVLRYIDIGKREGATLVTGGKPCGDNKGYYIEPTIFTDVKDDMTIAQDEIFGPVMALMKFKTVEEVIQKANNTRYGLAAGIVTKNIDVANTVSRSIRAGAIWINCYFAFDPDAPFGGYKMSGFGKDMGMDALDKYLQTKTVVTPLYNTPWL

SEQ ID NO: 38083 - DNA, 1499 bp, Zea mays subsp. mays
  misc_feature (1)..(1499): Ceres Seq. ID no. 12407470
aaatccgcggcacggacggagagacggctgcaccgccccacacccacccttttccgcgcccgcgaagaaaacgaaggcagtggaacccgaagcggaggggccagaaagcgacccgaccgtctctccgctccctccctcccccacaccacccacctgtgatctcccgcgcgggagatccgcccgccccatggcgccgtcgcgcccgctcatgcgggggatccgcccgccgcgcgtcttcccgacccgcggcggccgcgcctcgccgtacgctgtcgccctcacggccctgctcctcgtctccgccgccctcctcgcgctcatcgccttcggcgtcttctcgctccccgtgtcagcgccgaacgccgccgccaccaccacagccggaggggagaccgaatccgccgacacccgccccgcgcgcccccgcgcccgccgggacctgggggaggggctgggagagcgcggcgcgcagtggaccgaggtcatctcgtgggagccaagggcattcgtctaccacaacttcctgtctaaggaagagtgtgaatacctaattggattggccaagcctcacatggtaaaatcaacagttgtcgacagcactactggtaaaagcaaggacagcagggtccggacaagttcgggcatgtttcttcaaagaggaagggacaaggttattcgagtaattgaaaagaggattgcagactataccttcatacctgtagatcatggagagggactccaagtactgcattatgaagtcgggcagaagtatgagcctcactttgattattttcttgatgagtttaacaccaagaatggtggtcagaggatggctactcttctgatgtatctatcagatgttgaagaagggggcgagactattttccctgatgcaaatgtgaacgtcagttctttaccatggtacaatgagctttcagagtgtgccaagagaggcctttctgtcaaaccaaagatgggagatgcacttcttttctggagcatgaaaccagatgccaccctggacccattaagtttgcatgggggttgtcctgtgattagaggaaataaatggtcgtcaaccaagtggatgcatatccacgagtacaaagcttgagccttcaagactcgagagtcgagcgtaccaaagatggatctctatgcatgtgacttggggctgtctactgggttgacacccatgtatgctttacagacccactgaagctgtattctttgctcctttgttggaggggggagaattgcagataataggggccaataagcaggggccttgctcatccctgcagtatttttgggtctgatccttgctgacttggcttttgtcttttcttttctttttcttaccttgccgtaccccagctatagaggaatggtgtagtgtctgggggcatagagtttgagattttgttttgtgccacacctgtgttactagtataagctttggtactaatgaataacgaggcctaagctcacatctactg

SEQ ID NO: 38084 - protein, 370 aa, Zea mays subsp. mays
  peptide (1)..(370): Ceres Seq. ID no. 12407471
  misc_feature (242)..(365): Pfam Name: II Pfam Description: 2OG-Fe
  misc_feature (87)..(369): NCBI GI NO: 18394842 NR Description: expressed protein; protein id: At1g20270
  misc_feature (87)..(369): NCBI GI NO: 21537370 NR Description: putative prolyl 4-hydroxylase, alpha subunit
  misc_feature (92)..(369): NCBI GI NO: 15227885 NR Description: putative prolyl 4-hydroxylase, alpha subunit
  misc_feature (92)..(369): NCBI GI NO: 21593091 NR Description: putative prolyl 4-hydroxylase, alpha subunit
  misc_feature (83)..(352): NCBI GI NO: 37535718 NR Description: putative prolyl 4-hydroxylase, alpha subunit
  misc_feature (74)..(347): NCBI GI NO: 15239240 NR Description: prolyl 4-hydroxylase, alpha subunit-like protein
  misc_feature (92)..(347): NCBI GI NO: 7488226 NR Description: procollagen-proline dioxygenase alpha chain homologA_TM017A05
  misc_feature (162)..(368): NCBI GI NO: 20260280 NR Description: unknown protein [Arabidopsis thaliana]
  misc_feature (143)..(368): NCBI GI NO: 29150365 NR Description: putative oxidoreductase
  misc_feature (162)..(368): NCBI GI NO: 15239594 NR Description: putative protein; protein id: At5g18900
NPRHGRRDGCTAPHPPFSAPAKKTKAVEPEAEGPESDPTVSPLPPSPTPPTCDLPRGRSARPMAPSRPLMRGIRPPRVFPTRGGRASPYAVALTALLLVSAALLALIAFGVFSLPVSAPNAAATTTAGGETESADTRPARPRARRDLGEGLGERGAQWTEVISWEPRAFVYHNFLSKEECEYLIGLAKPHMVKSTVVDSTTGKSKDSRVRTSSGMFLQRGRDKVIRVIEKRIADYTFIPVDHGEGLQVLHYEVGQKYEPHFDYFLDEFNTKNGGQRMATLLMYLSDVEEGGETIFPDANVNVSSLPWYNELSECAKRGLSVKPKMGDALLFWSMKPDATLDPLSLHGGCPVIRGNKWSSTKWMHIHEYKA

SEQ ID NO: 38085 - protein, 308 aa, Zea mays subsp. mays; identical to SEQ ID NO: 27569
  peptide (1)..(308): Ceres Seq. ID no. 12407472
  misc_feature (180)..(303): Pfam Name: II Pfam Description: 2OG-Fe
  misc_feature (25)..(307): NCBI GI NO: 18394842 NR Description: expressed protein; protein id: At1g20270
  misc_feature (25)..(307): NCBI GI NO: 21537370 NR Description: putative prolyl 4-hydroxylase, alpha subunit
  misc_feature (30)..(307): NCBI GI NO: 15227885 NR Description: putative prolyl 4-hydroxylase, alpha subunit
  misc_feature (30)..(307): NCBI GI NO: 21593091 NR Description: putative prolyl 4-hydroxylase, alpha subunit
  misc_feature (21)..(290): NCBI GI NO: 37535718 NR Description: putative prolyl 4-hydroxylase, alpha subunit
  misc_feature (12)..(285): NCBI GI NO: 15239240 NR Description: prolyl 4-hydroxylase, alpha subunit-like protein
  misc_feature (30)..(285): NCBI GI NO: 7488226 NR Description: procollagen-proline dioxygenase alpha chain homologA_TM017A05
  misc_feature (100)..(306): NCBI GI NO: 20260280 NR Description: unknown protein [Arabidopsis thaliana]
  misc_feature (81)..(306): NCBI GI NO: 29150365 NR Description: putative oxidoreductase
  misc_feature (100)..(306): NCBI GI NO: 15239594 NR Description: putative protein; protein id: At5g18900

SEQ ID NO: 38086 - protein, 301 aa, Zea mays subsp. mays; identical to SEQ ID NO: 27570
  peptide (1)..(301): Ceres Seq. ID no. 12407473
  misc_feature (173)..(296): Pfam Name: II Pfam Description: 2OG-Fe
  misc_feature (18)..(300): NCBI GI NO: 18394842 NR Description: expressed protein; protein id: At1g20270
  misc_feature (18)..(300): NCBI GI NO: 21537370 NR Description: putative prolyl 4-hydroxylase, alpha subunit
  misc_feature (23)..(300): NCBI GI NO: 15227885 NR Description: putative prolyl 4-hydroxylase, alpha subunit
  misc_feature (23)..(300): NCBI GI NO: 21593091 NR Description: putative prolyl 4-hydroxylase, alpha subunit
  misc_feature (14)..(283): NCBI GI NO: 37535718 NR Description: putative prolyl 4-hydroxylase, alpha subunit
  misc_feature (5)..(278): NCBI GI NO: 15239240 NR Description: prolyl 4-hydroxylase, alpha subunit-like protein
  misc_feature (23)..(278): NCBI GI NO: 7488226 NR Description: procollagen-proline dioxygenase alpha chain homologA_TM017A05
  misc_feature (93)..(299): NCBI GI NO: 20260280 NR Description: unknown protein [Arabidopsis thaliana]
  misc_feature (74)..(299): NCBI GI NO: 29150365 NR Description: putative oxidoreductase
  misc_feature (93)..(299): NCBI GI NO: 15239594 NR Description: putative protein; protein id: At5g18900

SEQ ID NO: 38087 - DNA, 2136 bp, Zea mays subsp. mays
  misc_feature (1)..(2136): Ceres Seq. ID no. 12353121
gcattcgattcggcagctgcggggccgccggccgaagccgaatcgcctccgcagtccgcaccacacgtgccaccccctcgcgcctccctctcctcttcactccgccaccactcttctccccctccggcgagagcgtgcgcccacgcggccacgcccaccccgccatgaagcagctgcaccggcagtccagcatgagcaagcagcaccgcccgcaccaccaccgtacatccctctcccgcaccctcgcttcctacctcctccgcgagcagcgcctcctcttcgtcctcctcggcttcctcctagcctcgtccttcttcttcctctacccgcattccgccgccggatcctcctcggccaccaatatcaccgccgccttcgccagaaagaacccccgcagcagcggcgcctcctcctccgcgcgccgcctccccgtcggtgtccggaagccctccctgcgcatcgtcgtcaccggcggcgcgggttttgttggcagccacctcgtcgacaagctcctcgcccgcggggatagcgtcatcgtcgtcgacaacttcttcacgggccgcaaggacaacgtcgcgcaccacctcggcaacccgcgattcgagctcatccgccacgacgtcgtcgaacccattctcctagaggtcgaccagatctaccacctcgcctgccccgcatcccccgtgcactacaagttcaatcccatcaaaaccatcatatcctccccgctccgctgcccgcgcataattcgtccacatcctcacagaaattggattcgttatatttgtctttattggtttatttatggacacggatacggcttctgtaatgcacatttcacatgggggtgaaggtgcgcgtggggggtgcatttgtagttttgtgcttgcgtggggaatagcctgtatttacatctgtttattttgtctgttttttttcttcaattgtttctttaaccaactatgtacaagacaaatgtcatggggaccttgaatatgcttggactggctaagagggttggggcccggttcttgttgactagtaccagtgaagtgtatggtgatcctcttgagcatccacagaaggagagctactggggacatgtcaatcccataggtgttaggagctgttatgatgagggaaagagaacagctgaaactcttaccatggattaccaccgcggtgctggtgttgaggtgagaattgcacgcatatttaacacatatggccctcgaatgtgtttagatgatggccgagttgttagcaactttgttgcacaggctttgcggaaacaaccaatgacagtttatggcgatggaaaacagactagaagttttcagtatgtttcagatttggttgatgggttggtaactctaatggaaagcgaccatattggaccattcaacttggggaatcctggagaatttacaatgctggagcttgcacaggtggtaaaagaaactatcgacccaggtgcatctgtcgagttcaaacccaatactgcggatgatccacacatgagaaaacctgacatttcgaaggccaaatctcttctcaattgggagccccaagtttcactaaaacaaggtctgccgcgtatggtgtcggacttccagaaacgcatcatggatgagaaatgatgaggagcagaggtttgtttcgaaaaggaaatgaggagcagacgccaccagtctcagaacactgtatcctactgacagatctcttttggtgccatgaaggctgaaggccttgacaaaggtcagatgaacgactaattgccaaaaaattcttcctcgctccagggcaatttttttttgtgacaggacatctgttctttggttctggtttcttcgatacataaacttcgccatagaattccataattgcctttaagcgaacagtgagaggtcaacataaatttagtccctctttctctctttctgatgttattgaaacccatccacgtccattttacgtaggatgataccatattctcatgctacacatgtcctctatttcgtgtctgaatttttaggtgattttattactcttgtacaacaaacaaatagttattttatggttccttaaattgttacttttataatttgtgattttatgatttgtgatttgtttttg

SEQ ID NO: 38088 - protein, 282 aa, Zea mays subsp. mays
  peptide (1)..(282): Ceres Seq. ID no. 12353122
  misc_feature (153)..(238): Pfam Name: Pfam Description:  NAD dependent epimerase/dehydratase family
  misc_feature (55)..(238): NCBI GI NO: 25396402 NR Description: UDP-glucuronic acid decarboxylase
  misc_feature (63)..(238): NCBI GI NO: 17473549 NR Description: dTDP-glucose 4-6-dehydratase-like protein
  misc_feature (63)..(238): NCBI GI NO: 11270116 NR Description: dTDP-glucose 4-6-dehydratase-like protein -Arabidopsis thaliana
  misc_feature (63)..(238): NCBI GI NO: 30693847 NR Description: NAD-dependent epimerase/dehydratase family
  misc_feature (84)..(238): NCBI GI NO: 15229334 NR Description: dTDP-glucose 4-6-dehydratase homolog D18
  misc_feature (84)..(238): NCBI GI NO: 2129578 NR Description: dTDP-glucose 4-6-dehydratase homolog D18 -Arabidopsis thaliana
  misc_feature (109)..(238): NCBI GI NO: 15227109 NR Description: putative dTDP-glucose 4-6-dehydratase
  misc_feature (55)..(198): NCBI GI NO: 34908082 NR Description: P0506B12.30
  misc_feature (150)..(238): NCBI GI NO: 13591616 NR Description: UDP-D-glucuronate carboxy-lyase [Pisum sativum]
  misc_feature (150)..(238): NCBI GI NO: 15231432 NR Description: dTDP-glucose 4-6-dehydratases-like protein
IRFGSCGAAGRSRIASAVRTTRATPSRLPLLFTPPPLFSPSGESVRPRGHAHPAMKQLHRQSSMSKQHRPHHHRTSLSRTLASYLLREQRLLFVLLGFLLASSFFFLYPHSAAGSSSATNITAAFARKNPRSSGASSSARRLPVGVRKPSLRIVVTGGAGFVGSHLVDKLLARGDSVIVVDNFFTGRKDNVAHHLGNPRFELIRHDVVEPILLEVDQIYHLACPASPVHYKFNPIKTIISSPLRCPRIIRPHPHRNWIRYICLYWFIYGHGYGFCNAHFTWG

SEQ ID NO: 38089 - protein, 228 aa, Zea mays subsp. mays
  peptide (1)..(228): Ceres Seq. ID no. 12353123
  misc_feature (99)..(184): Pfam Name: Pfam Description:  NAD dependent epimerase/dehydratase family
  misc_feature (1)..(184): NCBI GI NO: 25396402 NR Description: UDP-glucuronic acid decarboxylase
  misc_feature (9)..(184): NCBI GI NO: 17473549 NR Description: dTDP-glucose 4-6-dehydratase-like protein
  misc_feature (9)..(184): NCBI GI NO: 11270116 NR Description: dTDP-glucose 4-6-dehydratase-like protein -Arabidopsis thaliana
  misc_feature (9)..(184): NCBI GI NO: 30693847 NR Description: NAD-dependent epimerase/dehydratase family
  misc_feature (30)..(184): NCBI GI NO: 15229334 NR Description: dTDP-glucose 4-6-dehydratase homolog D18
  misc_feature (30)..(184): NCBI GI NO: 2129578 NR Description: dTDP-glucose 4-6-dehydratase homolog D18 -Arabidopsis thaliana
  misc_feature (55)..(184): NCBI GI NO: 15227109 NR Description: putative dTDP-glucose 4-6-dehydratase
  misc_feature (1)..(144): NCBI GI NO: 34908082 NR Description: P0506B12.30
  misc_feature (96)..(184): NCBI GI NO: 13591616 NR Description: UDP-D-glucuronate carboxy-lyase [Pisum sativum]
  misc_feature (96)..(184): NCBI GI NO: 15231432 NR Description: dTDP-glucose 4-6-dehydratases-like protein
MKQLHRQSSMSKQHRPHHHRTSLSRTLASYLLREQRLLFVLLGFLLASSFFFLYPHSAAGSSSATNITAAFARKNPRSSGASSSARRLPVGVRKPSLRIVVTGGAGFVGSHLVDKLLARGDSVIVVDNFFTGRKDNVAHHLGNPRFELIRHDVVEPILLEVDQIYHLACPASPVHYKFNPIKTIISSPLRCPRIIRPHPHRNWIRYICLYWFIYGHGYGFCNAHFTWG

SEQ ID NO: 38090 - protein, 225 aa, Zea mays subsp. mays
  peptide (1)..(225): Ceres Seq. ID no. 12353124
  misc_feature (3)..(221): Pfam Name: Pfam Description:  NAD dependent epimerase/dehydratase family
  misc_feature (3)..(224): NCBI GI NO: 25396402 NR Description: UDP-glucuronic acid decarboxylase
  misc_feature (3)..(224): NCBI GI NO: 17473549 NR Description: dTDP-glucose 4-6-dehydratase-like protein
  misc_feature (3)..(224): NCBI GI NO: 11270116 NR Description: dTDP-glucose 4-6-dehydratase-like protein -Arabidopsis thaliana
  misc_feature (2)..(224): NCBI GI NO: 30693847 NR Description: NAD-dependent epimerase/dehydratase family
  misc_feature (3)..(225): NCBI GI NO: 15229334 NR Description: dTDP-glucose 4-6-dehydratase homolog D18
  misc_feature (3)..(225): NCBI GI NO: 2129578 NR Description: dTDP-glucose 4-6-dehydratase homolog D18 -Arabidopsis thaliana
  misc_feature (3)..(225): NCBI GI NO: 15227109 NR Description: putative dTDP-glucose 4-6-dehydratase
  misc_feature (4)..(224): NCBI GI NO: 34908082 NR Description: P0506B12.30
  misc_feature (3)..(225): NCBI GI NO: 13591616 NR Description: UDP-D-glucuronate carboxy-lyase [Pisum sativum]
  misc_feature (3)..(221): NCBI GI NO: 15231432 NR Description: dTDP-glucose 4-6-dehydratases-like protein
MYKTNVMGTLNMLGLAKRVGARFLLTSTSEVYGDPLEHPQKESYWGHVNPIGVRSCYDEGKRTAETLTMDYHRGAGVEVRIARIFNTYGPRMCLDDGRVVSNFVAQALRKQPMTVYGDGKQTRSFQYVSDLVDGLVTLMESDHIGPFNLGNPGEFTMLELAQVVKETIDPGASVEFKPNTADDPHMRKPDISKAKSLLNWEPQVSLKQGLPRMVSDFQKRIMDEK

SEQ ID NO: 38091 - DNA, 1409 bp, Zea mays subsp. mays
  misc_feature (1)..(1409): Ceres Seq. ID no. 12369478
  misc_feature (950)..(950): n is a, c, t, g, unknown, or other
atgcctttcgcgagagaaaggggtcgaatcggcggctgatttgacccggctcgctattagagctgcgaaagtgatccgagcagtcacggtttcggaagcggcgcgtcggccggaggagaaacgcaaccagctgtcgaggagctatgagcagcggtggcggaggcagagtgccggcggcggcggcggcgcagtcgcaggagctgcagctaccgccggggttccggttccacccgacggatgaggagctggtggtgcactacctctgccggcgctgcgccgggctgcccatctccgtgcccatcatcgccgaggtcgacctatacaagcacgatccctggcagctcccaaggatggcgctgtacggcgagaaggagtggtacttcttctccccgcgggaccgcaagtacccgaacgggtcgcggccgaaccgcgccgccggcgccgggtactggaaggccactggcgcagacaagccggtgggcacgccgaagccggtggccatcaagaaggctctcgtcttctacgccggcaaggcacccaagggcgacaagaccaactggatcatgcatgagtaccgcctcgccgacgtcgaccgcaccgcccgcaagaagaacaacagcctcaggttggatgattgggtgctgtgccgaatctacaacaagaaaggcgcgctggagaagccgaccggagccggcggcagggccgaggccagcagccagggcgcgctggggtccatgtccatgggctcgccgccggagcagaaaccgtccgtgctgccgtctgccacggcaacggccgcggccgcggccgggacggggtacgcgccgctgccgttctcggagctggcggcgtactacgaggtccggccgtccgactcgatgccccgggcgcacggcgcggactcgagctgctcgggccacgcgctggccgccacgtcgtcgtgcggcggnggcggctggcgagcggcctgaggtacagagccagcccaagatctccgagtgggagcgcactttcgccgccggcgccggcccgggaatcaacccggccggctcgatgctggggcttggcgggcatcagctcggcccctcggcggtgggggtagggctgcccgcgggcgacccgctgctccaggacatcctcacatactggggcaagccgtactgagaaagatgactggtccgagccgccggcgatgaggccatgtcggcttgtgaatgatcatggagctggactacaggattattgctgctacgagttgaattaaactgtttatatgcgattgatttggtactgggatttttgtatacttgaattagtactctctctatatagagagacatacacatactcgagtatatatgttttgcttatatagagtatggagtaataatatttatatctgctggtcc

SEQ ID NO: 38092 - protein, 308 aa, Zea mays subsp. mays
  peptide (1)..(308): Ceres Seq. ID no. 12369479
  misc_feature (245)..(308): NCBI GI NO: 25458553 NR Description: OsNAC6 protein [imported] - rice
  misc_feature (1)..(253): NCBI GI NO: 28972153 NR Description: mKIAA0324 protein [Mus musculus]
  misc_feature (238)..(238): Xaa is any aa, unknown or other
MRSWWCTTSAGAAPGCPSPCPSSPRSTYTSTIPGSSQGWRCTARRSGTSSPRGTASTRTGRGRTAPPAPGTGRPLAQTSRWARRSRWPSRRLSSSTPARHPRATRPTGSCMSTASPTSTAPPARRTTASGWMIGCCAESTTRKARWRSRPEPAAGPRPAARARWGPCPWARRRSRNRPCCRLPRQRPRPRPGRGTRRCRSRSWRRTTRSGRPTRCPGRTARTRAARATRWPPRRRAAXAAGERPEVQSQPKISEWERTFAAGAGPGINPAGSMLGLGGHQLGPSAVGVGLPAGDPLLQDILTYWGKPY

SEQ ID NO: 38093 - protein, 275 aa, Zea mays subsp. mays
  peptide (1)..(275): Ceres Seq. ID no. 12369480
  misc_feature (22)..(147): Pfam Name: NAM Pfam Description: No apical meristem
  misc_feature (18)..(267): NCBI GI NO: 25458553 NR Description: OsNAC6 protein [imported] - rice
  misc_feature (19)..(267): NCBI GI NO: 21105748 NR Description: nam-like protein 10 [Petunia x hybrida]
  misc_feature (17)..(206): NCBI GI NO: 15223456 NR Description: NAC domain protein, putative; protein id:At1g01720
  misc_feature (17)..(267): NCBI GI NO: 21105734 NR Description: nam-like protein 3 [Petunia x hybrida]
  misc_feature (14)..(262): NCBI GI NO: 14485513 NR Description: putative NAC domain protein [Solanum tuberosum]
  misc_feature (17)..(262): NCBI GI NO: 40647397 NR Description: NAC domain protein [Lycopersicon esculentum]
  misc_feature (19)..(179): NCBI GI NO: 15223963 NR Description: GRAB1-like protein; protein id: At1g77450
  misc_feature (20)..(271): NCBI GI NO: 25458551 NR Description: OsNAC5 protein [imported] - rice
  misc_feature (19)..(179): NCBI GI NO: 21593134 NR Description: GRAB1-like protein [Arabidopsis thaliana]
  misc_feature (19)..(230): NCBI GI NO: 22326685 NR Description: Expressed protein; protein id: At5g08790
  misc_feature (269)..(269): Xaa is any aa, unknown or other
MSSGGGGRVPAAAAAQSQELQLPPGFRFHPTDEELVVHYLCRRCAGLPISVPIIAEVDLYKHDPWQLPRMALYGEKEWYFFSPRDRKYPNGSRPNRAAGAGYWKATGADKPVGTPKPVAIKKALVFYAGKAPKGDKTNWIMHEYRLADVDRTARKKNNSLRLDDWVLCRIYNKKGALEKPTGAGGRAEASSQGALGSMSMGSPPEQKPSVLPSATATAAAAAGTGYAPLPFSELAAYYEVRPSDSMPRAHGADSSCSGHALAATSSCGXGGWRAA

SEQ ID NO: 38094 - protein, 206 aa, Zea mays subsp. mays
  peptide (1)..(206): Ceres Seq. ID no. 12369481
  misc_feature (1)..(78): Pfam Name: NAM Pfam Description: No apical meristem
  misc_feature (1)..(198): NCBI GI NO: 25458553 NR Description: OsNAC6 protein [imported] - rice
  misc_feature (1)..(198): NCBI GI NO: 21105748 NR Description: nam-like protein 10 [Petunia x hybrida]
  misc_feature (1)..(137): NCBI GI NO: 15223456 NR Description: NAC domain protein, putative; protein id:At1g01720
  misc_feature (1)..(198): NCBI GI NO: 21105734 NR Description: nam-like protein 3 [Petunia x hybrida]
  misc_feature (1)..(193): NCBI GI NO: 14485513 NR Description: putative NAC domain protein [Solanum tuberosum]
  misc_feature (1)..(193): NCBI GI NO: 40647397 NR Description: NAC domain protein [Lycopersicon esculentum]
  misc_feature (1)..(110): NCBI GI NO: 15223963 NR Description: GRAB1-like protein; protein id: At1g77450
  misc_feature (1)..(202): NCBI GI NO: 25458551 NR Description: OsNAC5 protein [imported] - rice
  misc_feature (1)..(110): NCBI GI NO: 21593134 NR Description: GRAB1-like protein [Arabidopsis thaliana]
  misc_feature (1)..(161): NCBI GI NO: 22326685 NR Description: Expressed protein; protein id: At5g08790
  misc_feature (200)..(200): Xaa is any aa, unknown or other
MALYGEKEWYFFSPRDRKYPNGSRPNRAAGAGYWKATGADKPVGTPKPVAIKKALVFYAGKAPKGDKTNWIMHEYRLADVDRTARKKNNSLRLDDWVLCRIYNKKGALEKPTGAGGRAEASSQGALGSMSMGSPPEQKPSVLPSATATAAAAAGTGYAPLPFSELAAYYEVRPSDSMPRAHGADSSCSGHALAATSSCGXGGWRAA

SEQ ID NO: 38095 - DNA, 1363 bp, Zea mays subsp. mays
  misc_feature (1)..(1363): Ceres Seq. ID no. 12406464
  misc_feature (973)..(973): n is a, c, t, g, unknown, or other
atccaagctcacggagtcgcagtgccaccgaggcttccaagcaagaaccacccccgcctgcctgcggagctcggccgtcccctgcgctgcggagcgggagcgggagcggcggcgacaatgtcctccaacggcaagcccaccccacagcccgcggcggccagcgccggcgccggcgccggcgggccgccgaagatgtaccagcgacccatctaccggccgcagcaggcgccggcgaagcggcggcgcggggggcggtcgtgcccgttcagctgctgctgctgcttctgctggacgctcctcgtcgtcgtcctcctcgccgtcctggccgccgtggccgggggcgccttctacctgctgtaccggccgcaccggccggccttcacgctgaccgcggcgcgcgtgacgaggctgagcctgtcgtcgtccgccaccgcgcccgcgctgagcgacgccatcgacgtgacgctgaccgccaggaaccccaacaagaagctggtgtacgtctacgacgacttcgccgtgacggccgccacggccgccaacgccgtgccgctgggcgcggccaccgcgcccgggttcgcgcacgacgccggcaacgtcaccgtcatccgggccaccgtctccgcgtccgcgctcgcggtcgaccccgccgcggccggctccgacgtcaagaggtccggcgagttccccatcgtcctggacctggagaccagggccggcgtccgggttggcgcgctcaggaccaaagaagatcggcatcctggtgcactgcgacggcgtcaaggtggccgcgcccgcgcccgcgccggccaagaagacgaagaagctggcgaaggccgcggccgacaccccagcccccgccgccgcggccgttgaagacgcgccggcgccgcccgccgcgtcggccacggccaccgtcgctcgcgcgtgccaggtcagggtccgcgtcaagatctggaagtggaccttctanccacgtcgtcgtcgccagcctccgaggggccgcattgcaaaatttttcgggtgaaagggaaaaaggttgctttgctttgctttgctttgcaacaccgggtgaagtttctccagtcagtccagtaggagggaaagcaagggaaacagaattcgaatcaaatgccggccgctgtaaatttttttccgtgtttaattgaattttaccaaattcggcggggagggaaggagaaggagaggtcggaggagcggcaaggcaggaagtgacgtgccgtgtgcattctgttctgcagtgtgaggcttgaacgatttgatttctctctctctctctttctctttatcgctttgtgtagtgccatttttttaaattttttcacgcatcttcttgttggtg

SEQ ID NO: 38096 - protein, 388 aa, Zea mays subsp. mays
  peptide (1)..(388): Ceres Seq. ID no. 12406465
  misc_feature (105)..(280): Pfam Name: Pfam Description:  HlyD family secretion protein
  misc_feature (11)..(346): NCBI GI NO: 23106243 NR Description: hypothetical protein [Azotobacter vinelandii]
  misc_feature (263)..(308): NCBI GI NO: 14253159 NR Description: VMP3 protein [Volvox carteri f. nagariensis]
  misc_feature (129)..(323): NCBI GI NO: 5032119 NR Description: Ser/Arg-related nuclear matrix protein
  misc_feature (37)..(335): NCBI GI NO: 25989119 NR Description: unknown [Streptomyces aureofaciens]
  misc_feature (42)..(388): NCBI GI NO: 25989119 NR Description: unknown [Streptomyces aureofaciens]
  misc_feature (16)..(319): NCBI GI NO: 29247944 NR Description: GLP_26_54603_52153 [Giardia lamblia ATCC 50803]
  misc_feature (1)..(318): NCBI GI NO: 5821151 NR Description: RNA binding protein [Homo sapiens]
  misc_feature (99)..(321): NCBI GI NO: 11362193 NR Description: hypothetical protein
  misc_feature (4)..(317): NCBI GI NO: 7949115 NR Description: Ser/Arg-related nuclear matrix protein
  misc_feature (1)..(318): NCBI GI NO: 6634015 NR Description: KIAA0324 protein [Homo sapiens]
  misc_feature (324)..(324): Xaa is any aa, unknown or other
PSSRSRSATEASKQEPPPPACGARPSPALRSGSGSGGDNVLQRQAHPTARGGQRRRRRRRAAEDVPATHLPAAAGAGEAAARGAVVPVQLLLLLLLDAPRRRPPRRPGRRGRGRLLPAVPAAPAGLHADRGARDEAEPVVVRHRARAERRHRRDADRQEPQQEAGVRLRRLRRDGRHGRQRRAAGRGHRARVRARRRQRHRHPGHRLRVRARGRPRRGRLRRQEVRRVPHRPGPGDQGRRPGWRAQDQRRSASWCTATASRWPRPRPRRPRRRRSWRRPRPTPQPPPPRPLKTRRRRPPRRPRPPSLARARSGSASRSGSGPSXHVVVASLRGAALQNFSGEREKGCFALLCFATPGEVSPVSPVGGKARETEFESNAGRCKFFSVFN

SEQ ID NO: 38097 - protein, 291 aa, Zea mays subsp. mays
  peptide (1)..(291): Ceres Seq. ID no. 12406466
  misc_feature (38)..(250): NCBI GI NO: 34903552 NR Description: P0001B06.28
  misc_feature (14)..(249): NCBI GI NO: 34914304 NR Description: B1151A10.19
  misc_feature (46)..(249): NCBI GI NO: 15239804 NR Description: putative protein; protein id: At5g11890
  misc_feature (46)..(249): NCBI GI NO: 21536796 NR Description: unknown [Arabidopsis thaliana]
  misc_feature (50)..(248): NCBI GI NO: 11762174 NR Description: At1g17620 [Arabidopsis thaliana]
  misc_feature (50)..(248): NCBI GI NO: 18394509 NR Description: expressed protein; protein id: At1g17620
  misc_feature (39)..(248): NCBI GI NO: 15242167 NR Description: putative protein; protein id: At5g21130.1
  misc_feature (41)..(252): NCBI GI NO: 18408342 NR Description: expressed protein; protein id: At1g65690
  misc_feature (27)..(247): NCBI GI NO: 38344198 NR Description: OSJNBa0064G10.14
  misc_feature (41)..(252): NCBI GI NO: 6686408 NR Description: F1E22.7 [Arabidopsis thaliana]
IQAHGVAVPPRLPSKNHPRLPAELGRPLRCGAGAGAAATMSSNGKPTPQPAAASAGAGAGGPPKMYQRPIYRPQQAPAKRRRGGRSCPFSCCCCFCWTLLVVVLLAVLAAVAGGAFYLLYRPHRPAFTLTAARVTRLSLSSSATAPALSDAIDVTLTARNPNKKLVYVYDDFAVTAATAANAVPLGAATAPGFAHDAGNVTVIRATVSASALAVDPAAAGSDVKRSGEFPIVLDLETRAGVRVGALRTKEDRHPGALRRRQGGRARARAGQEDEEAGEGRGRHPSPRRRGR

SEQ ID NO: 38098 - protein, 252 aa, Zea mays subsp. mays
  peptide (1)..(252): Ceres Seq. ID no. 12406467
  misc_feature (1)..(211): NCBI GI NO: 34903552 NR Description: P0001B06.28
  misc_feature (1)..(210): NCBI GI NO: 34914304 NR Description: B1151A10.19
  misc_feature (7)..(210): NCBI GI NO: 15239804 NR Description: putative protein; protein id: At5g11890
  misc_feature (7)..(210): NCBI GI NO: 21536796 NR Description: unknown [Arabidopsis thaliana]
  misc_feature (11)..(209): NCBI GI NO: 11762174 NR Description: At1g17620 [Arabidopsis thaliana]
  misc_feature (11)..(209): NCBI GI NO: 18394509 NR Description: expressed protein; protein id: At1g17620
  misc_feature (1)..(209): NCBI GI NO: 15242167 NR Description: putative protein; protein id: At5g21130.1
  misc_feature (2)..(213): NCBI GI NO: 18408342 NR Description: expressed protein; protein id: At1g65690
  misc_feature (1)..(208): NCBI GI NO: 38344198 NR Description: OSJNBa0064G10.14
  misc_feature (2)..(213): NCBI GI NO: 6686408 NR Description: F1E22.7 [Arabidopsis thaliana]
MSSNGKPTPQPAAASAGAGAGGPPKMYQRPIYRPQQAPAKRRRGGRSCPFSCCCCFCWTLLVVVLLAVLAAVAGGAFYLLYRPHRPAFTLTAARVTRLSLSSSATAPALSDAIDVTLTARNPNKKLVYVYDDFAVTAATAANAVPLGAATAPGFAHDAGNVTVIRATVSASALAVDPAAAGSDVKRSGEFPIVLDLETRAGVRVGALRTKEDRHPGALRRRQGGRARARAGQEDEEAGEGRGRHPSPRRRGR

SEQ ID NO: 38099 - DNA, 1566 bp, Zea mays subsp. mays
  misc_feature (1)..(1566): Ceres Seq. ID no. 12359525
ctctccctcgttgtccatggccctcgagtcatggctcaccaaggtccgctcggccatgtcctctgcctctggaggttcgggggcgccatcgaggccccggaagcagagcaccgtcggcatcctcgccttcgaggtcgccagcctcatgtccaagcttctccagctgtggcgagccgtgggtgacgctgccgtcgcacgcctccgccacgagaccatgaacctccacggcgtccgcaagatggtctccgacgacgacgacttccttgtcggcctcgcccgcgccgagctcgtggacacgctcagggccgcatccgactccgtggccgcgctcgccgcgcggtgcgcggaccccagcctccgcgacttcagggacgccttcctggagctggccgacaccggccgcgaccggcaccgctggacggcgcccagctggaaggagatggacgcgagggcgagcaggatggggaagcaggtggccaccaccgccgcgctccggagggccatggaggagctggccgaggccgagcacggcctccggaagcttgtcgtcctccagtgcgccgccagcagcctttcggcgagcaagatctcggcggcgtcggagcagcagcaggtggtcttctccaagaggcaggaggtgaagcacctgaagcagacgtccctctggggctccaccttcgacgctgccgtcgcgtcgctggcacgggcggcgttcaccaccctcgcgcgcatcaaggccgtcttcggcgccggccgggagcagcgccacccgccgctgtaccgcagcctgacactctcctcggcggtgcacccgtcaggcgacgcgcggtccccgccatcgcgcaagtccatgtcaatggaggaggtgctgctgttcgacgtggacgaccagccgtcgttcgctccgaaacggcaggtgcggggcggcgggttcctggaggacagctcggcggcactgacgcccccggcggggacgctgggcgcggcggcgctggcgccgcgctacgccgggctggtgatctcgatcgagcggatggcgcggtcgccgctgctggtgggccccgaggagcgggacgagctgtacgggatgctgacggcgagcgtgcgcgcgcagctccgggcgcggctgcgcggcgcggtgcccgcggcggacccggggctcgcagggcagtggtgcgcggcgctcgctgggatcctggagtggctggcgccgatggcgcacgcgacggtgcggtggcaggcggagcgcagcctggagcagcggggcgggagcggcaacggcagcgtgctgctgctgcagacactgcagttcgcggagcgcgacaaggtggacgcggcggtggtggagctcctggtggggctcaactacgtgtggcggttcgagaaggagatgagctgccgcgctatgctcgcctcgcccgcccgcccgcccgtccgatgacgatgcatccatggattatggatggtggtggtgatacgaatgatgcaagcacatctgcatctgcatctgtttgttgctcattctggatggatctgttgacgacgaataaatctctactacttatt

SEQ ID NO: 38100 - protein, 479 aa, Zea mays subsp. mays
  peptide (1)..(479): Ceres Seq. ID no. 12359526
  misc_feature (325)..(411): Pfam Name: DUF668 Pfam Description: Protein of unknown function
  misc_feature (6)..(467): NCBI GI NO: 30102981 NR Description: hypothetical protein
  misc_feature (6)..(469): NCBI GI NO: 15242144 NR Description: putative protein; protein id: At5g51670.1
  misc_feature (6)..(287): NCBI GI NO: 7939524 NR Description: contains similarity to unknownprotein~gb|AAD25764
  misc_feature (304)..(472): NCBI GI NO: 7939524 NR Description: contains similarity to unknownprotein~gb|AAD25764
  misc_feature (20)..(287): NCBI GI NO: 15228977 NR Description: hypothetical protein; protein id: At3g23160.1
  misc_feature (304)..(472): NCBI GI NO: 15228977 NR Description: hypothetical protein; protein id: At3g23160.1
  misc_feature (203)..(469): NCBI GI NO: 27754455 NR Description: unknown protein [Arabidopsis thaliana]
  misc_feature (10)..(463): NCBI GI NO: 34902086 NR Description: SR-rich pre-mRNA splicing activator
  misc_feature (33)..(381): NCBI GI NO: 15238198 NR Description: putative protein; protein id: At5g04550
  misc_feature (86)..(249): NCBI GI NO: 12003396 NR Description: Avr9/Cf-9 rapidly elicited protein 137
SPSLSMALESWLTKVRSAMSSASGGSGAPSRPRKQSTVGILAFEVASLMSKLLQLWRAVGDAAVARLRHETMNLHGVRKMVSDDDDFLVGLARAELVDTLRAASDSVAALAARCADPSLRDFRDAFLELADTGRDRHRWTAPSWKEMDARASRMGKQVATTAALRRAMEELAEAEHGLRKLVVLQCAASSLSASKISAASEQQQVVFSKRQEVKHLKQTSLWGSTFDAAVASLARAAFTTLARIKAVFGAGREQRHPPLYRSLTLSSAVHPSGDARSPPSRKSMSMEEVLLFDVDDQPSFAPKRQVRGGGFLEDSSAALTPPAGTLGAAALAPRYAGLVISIERMARSPLLVGPEERDELYGMLTASVRAQLRARLRGAVPAADPGLAGQWCAALAGILEWLAPMAHATVRWQAERSLEQRGGSGNGSVLLLQTLQFAERDKVDAAVVELLVGLNYVWRFEKEMSCRAMLASPARPPVR

SEQ ID NO: 38101 - protein, 474 aa, Zea mays subsp. mays
  peptide (1)..(474): Ceres Seq. ID no. 12359527
  misc_feature (320)..(406): Pfam Name: DUF668 Pfam Description: Protein of unknown function
  misc_feature (1)..(462): NCBI GI NO: 30102981 NR Description: hypothetical protein
  misc_feature (1)..(464): NCBI GI NO: 15242144 NR Description: putative protein; protein id: At5g51670.1
  misc_feature (1)..(282): NCBI GI NO: 7939524 NR Description: contains similarity to unknownprotein~gb|AAD25764
  misc_feature (299)..(467): NCBI GI NO: 7939524 NR Description: contains similarity to unknownprotein~gb|AAD25764
  misc_feature (15)..(282): NCBI GI NO: 15228977 NR Description: hypothetical protein; protein id: At3g23160.1
  misc_feature (299)..(467): NCBI GI NO: 15228977 NR Description: hypothetical protein; protein id: At3g23160.1
  misc_feature (198)..(464): NCBI GI NO: 27754455 NR Description: unknown protein [Arabidopsis thaliana]
  misc_feature (5)..(458): NCBI GI NO: 34902086 NR Description: SR-rich pre-mRNA splicing activator
  misc_feature (28)..(376): NCBI GI NO: 15238198 NR Description: putative protein; protein id: At5g04550
  misc_feature (81)..(244): NCBI GI NO: 12003396 NR Description: Avr9/Cf-9 rapidly elicited protein 137
MALESWLTKVRSAMSSASGGSGAPSRPRKQSTVGILAFEVASLMSKLLQLWRAVGDAAVARLRHETMNLHGVRKMVSDDDDFLVGLARAELVDTLRAASDSVAALAARCADPSLRDFRDAFLELADTGRDRHRWTAPSWKEMDARASRMGKQVATTAALRRAMEELAEAEHGLRKLVVLQCAASSLSASKISAASEQQQVVFSKRQEVKHLKQTSLWGSTFDAAVASLARAAFTTLARIKAVFGAGREQRHPPLYRSLTLSSAVHPSGDARSPPSRKSMSMEEVLLFDVDDQPSFAPKRQVRGGGFLEDSSAALTPPAGTLGAAALAPRYAGLVISIERMARSPLLVGPEERDELYGMLTASVRAQLRARLRGAVPAADPGLAGQWCAALAGILEWLAPMAHATVRWQAERSLEQRGGSGNGSVLLLQTLQFAERDKVDAAVVELLVGLNYVWRFEKEMSCRAMLASPARPPVR

SEQ ID NO: 38102 - protein, 461 aa, Zea mays subsp. mays
  peptide (1)..(461): Ceres Seq. ID no. 12359528
  misc_feature (307)..(393): Pfam Name: DUF668 Pfam Description: Protein of unknown function
  misc_feature (1)..(449): NCBI GI NO: 30102981 NR Description: hypothetical protein
  misc_feature (1)..(451): NCBI GI NO: 15242144 NR Description: putative protein; protein id: At5g51670.1
  misc_feature (1)..(269): NCBI GI NO: 7939524 NR Description: contains similarity to unknownprotein~gb|AAD25764
  misc_feature (286)..(454): NCBI GI NO: 7939524 NR Description: contains similarity to unknownprotein~gb|AAD25764
  misc_feature (2)..(269): NCBI GI NO: 15228977 NR Description: hypothetical protein; protein id: At3g23160.1
  misc_feature (286)..(454): NCBI GI NO: 15228977 NR Description: hypothetical protein; protein id: At3g23160.1
  misc_feature (185)..(451): NCBI GI NO: 27754455 NR Description: unknown protein [Arabidopsis thaliana]
  misc_feature (1)..(445): NCBI GI NO: 34902086 NR Description: SR-rich pre-mRNA splicing activator
  misc_feature (15)..(363): NCBI GI NO: 15238198 NR Description: putative protein; protein id: At5g04550
  misc_feature (68)..(231): NCBI GI NO: 12003396 NR Description: Avr9/Cf-9 rapidly elicited protein 137
MSSASGGSGAPSRPRKQSTVGILAFEVASLMSKLLQLWRAVGDAAVARLRHETMNLHGVRKMVSDDDDFLVGLARAELVDTLRAASDSVAALAARCADPSLRDFRDAFLELADTGRDRHRWTAPSWKEMDARASRMGKQVATTAALRRAMEELAEAEHGLRKLVVLQCAASSLSASKISAASEQQQVVFSKRQEVKHLKQTSLWGSTFDAAVASLARAAFTTLARIKAVFGAGREQRHPPLYRSLTLSSAVHPSGDARSPPSRKSMSMEEVLLFDVDDQPSFAPKRQVRGGGFLEDSSAALTPPAGTLGAAALAPRYAGLVISIERMARSPLLVGPEERDELYGMLTASVRAQLRARLRGAVPAADPGLAGQWCAALAGILEWLAPMAHATVRWQAERSLEQRGGSGNGSVLLLQTLQFAERDKVDAAVVELLVGLNYVWRFEKEMSCRAMLASPARPPVR

SEQ ID NO: 38103 - DNA, 911 bp, Zea mays subsp. mays
  misc_feature (1)..(911): Ceres Seq. ID no. 12367785
accaccacccaatcactcccgtctcgctctgcaccactcaaacctcttcttcctttccggaaaccacaccagcagtccccgcaggctgcagcttccccggccgccgcgcccaagccccagctgcctcgatcgctcgagagccacaaccaccactccaccagcagggcaaagctggaggatggccgcagtcgcagcgatgaaggctctcgcggtcgccgcctcgccggtgtcggcacggcagccccgtcggtacgtcgcaggtggcgctagccggcggctgcagtcgccgttccacggcgtgtcggtgcagtgccctgggcgaccgcggcgggcgacgccccggcgggggcggcaggtggcggtggtggcggcggcggtccggccggcgatccagttcatccagggcacggacgagcagacgatcccggacgtgcggctgaccaagtcccgggacggcacgaacggcgtggccatcttcacgttcgagcagccgtcggtgttcgactcgtcggcggagctcggggacatcacgggcttctacatgatcgacgacgagggcgtgctgcagtccgtggacgtgagcgccaagttcgtcaacggcaagccggcgcggatcgaggccaagtacgtcatgcgcacgccccgggactgggaccgcttcatgcgcttcatggagcggtactctcaggccaacggcctccagttcgtcaagaactgacgagccggctttgagatcgattgcctgcctgctgcgctacgttctgcttgcttgctagtgttctttttttttttctttcctttctcccctgtgctgcgcccctggtgttgtgattgtgacctgctgtgtgcttgtgagtgatttttttttttgtagagaaaagaaagaaatatgggagatttgttttgctctg

SEQ ID NO: 38104 - protein, 238 aa, Zea mays subsp. mays
  peptide (1)..(238): Ceres Seq. ID no. 12367786
  misc_feature (125)..(237): Pfam Name: Pfam Description:  Photosystem II reaction centre W protein, PsbW
  misc_feature (121)..(237): NCBI GI NO: 34907246 NR Description: photosystem II protein W-like protein
  misc_feature (95)..(237): NCBI GI NO: 7488014 NR Description: photosystem II protein W homolog T5F17
  misc_feature (95)..(237): NCBI GI NO: 18417239 NR Description: photosystem II protein W - like
  misc_feature (141)..(237): NCBI GI NO: 19880501 NR Description: saline responsive OSSRII protein [Oryza sativa]
  misc_feature (130)..(237): NCBI GI NO: 11467474 NR Description: photosystem II protein W [Odontella sinensis]
  misc_feature (130)..(237): NCBI GI NO: 11465813 NR Description: photosystem II protein W [Porphyra purpurea]
  misc_feature (130)..(237): NCBI GI NO: 11467617 NR Description: photosystem II protein W [Guillardia theta]
  misc_feature (130)..(237): NCBI GI NO: 11467376 NR Description: photosystem II protein W [Cyanophora paradoxa]
  misc_feature (130)..(238): NCBI GI NO: 22298036 NR Description: photosystem II reaction center W protein
  misc_feature (129)..(238): NCBI GI NO: 30468121 NR Description: photosystem II protein W [Cyanidioschyzon merolae]
PPPNHSRLALHHSNLFFLSGNHTSSPRRLQLPRPPRPSPSCLDRSRATTTTPPAGQSWRMAAVAAMKALAVAASPVSARQPRRYVAGGASRRLQSPFHGVSVQCPGRPRRATPRRGRQVAVVAAAVRPAIQFIQGTDEQTIPDVRLTKSRDGTNGVAIFTFEQPSVFDSSAELGDITGFYMIDDEGVLQSVDVSAKFVNGKPARIEAKYVMRTPRDWDRFMRFMERYSQANGLQFVKN

SEQ ID NO: 38105 - protein, 179 aa, Zea mays subsp. mays
  peptide (1)..(179): Ceres Seq. ID no. 12367787
  misc_feature (66)..(178): Pfam Name: Pfam Description:  Photosystem II reaction centre W protein, PsbW
  misc_feature (62)..(178): NCBI GI NO: 34907246 NR Description: photosystem II protein W-like protein
  misc_feature (36)..(178): NCBI GI NO: 7488014 NR Description: photosystem II protein W homolog T5F17
  misc_feature (36)..(178): NCBI GI NO: 18417239 NR Description: photosystem II protein W - like
  misc_feature (82)..(178): NCBI GI NO: 19880501 NR Description: saline responsive OSSRII protein [Oryza sativa]
  misc_feature (71)..(178): NCBI GI NO: 11467474 NR Description: photosystem II protein W [Odontella sinensis]
  misc_feature (71)..(178): NCBI GI NO: 11465813 NR Description: photosystem II protein W [Porphyra purpurea]
  misc_feature (71)..(178): NCBI GI NO: 11467617 NR Description: photosystem II protein W [Guillardia theta]
  misc_feature (71)..(178): NCBI GI NO: 11467376 NR Description: photosystem II protein W [Cyanophora paradoxa]
  misc_feature (71)..(179): NCBI GI NO: 22298036 NR Description: photosystem II reaction center W protein
  misc_feature (70)..(179): NCBI GI NO: 30468121 NR Description: photosystem II protein W [Cyanidioschyzon merolae]
MAAVAAMKALAVAASPVSARQPRRYVAGGASRRLQSPFHGVSVQCPGRPRRATPRRGRQVAVVAAAVRPAIQFIQGTDEQTIPDVRLTKSRDGTNGVAIFTFEQPSVFDSSAELGDITGFYMIDDEGVLQSVDVSAKFVNGKPARIEAKYVMRTPRDWDRFMRFMERYSQANGLQFVKN

SEQ ID NO: 38106 - protein, 173 aa, Zea mays subsp. mays
  peptide (1)..(173): Ceres Seq. ID no. 12367788
  misc_feature (60)..(172): Pfam Name: Pfam Description:  Photosystem II reaction centre W protein, PsbW
  misc_feature (56)..(172): NCBI GI NO: 34907246 NR Description: photosystem II protein W-like protein
  misc_feature (30)..(172): NCBI GI NO: 7488014 NR Description: photosystem II protein W homolog T5F17
  misc_feature (30)..(172): NCBI GI NO: 18417239 NR Description: photosystem II protein W - like
  misc_feature (76)..(172): NCBI GI NO: 19880501 NR Description: saline responsive OSSRII protein [Oryza sativa]
  misc_feature (65)..(172): NCBI GI NO: 11467474 NR Description: photosystem II protein W [Odontella sinensis]
  misc_feature (65)..(172): NCBI GI NO: 11465813 NR Description: photosystem II protein W [Porphyra purpurea]
  misc_feature (65)..(172): NCBI GI NO: 11467617 NR Description: photosystem II protein W [Guillardia theta]
  misc_feature (65)..(172): NCBI GI NO: 11467376 NR Description: photosystem II protein W [Cyanophora paradoxa]
  misc_feature (65)..(173): NCBI GI NO: 22298036 NR Description: photosystem II reaction center W protein
  misc_feature (64)..(173): NCBI GI NO: 30468121 NR Description: photosystem II protein W [Cyanidioschyzon merolae]
MKALAVAASPVSARQPRRYVAGGASRRLQSPFHGVSVQCPGRPRRATPRRGRQVAVVAAAVRPAIQFIQGTDEQTIPDVRLTKSRDGTNGVAIFTFEQPSVFDSSAELGDITGFYMIDDEGVLQSVDVSAKFVNGKPARIEAKYVMRTPRDWDRFMRFMERYSQANGLQFVKN

SEQ ID NO: 38107 - DNA, 1562 bp, Zea mays subsp. mays
  misc_feature (1)..(1562): Ceres Seq. ID no. 12357066
acggcccaaccccatccactcctttcctcccacccgccagccgtcacccgcgcgtgcagccagcttccctgctacccccgcgcgccgccagccgagcggacgccggccctgccccgcacgccggcacgcggcacgcgcagccagctgccccacacgacgccggccgccctcgcactccccaccgcgctacccggcagccccgcgctacccggtcctcgctcggcgtccttgattcccaccgcacggcggcccttcttctgccaccgcacaccgcgcaggagcactgcccttcgccccttgtttagctgcagcaggagcgccgcccagccggccaccaccaccgcagcttgagagttgagacctgcagttgacgaccagaggccagagggcgttgctgcgctgcttcctcccctttttctgctgcgacgacggctggtcgagcgccgccacacttcgcagcttcgctggctcttcgcaggtgacgagcacccaccagacatggggcaaggtggacaagagaagtcgttcaatttccttcaagttttgctcgagggcagcatagctggaggaactgctggtgttgtggtggaaacagcactttacccgattgatactataaaaaccaggcttcaggctgctcgaggtggaagccggattgaatggaaaggcttgtattctggattagctggaaatctcactggcgtccttccggcctctgcgatatttgtcggggtgtatgagccaactaaaagaaaattactggaaacacttcctgaaaatctgagtgcagttgcccattttactgcaggggccattggaggtattgctgcttccctcgtccgtgtccctacagaggtggtcaaacaaaggatgcaaactggtcagttcaagtctgcacctgatgctgttcgtctcattgttgctaaagaaggatttaaaggactgtacgctggttatggttcctttctacttcgagatctaccatttgatgccatccagttctgcatttatgagcaacttcgaattggctacaaacttgtggcgaaaagggagttgaatgatccagagaatgcacttatcggtgcttttgctggcgccatcactggagctataacaaccccccttgatgtcatgaagacaagattgatggttcagggacaagggaaccaatacactggaattgtaagctgtgctcagacaatcctcagagaggaaggccctaaggcattcttgaagggcattgagccgcgagtgctgtggatcggcatcggtgggtccatcttctttggcgtgctggagaaaaccaagtcgatgctagccgagaggaggaaccgcgagcttcgggccgtcaaggacgaatgagtggagatcagctcttttttggcgttgagtccttaccctgaaacaaaatacacaattttacttgccgggggaggcagggggacaacctcgccggcccgtacctgtactccacggcgttcacgttatcacgtacgtagaaatcatgagcatgactgacggtttctacagattgaaaaccaaaacgtcttacatgcgctggc

SEQ ID NO: 38108 - protein, 287 aa, Zea mays subsp. mays
  peptide (1)..(287): Ceres Seq. ID no. 12357067
  misc_feature (1)..(282): NCBI GI NO: 34394981 NR Description: mitochondrial aspartate-glutamate carrier protein-like
  misc_feature (6)..(287): NCBI GI NO: 18420458 NR Description: mitochondrial carrier protein family
  misc_feature (6)..(283): NCBI GI NO: 18399114 NR Description: allinase, putative; protein id: At1g34065.1
  misc_feature (6)..(249): NCBI GI NO: 7486053 NR Description: hypothetical protein F23K16
  misc_feature (21)..(275): NCBI GI NO: 27754081 NR Description: RIKEN cDNA 4930433D19; expressed sequence AW557176
  misc_feature (17)..(272): NCBI GI NO: 3171731 NR Description: AgPET8 [Eremothecium gossypii]
  misc_feature (22)..(264): NCBI GI NO: 19115553 NR Description: agpet8 protein. [Schizosaccharomyces pombe]
  misc_feature (21)..(273): NCBI GI NO: 24650120 NR Description: CG4743-PA [Drosophila melanogaster]
  misc_feature (21)..(275): NCBI GI NO: 6324325 NR Description: Member of family of mitochondrial carrier proteins
  misc_feature (21)..(267): NCBI GI NO: 17539504 NR Description: Agpet8 (29.0 kD) [Caenorhabditis elegans]
MGQGGQEKSFNFLQVLLEGSIAGGTAGVVVETALYPIDTIKTRLQAARGGSRIEWKGLYSGLAGNLTGVLPASAIFVGVYEPTKRKLLETLPENLSAVAHFTAGAIGGIAASLVRVPTEVVKQRMQTGQFKSAPDAVRLIVAKEGFKGLYAGYGSFLLRDLPFDAIQFCIYEQLRIGYKLVAKRELNDPENALIGAFAGAITGAITTPLDVMKTRLMVQGQGNQYTGIVSCAQTILREEGPKAFLKGIEPRVLWIGIGGSIFFGVLEKTKSMLAERRNRELRAVKDE

SEQ ID NO: 38109 - protein, 163 aa, Zea mays subsp. mays
  peptide (1)..(163): Ceres Seq. ID no. 12357068
  misc_feature (1)..(158): NCBI GI NO: 34394981 NR Description: mitochondrial aspartate-glutamate carrier protein-like
  misc_feature (1)..(163): NCBI GI NO: 18420458 NR Description: mitochondrial carrier protein family
  misc_feature (1)..(159): NCBI GI NO: 18399114 NR Description: allinase, putative; protein id: At1g34065.1
  misc_feature (1)..(125): NCBI GI NO: 7486053 NR Description: hypothetical protein F23K16
  misc_feature (1)..(151): NCBI GI NO: 27754081 NR Description: RIKEN cDNA 4930433D19; expressed sequence AW557176
  misc_feature (1)..(148): NCBI GI NO: 3171731 NR Description: AgPET8 [Eremothecium gossypii]
  misc_feature (1)..(140): NCBI GI NO: 19115553 NR Description: agpet8 protein. [Schizosaccharomyces pombe]
  misc_feature (1)..(149): NCBI GI NO: 24650120 NR Description: CG4743-PA [Drosophila melanogaster]
  misc_feature (1)..(151): NCBI GI NO: 6324325 NR Description: Member of family of mitochondrial carrier proteins
  misc_feature (1)..(143): NCBI GI NO: 17539504 NR Description: Agpet8 (29.0 kD) [Caenorhabditis elegans]
MQTGQFKSAPDAVRLIVAKEGFKGLYAGYGSFLLRDLPFDAIQFCIYEQLRIGYKLVAKRELNDPENALIGAFAGAITGAITTPLDVMKTRLMVQGQGNQYTGIVSCAQTILREEGPKAFLKGIEPRVLWIGIGGSIFFGVLEKTKSMLAERRNRELRAVKDE

SEQ ID NO: 38110 - DNA, 769 bp, Zea mays subsp. mays
  misc_feature (1)..(769): Ceres Seq. ID no. 12545911
  misc_feature (516)..(516): n is a, c, t, g, unknown, or other
acacatcattgagcgcaacgcggtcgtgattgcgagtgaatccgtggcgtccaactcccaagcccctaccggcaaccctagcgaggcgatggggaaggcggaggcgaggtcaagggggcgcggcggcggcggcggcggcggcggaggaggaggaggcggaggcgccagcggcaatccggggaagatcttcgtcggagggctcccgcgggacaccacggatgctacatttgtgaggcattttggacagtatggagaaatagttgattcggtgataatgaaggataggcacacatctcagccacggggttttggcttcattacatactccgaccctgctgttgttgataaagtgatagaggacaatcatgttatcaatggaaagcaagttgaaattaagagaaccataccaaaaggttcggtgcaatctagctctaaggatttcaagactaaaaagatatttgttggtgggcttccgtcaacactaacagaagacgaattcaagagtttctttgcaanatatgggactgtggtggaccaccagattatgtttgatcatgaaaccaaacgttcccgaggctttggatttatagtttttgcttctgagcaagttgtagatgatttgttagcaaatggaaatatggttgaccttgctggttcaaaggtgagtctgaagttcattatagaaatgacaccaatggttgtctcctccattgtggatctatggtgtaaaatatgtaaagtagtgttttgcattcttctattccaagtc

SEQ ID NO: 38111 - protein, 256 aa, Zea mays subsp. mays
  peptide (1)..(256): Ceres Seq. ID no. 12545912
  misc_feature (62)..(131): Pfam Name: a.k.a. RRM, RBD, or RNP domain Pfam Description: RNA recognition motif.
  misc_feature (52)..(223): NCBI GI NO: 30682550 NR Description: RNA recognition motif (RRM)-containing protein
  misc_feature (52)..(224): NCBI GI NO: 30682553 NR Description: RNA recognition motif (RRM)-containing protein
  misc_feature (54)..(224): NCBI GI NO: 35215091 NR Description: putative heterogeneous nuclear ribonucleoprotein A3homolog 1
  misc_feature (53)..(224): NCBI GI NO: 15242719 NR Description: RRM-containing RNA-binding protein, putative
  misc_feature (58)..(224): NCBI GI NO: 15220810 NR Description: RRM-containing RNA-binding protein, putative
  misc_feature (61)..(224): NCBI GI NO: 8778468 NR Description: F1L3.34 [Arabidopsis thaliana]
  misc_feature (60)..(141): NCBI GI NO: 18416794 NR Description: heterogeneous nuclear ribonucleoprotein
  misc_feature (148)..(224): NCBI GI NO: 18416794 NR Description: heterogeneous nuclear ribonucleoprotein
  misc_feature (60)..(141): NCBI GI NO: 7487039 NR Description: hypothetical protein T15N24
  misc_feature (148)..(224): NCBI GI NO: 7487039 NR Description: hypothetical protein T15N24
  misc_feature (172)..(172): Xaa is any aa, unknown or other
HIIERNAVVIASESVASNSQAPTGNPSEAMGKAEARSRGRGGGGGGGGGGGGGGASGNPGKIFVGGLPRDTTDATFVRHFGQYGEIVDSVIMKDRHTSQPRGFGFITYSDPAVVDKVIEDNHVINGKQVEIKRTIPKGSVQSSSKDFKTKKIFVGGLPSTLTEDEFKSFFAXYGTVVDHQIMFDHETKRSRGFGFIVFASEQVVDDLLANGNMVDLAGSKVSLKFIIEMTPMVVSSIVDLWCKICKVVFCILLFQV

SEQ ID NO: 38112 - protein, 227 aa, Zea mays subsp. mays
  peptide (1)..(227): Ceres Seq. ID no. 12545913
  misc_feature (33)..(102): Pfam Name: a.k.a. RRM, RBD, or RNP domain Pfam Description: RNA recognition motif.
  misc_feature (23)..(194): NCBI GI NO: 30682550 NR Description: RNA recognition motif (RRM)-containing protein
  misc_feature (23)..(195): NCBI GI NO: 30682553 NR Description: RNA recognition motif (RRM)-containing protein
  misc_feature (25)..(195): NCBI GI NO: 35215091 NR Description: putative heterogeneous nuclear ribonucleoprotein A3homolog 1
  misc_feature (24)..(195): NCBI GI NO: 15242719 NR Description: RRM-containing RNA-binding protein, putative
  misc_feature (29)..(195): NCBI GI NO: 15220810 NR Description: RRM-containing RNA-binding protein, putative
  misc_feature (32)..(195): NCBI GI NO: 8778468 NR Description: F1L3.34 [Arabidopsis thaliana]
  misc_feature (31)..(112): NCBI GI NO: 18416794 NR Description: heterogeneous nuclear ribonucleoprotein
  misc_feature (119)..(195): NCBI GI NO: 18416794 NR Description: heterogeneous nuclear ribonucleoprotein
  misc_feature (31)..(112): NCBI GI NO: 7487039 NR Description: hypothetical protein T15N24
  misc_feature (119)..(195): NCBI GI NO: 7487039 NR Description: hypothetical protein T15N24
  misc_feature (143)..(143): Xaa is any aa, unknown or other
MGKAEARSRGRGGGGGGGGGGGGGGASGNPGKIFVGGLPRDTTDATFVRHFGQYGEIVDSVIMKDRHTSQPRGFGFITYSDPAVVDKVIEDNHVINGKQVEIKRTIPKGSVQSSSKDFKTKKIFVGGLPSTLTEDEFKSFFAXYGTVVDHQIMFDHETKRSRGFGFIVFASEQVVDDLLANGNMVDLAGSKVSLKFIIEMTPMVVSSIVDLWCKICKVVFCILLFQV

SEQ ID NO: 38113 - protein, 165 aa, Zea mays subsp. mays
  peptide (1)..(165): Ceres Seq. ID no. 12545914
  misc_feature (61)..(132): Pfam Name: a.k.a. RRM, RBD, or RNP domain Pfam Description: RNA recognition motif.
  misc_feature (1)..(132): NCBI GI NO: 30682550 NR Description: RNA recognition motif (RRM)-containing protein
  misc_feature (1)..(133): NCBI GI NO: 30682553 NR Description: RNA recognition motif (RRM)-containing protein
  misc_feature (1)..(133): NCBI GI NO: 35215091 NR Description: putative heterogeneous nuclear ribonucleoprotein A3homolog 1
  misc_feature (1)..(133): NCBI GI NO: 15242719 NR Description: RRM-containing RNA-binding protein, putative
  misc_feature (1)..(133): NCBI GI NO: 15220810 NR Description: RRM-containing RNA-binding protein, putative
  misc_feature (1)..(133): NCBI GI NO: 8778468 NR Description: F1L3.34 [Arabidopsis thaliana]
  misc_feature (1)..(50): NCBI GI NO: 18416794 NR Description: heterogeneous nuclear ribonucleoprotein
  misc_feature (57)..(133): NCBI GI NO: 18416794 NR Description: heterogeneous nuclear ribonucleoprotein
  misc_feature (1)..(50): NCBI GI NO: 7487039 NR Description: hypothetical protein T15N24
  misc_feature (57)..(133): NCBI GI NO: 7487039 NR Description: hypothetical protein T15N24
  misc_feature (81)..(81): Xaa is any aa, unknown or other
MKDRHTSQPRGFGFITYSDPAVVDKVIEDNHVINGKQVEIKRTIPKGSVQSSSKDFKTKKIFVGGLPSTLTEDEFKSFFAXYGTVVDHQIMFDHETKRSRGFGFIVFASEQVVDDLLANGNMVDLAGSKVSLKFIIEMTPMVVSSIVDLWCKICKVVFCILLFQV

SEQ ID NO: 38114 - DNA, 1644 bp, Zea mays subsp. mays
  misc_feature (1)..(1644): Ceres Seq. ID no. 12407466
actcttcaccaccgccattcccccccccactcttcaccaccgcagcgccgccgcgtacaaggcgattaggcgaagctgcaccggaaggagaaggagagaagcgagagtctccccagccagagcaagccgaatccgaagctagcggagaggagagagggctgagtgaggatgccgacggttacctgcaacgcgtgcaacgcggggttcgacgacgaggagcagcagcggcttcactaccgctctgaatggcaccgttacaacctcaagcgcaaggtggctggagttcctggtgtcacagaggctctgtttctggctaggcaagctgctttggcggaggggagcaagcctgctagcaccccaatgctttacagctgtgctctttgtggaaaggagtacagaagctcgaaagctcacgagcagcatcttaactcgcgatcacatcttttgaaagcctctcaggagcccaatgcctctattgctggtatcacgatagtcaagccacttcctgaacgagtctcacgaagagctccatctgcagtagaggaggatcaagacgacgatgaggaagaagagtgggttgaagttgacccaagtgagatggagttggctgatgagtctacttcaaacatgcaagaagatgagcactcctcaaaatcagatgatgacatggatgaccttgaagagttggatatctcgtcgtgtttcatgtgtgacctcaagcatgacaccatagaagactgcatggtccatatgcataagaagcatgggtttttcatacctgacagtgaatacttgaaggatcccagtggtcttcttacttatgttggactgaaggtgaagcgtgattttatctgcctctactgcaatgacagatgccagtccttcttcagtctagaggctgtcaggaagcacatggatgcaaaggggcattgcaagttgcggtatggagatggtggagatgatgaagatgctgacctcgaggaattctatgattacagcagcagttatgttgattcagaaggcaagcagttgattgctgttgatgacttgaacaacaacattgagctgggaatcggtgggtctgagctagtaataacaaacaagagcgagaaaggcactcgggtcagaacccttggctctagggaatttatgcgctactatcgccagaaaccacggccttctgttgcaccagaccgtgcgcttgcactttcactagcttccagctacaagagcatgggtttggtgacagtgcagtctaaggagcagatggtgaggctgaaagttctccgtgctatgaacaggaccggggtcgagactatgcggaacaagatcggaatgaagagcaatgtgatccggaacctccctaagaattgcccgcactagacaacactgccttctcctgcaccctatctggagcttctcctggcatttatatggtgtcttatggtttcttgtctgtcgctgacaacgttggcgcttaagatatttggaataggactacaccttccatagtttttgttgaactctgtggtgcggaagcagctgttgccattatggcggaaattgctgacgcctcattgaacatgtttagtttttattttgttaaaaaattgggcaaaaaagtttgatgctcatattcatcgc

SEQ ID NO: 38115 - protein, 404 aa, Zea mays subsp. mays
  peptide (1)..(404): Ceres Seq. ID no. 12407467
  misc_feature (227)..(254): Pfam Name: Pfam Description:  Zinc finger, C2H2 type
  misc_feature (1)..(404): NCBI GI NO: 18417803 NR Description: putative zinc finger protein; protein id:At4g31420
  misc_feature (1)..(404): NCBI GI NO: 13878013 NR Description: putative zinc finger protein
  misc_feature (1)..(401): NCBI GI NO: 15224153 NR Description: putative C2H2-type zinc finger protein
  misc_feature (1)..(353): NCBI GI NO: 7486672 NR Description: hypothetical protein F8F16
  misc_feature (125)..(398): NCBI GI NO: 21362307 NR Description: hypothetical protein D15Ertd806e [Mus musculus]
  misc_feature (1)..(142): NCBI GI NO: 21362307 NR Description: hypothetical protein D15Ertd806e [Mus musculus]
  misc_feature (160)..(325): NCBI GI NO: 28207607 NR Description: putative C2H2-type zinc finger protein
  misc_feature (114)..(398): NCBI GI NO: 15529978 NR Description: zinc finger-like protein 9 [Homo sapiens]
  misc_feature (1)..(103): NCBI GI NO: 15529978 NR Description: zinc finger-like protein 9 [Homo sapiens]
  misc_feature (1)..(396): NCBI GI NO: 18859899 NR Description: CG6769-PA [Drosophila melanogaster]
MPTVTCNACNAGFDDEEQQRLHYRSEWHRYNLKRKVAGVPGVTEALFLARQAALAEGSKPASTPMLYSCALCGKEYRSSKAHEQHLNSRSHLLKASQEPNASIAGITIVKPLPERVSRRAPSAVEEDQDDDEEEEWVEVDPSEMELADESTSNMQEDEHSSKSDDDMDDLEELDISSCFMCDLKHDTIEDCMVHMHKKHGFFIPDSEYLKDPSGLLTYVGLKVKRDFICLYCNDRCQSFFSLEAVRKHMDAKGHCKLRYGDGGDDEDADLEEFYDYSSSYVDSEGKQLIAVDDLNNNIELGIGGSELVITNKSEKGTRVRTLGSREFMRYYRQKPRPSVAPDRALALSLASSYKSMGLVTVQSKEQMVRLKVLRAMNRTGVETMRNKIGMKSNVIRNLPKNCPH

SEQ ID NO: 38116 - protein, 340 aa, Zea mays subsp. mays
  peptide (1)..(340): Ceres Seq. ID no. 12407468
  misc_feature (163)..(190): Pfam Name: Pfam Description:  Zinc finger, C2H2 type
  misc_feature (1)..(340): NCBI GI NO: 18417803 NR Description: putative zinc finger protein; protein id:At4g31420
  misc_feature (1)..(340): NCBI GI NO: 13878013 NR Description: putative zinc finger protein
  misc_feature (1)..(337): NCBI GI NO: 15224153 NR Description: putative C2H2-type zinc finger protein
  misc_feature (1)..(289): NCBI GI NO: 7486672 NR Description: hypothetical protein F8F16
  misc_feature (61)..(334): NCBI GI NO: 21362307 NR Description: hypothetical protein D15Ertd806e [Mus musculus]
  misc_feature (1)..(78): NCBI GI NO: 21362307 NR Description: hypothetical protein D15Ertd806e [Mus musculus]
  misc_feature (96)..(261): NCBI GI NO: 28207607 NR Description: putative C2H2-type zinc finger protein
  misc_feature (50)..(334): NCBI GI NO: 15529978 NR Description: zinc finger-like protein 9 [Homo sapiens]
  misc_feature (1)..(39): NCBI GI NO: 15529978 NR Description: zinc finger-like protein 9 [Homo sapiens]
  misc_feature (1)..(332): NCBI GI NO: 18859899 NR Description: CG6769-PA [Drosophila melanogaster]
MLYSCALCGKEYRSSKAHEQHLNSRSHLLKASQEPNASIAGITIVKPLPERVSRRAPSAVEEDQDDDEEEEWVEVDPSEMELADESTSNMQEDEHSSKSDDDMDDLEELDISSCFMCDLKHDTIEDCMVHMHKKHGFFIPDSEYLKDPSGLLTYVGLKVKRDFICLYCNDRCQSFFSLEAVRKHMDAKGHCKLRYGDGGDDEDADLEEFYDYSSSYVDSEGKQLIAVDDLNNNIELGIGGSELVITNKSEKGTRVRTLGSREFMRYYRQKPRPSVAPDRALALSLASSYKSMGLVTVQSKEQMVRLKVLRAMNRTGVETMRNKIGMKSNVIRNLPKNCPH

SEQ ID NO: 38117 - protein, 261 aa, Zea mays subsp. mays
  peptide (1)..(261): Ceres Seq. ID no. 12407469
  misc_feature (84)..(111): Pfam Name: Pfam Description:  Zinc finger, C2H2 type
  misc_feature (1)..(261): NCBI GI NO: 18417803 NR Description: putative zinc finger protein; protein id:At4g31420
  misc_feature (1)..(261): NCBI GI NO: 13878013 NR Description: putative zinc finger protein
  misc_feature (1)..(258): NCBI GI NO: 15224153 NR Description: putative C2H2-type zinc finger protein
  misc_feature (1)..(210): NCBI GI NO: 7486672 NR Description: hypothetical protein F8F16
  misc_feature (1)..(255): NCBI GI NO: 21362307 NR Description: hypothetical protein D15Ertd806e [Mus musculus]
  misc_feature (17)..(182): NCBI GI NO: 28207607 NR Description: putative C2H2-type zinc finger protein
  misc_feature (1)..(255): NCBI GI NO: 15529978 NR Description: zinc finger-like protein 9 [Homo sapiens]
  misc_feature (1)..(253): NCBI GI NO: 18859899 NR Description: CG6769-PA [Drosophila melanogaster]
  misc_feature (1)..(255): NCBI GI NO: 34854897 NR Description: similar to Ac1133 [Rattus norvegicus]
  misc_feature (1)..(238): NCBI GI NO: 33286946 NR Description: Unknown (protein for IMAGE:6795513) [Danio rerio]
MELADESTSNMQEDEHSSKSDDDMDDLEELDISSCFMCDLKHDTIEDCMVHMHKKHGFFIPDSEYLKDPSGLLTYVGLKVKRDFICLYCNDRCQSFFSLEAVRKHMDAKGHCKLRYGDGGDDEDADLEEFYDYSSSYVDSEGKQLIAVDDLNNNIELGIGGSELVITNKSEKGTRVRTLGSREFMRYYRQKPRPSVAPDRALALSLASSYKSMGLVTVQSKEQMVRLKVLRAMNRTGVETMRNKIGMKSNVIRNLPKNCPH

SEQ ID NO: 38118 - DNA, 2112 bp, Zea mays subsp. mays
  misc_feature (1)..(2112): Ceres Seq. ID no. 12405293
atcaccaccagccagcaccacccctcctgcccctctgcgctggcgggccgagcgccgcgagcgagctgggccgcgggcggaggaggagtcgaggctgaccgaccccgcggccggcggcgacgagcggacgcagattcggcagccgtgcgcggaatgcccgtggaaggaggggagagagggagggcgcaggcgcagctgagctgagctgagcccgcgaggttcgcggtctgcggtgcggcggcagaggtctcgccagcgcgatggccagcggcggctcctccaggtacagctcgtacaaggcgccggggctgcgcggcgcgctgctggaggcggcgcacgtgtcgtgcctcgaggaccggtacgcgctgggcccgcagctggggtggggccagttcggcgtgatccggtcctgctccgacctggtcaccggcgaggcgctggcctgcaagtccatcgccaagggccggctcgtgtcccccgacgacgtgcgcggggtcaggctggagatcgacgtcatggcgcgcctggcgggccaccccaacgtcgtggggctcaaggccgtgtacgaggaccgcgactcggtgcacctcgtcatggagctctgcgccggcggcgagctcttccaccgcctccacgagcgcggctgcttccccgagcgcgaggccgccgcgctcttccgccacctcatggaggtcgtcgcgcactgccacgccaaggggatcgtgcaccgcgacctcaagcccgagaacatcctcctcgtcagcaggtcgccccagtcgccgatcaaactcgcggactttggactcgccacctacacccagcctggccgaagcttgagcggcatggtaggcagcccgttctacattgcgccggaggtgctctccggcgggtacaacgaggccgccgacgtctggagcgcgggggtcatactctacatcctcctcagcggcatcccacctttttggggcaagaccaagtccaagatcttcgactgcatcaggtccatggagctgcggttcccttctgacccatgggacagggtttctgattccgccaaggagctcgtcaccgggatgctgcggcgcgaccctaggctgcggctcacggccaagcaggttctagagcatccgtggatgcaggaacacgcggacccacaagactcgtgcgggcagtgccacgagaccggcctccaacgggagggcgccggctcgtgctccttctccacgccgttggcgtcgcggagcagggacgtgagctttgacacgcgtggccccatcgcgtggaggggtgggggcgaggacgaggcgacctgctgctcgcccacgttcgccgccgtctgcaggtcgtcgttctcggcgttcatcaccgacccggccccgccgccctgctcggcctcctccgccttgggtggctctggcttctcgttcggtgagccctgcgaaccacttgacggaggaggaggaggagggttcccgatgcccatggcttccatgccgagcttctcgttcttctgcgcgcgggacagcagcgagccagctgagccacagccggtcgctgcctcctcgactccgaggacggcgaggggatccacgccacggggcgtcaacggcaggcggaaccacacgatcggcggcggcgggcgggagcacctggacgtggcggtggagtctgtcatccgctgggcgtcgtgcaccaacttctccacggcgccctcacttcgggcctccctcgtatgctagcactagcaacgtcgttccgcgcgccggcgccgccaacgccgggctgagggtgaggaggagaattccgacgagacgagcggtagagagtgtgcagtagcctcgaattgtataatatatatacagacacagtgctgttatagtggtgatgatagattagagagtgaaggtgaagttgctacggagggatggatgcatggagatggagagcgagtggcagagctggaactgatgtgttttattcttcgctgtcacgctgctggtcagataagatttgggaacgctgctggtcagataagatttgggaacacacctggcgacggagagagaaggcgtctgataatttgatatgaacaagaagcaacaatgttcaggt

SEQ ID NO: 38119 - protein, 492 aa, Zea mays subsp. mays
  peptide (1)..(492): Ceres Seq. ID no. 12405294
  misc_feature (34)..(292): Pfam Name: Pfam Description:  Protein kinase domain
  misc_feature (1)..(492): NCBI GI NO: 34898032 NR Description: ESTs AU030197
  misc_feature (1)..(492): NCBI GI NO: 25553562 NR Description: OSJNBa0038F22.11
  misc_feature (1)..(492): NCBI GI NO: 21064945 NR Description: CDPK-like protein [Solanum tuberosum]
  misc_feature (12)..(386): NCBI GI NO: 15222023 NR Description: calcium-dependent protein kinase, putative
  misc_feature (396)..(492): NCBI GI NO: 15222023 NR Description: calcium-dependent protein kinase, putative
  misc_feature (1)..(300): NCBI GI NO: 5162877 NR Description: calcium-dependent protein kinase
  misc_feature (1)..(300): NCBI GI NO: 5162878 NR Description: calcium-dependent protein kinase
  misc_feature (16)..(293): NCBI GI NO: 7434364 NR Description: calcium-dependent protein kinase (EC 2
  misc_feature (30)..(292): NCBI GI NO: 33146743 NR Description: putative calcium-dependent protein kinase 2
  misc_feature (1)..(300): NCBI GI NO: 15239716 NR Description: calcium-dependent protein kinase - like
MASGGSSRYSSYKAPGLRGALLEAAHVSCLEDRYALGPQLGWGQFGVIRSCSDLVTGEALACKSIAKGRLVSPDDVRGVRLEIDVMARLAGHPNVVGLKAVYEDRDSVHLVMELCAGGELFHRLHERGCFPEREAAALFRHLMEVVAHCHAKGIVHRDLKPENILLVSRSPQSPIKLADFGLATYTQPGRSLSGMVGSPFYIAPEVLSGGYNEAADVWSAGVILYILLSGIPPFWGKTKSKIFDCIRSMELRFPSDPWDRVSDSAKELVTGMLRRDPRLRLTAKQVLEHPWMQEHADPQDSCGQCHETGLQREGAGSCSFSTPLASRSRDVSFDTRGPIAWRGGGEDEATCCSPTFAAVCRSSFSAFITDPAPPPCSASSALGGSGFSFGEPCEPLDGGGGGGFPMPMASMPSFSFFCARDSSEPAEPQPVAASSTPRTARGSTPRGVNGRRNHTIGGGGREHLDVAVESVIRWASCTNFSTAPSLRASLVC

SEQ ID NO: 38120 - protein, 407 aa, Zea mays subsp. mays
  peptide (1)..(407): Ceres Seq. ID no. 12405295
  misc_feature (1)..(207): Pfam Name: Pfam Description:  Protein kinase domain
  misc_feature (1)..(407): NCBI GI NO: 34898032 NR Description: ESTs AU030197
  misc_feature (1)..(407): NCBI GI NO: 25553562 NR Description: OSJNBa0038F22.11
  misc_feature (1)..(407): NCBI GI NO: 21064945 NR Description: CDPK-like protein [Solanum tuberosum]
  misc_feature (1)..(301): NCBI GI NO: 15222023 NR Description: calcium-dependent protein kinase, putative
  misc_feature (311)..(407): NCBI GI NO: 15222023 NR Description: calcium-dependent protein kinase, putative
  misc_feature (1)..(215): NCBI GI NO: 5162877 NR Description: calcium-dependent protein kinase
  misc_feature (1)..(215): NCBI GI NO: 5162878 NR Description: calcium-dependent protein kinase
  misc_feature (1)..(208): NCBI GI NO: 7434364 NR Description: calcium-dependent protein kinase (EC 2
  misc_feature (1)..(207): NCBI GI NO: 33146743 NR Description: putative calcium-dependent protein kinase 2
  misc_feature (1)..(215): NCBI GI NO: 15239716 NR Description: calcium-dependent protein kinase - like
MARLAGHPNVVGLKAVYEDRDSVHLVMELCAGGELFHRLHERGCFPEREAAALFRHLMEVVAHCHAKGIVHRDLKPENILLVSRSPQSPIKLADFGLATYTQPGRSLSGMVGSPFYIAPEVLSGGYNEAADVWSAGVILYILLSGIPPFWGKTKSKIFDCIRSMELRFPSDPWDRVSDSAKELVTGMLRRDPRLRLTAKQVLEHPWMQEHADPQDSCGQCHETGLQREGAGSCSFSTPLASRSRDVSFDTRGPIAWRGGGEDEATCCSPTFAAVCRSSFSAFITDPAPPPCSASSALGGSGFSFGEPCEPLDGGGGGGFPMPMASMPSFSFFCARDSSEPAEPQPVAASSTPRTARGSTPRGVNGRRNHTIGGGGREHLDVAVESVIRWASCTNFSTAPSLRASLVC

SEQ ID NO: 38121 - protein, 381 aa, Zea mays subsp. mays
  peptide (1)..(381): Ceres Seq. ID no. 12405296
  misc_feature (1)..(181): Pfam Name: Pfam Description:  Protein kinase domain
  misc_feature (1)..(381): NCBI GI NO: 34898032 NR Description: ESTs AU030197
  misc_feature (1)..(381): NCBI GI NO: 25553562 NR Description: OSJNBa0038F22.11
  misc_feature (1)..(381): NCBI GI NO: 21064945 NR Description: CDPK-like protein [Solanum tuberosum]
  misc_feature (1)..(275): NCBI GI NO: 15222023 NR Description: calcium-dependent protein kinase, putative
  misc_feature (285)..(381): NCBI GI NO: 15222023 NR Description: calcium-dependent protein kinase, putative
  misc_feature (1)..(189): NCBI GI NO: 5162877 NR Description: calcium-dependent protein kinase
  misc_feature (1)..(189): NCBI GI NO: 5162878 NR Description: calcium-dependent protein kinase
  misc_feature (1)..(182): NCBI GI NO: 7434364 NR Description: calcium-dependent protein kinase (EC 2
  misc_feature (1)..(181): NCBI GI NO: 33146743 NR Description: putative calcium-dependent protein kinase 2
  misc_feature (1)..(189): NCBI GI NO: 15239716 NR Description: calcium-dependent protein kinase - like
MELCAGGELFHRLHERGCFPEREAAALFRHLMEVVAHCHAKGIVHRDLKPENILLVSRSPQSPIKLADFGLATYTQPGRSLSGMVGSPFYIAPEVLSGGYNEAADVWSAGVILYILLSGIPPFWGKTKSKIFDCIRSMELRFPSDPWDRVSDSAKELVTGMLRRDPRLRLTAKQVLEHPWMQEHADPQDSCGQCHETGLQREGAGSCSFSTPLASRSRDVSFDTRGPIAWRGGGEDEATCCSPTFAAVCRSSFSAFITDPAPPPCSASSALGGSGFSFGEPCEPLDGGGGGGFPMPMASMPSFSFFCARDSSEPAEPQPVAASSTPRTARGSTPRGVNGRRNHTIGGGGREHLDVAVESVIRWASCTNFSTAPSLRASLVC

SEQ ID NO: 38122 - DNA, 975 bp, Zea mays subsp. mays
  misc_feature (1)..(975): Ceres Seq. ID no. 12373004
agatcactggcagtcgcaagtagcaacccgcatcacgagttcacccacgctccccgcacagctcactagcgaccagggagttcaaacaagaggcaacaagaacgaacgccaccaccgcgctccggtcgctttgcttggttcgggccactgcaccgccattgttgatctgttctccttctccttggaggagaaagaagagggggagaggaatgatggggcggacgagcgtggcggcggcggcggccctgctggtgctggcggcgtgcgcggctctgccggcgagaacggcggcgaacaagatcagcatcaactggaagcccaacgtgaactacaccgactggctgaagcagcacagccccttctacaaggacgactggctggtgttctactacacggcggggcaggcggacgtggtgcaggtggacgaggtgggctacaacaagtgcgactccaccaacgccatctacaactacagcaaggggcgcagcttcgccttccagctcaacgagaccaagacctactacttcatctgcagctacggctactgcttcggcgggatgcgcctcgccatcaaggccgagaagttgccgccgccgtcgccgccgccgtccgccagcgaccgctccgccgccgccatcgccgccttcgccaggtcccacgcgcccgtcatctacgccgccgtcgccgtgctcgccgcgctgctcaggatggtctagctgggaagaatctacccgccggcccctttgttggttcgaattgggactccttttttttgttcgttcagcctctccatcttttccgtagtgtgcttgggctctcgagaggagcagtagctggtgctggagtgctgcgttgggttcattaattaattagcggtgtggatttgccgaagcgattgattgagctgagattgatttttcaagtgtgaagaactctagctgccttgctgaattaaagtaactccagccttttcgt

SEQ ID NO: 38123 - protein, 287 aa, Zea mays subsp. mays
  peptide (1)..(287): Ceres Seq. ID no. 12373005
DHWQSQVATRITSSPTLPAQLTSDQGVQTRGNKNERHHRAPVALLGSGHCTAIVDLFSFSLEEKEEGERNDGADERGGGGGPAGAGGVRGSAGENGGEQDQHQLEAQRELHRLAEAAQPLLQGRLAGVLLHGGAGGRGAGGRGGLQQVRLHQRHLQLQQGAQLRLPAQRDQDLLLHLQLRLLLRRDAPRHQGREVAAAVAAAVRQRPLRRRHRRLRQVPRARHLRRRRRARRAAQDGLAGKNLPAGPFVGSNWDSFFLFVQPLHLFRSVLGLSRGAVAGAGVLRWVH

SEQ ID NO: 38124 - protein, 168 aa, Zea mays subsp. mays
  peptide (1)..(168): Ceres Seq. ID no. 12373006
  misc_feature (35)..(117): Pfam Name: Pfam Description:  Plastocyanin-like domain
  misc_feature (11)..(167): NCBI GI NO: 13236660 NR Description: putative blue copper-binding protein
  misc_feature (14)..(168): NCBI GI NO: 38175738 NR Description: blue copper-binding protein-like
  misc_feature (14)..(168): NCBI GI NO: 34915266 NR Description: contains EST AU197337
  misc_feature (2)..(158): NCBI GI NO: 21594180 NR Description: putative lamin [Arabidopsis thaliana]
  misc_feature (2)..(158): NCBI GI NO: 15232035 NR Description: putative lamin; protein id: At3g01070
  misc_feature (2)..(167): NCBI GI NO: 15242279 NR Description: putative protein; protein id: At5g15350
  misc_feature (2)..(144): NCBI GI NO: 24417322 NR Description: unknown [Arabidopsis thaliana]
  misc_feature (2)..(144): NCBI GI NO: 25282797 NR Description: blue copper-binding protein lamin - wild cabbage
  misc_feature (2)..(135): NCBI GI NO: 15235520 NR Description: blue copper-binding protein, 15K
  misc_feature (2)..(130): NCBI GI NO: 2129631 NR Description: blue copper-binding protein
MMGRTSVAAAAALLVLAACAALPARTAANKISINWKPNVNYTDWLKQHSPFYKDDWLVFYYTAGQADVVQVDEVGYNKCDSTNAIYNYSKGRSFAFQLNETKTYYFICSYGYCFGGMRLAIKAEKLPPPSPPPSASDRSAAAIAAFARSHAPVIYAAVAVLAALLRMV

SEQ ID NO: 38125 - protein, 167 aa, Zea mays subsp. mays
  peptide (1)..(167): Ceres Seq. ID no. 12373007
  misc_feature (34)..(116): Pfam Name: Pfam Description:  Plastocyanin-like domain
  misc_feature (10)..(166): NCBI GI NO: 13236660 NR Description: putative blue copper-binding protein
  misc_feature (13)..(167): NCBI GI NO: 38175738 NR Description: blue copper-binding protein-like
  misc_feature (13)..(167): NCBI GI NO: 34915266 NR Description: contains EST AU197337
  misc_feature (1)..(157): NCBI GI NO: 21594180 NR Description: putative lamin [Arabidopsis thaliana]
  misc_feature (1)..(157): NCBI GI NO: 15232035 NR Description: putative lamin; protein id: At3g01070
  misc_feature (1)..(166): NCBI GI NO: 15242279 NR Description: putative protein; protein id: At5g15350
  misc_feature (1)..(143): NCBI GI NO: 24417322 NR Description: unknown [Arabidopsis thaliana]
  misc_feature (1)..(143): NCBI GI NO: 25282797 NR Description: blue copper-binding protein lamin - wild cabbage
  misc_feature (1)..(134): NCBI GI NO: 15235520 NR Description: blue copper-binding protein, 15K
  misc_feature (1)..(129): NCBI GI NO: 2129631 NR Description: blue copper-binding protein
MGRTSVAAAAALLVLAACAALPARTAANKISINWKPNVNYTDWLKQHSPFYKDDWLVFYYTAGQADVVQVDEVGYNKCDSTNAIYNYSKGRSFAFQLNETKTYYFICSYGYCFGGMRLAIKAEKLPPPSPPPSASDRSAAAIAAFARSHAPVIYAAVAVLAALLRMV

SEQ ID NO: 38126 - DNA, 1685 bp, Zea mays subsp. mays
  misc_feature (1)..(1685): Ceres Seq. ID no. 12350656
atagtcattttagcttgtgcacgctttgctgctctaaggtttaccgggcaaacactggacgacaggtgaacggggatgcacagttaggagattgagggagcgagaagggagggaggcaaaggagacagcatatgggatgtatttacagatgacaaagaacatgtcttagacagaagcaatggagaaattgcagttgatcactaccatcgatacaaggaagacattgagctcatggcaagtctaggttttagcgcatacagattttctatatcttgggcgcgtatatttcctgatggcttggggggaaaggtcaatgatcaaggagtcgccttctataatgacctcatcaactttatgatttcgaaaggtattgagccttacgcaactctatatcattgggatcttccaaacaatcttcagaagactctggggggctggatttctgacaagattgtggagtactttgcattgtatgcagaagcttgctttgcaaattttggagacagagtaaagcattggataacaatcaatgaacctctccaaactgcaatcaatggttatgggattggaatttttgcacctggaggatgccaaggtgaaactgctagatgttacttggctgcccatcaccaaatcttggctcatgctgctgctgttgatgtttatagaagaaaattcaaggctgcacaaggtggtgaagtagggttggttgttgattgtgaatgggcagagccattttctgaaaatgtggaagaccaaattgctgcacagcggaggcttgactttcaacttggatggtacttagatccaatatattttggtgattacccagaaagcatgcgtcaacgactgggcagtgatcttccaaccttctcagagaaagataaagagttcatgaggaacaaaattgattttgttggagtaaatcattatacttcaagactcattgctcatctccaaaatccaaacgatgtttatttctaccaagtgcaacaaatggagcgaatagaaaaatggaatagtggtgaaaaaattggtgaaagggctgcatctgaatggcttttcatagttccttggggccttcataagtcacttaattatatagcgaagaagtacaataatccagcaatttatgttactgagaatggcatggatgaagaggacgatcaatccgcaacgcttgaccaggtcctaaacgacacgacgagggtcggttacttcaaagggtacctcaattcagttgcgcaagcgatcaaggacggagctgatgtccgcgggtactttgcgtggtcgttcctggacaacttcgagtgggcaatgggctacaccaagaggttcggcatagtctacgtggactacaagaaggggctgtccaggcacccgaaagcatcggcgctgtggttctcgcgcttgctcaagggcgaggctggcactggcacaagctgagcgaactgcacgcagcatgcaagcacagaacgtcgtcgttattacaatataaatattccacacaactagacgttttctcctgttgttgtatcgtactactgtacagtaagcgccaataagctagcctcagatgtgtgctgcctgcctatacctctagtggctgccattgatccagcactagctgaaatgtacccggcctccaagaatcagcaccagaatatatgctttgaattgaactc

SEQ ID NO: 38127 - protein, 404 aa, Zea mays subsp. mays
  peptide (1)..(404): Ceres Seq. ID no. 12350657
  misc_feature (1)..(398): NCBI GI NO: 34907636 NR Description: putative beta-glucosidase
  misc_feature (1)..(400): NCBI GI NO: 31580730 NR Description: latex cyanogenic beta glucosidase
  misc_feature (1)..(398): NCBI GI NO: 22327412 NR Description: glycosyl hydrolase family 1; protein id:At5g36890
  misc_feature (1)..(396): NCBI GI NO: 22658440 NR Description: beta-glucosidase
  misc_feature (1)..(401): NCBI GI NO: 15778431 NR Description: prunasin hydrolase isoform PH A precursor
  misc_feature (1)..(401): NCBI GI NO: 6979913 NR Description: prunasin hydrolase isoform PHA precursor
  misc_feature (1)..(396): NCBI GI NO: 15229584 NR Description: glycosyl hydrolase family 1; protein id:At3g18080
  misc_feature (1)..(396): NCBI GI NO: 16757966 NR Description: amygdalin hydrolase isoform AH I precursor
  misc_feature (1)..(396): NCBI GI NO: 18875458 NR Description: beta-glucosidase [Oryza sativa]
  misc_feature (1)..(396): NCBI GI NO: 7435445 NR Description: beta-glucosidase (EC 3
MASLGFSAYRFSISWARIFPDGLGGKVNDQGVAFYNDLINFMISKGIEPYATLYHWDLPNNLQKTLGGWISDKIVEYFALYAEACFANFGDRVKHWITINEPLQTAINGYGIGIFAPGGCQGETARCYLAAHHQILAHAAAVDVYRRKFKAAQGGEVGLVVDCEWAEPFSENVEDQIAAQRRLDFQLGWYLDPIYFGDYPESMRQRLGSDLPTFSEKDKEFMRNKIDFVGVNHYTSRLIAHLQNPNDVYFYQVQQMERIEKWNSGEKIGERAASEWLFIVPWGLHKSLNYIAKKYNNPAIYVTENGMDEEDDQSATLDQVLNDTTRVGYFKGYLNSVAQAIKDGADVRGYFAWSFLDNFEWAMGYTKRFGIVYVDYKKGLSRHPKASALWFSRLLKGEAGTGTS

SEQ ID NO: 38128 - protein, 363 aa, Zea mays subsp. mays
  peptide (1)..(363): Ceres Seq. ID no. 12350658
  misc_feature (1)..(357): NCBI GI NO: 34907636 NR Description: putative beta-glucosidase
  misc_feature (1)..(359): NCBI GI NO: 31580730 NR Description: latex cyanogenic beta glucosidase
  misc_feature (1)..(357): NCBI GI NO: 22327412 NR Description: glycosyl hydrolase family 1; protein id:At5g36890
  misc_feature (1)..(355): NCBI GI NO: 22658440 NR Description: beta-glucosidase
  misc_feature (1)..(360): NCBI GI NO: 15778431 NR Description: prunasin hydrolase isoform PH A precursor
  misc_feature (1)..(360): NCBI GI NO: 6979913 NR Description: prunasin hydrolase isoform PHA precursor
  misc_feature (1)..(355): NCBI GI NO: 15229584 NR Description: glycosyl hydrolase family 1; protein id:At3g18080
  misc_feature (1)..(355): NCBI GI NO: 16757966 NR Description: amygdalin hydrolase isoform AH I precursor
  misc_feature (1)..(355): NCBI GI NO: 18875458 NR Description: beta-glucosidase [Oryza sativa]
  misc_feature (1)..(355): NCBI GI NO: 7435445 NR Description: beta-glucosidase (EC 3
MISKGIEPYATLYHWDLPNNLQKTLGGWISDKIVEYFALYAEACFANFGDRVKHWITINEPLQTAINGYGIGIFAPGGCQGETARCYLAAHHQILAHAAAVDVYRRKFKAAQGGEVGLVVDCEWAEPFSENVEDQIAAQRRLDFQLGWYLDPIYFGDYPESMRQRLGSDLPTFSEKDKEFMRNKIDFVGVNHYTSRLIAHLQNPNDVYFYQVQQMERIEKWNSGEKIGERAASEWLFIVPWGLHKSLNYIAKKYNNPAIYVTENGMDEEDDQSATLDQVLNDTTRVGYFKGYLNSVAQAIKDGADVRGYFAWSFLDNFEWAMGYTKRFGIVYVDYKKGLSRHPKASALWFSRLLKGEAGTGTS

SEQ ID NO: 38129 - protein, 202 aa, Zea mays subsp. mays
  peptide (1)..(202): Ceres Seq. ID no. 12350659
  misc_feature (1)..(196): NCBI GI NO: 34907636 NR Description: putative beta-glucosidase
  misc_feature (1)..(198): NCBI GI NO: 31580730 NR Description: latex cyanogenic beta glucosidase
  misc_feature (1)..(196): NCBI GI NO: 22327412 NR Description: glycosyl hydrolase family 1; protein id:At5g36890
  misc_feature (1)..(194): NCBI GI NO: 22658440 NR Description: beta-glucosidase
  misc_feature (1)..(199): NCBI GI NO: 15778431 NR Description: prunasin hydrolase isoform PH A precursor
  misc_feature (1)..(199): NCBI GI NO: 6979913 NR Description: prunasin hydrolase isoform PHA precursor
  misc_feature (1)..(194): NCBI GI NO: 15229584 NR Description: glycosyl hydrolase family 1; protein id:At3g18080
  misc_feature (1)..(194): NCBI GI NO: 16757966 NR Description: amygdalin hydrolase isoform AH I precursor
  misc_feature (1)..(194): NCBI GI NO: 18875458 NR Description: beta-glucosidase [Oryza sativa]
  misc_feature (1)..(194): NCBI GI NO: 7435445 NR Description: beta-glucosidase (EC 3
MRQRLGSDLPTFSEKDKEFMRNKIDFVGVNHYTSRLIAHLQNPNDVYFYQVQQMERIEKWNSGEKIGERAASEWLFIVPWGLHKSLNYIAKKYNNPAIYVTENGMDEEDDQSATLDQVLNDTTRVGYFKGYLNSVAQAIKDGADVRGYFAWSFLDNFEWAMGYTKRFGIVYVDYKKGLSRHPKASALWFSRLLKGEAGTGTS

SEQ ID NO: 38130 - DNA, 1253 bp, Zea mays subsp. mays
  misc_feature (1)..(1253): Ceres Seq. ID no. 12354559
atgaaggcgccgcgccggcgtgggggcatcgatagccgcgccggtgatacggcgcaccgccctgctcgcccagcggattcggtgcggcagacgtacgcggacagccggacccggacgcgatgcgaagtgcgaacccccaaaatattccacttgtcttcccccctcgtcgacccacggaaccttcgactcctcgccactggagtggctggctacctccaattcagcacgtaaagaaagcaaaccgcccgcagttccgttccgcaagaccagatcgcccgcttttctcctccggtcctctcctccctccccttgagccctgatcgaatcgatccacggtgccggcggacgcctcgcccccttcagttccatccaatccacgagtgaacagatggcgtcgcagtgggctgctccgccgccgggctactcggccgggcacgggcaggcgtacggcgaccagcagctggccacgccgccgcctcaggcagcgacggccgtggccgtgacggcggcgagcaacggcgtgggcaacccctacgtcgtcgtcacccccgcgtctgccgcaccgtccacctgccagaccgtcaggaaggcgctgggccgctacggcaagctgctcgaggacggaacccgcaaggccgccgacgccaccggcaacatctggcaccacctccggacggcgccgaacatggcggacgcggcggtggcgcggctgacgcaggggaccaaggtgtacgcggagggcggccacgacagggtgttctacccagacgttcggcgccatgcccggggagcagctccgcaaggcctacgcctgctacctctccacctcctcgggccccgtcatcggcacgctctacctctccacggcgcgcctcgccttctgcagcgacagcccgctctgctaccagggccctgccggccagccgcacgagtgcatgtactacaaggtggtgcttcctctgagccaggtgacatccgtgaacccttcttccagcatgcgcaaccgggcagaaaggtacattcagatcaggaccatggataaccacgagttctggttcatggggttcgtgaactacgacaaggccctcaagaatctcaacgaggccctgcagcaccgcgatgtcagcggccaccagcgctgctgatgctgatcaggcttcggttaggcactacagtcctactgctacttatttagttcatgatgaactgtgatacctttatcttatttgatgttcttgatgaataagagaacc

SEQ ID NO: 38131 - protein, 217 aa, Zea mays subsp. mays
  peptide (1)..(217): Ceres Seq. ID no. 12354560
  misc_feature (1)..(124): NCBI GI NO: 29788871 NR Description: putative ABA-responsive protein
  misc_feature (6)..(124): NCBI GI NO: 15217869 NR Description: FH protein interacting protein FIP1
  misc_feature (40)..(124): NCBI GI NO: 18399985 NR Description: Expressed protein; protein id: At2g22475
  misc_feature (40)..(124): NCBI GI NO: 21592789 NR Description: unknown [Arabidopsis thaliana]
  misc_feature (40)..(124): NCBI GI NO: 26452129 NR Description: unknown protein [Arabidopsis thaliana]
  misc_feature (1)..(125): NCBI GI NO: 34906818 NR Description: contains EST C91668
  misc_feature (8)..(124): NCBI GI NO: 15240044 NR Description: ABA-responsive protein - like
  misc_feature (33)..(124): NCBI GI NO: 15234255 NR Description: putative ABA-repsonsive protein
  misc_feature (1)..(124): NCBI GI NO: 11281146 NR Description: ABA-responsive protein - barley
  misc_feature (51)..(124): NCBI GI NO: 20271007 NR Description: putative ABA-binding protein
MASQWAAPPPGYSAGHGQAYGDQQLATPPPQAATAVAVTAASNGVGNPYVVVTPASAAPSTCQTVRKALGRYGKLLEDGTRKAADATGNIWHHLRTAPNMADAAVARLTQGTKVYAEGGHDRVFYPDVRRHARGAAPQGLRLLPLHLLGPRHRHALPLHGAPRLLQRQPALLPGPCRPAARVHVLQGGASSEPGDIREPFFQHAQPGRKVHSDQDHG

SEQ ID NO: 38132 - protein, 121 aa, Zea mays subsp. mays
  peptide (1)..(121): Ceres Seq. ID no. 12354561
  misc_feature (1)..(71): Pfam Name: Pfam Description:  GRAM domain
  misc_feature (1)..(113): NCBI GI NO: 29788871 NR Description: putative ABA-responsive protein
  misc_feature (1)..(111): NCBI GI NO: 15217869 NR Description: FH protein interacting protein FIP1
  misc_feature (1)..(111): NCBI GI NO: 18399985 NR Description: Expressed protein; protein id: At2g22475
  misc_feature (1)..(111): NCBI GI NO: 21592789 NR Description: unknown [Arabidopsis thaliana]
  misc_feature (1)..(111): NCBI GI NO: 26452129 NR Description: unknown protein [Arabidopsis thaliana]
  misc_feature (1)..(118): NCBI GI NO: 34906818 NR Description: contains EST C91668
  misc_feature (1)..(117): NCBI GI NO: 15240044 NR Description: ABA-responsive protein - like
  misc_feature (1)..(110): NCBI GI NO: 15234255 NR Description: putative ABA-repsonsive protein
  misc_feature (1)..(111): NCBI GI NO: 34902414 NR Description: Putative FH protein interacting protein FIP1
  misc_feature (1)..(118): NCBI GI NO: 33146631 NR Description: putative FH protein interacting protein FIP1
MPGEQLRKAYACYLSTSSGPVIGTLYLSTARLAFCSDSPLCYQGPAGQPHECMYYKVVLPLSQVTSVNPSSSMRNRAERYIQIRTMDNHEFWFMGFVNYDKALKNLNEALQHRDVSGHQRC

SEQ ID NO: 38133 - protein, 118 aa, Zea mays subsp. mays
  peptide (1)..(118): Ceres Seq. ID no. 12354562
  misc_feature (1)..(25): NCBI GI NO: 29788871 NR Description: putative ABA-responsive protein
  misc_feature (1)..(25): NCBI GI NO: 15217869 NR Description: FH protein interacting protein FIP1
  misc_feature (1)..(25): NCBI GI NO: 18399985 NR Description: Expressed protein; protein id: At2g22475
  misc_feature (1)..(25): NCBI GI NO: 21592789 NR Description: unknown [Arabidopsis thaliana]
  misc_feature (1)..(25): NCBI GI NO: 26452129 NR Description: unknown protein [Arabidopsis thaliana]
  misc_feature (1)..(26): NCBI GI NO: 34906818 NR Description: contains EST C91668
  misc_feature (1)..(25): NCBI GI NO: 15240044 NR Description: ABA-responsive protein - like
  misc_feature (1)..(25): NCBI GI NO: 15234255 NR Description: putative ABA-repsonsive protein
  misc_feature (1)..(25): NCBI GI NO: 11281146 NR Description: ABA-responsive protein - barley
  misc_feature (1)..(25): NCBI GI NO: 20271007 NR Description: putative ABA-binding protein
MADAAVARLTQGTKVYAEGGHDRVFYPDVRRHARGAAPQGLRLLPLHLLGPRHRHALPLHGAPRLLQRQPALLPGPCRPAARVHVLQGGASSEPGDIREPFFQHAQPGRKVHSDQDHG

SEQ ID NO: 38134 - DNA, 1208 bp, Zea mays subsp. mays
  misc_feature (1)..(1208): Ceres Seq. ID no. 12351544
gcagcagcccaggaagcaacacccagccgcctaatcccgcaacaactcgccctcttctacccccatcggctcctctgcatccgcataccggtggcctacaggtttgctggagtgcagtgcacgggcggtggagcagcaaatctgcaactgattcaggatggatcaggaggcgaaggactctaggccctcaaggtctcccagcgagccaaacctcttcccaatggggtagccgtaagaggctgcgatgtgtcaagacgcgtgatgacggctcaccatcgccgtcgccgtctcaaggtcttaggcgtgccataccccgttctactcggcccctccttggagcagacattgcagcatttcgttcaccgcggcgccctagcacccttaaccgcaggaaatccgatttgctggtgaatgagtacaagcacacgatggcgctatcgccagagaaggacaagtattacacaacgaggggttcaccatttccctttgaaggaaatgggtttgactttggtaccataacagaggataagggaaccacatcgttgccgagattcttcattgcattgtcaaacaaggagaaggaggaggacttcatggcgatgaagggctccaagctgccacagaggccaaagaagaggcccaagctgatgcagaagtgcttgcttatggtgagcccaggagcttggttatcagatctatctcatgagagatatgaagttagagagaagaagagttctaaaaagagggctagaggcttgaaggctttgagcatggcgagtgattcagaatagagtttgaggcgaatggatttttggacttgactttagctggtggcaagaatctgtagttaggtggcactgccttctgcctgtcagacaaacctctgcatctaatttggtgctatgagtgctctgatcaaggtctattgatgtcaacagcaaagatgatattagattcctgatctagtgaggtgcagctccatctttctgggtagtgggcgcctttgtgggagagaaaatggagggtgggatacaatagatggtttctcaaaaccacaggaggaagtaatgttcaactgttgggaaacattgaaagctggatgttgggctgagaaccaatgaatcatgatgtttaatcgtcataaacttgtagctgtaagacttatggtgaccattctgtccattcaatcaagactgaccaaaattttc

SEQ ID NO: 38135 - protein, 262 aa, Zea mays subsp. mays
  peptide (1)..(262): Ceres Seq. ID no. 12351545
  misc_feature (73)..(262): NCBI GI NO: 30103017 NR Description: unknown protein
  misc_feature (73)..(262): NCBI GI NO: 30695924 NR Description: expressed protein [Arabidopsis thaliana]
  misc_feature (73)..(250): NCBI GI NO: 25405821 NR Description: unknown protein, 25817-24837
  misc_feature (73)..(262): NCBI GI NO: 30678969 NR Description: expressed protein [Arabidopsis thaliana]
  misc_feature (73)..(221): NCBI GI NO: 6006854 NR Description: hypothetical protein [Arabidopsis thaliana]
  misc_feature (222)..(262): NCBI GI NO: 6006854 NR Description: hypothetical protein [Arabidopsis thaliana]
  misc_feature (88)..(262): NCBI GI NO: 7485821 NR Description: hypothetical protein F1C12
  misc_feature (88)..(262): NCBI GI NO: 30685058 NR Description: expressed protein [Arabidopsis thaliana]
  misc_feature (88)..(262): NCBI GI NO: 21553974 NR Description: unknown [Arabidopsis thaliana]
  misc_feature (88)..(247): NCBI GI NO: 30685055 NR Description: expressed protein [Arabidopsis thaliana]
SSPGSNTQPPNPATTRPLLPPSAPLHPHTGGLQVCWSAVHGRWSSKSATDSGWIRRRRTLGPQGLPASQTSSQWGSRKRLRCVKTRDDGSPSPSPSQGLRRAIPRSTRPLLGADIAAFRSPRRPSTLNRRKSDLLVNEYKHTMALSPEKDKYYTTRGSPFPFEGNGFDFGTITEDKGTTSLPRFFIALSNKEKEEDFMAMKGSKLPQRPKKRPKLMQKCLLMVSPGAWLSDLSHERYEVREKKSSKKRARGLKALSMASDSE

SEQ ID NO: 38136 - DNA, 1252 bp, Zea mays subsp. mays
  misc_feature (1)..(1252): Ceres Seq. ID no. 12434879
aagaatccagcctccactacccccagccgggccagcccccccaagccaagcagaatcctcgccccgcaatgcagcacctggccgccgtgctcctcgtcctggcggctaccaccgcgctgccgcccggcgcggcggcgtggcgcccgtggccgccgcgcgacaacgcgacggctgcggcgggccttggcgcgtccaagaggctggagggctcgtcggagttcgtgaagctggagtaccacatgggcccggtcctggcgtcggccatcacggtgcacccgatctggtacgggccctggccggcggcgcaggaagcgcacgatccgcgcgttcctccgctccctgtcgccttctgccgccatcccttcgccgtccgtgtcggcgtggtggcgcacggtgcggctgtaccgcggaccagacctcggccaacgtgtcggcgtcggtgtcgctgggcgcggagaagtcggacgcgcgcatgtcccgcggcgcgcggctgtcgcgcatggacatccaggcagtggtccgcgacgccgtgacggcgcgcacccggcccctgcccgtggacgccagcggcggcgtgtacctggtgctcacgtccccggacgtcgccgtggacgacttctgcgggcaggtgtgcggcttccactacttcaccttcgcgtcggtggtcgggtccacgctgccgtacgcgtgggtgggcaactcggcgcgcaggtgccccgaggtgtgcgcgtacccgttcgcggtcccggcgtacgtgcgcgggcgcaggcccgagtcccccgcccaacggcgacgtcggggtggacggcatggtcagcgtcatcgcgcacgagctcgcggagatggcgtccaacccgctcgccaacgcctggtacgccggcggcgacccgtcgttccccacggagatcgcagacctctgcgagggcatctacggcaccggcgggggaggggcgtacacggggcagctgctcacggacgcgcgctccggcgcggcctacaacgtgaacggcgtcggcgggcgcaggttcctcgtgcagtgggtgtggaaccccgtgctcagctactgctccggccccaacgcgctcgaccagtagctgtttgatttcggtttcgtttcatttcgtttcatctacgtaccaatgaatcgaatcctctagcgcatttggattttcctctcctctccccggggaaatccatgggatgcttctgtatagagttgttattatcaattaattaatgccactttcggtgg

SEQ ID NO: 38137 - protein, 366 aa, Zea mays subsp. mays
  peptide (1)..(366): Ceres Seq. ID no. 12434880
  misc_feature (137)..(260): Pfam Name: Pfam Description:  Phosphate-induced protein 1 conserved region
  misc_feature (137)..(260): NCBI GI NO: 11875173 NR Description: contains ESTsC27834
  misc_feature (137)..(260): NCBI GI NO: 15242118 NR Description: putative protein; protein id: At5g51550
  misc_feature (137)..(260): NCBI GI NO: 16604527 NR Description: AT5g51550/K17N15_10 [Arabidopsis thaliana]
  misc_feature (137)..(260): NCBI GI NO: 21592873 NR Description: unknown [Arabidopsis thaliana]
  misc_feature (137)..(271): NCBI GI NO: 18398352 NR Description: expressed protein; protein id: At2g17230
  misc_feature (137)..(271): NCBI GI NO: 21594010 NR Description: unknown [Arabidopsis thaliana]
  misc_feature (137)..(249): NCBI GI NO: 18403760 NR Description: Expressed protein; protein id: At2g35150
  misc_feature (137)..(249): NCBI GI NO: 25408357 NR Description: hypothetical protein At2g35150
  misc_feature (136)..(254): NCBI GI NO: 34901824 NR Description: putative phi-1(phosphate-induced protein 1)
  misc_feature (146)..(260): NCBI GI NO: 15219504 NR Description: phosphate-induced
RIQPPLPPAGPAPPSQAESSPRNAAPGRRAPRPGGYHRAAARRGGVAPVAAARQRDGCGGPWRVQEAGGLVGVREAGVPHGPGPGVGHHGAPDLVRALAGGAGSARSARSSAPCRLLPPSLRRPCRRGGARCGCTADQTSANVSASVSLGAEKSDARMSRGARLSRMDIQAVVRDAVTARTRPLPVDASGGVYLVLTSPDVAVDDFCGQVCGFHYFTFASVVGSTLPYAWVGNSARRCPEVCAYPFAVPAYVRGRRPESPAQRRRRGGRHGQRHRARARGDGVQPARQRLVRRRRPVVPHGDRRPLRGHLRHRRGRGVHGAAAHGRALRRGLQRERRRRAQVPRAVGVEPRAQLLLRPQRARPVAV

SEQ ID NO: 38138 - protein, 209 aa, Zea mays subsp. mays
  peptide (1)..(209): Ceres Seq. ID no. 12434881
  misc_feature (1)..(103): Pfam Name: Pfam Description:  Phosphate-induced protein 1 conserved region
  misc_feature (1)..(103): NCBI GI NO: 11875173 NR Description: contains ESTsC27834
  misc_feature (1)..(103): NCBI GI NO: 15242118 NR Description: putative protein; protein id: At5g51550
  misc_feature (1)..(103): NCBI GI NO: 16604527 NR Description: AT5g51550/K17N15_10 [Arabidopsis thaliana]
  misc_feature (1)..(103): NCBI GI NO: 21592873 NR Description: unknown [Arabidopsis thaliana]
  misc_feature (1)..(114): NCBI GI NO: 18398352 NR Description: expressed protein; protein id: At2g17230
  misc_feature (1)..(114): NCBI GI NO: 21594010 NR Description: unknown [Arabidopsis thaliana]
  misc_feature (1)..(92): NCBI GI NO: 18403760 NR Description: Expressed protein; protein id: At2g35150
  misc_feature (1)..(92): NCBI GI NO: 25408357 NR Description: hypothetical protein At2g35150
  misc_feature (1)..(97): NCBI GI NO: 34901824 NR Description: putative phi-1(phosphate-induced protein 1)
  misc_feature (1)..(103): NCBI GI NO: 15219504 NR Description: phosphate-induced
MSRGARLSRMDIQAVVRDAVTARTRPLPVDASGGVYLVLTSPDVAVDDFCGQVCGFHYFTFASVVGSTLPYAWVGNSARRCPEVCAYPFAVPAYVRGRRPESPAQRRRRGGRHGQRHRARARGDGVQPARQRLVRRRRPVVPHGDRRPLRGHLRHRRGRGVHGAAAHGRALRRGLQRERRRRAQVPRAVGVEPRAQLLLRPQRARPVAV

SEQ ID NO: 38139 - protein, 200 aa, Zea mays subsp. mays
  peptide (1)..(200): Ceres Seq. ID no. 12434882
  misc_feature (1)..(94): Pfam Name: Pfam Description:  Phosphate-induced protein 1 conserved region
  misc_feature (1)..(94): NCBI GI NO: 11875173 NR Description: contains ESTsC27834
  misc_feature (1)..(94): NCBI GI NO: 15242118 NR Description: putative protein; protein id: At5g51550
  misc_feature (1)..(94): NCBI GI NO: 16604527 NR Description: AT5g51550/K17N15_10 [Arabidopsis thaliana]
  misc_feature (1)..(94): NCBI GI NO: 21592873 NR Description: unknown [Arabidopsis thaliana]
  misc_feature (1)..(105): NCBI GI NO: 18398352 NR Description: expressed protein; protein id: At2g17230
  misc_feature (1)..(105): NCBI GI NO: 21594010 NR Description: unknown [Arabidopsis thaliana]
  misc_feature (1)..(83): NCBI GI NO: 18403760 NR Description: Expressed protein; protein id: At2g35150
  misc_feature (1)..(83): NCBI GI NO: 25408357 NR Description: hypothetical protein At2g35150
  misc_feature (1)..(88): NCBI GI NO: 34901824 NR Description: putative phi-1(phosphate-induced protein 1)
  misc_feature (1)..(94): NCBI GI NO: 15219504 NR Description: phosphate-induced
MDIQAVVRDAVTARTRPLPVDASGGVYLVLTSPDVAVDDFCGQVCGFHYFTFASVVGSTLPYAWVGNSARRCPEVCAYPFAVPAYVRGRRPESPAQRRRRGGRHGQRHRARARGDGVQPARQRLVRRRRPVVPHGDRRPLRGHLRHRRGRGVHGAAAHGRALRRGLQRERRRRAQVPRAVGVEPRAQLLLRPQRARPVAV

SEQ ID NO: 38140 - DNA, 2024 bp, Zea mays subsp. mays
  misc_feature (1)..(2024): Ceres Seq. ID no. 12362351
attttgggggctctaaaatagcctcgccctcctcgtgccttatcttcatctcacctcctctttctcctccgtgctgatcggcagtctctaagctttgcaacaactgatagccgaattccgcgcgccggtccctaaaaaaatgcaagtactaggtagtagataagatgcatttcccagtaatttttcgttattatatatacgcagcacgggaaggaggggagacactctgttcaaccaccagccgagttcgcagcggcactccaggtccagcagtctcttcggctcttcgttggtggtgcgtggacaccggaaattacctcggggattgcgttcctgatctaagcccggcatgaagtgctgctcagagcgtttgctgctcctgctcctgctgctgctggcatcgtcgtcgttactgtccgtcgtggttgccgcgcagcagacttgccctgccgacctcgacagcaaatgcgacggtggtgcgcctgatgactgggagggggaattcttccccggcgtcccgaaaatcaagtatgagggtccaacaagcaagaaccctcttgcttataagtggtataacaaggaggaagtcattctcggaaagaagatgaaggactggatgcgcttcagtgttgcgttctggcacacgttccgtggtactggcgccgatccttttggtgcgcctacaaaggtttggccttgggaggacggcacaaattcgttggccatggctaagagaagaatgagagctcactttgagttcatggagaagctgggggttgacaaatggtgcttccatgatagggatattgcccctgatgggaaaactctcgaagaaacaaatgctaacttggatgagatagttgagctggcaaagcagctccagggtgagaccaatataaagccattgtggggtactgcacagctctttatgcatcctcgttacatgcacggagctgctactagcccagaggttaaagtatatgcatatgcggctgcacaagttaagaaagctttggaggtcactcactacctaggtggtgaaaactatgtgttttggggtggaagagagggttaccaaactcttctgaacactgatcttaagagagaacttgaccatttggctaactttcttcaagctgctgttgactacaagaagaagattggattcaacggaacactgttgatagagcctaaaccacaggaacctacaaaacaccagtatgactgggatgttgcaactacgtttgcttttctacagaagtatggtcttaccggagagttcaagattaatgttgagtgcaaccatgctactctatctggacatagctgccatcatgaactggagactgcacgcattaatgggctgcttgggaacattgatgcaaacactggtgatcctcaagttggctgggacacggatcagttcatgacagacattgcagaggctactttggttatgtcaactgtggttaagaatggtggacttgcacctggtggcttcaactttgacgccaaattgcggagggaaagcactgatgttgaggacttgtttcttgctcatatctccggaatggacaccctggcccgtggcctccgcaacgccgccaagctgatcgaggatggttccctagatgctctcgtccgcaagcggtaccggagctttgatagtgagatgggtgccttgatcgaggctgggaaaggagactttgaggcgctggagaagaaggtccttgagtggggtgagcccactgttccgtccggcaagcaggaactggcggagattctgttccactctgctctatagatggcgccatgtccgtagcggtagctcctggaataagcaagcactgagcctgcgcccctcctaacgcgcgcggtcgtcctcaccaccacgggaatgtttctggttgcgcgcgatgaaccatgtacaatacaccgtggaactgaaatagctagtcagaatttttagaagtgttgcgtcttttgtttggaacggaataaaactgaactttgtggttagtttg

SEQ ID NO: 38141 - protein, 484 aa, Zea mays subsp. mays
  peptide (1)..(484): Ceres Seq. ID no. 12362352
  misc_feature (78)..(484): Pfam Name: Pfam Description:  Xylose isomerase
  misc_feature (11)..(484): NCBI GI NO: 34899308 NR Description: putative xylose isomerase
  misc_feature (11)..(484): NCBI GI NO: 6175480 NR Description: Xylose isomerase
  misc_feature (11)..(484): NCBI GI NO: 2130051 NR Description: xylose isomerase (EC 5.3.1.5) - barley
  misc_feature (10)..(484): NCBI GI NO: 30696904 NR Description: expressed protein [Arabidopsis thaliana]
  misc_feature (10)..(484): NCBI GI NO: 21537178 NR Description: xylose isomerase [Arabidopsis thaliana]
  misc_feature (10)..(473): NCBI GI NO: 17433690 NR Description: Xylose isomerase
  misc_feature (51)..(482): NCBI GI NO: 1175034 NR Description: Xylose isomerase
  misc_feature (51)..(482): NCBI GI NO: 3319057 NR Description: Chain A
  misc_feature (51)..(482): NCBI GI NO: 15644415 NR Description: xylose isomerase [Thermotoga maritima]
  misc_feature (51)..(484): NCBI GI NO: 17433692 NR Description: Xylose isomerase
MKCCSERLLLLLLLLLASSSLLSVVVAAQQTCPADLDSKCDGGAPDDWEGEFFPGVPKIKYEGPTSKNPLAYKWYNKEEVILGKKMKDWMRFSVAFWHTFRGTGADPFGAPTKVWPWEDGTNSLAMAKRRMRAHFEFMEKLGVDKWCFHDRDIAPDGKTLEETNANLDEIVELAKQLQGETNIKPLWGTAQLFMHPRYMHGAATSPEVKVYAYAAAQVKKALEVTHYLGGENYVFWGGREGYQTLLNTDLKRELDHLANFLQAAVDYKKKIGFNGTLLIEPKPQEPTKHQYDWDVATTFAFLQKYGLTGEFKINVECNHATLSGHSCHHELETARINGLLGNIDANTGDPQVGWDTDQFMTDIAEATLVMSTVVKNGGLAPGGFNFDAKLRRESTDVEDLFLAHISGMDTLARGLRNAAKLIEDGSLDALVRKRYRSFDSEMGALIEAGKGDFEALEKKVLEWGEPTVPSGKQELAEILFHSAL

SEQ ID NO: 38142 - protein, 399 aa, Zea mays subsp. mays
  peptide (1)..(399): Ceres Seq. ID no. 12362353
  misc_feature (1)..(399): Pfam Name: Pfam Description:  Xylose isomerase
  misc_feature (1)..(399): NCBI GI NO: 34899308 NR Description: putative xylose isomerase
  misc_feature (1)..(399): NCBI GI NO: 6175480 NR Description: Xylose isomerase
  misc_feature (1)..(399): NCBI GI NO: 2130051 NR Description: xylose isomerase (EC 5.3.1.5) - barley
  misc_feature (1)..(399): NCBI GI NO: 30696904 NR Description: expressed protein [Arabidopsis thaliana]
  misc_feature (1)..(399): NCBI GI NO: 21537178 NR Description: xylose isomerase [Arabidopsis thaliana]
  misc_feature (1)..(388): NCBI GI NO: 17433690 NR Description: Xylose isomerase
  misc_feature (1)..(397): NCBI GI NO: 1175034 NR Description: Xylose isomerase
  misc_feature (1)..(397): NCBI GI NO: 3319057 NR Description: Chain A
  misc_feature (1)..(397): NCBI GI NO: 15644415 NR Description: xylose isomerase [Thermotoga maritima]
  misc_feature (1)..(399): NCBI GI NO: 17433692 NR Description: Xylose isomerase
MKDWMRFSVAFWHTFRGTGADPFGAPTKVWPWEDGTNSLAMAKRRMRAHFEFMEKLGVDKWCFHDRDIAPDGKTLEETNANLDEIVELAKQLQGETNIKPLWGTAQLFMHPRYMHGAATSPEVKVYAYAAAQVKKALEVTHYLGGENYVFWGGREGYQTLLNTDLKRELDHLANFLQAAVDYKKKIGFNGTLLIEPKPQEPTKHQYDWDVATTFAFLQKYGLTGEFKINVECNHATLSGHSCHHELETARINGLLGNIDANTGDPQVGWDTDQFMTDIAEATLVMSTVVKNGGLAPGGFNFDAKLRRESTDVEDLFLAHISGMDTLARGLRNAAKLIEDGSLDALVRKRYRSFDSEMGALIEAGKGDFEALEKKVLEWGEPTVPSGKQELAEILFHSAL

SEQ ID NO: 38143 - protein, 395 aa, Zea mays subsp. mays
  peptide (1)..(395): Ceres Seq. ID no. 12362354
  misc_feature (1)..(395): Pfam Name: Pfam Description:  Xylose isomerase
  misc_feature (1)..(395): NCBI GI NO: 34899308 NR Description: putative xylose isomerase
  misc_feature (1)..(395): NCBI GI NO: 6175480 NR Description: Xylose isomerase
  misc_feature (1)..(395): NCBI GI NO: 2130051 NR Description: xylose isomerase (EC 5.3.1.5) - barley
  misc_feature (1)..(395): NCBI GI NO: 30696904 NR Description: expressed protein [Arabidopsis thaliana]
  misc_feature (1)..(395): NCBI GI NO: 21537178 NR Description: xylose isomerase [Arabidopsis thaliana]
  misc_feature (1)..(384): NCBI GI NO: 17433690 NR Description: Xylose isomerase
  misc_feature (1)..(393): NCBI GI NO: 1175034 NR Description: Xylose isomerase
  misc_feature (1)..(393): NCBI GI NO: 3319057 NR Description: Chain A
  misc_feature (1)..(393): NCBI GI NO: 15644415 NR Description: xylose isomerase [Thermotoga maritima]
  misc_feature (1)..(395): NCBI GI NO: 17433692 NR Description: Xylose isomerase
MRFSVAFWHTFRGTGADPFGAPTKVWPWEDGTNSLAMAKRRMRAHFEFMEKLGVDKWCFHDRDIAPDGKTLEETNANLDEIVELAKQLQGETNIKPLWGTAQLFMHPRYMHGAATSPEVKVYAYAAAQVKKALEVTHYLGGENYVFWGGREGYQTLLNTDLKRELDHLANFLQAAVDYKKKIGFNGTLLIEPKPQEPTKHQYDWDVATTFAFLQKYGLTGEFKINVECNHATLSGHSCHHELETARINGLLGNIDANTGDPQVGWDTDQFMTDIAEATLVMSTVVKNGGLAPGGFNFDAKLRRESTDVEDLFLAHISGMDTLARGLRNAAKLIEDGSLDALVRKRYRSFDSEMGALIEAGKGDFEALEKKVLEWGEPTVPSGKQELAEILFHSAL

SEQ ID NO: 38144 - DNA, 1368 bp, Zea mays subsp. mays
  misc_feature (1)..(1368): Ceres Seq. ID no. 12357062
aaaaaagaaaaaaaccacaaagagattcctctcaccaccaccaaccctagacgatcctcctccgccatgatgcgggacggcgtgcctccgtcggtggccggctccggcggcgcggcgggcggcgacgggcccaggcgatgctcgcagtgcgggcaccacgggcacaacgcgcgaacctgcacggcgcggcccgtcaagctcttcggcgtgcgcatcggggacaagcccatccggaagagcgccagcatggggaacatcgcgcacctcgccgcggagggcagcggcggcagggaggaagggtacggctccgacggggagcgcccgcacaagaagcgaggtgaggcatggactgaagaggagcacaagaagtttctgcttgggttgaataagctagggaaaggcgattggcgtggtatatcccgtaaatatgttgtttcaaggacacctactcaagtggctagccatgcgcaaaagtatttcaatcgccaaacaaatgtgcatagaagaaagagaagatcaagcctattcgatatggtgattgatgacccgtctgatcaacttccgctctcgcgttcatcttcacaagaaatggagcagcaacatttagatgatccacagcctgttgcagccctgcctgcacctgtggtctctccagctactgtggtacctcctgtgcctgtggaagtgtctgcttcagttccatcgccagttcaggtcccagttccagtttcagccccagtgatgacatctcagcctatggaacaggactcagataccacaagttcaattgctggagaggcaggaacggtgatgccaggagccatgcccccctatctttatccaatgatgattcctcctccatactaccatactgcttttgtaccaatgccctgctacggttatgttcctttttactgtgagccacaaggtgctgcacaggctccgcatgaggttgtcaagccagtggctgttcattcaacgcctccactgaatgccaaagacctttacaacatgtctgaattgagcctgaagggcgactcgaatgcaaacggtggtgtgcctgcttcccccttgcctccgaagccgatcggtagaccagagaggcaatctgctttccatggcaaaggacctacacctaccggtggctcgtcaggtggactgattcctgcagtcaagtgaattcgattatgctcctaaacatgccttcatgtgtatgtaatactagaaatagccaaatcgtaatagccgcctgtgctgctaaaatggtggtgtgttttctagcaaaatatctatactgctcattttagccttcaccagtttggaagtcatgatccgagggtaaatatattgttagcttgttgtttttgt

SEQ ID NO: 38145 - protein, 392 aa, Zea mays subsp. mays
  peptide (1)..(392): Ceres Seq. ID no. 12357063
  misc_feature (113)..(160): Pfam Name: Pfam Description:  Myb-like DNA-binding domain
  misc_feature (87)..(257): NCBI GI NO: 37536856 NR Description: putative Myb-related protein
  misc_feature (45)..(104): NCBI GI NO: 37536856 NR Description: putative Myb-related protein
  misc_feature (82)..(384): NCBI GI NO: 15238083 NR Description: Myb-related transcription activator-like
  misc_feature (93)..(269): NCBI GI NO: 34906364 NR Description: unnamed protein product
  misc_feature (45)..(108): NCBI GI NO: 34906364 NR Description: unnamed protein product
  misc_feature (72)..(207): NCBI GI NO: 15228185 NR Description: putative MYB family transcription factor
  misc_feature (45)..(63): NCBI GI NO: 15228185 NR Description: putative MYB family transcription factor
  misc_feature (63)..(214): NCBI GI NO: 15222521 NR Description: DNA binding protein MybSt1, putative
  misc_feature (45)..(60): NCBI GI NO: 15222521 NR Description: DNA binding protein MybSt1, putative
  misc_feature (87)..(257): NCBI GI NO: 24850307 NR Description: transcription factor MYBS3
KKEKNHKEIPLTTTNPRRSSSAMMRDGVPPSVAGSGGAAGGDGPRRCSQCGHHGHNARTCTARPVKLFGVRIGDKPIRKSASMGNIAHLAAEGSGGREEGYGSDGERPHKKRGEAWTEEEHKKFLLGLNKLGKGDWRGISRKYVVSRTPTQVASHAQKYFNRQTNVHRRKRRSSLFDMVIDDPSDQLPLSRSSSQEMEQQHLDDPQPVAALPAPVVSPATVVPPVPVEVSASVPSPVQVPVPVSAPVMTSQPMEQDSDTTSSIAGEAGTVMPGAMPPYLYPMMIPPPYYHTAFVPMPCYGYVPFYCEPQGAAQAPHEVVKPVAVHSTPPLNAKDLYNMSELSLKGDSNANGGVPASPLPPKPIGRPERQSAFHGKGPTPTGGSSGGLIPAVK

SEQ ID NO: 38146 - protein, 370 aa, Zea mays subsp. mays
  peptide (1)..(370): Ceres Seq. ID no. 12357064
  misc_feature (91)..(138): Pfam Name: Pfam Description:  Myb-like DNA-binding domain
  misc_feature (65)..(235): NCBI GI NO: 37536856 NR Description: putative Myb-related protein
  misc_feature (23)..(82): NCBI GI NO: 37536856 NR Description: putative Myb-related protein
  misc_feature (60)..(362): NCBI GI NO: 15238083 NR Description: Myb-related transcription activator-like
  misc_feature (71)..(247): NCBI GI NO: 34906364 NR Description: unnamed protein product
  misc_feature (23)..(86): NCBI GI NO: 34906364 NR Description: unnamed protein product
  misc_feature (50)..(185): NCBI GI NO: 15228185 NR Description: putative MYB family transcription factor
  misc_feature (23)..(41): NCBI GI NO: 15228185 NR Description: putative MYB family transcription factor
  misc_feature (41)..(192): NCBI GI NO: 15222521 NR Description: DNA binding protein MybSt1, putative
  misc_feature (23)..(38): NCBI GI NO: 15222521 NR Description: DNA binding protein MybSt1, putative
  misc_feature (65)..(235): NCBI GI NO: 24850307 NR Description: transcription factor MYBS3
MMRDGVPPSVAGSGGAAGGDGPRRCSQCGHHGHNARTCTARPVKLFGVRIGDKPIRKSASMGNIAHLAAEGSGGREEGYGSDGERPHKKRGEAWTEEEHKKFLLGLNKLGKGDWRGISRKYVVSRTPTQVASHAQKYFNRQTNVHRRKRRSSLFDMVIDDPSDQLPLSRSSSQEMEQQHLDDPQPVAALPAPVVSPATVVPPVPVEVSASVPSPVQVPVPVSAPVMTSQPMEQDSDTTSSIAGEAGTVMPGAMPPYLYPMMIPPPYYHTAFVPMPCYGYVPFYCEPQGAAQAPHEVVKPVAVHSTPPLNAKDLYNMSELSLKGDSNANGGVPASPLPPKPIGRPERQSAFHGKGPTPTGGSSGGLIPAVK

SEQ ID NO: 38147 - protein, 369 aa, Zea mays subsp. mays
  peptide (1)..(369): Ceres Seq. ID no. 12357065
  misc_feature (90)..(137): Pfam Name: Pfam Description:  Myb-like DNA-binding domain
  misc_feature (64)..(234): NCBI GI NO: 37536856 NR Description: putative Myb-related protein
  misc_feature (22)..(81): NCBI GI NO: 37536856 NR Description: putative Myb-related protein
  misc_feature (59)..(361): NCBI GI NO: 15238083 NR Description: Myb-related transcription activator-like
  misc_feature (70)..(246): NCBI GI NO: 34906364 NR Description: unnamed protein product
  misc_feature (22)..(85): NCBI GI NO: 34906364 NR Description: unnamed protein product
  misc_feature (49)..(184): NCBI GI NO: 15228185 NR Description: putative MYB family transcription factor
  misc_feature (22)..(40): NCBI GI NO: 15228185 NR Description: putative MYB family transcription factor
  misc_feature (40)..(191): NCBI GI NO: 15222521 NR Description: DNA binding protein MybSt1, putative
  misc_feature (22)..(37): NCBI GI NO: 15222521 NR Description: DNA binding protein MybSt1, putative
  misc_feature (64)..(234): NCBI GI NO: 24850307 NR Description: transcription factor MYBS3
MRDGVPPSVAGSGGAAGGDGPRRCSQCGHHGHNARTCTARPVKLFGVRIGDKPIRKSASMGNIAHLAAEGSGGREEGYGSDGERPHKKRGEAWTEEEHKKFLLGLNKLGKGDWRGISRKYVVSRTPTQVASHAQKYFNRQTNVHRRKRRSSLFDMVIDDPSDQLPLSRSSSQEMEQQHLDDPQPVAALPAPVVSPATVVPPVPVEVSASVPSPVQVPVPVSAPVMTSQPMEQDSDTTSSIAGEAGTVMPGAMPPYLYPMMIPPPYYHTAFVPMPCYGYVPFYCEPQGAAQAPHEVVKPVAVHSTPPLNAKDLYNMSELSLKGDSNANGGVPASPLPPKPIGRPERQSAFHGKGPTPTGGSSGGLIPAVK

SEQ ID NO: 38148 - DNA, 1564 bp, Zea mays subsp. mays
  misc_feature (1)..(1564): Ceres Seq. ID no. 12369286
cgcccactaccctctccggctctccgctaacaaaatctagaaccctctgaaccctccacattcctccagatcgaataataacctagctctgcacaccgcccagccaccagtggcagcaggagcaggggtcggaacaagatggtggtgacggcggccggcagcgcggaggaggctgtgcggcggtgggtggacgccgccggaggacgcctcgtcctcgacggcgggctggccacggagctcgaggccaacggcgccgacctcaacgacccgctctggagcgctaagtgcctcctctcctccccgcacctcatccgcaaggtccacatggactatctggaagctggcgcaaacattataatcacagcatcgtatcaggccactattcaagggtttgaatcaaagggtttttcaaaagaacagagtgaaaacttactaacaaagagtgtcgagattgcactggaagctcgtgagatgttcttgaaggaacatctggagaagtccactcctatacagcacccggttctggtcgcagcgtctttagggagttatggagcttatcttgccgatggctccgagtacagtggggattatggtgaagctggtacgaaagagttcctgaaagatttccatcggcggaggctccaggttcttgcggaagcaggccccgatttgattgctttcgaaacgattcccaacaaactggaagctgaggcgtatgtcgaacttctcgaggagtgcaacatcaatatccctgcatggttttccttcaactcaaaagatggagtgcatattgtgagcggtgactcgttaatcgaatgcactactattgctgacaagtgtgcaaaggttggtgcggtcgggataaactgcacacctccaagatttatccatggactgatactctccattcgaaaggtcacggacaagcccattctgatatatcccaacagtggcgaaagatacgatggtgaaaaaaaggagtgggtggaatccactggtgtgtcagatggtgattttgtttcttatgtgaacgagtggtgcaaagacggggctgtgcttatcggtggctgctgcaggacaactccaaacactatcagggccatacacagaactctgaacaaaagccccaacaagcagcagttacctgctgtagaataagagctgtgctctactctgatgcgcccgccttcctcctagcagtacctcgaggctataactccatgattccgtaaccgtacgtgttcgttctcttgcaaacgagatgtttgtaaataacgctgtatttctgggttctgagatatgcaacttggatggaggtacaaccggtgaaggggggtgaggaagcagcaacaatggtaagagttctactactgagtgggggaaaaacaacttgcggctgggttagtgaagcttagtagctaccactattcaagagttaaagggagttcgtatgacagttcctctggagatgttatcttcaaagtcttatatcactgctacttgtgagctgtgttaaaacctatatatataagttttgtttgacgtgactgcattaaagatagtg

SEQ ID NO: 38149 - protein, 339 aa, Zea mays subsp. mays
  peptide (1)..(339): Ceres Seq. ID no. 12369287
  misc_feature (24)..(328): Pfam Name: Pfam Description:  Homocysteine S-methyltransferase
  misc_feature (1)..(339): NCBI GI NO: 10732787 NR Description: homocysteine S-methyltransferase-2 [Zea mays]
  misc_feature (1)..(336): NCBI GI NO: 10732789 NR Description: homocysteine S-methyltransferase-3 [Zea mays]
  misc_feature (11)..(327): NCBI GI NO: 37534456 NR Description: putative homocysteine S-methyltransferase-2
  misc_feature (7)..(326): NCBI GI NO: 15229396 NR Description: homocysteine S-methyltransferase AtHMT-2
  misc_feature (7)..(326): NCBI GI NO: 25453566 NR Description: homocysteine S-methyltransferase (EC 2
  misc_feature (9)..(338): NCBI GI NO: 10732791 NR Description: homocysteine S-methyltransferase-4 [Zea mays]
  misc_feature (16)..(336): NCBI GI NO: 18403505 NR Description: putative selenocysteine methyltransferase
  misc_feature (16)..(336): NCBI GI NO: 21593147 NR Description: putative selenocysteine methyltransferase
  misc_feature (20)..(330): NCBI GI NO: 6094303 NR Description: Selenocysteine methyltransferase
  misc_feature (1)..(200): NCBI GI NO: 34909958 NR Description: putative homocysteine S-methyltransferase-4
MVVTAAGSAEEAVRRWVDAAGGRLVLDGGLATELEANGADLNDPLWSAKCLLSSPHLIRKVHMDYLEAGANIIITASYQATIQGFESKGFSKEQSENLLTKSVEIALEAREMFLKEHLEKSTPIQHPVLVAASLGSYGAYLADGSEYSGDYGEAGTKEFLKDFHRRRLQVLAEAGPDLIAFETIPNKLEAEAYVELLEECNINIPAWFSFNSKDGVHIVSGDSLIECTTIADKCAKVGAVGINCTPPRFIHGLILSIRKVTDKPILIYPNSGERYDGEKKEWVESTGVSDGDFVSYVNEWCKDGAVLIGGCCRTTPNTIRAIHRTLNKSPNKQQLPAVE

SEQ ID NO: 38150 - protein, 277 aa, Zea mays subsp. mays
  peptide (1)..(277): Ceres Seq. ID no. 12369288
  misc_feature (1)..(266): Pfam Name: Pfam Description:  Homocysteine S-methyltransferase
  misc_feature (1)..(277): NCBI GI NO: 10732787 NR Description: homocysteine S-methyltransferase-2 [Zea mays]
  misc_feature (1)..(274): NCBI GI NO: 10732789 NR Description: homocysteine S-methyltransferase-3 [Zea mays]
  misc_feature (1)..(265): NCBI GI NO: 37534456 NR Description: putative homocysteine S-methyltransferase-2
  misc_feature (1)..(264): NCBI GI NO: 15229396 NR Description: homocysteine S-methyltransferase AtHMT-2
  misc_feature (1)..(264): NCBI GI NO: 25453566 NR Description: homocysteine S-methyltransferase (EC 2
  misc_feature (1)..(276): NCBI GI NO: 10732791 NR Description: homocysteine S-methyltransferase-4 [Zea mays]
  misc_feature (1)..(274): NCBI GI NO: 18403505 NR Description: putative selenocysteine methyltransferase
  misc_feature (1)..(274): NCBI GI NO: 21593147 NR Description: putative selenocysteine methyltransferase
  misc_feature (1)..(268): NCBI GI NO: 6094303 NR Description: Selenocysteine methyltransferase
  misc_feature (1)..(138): NCBI GI NO: 34909958 NR Description: putative homocysteine S-methyltransferase-4
MDYLEAGANIIITASYQATIQGFESKGFSKEQSENLLTKSVEIALEAREMFLKEHLEKSTPIQHPVLVAASLGSYGAYLADGSEYSGDYGEAGTKEFLKDFHRRRLQVLAEAGPDLIAFETIPNKLEAEAYVELLEECNINIPAWFSFNSKDGVHIVSGDSLIECTTIADKCAKVGAVGINCTPPRFIHGLILSIRKVTDKPILIYPNSGERYDGEKKEWVESTGVSDGDFVSYVNEWCKDGAVLIGGCCRTTPNTIRAIHRTLNKSPNKQQLPAVE

SEQ ID NO: 38151 - protein, 228 aa, Zea mays subsp. mays
  peptide (1)..(228): Ceres Seq. ID no. 12369289
  misc_feature (1)..(217): Pfam Name: Pfam Description:  Homocysteine S-methyltransferase
  misc_feature (1)..(228): NCBI GI NO: 10732787 NR Description: homocysteine S-methyltransferase-2 [Zea mays]
  misc_feature (1)..(225): NCBI GI NO: 10732789 NR Description: homocysteine S-methyltransferase-3 [Zea mays]
  misc_feature (1)..(216): NCBI GI NO: 37534456 NR Description: putative homocysteine S-methyltransferase-2
  misc_feature (1)..(215): NCBI GI NO: 15229396 NR Description: homocysteine S-methyltransferase AtHMT-2
  misc_feature (1)..(215): NCBI GI NO: 25453566 NR Description: homocysteine S-methyltransferase (EC 2
  misc_feature (1)..(227): NCBI GI NO: 10732791 NR Description: homocysteine S-methyltransferase-4 [Zea mays]
  misc_feature (1)..(225): NCBI GI NO: 18403505 NR Description: putative selenocysteine methyltransferase
  misc_feature (1)..(225): NCBI GI NO: 21593147 NR Description: putative selenocysteine methyltransferase
  misc_feature (1)..(219): NCBI GI NO: 6094303 NR Description: Selenocysteine methyltransferase
  misc_feature (1)..(89): NCBI GI NO: 34909958 NR Description: putative homocysteine S-methyltransferase-4
MFLKEHLEKSTPIQHPVLVAASLGSYGAYLADGSEYSGDYGEAGTKEFLKDFHRRRLQVLAEAGPDLIAFETIPNKLEAEAYVELLEECNINIPAWFSFNSKDGVHIVSGDSLIECTTIADKCAKVGAVGINCTPPRFIHGLILSIRKVTDKPILIYPNSGERYDGEKKEWVESTGVSDGDFVSYVNEWCKDGAVLIGGCCRTTPNTIRAIHRTLNKSPNKQQLPAVE

SEQ ID NO: 38152 - DNA, 1460 bp, Zea mays subsp. mays
  misc_feature (1)..(1460): Ceres Seq. ID no. 12350660
gactagctattagggttttgtttgcaaaccccaattcgattcccaaccacatcagccgccgccgtcccgtcaccaccaccaaccttggtagcagccgccgtccggtcatcaccaccaccttggtagccgccgccgaagcgcgccgcgggcgcgggcgctcgcgatggctaaccgcacggaccccctcgcgaagagcatccatgggacgaacccacaaaacctggtggagaagatcgtgcgctccaagatctatcagagcacctactggaaggagcaatgcttcggcctcaccgcagagacgctagtcgacaaggccatggagctcgaccacaccggcggaacctacggcggcaaccgcaagcccacccctttcctctgcctcgcgctcaagatgctgcagatccaaccagacaaggacatcgtagtcgagttcatcaagaacgaggattacaagtatgttcgtgttctcggggccttctacctgcgtctcactggcacaattgctgacgtctaccagtatcttgagccgctctacaacgactaccgcaagatcaggcacaagctcagcgatggacagttcacacttacccatgttgatgagttcattgatgagttgctgaccaaggattactcctgtgatacagccatgcctcgcatccagaaaagatgggttcttgaagcgtctggaactctggaaccgagaagaagtgcacttgaggacgattttgaggaagaagaggaagacaaggaggaacagcctatggaaattgatgaaccgaatggtcgtgaaaatgataatcatcgtggaaggagccttgccagggaacgggatagggactgggaccatgacaggaaacatgaaaggcataacagggacaaagattatgatagagatcgggattatgatagggactatgggagagggcgggaaagacaccgagatagagatcgtgaaagagacagaaaccgggatagggatagagaccgtcaccgcctgcgagatgatgattacaatcgcaacagggatagggacagggagagggatggtagggaaagggagcgccgagacagagaccgtggcaggcacaggagccgctcaaggagcagagatcgacgggacagagaccgtgaagatggagagtaccgcaggaggcgtggtcgtggcagtgtaagtcctcgaggacgtggtgaagacggtggcccaagagaggaacctaagaggaagaaggaaaagaaagagaagggtgaaggaaatgctccggacccgaatgaccctgagatcatagaaatgaacaagctacgggcctcactggggttgaaaccactaaagtagtttacacgagtaatgttcaacttgacctgcatccaaccttttttgtgctggactttttcagcttgatgtaactaaacttttgtattgatgtggttatatattcatcagggcttccatttctgtctgc

SEQ ID NO: 38153 - protein, 389 aa, Zea mays subsp. mays
  peptide (1)..(389): Ceres Seq. ID no. 12350661
  misc_feature (1)..(177): Pfam Name: Pfam Description:  PRP38 family
  misc_feature (1)..(352): NCBI GI NO: 18405463 NR Description: expressed protein; protein id: At2g40650
  misc_feature (1)..(352): NCBI GI NO: 25408716 NR Description: hypothetical protein At2g40650
  misc_feature (1)..(332): NCBI GI NO: 31248148 NR Description: ENSANGP00000012048 [Anopheles gambiae]
  misc_feature (1)..(322): NCBI GI NO: 22024089 NR Description: CG30342-PA [Drosophila melanogaster]
  misc_feature (1)..(309): NCBI GI NO: 24762236 NR Description: hypothetical protein FLJ14936 [Homo sapiens]
  misc_feature (1)..(309): NCBI GI NO: 27370014 NR Description: RIKEN cDNA 2410002M20 [Mus musculus]
  misc_feature (1)..(302): NCBI GI NO: 17559118 NR Description: PRP38 family (38.2 kD) [Caenorhabditis elegans]
  misc_feature (1)..(305): NCBI GI NO: 39593428 NR Description: Hypothetical protein CBG09713
  misc_feature (10)..(370): NCBI GI NO: 28829361 NR Description: similar to Arabidopsis thaliana (Mouse-ear cress)
  misc_feature (1)..(389): NCBI GI NO: 23508527 NR Description: hypothetical protein, conserved
MANRTDPLAKSIHGTNPQNLVEKIVRSKIYQSTYWKEQCFGLTAETLVDKAMELDHTGGTYGGNRKPTPFLCLALKMLQIQPDKDIVVEFIKNEDYKYVRVLGAFYLRLTGTIADVYQYLEPLYNDYRKIRHKLSDGQFTLTHVDEFIDELLTKDYSCDTAMPRIQKRWVLEASGTLEPRRSALEDDFEEEEEDKEEQPMEIDEPNGRENDNHRGRSLARERDRDWDHDRKHERHNRDKDYDRDRDYDRDYGRGRERHRDRDRERDRNRDRDRDRHRLRDDDYNRNRDRDRERDGRERERRDRDRGRHRSRSRSRDRRDRDREDGEYRRRRGRGSVSPRGRGEDGGPREEPKRKKEKKEKGEGNAPDPNDPEIIEMNKLRASLGLKPLK

SEQ ID NO: 38154 - protein, 338 aa, Zea mays subsp. mays
  peptide (1)..(338): Ceres Seq. ID no. 12350662
  misc_feature (1)..(126): Pfam Name: Pfam Description:  PRP38 family
  misc_feature (1)..(301): NCBI GI NO: 18405463 NR Description: expressed protein; protein id: At2g40650
  misc_feature (1)..(301): NCBI GI NO: 25408716 NR Description: hypothetical protein At2g40650
  misc_feature (1)..(281): NCBI GI NO: 31248148 NR Description: ENSANGP00000012048 [Anopheles gambiae]
  misc_feature (1)..(271): NCBI GI NO: 22024089 NR Description: CG30342-PA [Drosophila melanogaster]
  misc_feature (1)..(258): NCBI GI NO: 24762236 NR Description: hypothetical protein FLJ14936 [Homo sapiens]
  misc_feature (1)..(258): NCBI GI NO: 27370014 NR Description: RIKEN cDNA 2410002M20 [Mus musculus]
  misc_feature (1)..(251): NCBI GI NO: 17559118 NR Description: PRP38 family (38.2 kD) [Caenorhabditis elegans]
  misc_feature (1)..(254): NCBI GI NO: 39593428 NR Description: Hypothetical protein CBG09713
  misc_feature (1)..(319): NCBI GI NO: 28829361 NR Description: similar to Arabidopsis thaliana (Mouse-ear cress)
  misc_feature (1)..(338): NCBI GI NO: 23508527 NR Description: hypothetical protein, conserved
MELDHTGGTYGGNRKPTPFLCLALKMLQIQPDKDIVVEFIKNEDYKYVRVLGAFYLRLTGTIADVYQYLEPLYNDYRKIRHKLSDGQFTLTHVDEFIDELLTKDYSCDTAMPRIQKRWVLEASGTLEPRRSALEDDFEEEEEDKEEQPMEIDEPNGRENDNHRGRSLARERDRDWDHDRKHERHNRDKDYDRDRDYDRDYGRGRERHRDRDRERDRNRDRDRDRHRLRDDDYNRNRDRDRERDGRERERRDRDRGRHRSRSRSRDRRDRDREDGEYRRRRGRGSVSPRGRGEDGGPREEPKRKKEKKEKGEGNAPDPNDPEIIEMNKLRASLGLKPLK

SEQ ID NO: 38155 - protein, 313 aa, Zea mays subsp. mays
  peptide (1)..(313): Ceres Seq. ID no. 12350663
  misc_feature (1)..(101): Pfam Name: Pfam Description:  PRP38 family
  misc_feature (1)..(276): NCBI GI NO: 18405463 NR Description: expressed protein; protein id: At2g40650
  misc_feature (1)..(276): NCBI GI NO: 25408716 NR Description: hypothetical protein At2g40650
  misc_feature (1)..(256): NCBI GI NO: 31248148 NR Description: ENSANGP00000012048 [Anopheles gambiae]
  misc_feature (1)..(246): NCBI GI NO: 22024089 NR Description: CG30342-PA [Drosophila melanogaster]
  misc_feature (1)..(233): NCBI GI NO: 24762236 NR Description: hypothetical protein FLJ14936 [Homo sapiens]
  misc_feature (1)..(233): NCBI GI NO: 27370014 NR Description: RIKEN cDNA 2410002M20 [Mus musculus]
  misc_feature (1)..(226): NCBI GI NO: 17559118 NR Description: PRP38 family (38.2 kD) [Caenorhabditis elegans]
  misc_feature (1)..(229): NCBI GI NO: 39593428 NR Description: Hypothetical protein CBG09713
  misc_feature (1)..(294): NCBI GI NO: 28829361 NR Description: similar to Arabidopsis thaliana (Mouse-ear cress)
  misc_feature (1)..(313): NCBI GI NO: 23508527 NR Description: hypothetical protein, conserved
MLQIQPDKDIVVEFIKNEDYKYVRVLGAFYLRLTGTIADVYQYLEPLYNDYRKIRHKLSDGQFTLTHVDEFIDELLTKDYSCDTAMPRIQKRWVLEASGTLEPRRSALEDDFEEEEEDKEEQPMEIDEPNGRENDNHRGRSLARERDRDWDHDRKHERHNRDKDYDRDRDYDRDYGRGRERHRDRDRERDRNRDRDRDRHRLRDDDYNRNRDRDRERDGRERERRDRDRGRHRSRSRSRDRRDRDREDGEYRRRRGRGSVSPRGRGEDGGPREEPKRKKEKKEKGEGNAPDPNDPEIIEMNKLRASLGLKPLK

SEQ ID NO: 38156 - DNA, 1692 bp, Zea mays subsp. mays
  misc_feature (1)..(1692): Ceres Seq. ID no. 12367838
agcactcactcacgcccggccctgcactgcacgcgcgcggcgggagatcgagaagagactttgctcggttttggtaggcatccgcgcggagcgtgaccagacggtgtagagactacatagatcggaagggggtcggaaggggatctagacatagagactagagagcgaggaggatgaccggcgttgttgcaggcgccggagggggcaacaaggcggcgcccgccacgctgcggctgcaccactaccttgtgatggccggggtggcggcggcggtcgtcctcgcctgcctccggtacgcgccggaccccgcggggtacggcttcctggccgtggcgccgcggccggtggaggccgatgctggtgcccggcgggacaccactcctccaccgcgcccgtcgtcgtcgtcggtggtcatcttcaacttcggtgactccaactccgacacgggcggcatggcggcggtcaacgggatgaacattaacctgcccgagggacgcaccttcttccgccgccccaccggaaggctctccgacggccgcctcgtcatcgacttcatctgtgagagcctgcacacgcctttcctgagcccatacctcaaggcgctgggcgcggatttcagcaacggcgtgaacttcgccatcggcgggtccacggcgacgccggggggctctcccttctcgctggacgtgcagctccatcagtggctctacttcagggccaggtccatggagatgatcaacctaggacagaggcctcccatcgatcgcgaaggattccgaaaggccatctacaccatcgacatcgggcaaaacgacgtgtctgcttacatgcacctgccctacgaccaagtgcttgccaagatccccggatttgttgctcagatcaagtacaccatcgagacgctgtactcgcacggggcccgcaagttctggatccacggcacgggcgcgctgggctgcctgccgcagaagctggccatcccgcgggacgccgacgacggcgaccagctggacgcccacggctgcctcaagacctacaacaacgccgccaagcgcttcaacgcgctgctcggcgacgcctgcgcccagctccggcgccggatggtggacgcggcgctcgtcttcgtcgacatgtacgccgtcaagtacgacctggtggccaaccacacgacgcacgggatcgagaaacctctcatggcgtgctgcggctacggcgggccgccgtacaactacaaccacttcaaggcgtgcatgtcggcggagatgcagctgtgcgacgtgggcacgcgcttcatcagctgggacggcgtgcacttcaccgaggccgccaacgccatcgtcgccgccaaggtgctcaccggcgactactccacgcccagggtcaccatcgccaaactcgtcaactccacgctgcccaacgacgactagctggctggccgatcgatcgatcgtcgcgtcgtcattctgataaacatactgcaggcaggcttcatcgatccatatccaattgtccgtagaaatctacgactagctcattgtagatccgtaatgtgggctaagagatgcatcatgcatggcgatcgactagctgcccaactcgtcaagagctggttcaccgctctcgtcatgatcgagctagtttggacgagcaaattccatggcaccgagtaacacaattgatatcctcattggc

SEQ ID NO: 38157 - protein, 417 aa, Zea mays subsp. mays
  peptide (1)..(417): Ceres Seq. ID no. 12367839
  misc_feature (81)..(393): Pfam Name: Pfam Description:  GDSL-like Lipase/Acylhydrolase
  misc_feature (75)..(416): NCBI GI NO: 34894838 NR Description: putative lipase homolog
  misc_feature (4)..(68): NCBI GI NO: 34894838 NR Description: putative lipase homolog
  misc_feature (51)..(403): NCBI GI NO: 34894866 NR Description: putative lipase homolog
  misc_feature (80)..(401): NCBI GI NO: 15217506 NR Description: putative lipase; protein id: At1g09390.1
  misc_feature (71)..(401): NCBI GI NO: 15223585 NR Description: nodule-specific protein, putative
  misc_feature (130)..(403): NCBI GI NO: 34894844 NR Description: putative lipase homolog
  misc_feature (85)..(382): NCBI GI NO: 25336281 NR Description: lipase-like protein Lip-4
  misc_feature (74)..(401): NCBI GI NO: 25405771 NR Description: hypothetical protein T22H22.20
  misc_feature (82)..(401): NCBI GI NO: 18405064 NR Description: early nodule-specific protein, putative
  misc_feature (82)..(401): NCBI GI NO: 21537184 NR Description: early nodule-specific protein, putative
MTGVVAGAGGGNKAAPATLRLHHYLVMAGVAAAVVLACLRYAPDPAGYGFLAVAPRPVEADAGARRDTTPPPRPSSSSVVIFNFGDSNSDTGGMAAVNGMNINLPEGRTFFRRPTGRLSDGRLVIDFICESLHTPFLSPYLKALGADFSNGVNFAIGGSTATPGGSPFSLDVQLHQWLYFRARSMEMINLGQRPPIDREGFRKAIYTIDIGQNDVSAYMHLPYDQVLAKIPGFVAQIKYTIETLYSHGARKFWIHGTGALGCLPQKLAIPRDADDGDQLDAHGCLKTYNNAAKRFNALLGDACAQLRRRMVDAALVFVDMYAVKYDLVANHTTHGIEKPLMACCGYGGPPYNYNHFKACMSAEMQLCDVGTRFISWDGVHFTEAANAIVAAKVLTGDYSTPRVTIAKLVNSTLPNDD

SEQ ID NO: 38158 - protein, 391 aa, Zea mays subsp. mays
  peptide (1)..(391): Ceres Seq. ID no. 12367840
  misc_feature (55)..(367): Pfam Name: Pfam Description:  GDSL-like Lipase/Acylhydrolase
  misc_feature (49)..(390): NCBI GI NO: 34894838 NR Description: putative lipase homolog
  misc_feature (1)..(42): NCBI GI NO: 34894838 NR Description: putative lipase homolog
  misc_feature (25)..(377): NCBI GI NO: 34894866 NR Description: putative lipase homolog
  misc_feature (54)..(375): NCBI GI NO: 15217506 NR Description: putative lipase; protein id: At1g09390.1
  misc_feature (45)..(375): NCBI GI NO: 15223585 NR Description: nodule-specific protein, putative
  misc_feature (104)..(377): NCBI GI NO: 34894844 NR Description: putative lipase homolog
  misc_feature (59)..(356): NCBI GI NO: 25336281 NR Description: lipase-like protein Lip-4
  misc_feature (48)..(375): NCBI GI NO: 25405771 NR Description: hypothetical protein T22H22.20
  misc_feature (56)..(375): NCBI GI NO: 18405064 NR Description: early nodule-specific protein, putative
  misc_feature (56)..(375): NCBI GI NO: 21537184 NR Description: early nodule-specific protein, putative
MAGVAAAVVLACLRYAPDPAGYGFLAVAPRPVEADAGARRDTTPPPRPSSSSVVIFNFGDSNSDTGGMAAVNGMNINLPEGRTFFRRPTGRLSDGRLVIDFICESLHTPFLSPYLKALGADFSNGVNFAIGGSTATPGGSPFSLDVQLHQWLYFRARSMEMINLGQRPPIDREGFRKAIYTIDIGQNDVSAYMHLPYDQVLAKIPGFVAQIKYTIETLYSHGARKFWIHGTGALGCLPQKLAIPRDADDGDQLDAHGCLKTYNNAAKRFNALLGDACAQLRRRMVDAALVFVDMYAVKYDLVANHTTHGIEKPLMACCGYGGPPYNYNHFKACMSAEMQLCDVGTRFISWDGVHFTEAANAIVAAKVLTGDYSTPRVTIAKLVNSTLPNDD

SEQ ID NO: 38159 - protein, 324 aa, Zea mays subsp. mays
  peptide (1)..(324): Ceres Seq. ID no. 12367841
  misc_feature (1)..(300): Pfam Name: Pfam Description:  GDSL-like Lipase/Acylhydrolase
  misc_feature (1)..(323): NCBI GI NO: 34894838 NR Description: putative lipase homolog
  misc_feature (1)..(310): NCBI GI NO: 34894866 NR Description: putative lipase homolog
  misc_feature (1)..(308): NCBI GI NO: 15217506 NR Description: putative lipase; protein id: At1g09390.1
  misc_feature (1)..(308): NCBI GI NO: 15223585 NR Description: nodule-specific protein, putative
  misc_feature (37)..(310): NCBI GI NO: 34894844 NR Description: putative lipase homolog
  misc_feature (1)..(289): NCBI GI NO: 25336281 NR Description: lipase-like protein Lip-4
  misc_feature (1)..(308): NCBI GI NO: 25405771 NR Description: hypothetical protein T22H22.20
  misc_feature (1)..(308): NCBI GI NO: 18405064 NR Description: early nodule-specific protein, putative
  misc_feature (1)..(308): NCBI GI NO: 21537184 NR Description: early nodule-specific protein, putative
  misc_feature (1)..(149): NCBI GI NO: 15228721 NR Description: putative protein; protein id: At3g62280.1
MAAVNGMNINLPEGRTFFRRPTGRLSDGRLVIDFICESLHTPFLSPYLKALGADFSNGVNFAIGGSTATPGGSPFSLDVQLHQWLYFRARSMEMINLGQRPPIDREGFRKAIYTIDIGQNDVSAYMHLPYDQVLAKIPGFVAQIKYTIETLYSHGARKFWIHGTGALGCLPQKLAIPRDADDGDQLDAHGCLKTYNNAAKRFNALLGDACAQLRRRMVDAALVFVDMYAVKYDLVANHTTHGIEKPLMACCGYGGPPYNYNHFKACMSAEMQLCDVGTRFISWDGVHFTEAANAIVAAKVLTGDYSTPRVTIAKLVNSTLPNDD

SEQ ID NO: 38160 - DNA, 1073 bp, Zea mays subsp. mays
  misc_feature (1)..(1073): Ceres Seq. ID no. 12405278
  misc_feature (1051)..(1051): n is a, c, t, g, unknown, or other
aatccccacccgcaacaaaccaaacccaaccgcaactgcaacacagaggcatctctctccgcctccacgccgccgcccccagaccctcctcgatccaggcggtgattcgccgggctcccggcccggccatggatttgctggcgtccttggccgccgaggagcggtggctgttcccggcgttcctcgccatgtacgccgccatctactgcgccggccagctcgtcgtgttccggcggtgggcgccgcggcagaggctcgacggcgccagctgcctcatctcgctattccacggcacccccgccgcgctggccgccgcgggggccatcctcgcgcttcccgcggagtcccgctccttcgccgcgcccaacgcgcgcctccaggaccacgtcctcgactacagcgtcgcctacttcaccatggacctgctccactacctcgcctttctgccgggcgacgtcctcttcatcgcgcaccacctcgccacgctcttcgtcttcctgacctgccgctacctcgtccgccacggcgcctacgcgctcctcgtcctcctcgtcctcgccgaggtcaccagcctgctgcagaacgtctggacgctcgccgggatctggcgggaccagtcccccgccgccgcccgcgtcctacggcgccctctcgccgcccttctacgcgctctacacgctcgtcaggggcgtcgccggcccgctcttcctcctcaagatggccgccttctacctgtccggccaggccgtcgacgtcattccgtggtgggtgcggatctcctggatcctggaggaactgagcggtggggcccgcgcggccaagttatcctgttcgctaccgtgatgtttaccctagtccagagggtttatcttcgttcgtgtcgtgtttgttgttgcccatctgtgtttttgattgcaaggtcgctctgtgtcagttgttagtgctgtgttcatcctcggtttcagcagacccatgcatcaaacagcatggactgcggatcgatggatgctgttacccccgtcaggctttatttctaagttaatcttaaggnaaaaatggtgcttcttggtgct

SEQ ID NO: 38161 - protein, 312 aa, Zea mays subsp. mays
  peptide (1)..(312): Ceres Seq. ID no. 12405279
  misc_feature (57)..(218): NCBI GI NO: 9279600 NR Description: gene_id:MPE11.12~unknown protein
  misc_feature (57)..(218): NCBI GI NO: 15230950 NR Description: hypothetical protein; protein id: At3g25950.1
  misc_feature (58)..(207): NCBI GI NO: 15241364 NR Description: putative protein; protein id: At5g14280.1
  misc_feature (58)..(207): NCBI GI NO: 26450181 NR Description: unknown protein [Arabidopsis thaliana]
  misc_feature (58)..(214): NCBI GI NO: 15232128 NR Description: unknown protein; protein id: At3g27270.1
SPPATNQTQPQLQHRGISLRLHAAAPRPSSIQAVIRRAPGPAMDLLASLAAEERWLFPAFLAMYAAIYCAGQLVVFRRWAPRQRLDGASCLISLFHGTPAALAAAGAILALPAESRSFAAPNARLQDHVLDYSVAYFTMDLLHYLAFLPGDVLFIAHHLATLFVFLTCRYLVRHGAYALLVLLVLAEVTSLLQNVWTLAGIWRDQSPAAARVLRRPLAALLRALHARQGRRRPALPPQDGRLLPVRPGRRRHSVVGADLLDPGGTERWGPRGQVILFATVMFTLVQRVYLRSCRVCCCPSVFLIARSLCVSC

SEQ ID NO: 38162 - protein, 270 aa, Zea mays subsp. mays
  peptide (1)..(270): Ceres Seq. ID no. 12405280
  misc_feature (15)..(176): NCBI GI NO: 9279600 NR Description: gene_id:MPE11.12~unknown protein
  misc_feature (15)..(176): NCBI GI NO: 15230950 NR Description: hypothetical protein; protein id: At3g25950.1
  misc_feature (16)..(165): NCBI GI NO: 15241364 NR Description: putative protein; protein id: At5g14280.1
  misc_feature (16)..(165): NCBI GI NO: 26450181 NR Description: unknown protein [Arabidopsis thaliana]
  misc_feature (16)..(172): NCBI GI NO: 15232128 NR Description: unknown protein; protein id: At3g27270.1
MDLLASLAAEERWLFPAFLAMYAAIYCAGQLVVFRRWAPRQRLDGASCLISLFHGTPAALAAAGAILALPAESRSFAAPNARLQDHVLDYSVAYFTMDLLHYLAFLPGDVLFIAHHLATLFVFLTCRYLVRHGAYALLVLLVLAEVTSLLQNVWTLAGIWRDQSPAAARVLRRPLAALLRALHARQGRRRPALPPQDGRLLPVRPGRRRHSVVGADLLDPGGTERWGPRGQVILFATVMFTLVQRVYLRSCRVCCCPSVFLIARSLCVSC

SEQ ID NO: 38163 - protein, 265 aa, Zea mays subsp. mays
  peptide (1)..(265): Ceres Seq. ID no. 12405281
  misc_feature (13)..(252): NCBI GI NO: 29247944 NR Description: GLP_26_54603_52153 [Giardia lamblia ATCC 50803]
  misc_feature (4)..(265): NCBI GI NO: 23018055 NR Description: hypothetical protein [Thermobifida fusca]
  misc_feature (62)..(265): NCBI GI NO: 25143299 NR Description: pre-mRNA splicing SR protein related RSR-1 (68
  misc_feature (72)..(248): NCBI GI NO: 15219287 NR Description: arginine/serine-rich protein, putative
IPTRNKPNPTATATQRHLSPPPRRRPQTLLDPGGDSPGSRPGHGFAGVLGRRGAVAVPGVPRHVRRHLLRRPARRVPAVGAAAEARRRQLPHLAIPRHPRRAGRRGGHPRASRGVPLLRRAQRAPPGPRPRLQRRLLHHGPAPLPRLSAGRRPLHRAPPRHALRLPDLPLPRPPRRLRAPRPPRPRRGHQPAAERLDARRDLAGPVPRRRPRPTAPSRRPSTRSTRSSGASPARSSSSRWPPSTCPARPSTSFRGGCGSPGSWRN

SEQ ID NO: 38164 - DNA, 1891 bp, Zea mays subsp. mays
  misc_feature (1)..(1891): Ceres Seq. ID no. 12366083
atatattaaccgcgcaccttttgtcctctccttgttcccaaacctctgctagcttcgcttccaaccccatcgatacttcccagcaagctacactacaagctcatccgcctagtcctttcatggccgatcaccagcctcaggtcgaggtcctgaccgagtcagtgcgggtcaacggcaccaaggcggaggccacgctcgtgggaggcgagctggcgtggcgccccgccgccggcggcaacggagaggggcaggagcggcggctggagctggagtcggaggtgctcgggttccagatggacgggaggcagctcaaattcgcgacctttgccgcgagcggcggcggtaatgggaaagggggaggaggggatgggaatcggaggagaggggaggtggagatggagatggagaacgaggccaccgcggtgcggtggggggacgtaatcagtgatcgcctagcctcgctcggccggccaaagaaattgttcattatagtgaacccttatggtggaaagagaagcggaccgagtattttccagaatgaagtcctccccctcattgaagcttctggcgtgctttatacgatgcaagaaaccaagcatcgccttcatgctcaagagattgcacattcacttgatcttaggaagtatgacggcatcatttgtgtcagtggagatggtgtgatggtagaggttgtcaatggtctcctgcaaagggaggactgggaagcagcaataaaagtgccccttgggatcattccagcaggtactggaaatggaatggcacgatctctactgcatgctgctggtgaaccattctctatatctaatgctgtgttcgcaatcatcagaggtcataaacgtgcccttgatgttacttctgttgtgcagggaaaggcgaggttctttagtgtcctgatgcttacatggggtctggtggctgatgttgatattgaatcagagaagtataggtggatgggaagtgctcgccttgatttttatcttctactccgcattctgaacctgcgacggtacaatgggcgtatcctttttgttccagcaccaggatacgaagaagttggtgatcctgtggaccaagctaccggttacgaaacaaacgggtttagcacgggatttcaagacgacggaagaaccggcagtaatggtgagacgtgtggctatgtgggcccatcgtcgatcaaagaagctggtcttagatggagatcactggatgggccattcgtttcagtctggctcggcaatgttcctttcgctagcgaagatgccatggcagcaccaaaagctgagtttgcggatggctacttggatgctgctataatcaaggattgtcctcggtgggatgtcctcgggctcgtgttccagatgaaggacggcagctacgtgaactcgccatgcgtggagtacttcaaggtgaaggcgatccggatcgagccgggcctgcgcgtgggcagcagcaccgagggcggtatcatcgactcggacggggaggtgatcgcgaggggcgacgagtccgattcccgcgccggcgacgacgagccggggcacctgatggcgtacggcccgcccatccagctgacggtggaccaggggctggccaccatcttctccccgagatgacgatccttctctcagttctcctccaccgcctgcgagtaatttgcttcgtctagccctgcctgccattctctcgcgtaggatcatgtgcttctgtatgtaaatattgctcacagcccaccccagttggatgagcgatgagccaagagggacggatactggctggatctccgtctatagattgttttatttccctgcccacatggctgccgcttttagtgctagcttgagaaatgagagctgggcagttcataagcttc

SEQ ID NO: 38165 - protein, 543 aa, Zea mays subsp. mays
  peptide (1)..(543): Ceres Seq. ID no. 12366084
  misc_feature (159)..(254): Pfam Name: presumed Pfam Description: Diacylglycerol kinase catalytic domain
  misc_feature (280)..(543): NCBI GI NO: 34898712 NR Description: putative sphingosine kinase
  misc_feature (44)..(253): NCBI GI NO: 34898712 NR Description: putative sphingosine kinase
  misc_feature (42)..(509): NCBI GI NO: 22136030 NR Description: putative protein [Arabidopsis thaliana]
  misc_feature (48)..(534): NCBI GI NO: 15234501 NR Description: putative protein; protein id: At4g21540.1
  misc_feature (42)..(434): NCBI GI NO: 15234501 NR Description: putative protein; protein id: At4g21540.1
  misc_feature (475)..(542): NCBI GI NO: 15234501 NR Description: putative protein; protein id: At4g21540.1
  misc_feature (67)..(230): NCBI GI NO: 34910090 NR Description: B1100D10.20
  misc_feature (228)..(364): NCBI GI NO: 34910090 NR Description: B1100D10.20
  misc_feature (316)..(456): NCBI GI NO: 34910090 NR Description: B1100D10.20
  misc_feature (125)..(352): NCBI GI NO: 28828335 NR Description: similar to Homo sapiens (Human)
ILTAHLLSSPCSQTSASFASNPIDTSQQATLQAHPPSPFMADHQPQVEVLTESVRVNGTKAEATLVGGELAWRPAAGGNGEGQERRLELESEVLGFQMDGRQLKFATFAASGGGNGKGGGGDGNRRRGEVEMEMENEATAVRWGDVISDRLASLGRPKKLFIIVNPYGGKRSGPSIFQNEVLPLIEASGVLYTMQETKHRLHAQEIAHSLDLRKYDGIICVSGDGVMVEVVNGLLQREDWEAAIKVPLGIIPAGTGNGMARSLLHAAGEPFSISNAVFAIIRGHKRALDVTSVVQGKARFFSVLMLTWGLVADVDIESEKYRWMGSARLDFYLLLRILNLRRYNGRILFVPAPGYEEVGDPVDQATGYETNGFSTGFQDDGRTGSNGETCGYVGPSSIKEAGLRWRSLDGPFVSVWLGNVPFASEDAMAAPKAEFADGYLDAAIIKDCPRWDVLGLVFQMKDGSYVNSPCVEYFKVKAIRIEPGLRVGSSTEGGIIDSDGEVIARGDESDSRAGDDEPGHLMAYGPPIQLTVDQGLATIFSPR

SEQ ID NO: 38166 - protein, 504 aa, Zea mays subsp. mays
  peptide (1)..(504): Ceres Seq. ID no. 12366085
  misc_feature (120)..(215): Pfam Name: presumed Pfam Description: Diacylglycerol kinase catalytic domain
  misc_feature (241)..(504): NCBI GI NO: 34898712 NR Description: putative sphingosine kinase
  misc_feature (5)..(214): NCBI GI NO: 34898712 NR Description: putative sphingosine kinase
  misc_feature (3)..(470): NCBI GI NO: 22136030 NR Description: putative protein [Arabidopsis thaliana]
  misc_feature (9)..(495): NCBI GI NO: 15234501 NR Description: putative protein; protein id: At4g21540.1
  misc_feature (3)..(395): NCBI GI NO: 15234501 NR Description: putative protein; protein id: At4g21540.1
  misc_feature (436)..(503): NCBI GI NO: 15234501 NR Description: putative protein; protein id: At4g21540.1
  misc_feature (28)..(191): NCBI GI NO: 34910090 NR Description: B1100D10.20
  misc_feature (189)..(325): NCBI GI NO: 34910090 NR Description: B1100D10.20
  misc_feature (277)..(417): NCBI GI NO: 34910090 NR Description: B1100D10.20
  misc_feature (86)..(313): NCBI GI NO: 28828335 NR Description: similar to Homo sapiens (Human)
MADHQPQVEVLTESVRVNGTKAEATLVGGELAWRPAAGGNGEGQERRLELESEVLGFQMDGRQLKFATFAASGGGNGKGGGGDGNRRRGEVEMEMENEATAVRWGDVISDRLASLGRPKKLFIIVNPYGGKRSGPSIFQNEVLPLIEASGVLYTMQETKHRLHAQEIAHSLDLRKYDGIICVSGDGVMVEVVNGLLQREDWEAAIKVPLGIIPAGTGNGMARSLLHAAGEPFSISNAVFAIIRGHKRALDVTSVVQGKARFFSVLMLTWGLVADVDIESEKYRWMGSARLDFYLLLRILNLRRYNGRILFVPAPGYEEVGDPVDQATGYETNGFSTGFQDDGRTGSNGETCGYVGPSSIKEAGLRWRSLDGPFVSVWLGNVPFASEDAMAAPKAEFADGYLDAAIIKDCPRWDVLGLVFQMKDGSYVNSPCVEYFKVKAIRIEPGLRVGSSTEGGIIDSDGEVIARGDESDSRAGDDEPGHLMAYGPPIQLTVDQGLATIFSPR

SEQ ID NO: 38167 - protein, 446 aa, Zea mays subsp. mays
  peptide (1)..(446): Ceres Seq. ID no. 12366086
  misc_feature (62)..(157): Pfam Name: presumed Pfam Description: Diacylglycerol kinase catalytic domain
  misc_feature (183)..(446): NCBI GI NO: 34898712 NR Description: putative sphingosine kinase
  misc_feature (1)..(156): NCBI GI NO: 34898712 NR Description: putative sphingosine kinase
  misc_feature (1)..(412): NCBI GI NO: 22136030 NR Description: putative protein [Arabidopsis thaliana]
  misc_feature (1)..(437): NCBI GI NO: 15234501 NR Description: putative protein; protein id: At4g21540.1
  misc_feature (1)..(337): NCBI GI NO: 15234501 NR Description: putative protein; protein id: At4g21540.1
  misc_feature (378)..(445): NCBI GI NO: 15234501 NR Description: putative protein; protein id: At4g21540.1
  misc_feature (1)..(133): NCBI GI NO: 34910090 NR Description: B1100D10.20
  misc_feature (131)..(267): NCBI GI NO: 34910090 NR Description: B1100D10.20
  misc_feature (219)..(359): NCBI GI NO: 34910090 NR Description: B1100D10.20
  misc_feature (28)..(255): NCBI GI NO: 28828335 NR Description: similar to Homo sapiens (Human)
MDGRQLKFATFAASGGGNGKGGGGDGNRRRGEVEMEMENEATAVRWGDVISDRLASLGRPKKLFIIVNPYGGKRSGPSIFQNEVLPLIEASGVLYTMQETKHRLHAQEIAHSLDLRKYDGIICVSGDGVMVEVVNGLLQREDWEAAIKVPLGIIPAGTGNGMARSLLHAAGEPFSISNAVFAIIRGHKRALDVTSVVQGKARFFSVLMLTWGLVADVDIESEKYRWMGSARLDFYLLLRILNLRRYNGRILFVPAPGYEEVGDPVDQATGYETNGFSTGFQDDGRTGSNGETCGYVGPSSIKEAGLRWRSLDGPFVSVWLGNVPFASEDAMAAPKAEFADGYLDAAIIKDCPRWDVLGLVFQMKDGSYVNSPCVEYFKVKAIRIEPGLRVGSSTEGGIIDSDGEVIARGDESDSRAGDDEPGHLMAYGPPIQLTVDQGLATIFSPR

SEQ ID NO: 38168 - DNA, 1598 bp, Zea mays subsp. mays
  misc_feature (1)..(1598): Ceres Seq. ID no. 12407458
gcacgagaccattacctagaacatcctaatcaaaaattcttctttctccgtcctttccatcccaggtcgccaccgcgtctccgcccttccctcctccccaccatcttcagcacgaggcagcacgcgcggacgtccctcccgacacggagaaccccgctccgcgcgctcgcattcatcgcgccgccacccaggtcccagccggccgcgcgcccgcgcccccccgccgccggccgtgccatgccgcggcggggcgagacggcggtggtccccattgacgtggcgtccgccggcggcgggcgaggcgatgagcggcccaagagagagcgccaccggagccacggccccggccgccacggtccgcaccggagtcgcccgccgcccccgcccccgccggcgttccggccgttccggcggtggttcccgttccttgtgccgctattcatcgtcgctaacatcgtcctcttcgtgctcaccatgtacgtcaacgactgccccgcgcacgcgcgggccaccggcgccgcgataggcggatcggtcggcgagagcgccaccgcgcagggctgctggctcgcgcccgagctcgggaggttcgcgttccagtcgttcaaggagaacccgctcatcggcccttcctccgccacgctgttggaaatgggggcactggaaaccagtaaagttaccaaagatcacgaagggtggcgcctcattacatgcatttggttgcatgctggagtcgtccacatactcgccaacatgttgagcctcttaatgatcggaatcaggctcgagaaggaatttggtttcataaggattggtacactgtatgtgatctctggtgttggtggcagcttgctgtcttctctatttatggtgtcaaatatatcagtcggtgcttcaggtgcattatttggactattgggctcaatgctgtcagagctcataacgaattggacgatatatgagaacaagtttgcagcactcttgactctagttatgatcattctcatcaacttagctgttgggatccttccacatgttgacaacttcgctcaccttggaggatttatgtcagggttctgtcttggttttgtgctgctaatgcgaccacagtttggatatattaaccaaaagaactctcctcttggatttcccatgggcgtaactaaacggaagttcaagacatatcaagtcatacttttggttatttctacaatgatactagtttctgggttcaccattggattggtgttgctatttcaagggttcaatgctagtgagcactgttcttggtgccattatatgagctgtgtgcctacttcaaagtggagttgcaacgcaccaaataactactgcatgtcttcacagctcggaaaccaactaaatctgacatgtgaaagcactggaaagaccgcatcatatgttctcagcgatccaaacaactcggaggcgattaaaaatctttgtgtcggtctttgcagttaatagtaatgtctgcattttctaacaggaaattaatgctagcatatctatggattatatgactagaagcctatgcttacattatgattctctggtaatgctattgcggcttctatggc

SEQ ID NO: 38169 - protein, 493 aa, Zea mays subsp. mays
  peptide (1)..(493): Ceres Seq. ID no. 12407459
  misc_feature (97)..(401): NCBI GI NO: 34895778 NR Description: putative membrane protein
  misc_feature (188)..(492): NCBI GI NO: 30693911 NR Description: membrane protein, Rhomboid family
  misc_feature (78)..(165): NCBI GI NO: 30693911 NR Description: membrane protein, Rhomboid family
  misc_feature (102)..(445): NCBI GI NO: 15240744 NR Description: membrane protein; protein id: At5g07250
  misc_feature (188)..(492): NCBI GI NO: 11357824 NR Description: hypothetical protein F5K20
  misc_feature (139)..(444): NCBI GI NO: 15221690 NR Description: membrane protein, putative; protein id: At1g63120
  misc_feature (137)..(445): NCBI GI NO: 294845 NR Description: membrane protein
  misc_feature (218)..(492): NCBI GI NO: 18409916 NR Description: putative protein; protein id: At3g53780.1
  misc_feature (210)..(444): NCBI GI NO: 37536172 NR Description: putative membrane protein
  misc_feature (137)..(175): NCBI GI NO: 37536172 NR Description: putative membrane protein
ARDHYLEHPNQKFFFLRPFHPRSPPRLRPSLLPTIFSTRQHARTSLPTRRTPLRALAFIAPPPRSQPAARPRPPAAGRAMPRRGETAVVPIDVASAGGGRGDERPKRERHRSHGPGRHGPHRSRPPPPPPPAFRPFRRWFPFLVPLFIVANIVLFVLTMYVNDCPAHARATGAAIGGSVGESATAQGCWLAPELGRFAFQSFKENPLIGPSSATLLEMGALETSKVTKDHEGWRLITCIWLHAGVVHILANMLSLLMIGIRLEKEFGFIRIGTLYVISGVGGSLLSSLFMVSNISVGASGALFGLLGSMLSELITNWTIYENKFAALLTLVMIILINLAVGILPHVDNFAHLGGFMSGFCLGFVLLMRPQFGYINQKNSPLGFPMGVTKRKFKTYQVILLVISTMILVSGFTIGLVLLFQGFNASEHCSWCHYMSCVPTSKWSCNAPNNYCMSSQLGNQLNLTCESTGKTASYVLSDPNNSEAIKNLCVGLCS

SEQ ID NO: 38170 - protein, 414 aa, Zea mays subsp. mays
  peptide (1)..(414): Ceres Seq. ID no. 12407460
  misc_feature (18)..(322): NCBI GI NO: 34895778 NR Description: putative membrane protein
  misc_feature (109)..(413): NCBI GI NO: 30693911 NR Description: membrane protein, Rhomboid family
  misc_feature (1)..(86): NCBI GI NO: 30693911 NR Description: membrane protein, Rhomboid family
  misc_feature (23)..(366): NCBI GI NO: 15240744 NR Description: membrane protein; protein id: At5g07250
  misc_feature (109)..(413): NCBI GI NO: 11357824 NR Description: hypothetical protein F5K20
  misc_feature (60)..(365): NCBI GI NO: 15221690 NR Description: membrane protein, putative; protein id: At1g63120
  misc_feature (58)..(366): NCBI GI NO: 294845 NR Description: membrane protein
  misc_feature (139)..(413): NCBI GI NO: 18409916 NR Description: putative protein; protein id: At3g53780.1
  misc_feature (131)..(365): NCBI GI NO: 37536172 NR Description: putative membrane protein
  misc_feature (58)..(96): NCBI GI NO: 37536172 NR Description: putative membrane protein
MPRRGETAVVPIDVASAGGGRGDERPKRERHRSHGPGRHGPHRSRPPPPPPPAFRPFRRWFPFLVPLFIVANIVLFVLTMYVNDCPAHARATGAAIGGSVGESATAQGCWLAPELGRFAFQSFKENPLIGPSSATLLEMGALETSKVTKDHEGWRLITCIWLHAGVVHILANMLSLLMIGIRLEKEFGFIRIGTLYVISGVGGSLLSSLFMVSNISVGASGALFGLLGSMLSELITNWTIYENKFAALLTLVMIILINLAVGILPHVDNFAHLGGFMSGFCLGFVLLMRPQFGYINQKNSPLGFPMGVTKRKFKTYQVILLVISTMILVSGFTIGLVLLFQGFNASEHCSWCHYMSCVPTSKWSCNAPNNYCMSSQLGNQLNLTCESTGKTASYVLSDPNNSEAIKNLCVGLCS

SEQ ID NO: 38171 - protein, 335 aa, Zea mays subsp. mays
  peptide (1)..(335): Ceres Seq. ID no. 12407461
  misc_feature (1)..(243): NCBI GI NO: 34895778 NR Description: putative membrane protein
  misc_feature (30)..(334): NCBI GI NO: 30693911 NR Description: membrane protein, Rhomboid family
  misc_feature (1)..(287): NCBI GI NO: 15240744 NR Description: membrane protein; protein id: At5g07250
  misc_feature (30)..(334): NCBI GI NO: 11357824 NR Description: hypothetical protein F5K20
  misc_feature (1)..(286): NCBI GI NO: 15221690 NR Description: membrane protein, putative; protein id: At1g63120
  misc_feature (1)..(287): NCBI GI NO: 294845 NR Description: membrane protein
  misc_feature (60)..(334): NCBI GI NO: 18409916 NR Description: putative protein; protein id: At3g53780.1
  misc_feature (52)..(286): NCBI GI NO: 37536172 NR Description: putative membrane protein
  misc_feature (1)..(17): NCBI GI NO: 37536172 NR Description: putative membrane protein
  misc_feature (1)..(286): NCBI GI NO: 15222058 NR Description: membrane protein, putative; protein id:At1g12750
MYVNDCPAHARATGAAIGGSVGESATAQGCWLAPELGRFAFQSFKENPLIGPSSATLLEMGALETSKVTKDHEGWRLITCIWLHAGVVHILANMLSLLMIGIRLEKEFGFIRIGTLYVISGVGGSLLSSLFMVSNISVGASGALFGLLGSMLSELITNWTIYENKFAALLTLVMIILINLAVGILPHVDNFAHLGGFMSGFCLGFVLLMRPQFGYINQKNSPLGFPMGVTKRKFKTYQVILLVISTMILVSGFTIGLVLLFQGFNASEHCSWCHYMSCVPTSKWSCNAPNNYCMSSQLGNQLNLTCESTGKTASYVLSDPNNSEAIKNLCVGLCS

SEQ ID NO: 38172 - DNA, 1553 bp, Zea mays subsp. mays
  misc_feature (1)..(1553): Ceres Seq. ID no. 13498955
actatactctcgcgcggcgagctcctcgagctcgctccccgttccaagatagaaaaatggccgcggcggaagcagcctcctccgcgccggcgcccgagcatctcctggaggtggaggacgacgaggtgctgatcgacttcaagcccaacgccaagtgccgcgccgacctccgcctccgctccctgcacccgtccctccccgtcgccttcaaggtgcagacctcctccccgctcaagttcctcgtcagcccgccgcgcggcgccgtgccgccgctctcctcggcgtccctgcgcgtcgtgctccgcccgcagccgcacgcgccgccgtccttcccgcgctcccgcgccgaccgcttmctcgtcctgtcctcgctctccgcggcgcgcctcgactccgtgggaagcagcaacgacggcggcggcgggggcggagtcagggccgtccgcctccgcgtgttcttcggcgggccgtaccttctccgcctcgccgcggacgccggagacgccgykgccgtgcgcctcatcctgcgccggcagccgcacctgctgccgttcctggagcaccagcaggccgccgcggcgcccgacgccggcgagcakyaktgggcgccgctgcacgcggcggccgccaggggggactgcggtkkagctgaggcggctggggcccgaggcgctggccgcgcgtgaccgygaggggaggacggtcctgcacgcdgtcgccgcggccggcgaggccgagacggtggcggtgctggtggacatgggcgccgacacgtmdkyggtcgacgcgcgcggkaggactccgctggacgtckcgcgcgacaagggataccaagaagtggtggacgtyctgkaacggtggsagctgstgatgacggcggcgaggcgaggcgacctcgggagcctcgagtccctgctcagcaagcgcgccggcgtccgcgggcgcgaccagtacggcctcacggcgctgcacctggccgcgatcaagggccacggcgacgcgatcgcgctgctcgccgggccgggatgcatggacgtcgagtgcgaggacgtggaagggcacaggccgctccacctcgccgtcgagggaggccacgcggaggccgtggagctgctgctcgacatgggcgccgacgccaacgcccggaccaggcgcggcgccacgccgctccagatggcggaggccatggggtacgaggccatcgctcagctcctgtgcgcgagaggtgcggaggtggccgccgcgtcggcgttgtgcgccgcgtcgtcgtcttcatcgtccatatcgtgcgcctgattgctgccggtatcgtttccgctgctgctcctgctgtgcgtgagctgtgtggtacagtactgtagccgagagatgcctacaaccgccgtggctggctttaaagtaagaagcgaacccgtccgaaattgcactgtactgtatagtggtttgttctgctttgttgggagagtagctcattgttgagacggtcgattgctatacccagcgtgctggtggaaaaaaaaacatcgccatgcaattgcagtgctttacatgtc

SEQ ID NO: 38173 - protein, 227 aa, Zea mays subsp. mays
  peptide (1)..(227): Ceres Seq. ID no. 15223058
  misc_feature (3)..(227): NCBI GI NO: 34907942 NR Description: B1088C09.19
  misc_feature (208)..(227): NCBI GI NO: 22958408 NR Description: hypothetical protein [Rhodobacter sphaeroides]
  misc_feature (118)..(118): Xaa is any aa, unknown or other
  misc_feature (169)..(169): Xaa is any aa, unknown or other
  misc_feature (199)..(199): Xaa is any aa, unknown or other
  misc_feature (200)..(200): Xaa is any aa, unknown or other
  misc_feature (215)..(215): Xaa is any aa, unknown or other
YTLARRAPRARSPFQDRKMAAAEAASSAPAPEHLLEVEDDEVLIDFKPNAKCRADLRLRSLHPSLPVAFKVQTSSPLKFLVSPPRGAVPPLSSASLRVVLRPQPHAPPSFPRSRADRXLVLSSLSAARLDSVGSSNDGGGGGGVRAVRLRVFFGGPYLLRLAADAGDAXAVRLILRRQPHLLPFLEHQQAAAAPDAGEXXWAPLHAAAARGDCGXAEAAGARGAGRA

SEQ ID NO: 38174 - protein, 209 aa, Zea mays subsp. mays
  peptide (1)..(209): Ceres Seq. ID no. 15223059
  misc_feature (1)..(209): NCBI GI NO: 34907942 NR Description: B1088C09.19
  misc_feature (190)..(209): NCBI GI NO: 22958408 NR Description: hypothetical protein [Rhodobacter sphaeroides]
  misc_feature (100)..(100): Xaa is any aa, unknown or other
  misc_feature (151)..(151): Xaa is any aa, unknown or other
  misc_feature (181)..(181): Xaa is any aa, unknown or other
  misc_feature (182)..(182): Xaa is any aa, unknown or other
  misc_feature (197)..(197): Xaa is any aa, unknown or other
MAAAEAASSAPAPEHLLEVEDDEVLIDFKPNAKCRADLRLRSLHPSLPVAFKVQTSSPLKFLVSPPRGAVPPLSSASLRVVLRPQPHAPPSFPRSRADRXLVLSSLSAARLDSVGSSNDGGGGGGVRAVRLRVFFGGPYLLRLAADAGDAXAVRLILRRQPHLLPFLEHQQAAAAPDAGEXXWAPLHAAAARGDCGXAEAAGARGAGRA

SEQ ID NO: 38175 - protein, 178 aa, Zea mays subsp. mays
  peptide (1)..(178): Ceres Seq. ID no. 15223060
  misc_feature (99)..(131): Pfam Name: Pfam Description:  Ankyrin repeat
  misc_feature (1)..(178): NCBI GI NO: 34907942 NR Description: B1088C09.19
  misc_feature (1)..(152): NCBI GI NO: 28274852 NR Description: ankyrin repeat protein E4_2 [synthetic construct]
  misc_feature (1)..(152): NCBI GI NO: 28274854 NR Description: ankyrin repeat protein E4_8 [synthetic construct]
  misc_feature (40)..(157): NCBI GI NO: 28373837 NR Description: Chain A
  misc_feature (38)..(161): NCBI GI NO: 28274852 NR Description: ankyrin repeat protein E4_2 [synthetic construct]
  misc_feature (1)..(151): NCBI GI NO: 23055190 NR Description: hypothetical protein [Geobacter metallireducens]
  misc_feature (40)..(161): NCBI GI NO: 28274854 NR Description: ankyrin repeat protein E4_8 [synthetic construct]
  misc_feature (38)..(161): NCBI GI NO: 28274850 NR Description: ankyrin repeat protein E3_19 [synthetic construct]
  misc_feature (1)..(161): NCBI GI NO: 18312929 NR Description: hypothetical protein with 4 ankyrin repeats
  misc_feature (38)..(161): NCBI GI NO: 28373666 NR Description: Chain A
  misc_feature (6)..(6): Xaa is any aa, unknown or other
  misc_feature (7)..(7): Xaa is any aa, unknown or other
  misc_feature (12)..(12): Xaa is any aa, unknown or other
  misc_feature (19)..(19): Xaa is any aa, unknown or other
  misc_feature (30)..(30): Xaa is any aa, unknown or other
  misc_feature (32)..(32): Xaa is any aa, unknown or other
  misc_feature (35)..(35): Xaa is any aa, unknown or other
  misc_feature (37)..(37): Xaa is any aa, unknown or other
MGADTXXVDARXRTPLDVXRDKGYQEVVDXLXRWXLXMTAARRGDLGSLESLLSKRAGVRGRDQYGLTALHLAAIKGHGDAIALLAGPGCMDVECEDVEGHRPLHLAVEGGHAEAVELLLDMGADANARTRRGATPLQMAEAMGYEAIAQLLCARGAEVAAASALCAASSSSSSISCA

SEQ ID NO: 38176 - DNA, 1071 bp, Zea mays subsp. mays
  misc_feature (1)..(1071): Ceres Seq. ID no. 12406460
gtctctctgaccttatccccttgcggcaaaaccttgcgcgcaacaatggccgcctccctcccgaccaccgccgcgcgcctcgcggccccggccttcgcctaccggtcgcccaaggctccctccgccaccgccctcccgcgtgccgccgccttccctgcaatcgccgttgcggcggcgcccctgcgcccgcgccgcgcgccgaggccggtggcggcccgggccgggggcgaggagagggagacgatactgctccccgggtgcgactacaaccactggctgatcgtcatggagttccccaaggaccccgcgcccacccgcgagcagatgatcgacacctacctcaacacactcgccaccgtcctcggcagcatggaggaagccaagaagaacatgtacgccttcagcacgaccacctacaccgggttccagtgcaccgtggacgaggagacgtcggagaagttcaagggtctgcctggggtgctgtgggtgctccctgattcctacatcgacgtgaagaacaaggactacggaggtgacaagtacgtgaacggcgagataatcccctgcacgtacccgacgtaccagccgaaggagcggaggacgtccaagtacgagagcaggcggtacgagaggcggagagatgggccaccggcggccagcaggaaaccgaggcagcaggcaccagctcagactcagaccgagtcggcgtcttcgtgacgagctctgcaggcattttgtccacgtacctacctacctagaagtagaacaagagaggaggacgcctaaaattctgtcgcattgggcaccgcgtactggactggacaggcgggtcgggatccatcatccatcgtcagccagaaaattgtcgctgtccaagcagcctgggcagcttgtgtgtgactgtgtgtgctgatatcttgagctagctgtggcagaaactggaaaccctactgtgtgtgtgctgatatcttgtcatagcgagctgtgtgatgccgactggtgtagagctgtatcgctgattgcgtgaaaccgaaatgctgtggctttatttagactgatgttgtcacttcc

SEQ ID NO: 38177 - protein, 238 aa, Zea mays subsp. mays
  peptide (1)..(238): Ceres Seq. ID no. 12406461
  misc_feature (18)..(238): NCBI GI NO: 38636775 NR Description: putative DAG protein
  misc_feature (1)..(233): NCBI GI NO: 6014904 NR Description: DAG PROTEIN, CHLOROPLAST PRECURSOR
  misc_feature (77)..(233): NCBI GI NO: 15220382 NR Description: DAG protein, putative; protein id: At1g11430
  misc_feature (77)..(233): NCBI GI NO: 21593052 NR Description: DAG protein, putative [Arabidopsis thaliana]
  misc_feature (4)..(223): NCBI GI NO: 15230785 NR Description: DAG protein, putative; protein id: At3g06790.1
  misc_feature (4)..(223): NCBI GI NO: 27754695 NR Description: putative DAG protein [Arabidopsis thaliana]
  misc_feature (14)..(214): NCBI GI NO: 38344141 NR Description: OSJNBa0041A02.8
  misc_feature (20)..(214): NCBI GI NO: 34897972 NR Description: putative plastid protein
  misc_feature (83)..(214): NCBI GI NO: 15226108 NR Description: plastid protein; protein id: At2g33430
  misc_feature (83)..(214): NCBI GI NO: 25370552 NR Description: DAG protein homolog
VSLTLSPCGKTLRATMAASLPTTAARLAAPAFAYRSPKAPSATALPRAAAFPAIAVAAAPLRPRRAPRPVAARAGGEERETILLPGCDYNHWLIVMEFPKDPAPTREQMIDTYLNTLATVLGSMEEAKKNMYAFSTTTYTGFQCTVDEETSEKFKGLPGVLWVLPDSYIDVKNKDYGGDKYVNGEIIPCTYPTYQPKERRTSKYESRRYERRRDGPPAASRKPRQQAPAQTQTESASS

SEQ ID NO: 38178 - protein, 223 aa, Zea mays subsp. mays
  peptide (1)..(223): Ceres Seq. ID no. 12406462
  misc_feature (3)..(223): NCBI GI NO: 38636775 NR Description: putative DAG protein
  misc_feature (1)..(218): NCBI GI NO: 6014904 NR Description: DAG PROTEIN, CHLOROPLAST PRECURSOR
  misc_feature (62)..(218): NCBI GI NO: 15220382 NR Description: DAG protein, putative; protein id: At1g11430
  misc_feature (62)..(218): NCBI GI NO: 21593052 NR Description: DAG protein, putative [Arabidopsis thaliana]
  misc_feature (1)..(208): NCBI GI NO: 15230785 NR Description: DAG protein, putative; protein id: At3g06790.1
  misc_feature (1)..(208): NCBI GI NO: 27754695 NR Description: putative DAG protein [Arabidopsis thaliana]
  misc_feature (1)..(199): NCBI GI NO: 38344141 NR Description: OSJNBa0041A02.8
  misc_feature (5)..(199): NCBI GI NO: 34897972 NR Description: putative plastid protein
  misc_feature (68)..(199): NCBI GI NO: 15226108 NR Description: plastid protein; protein id: At2g33430
  misc_feature (68)..(199): NCBI GI NO: 25370552 NR Description: DAG protein homolog
MAASLPTTAARLAAPAFAYRSPKAPSATALPRAAAFPAIAVAAAPLRPRRAPRPVAARAGGEERETILLPGCDYNHWLIVMEFPKDPAPTREQMIDTYLNTLATVLGSMEEAKKNMYAFSTTTYTGFQCTVDEETSEKFKGLPGVLWVLPDSYIDVKNKDYGGDKYVNGEIIPCTYPTYQPKERRTSKYESRRYERRRDGPPAASRKPRQQAPAQTQTESASS

SEQ ID NO: 38179 - protein, 164 aa, Zea mays subsp. mays
  peptide (1)..(164): Ceres Seq. ID no. 12406463
LSDLIPLRQNLARNNGRLPPDHRRAPRGPGLRLPVAQGSLRHRPPACRRLPCNRRCGGAPAPAPRAEAGGGPGRGRGEGDDTAPRVRLQPLADRHGVPQGPRAHPRADDRHLPQHTRHRPRQHGGSQEEHVRLQHDHLHRVPVHRGRGDVGEVQGSAWGAVGAP

SEQ ID NO: 38180 - DNA, 481 bp, Zea mays subsp. mays
  misc_feature (1)..(481): Ceres Seq. ID no. 4611714
accgcaaggatccaccacaacagcgaaggagaaagcagaccaacctagccacccagggagaaaggccaaaagggaggggagagtgtcgtcatggcttccattgtcgcttccaggagggccgttcctctagttcgcgctctggagaagctcatcgcagcgtcctccgcgcccgggacatgccgggcctggggaaggagcacgtcaaggtgtgggcggagcagaacagcctggtgatcaagggcgagggcgagaaggaggatagcgaggacgaggccgccccgcctccgagatacagcggtcgcatcgagctcgcgccagaggtttacaggatggacaagatcaaggcggagatgaagaacggcgtgctcaaggtggtcgtgccgaaggtgaaggagcagcagcgcaaggacgtgttccaagtcaacgtcgagtagatgtttccaaatagaagcaagtgccggtacgggatggaggattggag

SEQ ID NO: 38181 - protein, 143 aa, Zea mays subsp. mays
  peptide (1)..(143): Ceres Seq. ID no. 4611715
  misc_feature (58)..(143): NCBI GI NO: 7441311 NR Description: heat shock protein hsp22 precursor
  misc_feature (54)..(143): NCBI GI NO: 4138869 NR Description: small heat shock protein Hsp23.5
  misc_feature (39)..(143): NCBI GI NO: 3122228 NR Description: Heat shock 22 kDa protein, mitochondrial precursor
  misc_feature (58)..(143): NCBI GI NO: 123564 NR Description: Small heat shock protein, chloroplast precursor
  misc_feature (58)..(143): NCBI GI NO: 7159338 NR Description: LMW heat shock protein [Euphorbia esula]
  misc_feature (58)..(143): NCBI GI NO: 7441310 NR Description: heat shock protein MTSHP precursor
  misc_feature (58)..(143): NCBI GI NO: 15242086 NR Description: mitochondrial heat shock 22 kd protein-like
  misc_feature (58)..(143): NCBI GI NO: 21554988 NR Description: mitochondrial heat shock 22 kd protein-like
  misc_feature (40)..(143): NCBI GI NO: 7441313 NR Description: heat shock protein HSP23
  misc_feature (40)..(143): NCBI GI NO: 21068482 NR Description: small heat-shock protein [Picea glauca]
RKDPPQQRRRKQTNLATQGERPKGRGECRHGFHCRFQEGRSSSSRSGEAHRSVLRARDMPGLGKEHVKVWAEQNSLVIKGEGEKEDSEDEAAPPPRYSGRIELAPEVYRMDKIKAEMKNGVLKVVVPKVKEQQRKDVFQVNVE

SEQ ID NO: 38182 - protein, 85 aa, Zea mays subsp. mays; identical to SEQ ID NO: 36661
  peptide (1)..(85): Ceres Seq. ID no. 4611716
  misc_feature (1)..(85): NCBI GI NO: 7441311 NR Description: heat shock protein hsp22 precursor
  misc_feature (1)..(85): NCBI GI NO: 4138869 NR Description: small heat shock protein Hsp23.5
  misc_feature (1)..(85): NCBI GI NO: 3122228 NR Description: Heat shock 22 kDa protein, mitochondrial precursor
  misc_feature (1)..(85): NCBI GI NO: 123564 NR Description: Small heat shock protein, chloroplast precursor
  misc_feature (1)..(85): NCBI GI NO: 7159338 NR Description: LMW heat shock protein [Euphorbia esula]
  misc_feature (1)..(85): NCBI GI NO: 7441310 NR Description: heat shock protein MTSHP precursor
  misc_feature (1)..(85): NCBI GI NO: 15242086 NR Description: mitochondrial heat shock 22 kd protein-like
  misc_feature (1)..(85): NCBI GI NO: 21554988 NR Description: mitochondrial heat shock 22 kd protein-like
  misc_feature (1)..(85): NCBI GI NO: 7441313 NR Description: heat shock protein HSP23
  misc_feature (1)..(85): NCBI GI NO: 21068482 NR Description: small heat-shock protein [Picea glauca]

SEQ ID NO: 38183 - DNA, 1075 bp, Zea mays subsp. mays
  misc_feature (1)..(1075): Ceres Seq. ID no. 12407455
ctcccgcagccgccacctcaacccaggaacagagcgaggcgacgccgcggcacctcttctccggtaagtgagatcgcatatctcgtcgcatgcggcgaagaatttttaggtccggtagcttgttctctgctttattcgtggtgaagtttgggcggttcgaagttgatgaattgcttgtacgattcgactgggggtttgtcgtgcttattaggcacgattcgtcgttggttaggtggctgtagcatccctgcttctgttttgcactttctatgcgtatttttgcactctatatgtgttaaggttgacttaaatctgattattcgctcggttagatttggtatcctcatagtgtgtaggtctatctgtcttagaaatactaagtcaaatgttccgcattagcttgcaacccaaagtcttccgcagatagtaatgatatacggaatatcacatttggcagttgatattgattatttaggcgaagggaaatggcaaccgttccaggggatctgatctggcaggttgtgaggaagaacaactccttccttgtgaagcagttcggcaacggcaatgccaaggtgcagttcaccaaggagccgaacaacctctacaacatccactccttcaaacactcgggtttggcgaacaagaagactgtgacgatccagccagctgcaaaggactcggctgtggtcctctctactaccaagaccaagaagcagaacgcacctgcgaagctcagccacaagtctgtgatgcgcaaggagttccgcaagatggccaaggctgtgaaaaaccaggttagtgacaactactacaggcctgatctgaccaagccagctcttgctaggctaagctcggtgtaccgcagcctccaggttgccaagtccggtgtcaagaagaagaacaggcagtcctaagcgctaagtttgtgttctgtcagggggcatgttggtgctcgtagtcccagcttatatttatctatgttccaacagttttgagacttgttagaactgagcaaaccatgttaagatgctgctgtgtgtcattccttaaaaaaattgccttgcactttgtg

SEQ ID NO: 38184 - protein, 143 aa, Zea mays subsp. mays
  peptide (1)..(143): Ceres Seq. ID no. 12407456
  misc_feature (5)..(136): Pfam Name: Pfam Description:  Ribosomal L28e protein family
  misc_feature (1)..(143): NCBI GI NO: 34910390 NR Description: ribosomal protein L28-like
  misc_feature (1)..(143): NCBI GI NO: 15224835 NR Description: putative ribosomal protein L28
  misc_feature (1)..(143): NCBI GI NO: 15233567 NR Description: putative protein; protein id: At4g29410
  misc_feature (1)..(138): NCBI GI NO: 20976820 NR Description: GH04183p [Drosophila melanogaster]
  misc_feature (3)..(134): NCBI GI NO: 19114036 NR Description: 60s ribosomal protein L28/L44
  misc_feature (8)..(134): NCBI GI NO: 24418650 NR Description: 60S ribosomal protein L28
  misc_feature (1)..(138): NCBI GI NO: 24656625 NR Description: CG12740-PA [Drosophila melanogaster]
  misc_feature (8)..(141): NCBI GI NO: 6677779 NR Description: ribosomal protein L28
  misc_feature (1)..(138): NCBI GI NO: 38047791 NR Description: similar to Drosophila melanogaster CG12740
  misc_feature (8)..(141): NCBI GI NO: 33416595 NR Description: Unknown (protein for MGC:66289) [Danio rerio]
MATVPGDLIWQVVRKNNSFLVKQFGNGNAKVQFTKEPNNLYNIHSFKHSGLANKKTVTIQPAAKDSAVVLSTTKTKKQNAPAKLSHKSVMRKEFRKMAKAVKNQVSDNYYRPDLTKPALARLSSVYRSLQVAKSGVKKKNRQS

SEQ ID NO: 38185 - protein, 77 aa, Zea mays subsp. mays
  peptide (1)..(77): Ceres Seq. ID no. 12407457
MNCLYDSTGGLSCLLGTIRRWLGGCSIPASVLHFLCVFLHSICVKVDLNLIIRSVRFGILIVCRSICLRNTKSNVPH

SEQ ID NO: 38186 - DNA, 1418 bp, Zea mays subsp. mays
  misc_feature (1)..(1418): Ceres Seq. ID no. 12376548
aaggatcgagtcgtttaattttctactaggagctagcagcgagcgggttatttgcaacgacggcatcgtcttggcgttggcgggcgtgtttggcaccatgggcgactactactacagccgccgctcgccgcacctcctcccggcggcggtgctggcgctgctcgccgtcgtcgtcgtcgtcgtcgcgagcagcagcctccggggtgcggcggcggcggcgggggcgggccggaatgtgatcacgcacatcaagggcttcgaaggccctctgcccttccacctcgagacagggtacgtggaggtggacgaggagcacggcacgcggctcttctactacttcatcgagtcggagaggaacccggcggaggacccgctcatcctctggatcaccggtggccccggatgctccgcgctctctggactcctcttcgagatcggacccctcaagttcgatgtggcggggtacacggaagggttcccgcggctggtctacttcgaggattcatggaccaaggtgagcaacgtgatcttccttgacgcgccggtggggacaggcttctcctactcgcgggaggaggccggcctgaacgtgagcctgacggagtccgggcggcagcaccacgtgttcctccgcaagtgggtggcggagcaccccgagttcgcgtccaacccgctgtacatcggcggcgactcctactcgggctacaccgtgcccgtgacggcgatggacatcgccaccagcagcgacgacgaggagccgccgaagctgaaccttgtgggctacctggtgggcaacgccgcgacggacgaccggtacgacacggggggcaaggtgccgttcatgcacggcatggggctcatctccgacgagctgtacgagtcggcgaagcagggctgcggcggcgacttctacgtggcgccggaccccaccaacgcgcggtgcgccagcgcgatgatggccatcaacatggtgaccttcgccgtgaaccccgtgcacatcctggagcccttctgcggcgcggccgtgcgggccgacggcggcagcatcttccagggctacggcggcggcgcgaggcggtcgatgctggtgcgggacgacgtccgccacccgggcttcttcgccaagcagcggctgggcctgcccgtggagtgcagggacaacgggtaccggctgtcctacatctgggcggacgacccggaggtgagggaggcgctcggcatccacgagggttccatcgggtcgtggagccggtgcaccatgctgtcgcactacaggcacgacgtcaccaccgtcatcccctaccatgtcaacctcaccaaggcaggatacagggcgcttgtgtacaagtacgtacgtacgtgttagctagtatgtatatactattgatcgatgcttattaaactaggattattatttg

SEQ ID NO: 38187 - protein, 454 aa, Zea mays subsp. mays
  peptide (1)..(454): Ceres Seq. ID no. 12376549
  misc_feature (144)..(343): NCBI GI NO: 37530318 NR Description: putative acyltransferase
  misc_feature (377)..(448): NCBI GI NO: 37530318 NR Description: putative acyltransferase
  misc_feature (50)..(296): NCBI GI NO: 37530314 NR Description: putative serine carboxypeptidase
  misc_feature (377)..(448): NCBI GI NO: 37530314 NR Description: putative serine carboxypeptidase
  misc_feature (78)..(338): NCBI GI NO: 15219427 NR Description: putative serine carboxypeptidase
  misc_feature (383)..(448): NCBI GI NO: 15219427 NR Description: putative serine carboxypeptidase
  misc_feature (78)..(338): NCBI GI NO: 15219433 NR Description: putative serine carboxypeptidase
  misc_feature (383)..(448): NCBI GI NO: 15219433 NR Description: putative serine carboxypeptidase
  misc_feature (78)..(448): NCBI GI NO: 15217581 NR Description: serine carboxypeptidase, putative
  misc_feature (78)..(338): NCBI GI NO: 15219435 NR Description: putative serine carboxypeptidase
RIESFNFLLGASSERVICNDGIVLALAGVFGTMGDYYYSRRSPHLLPAAVLALLAVVVVVVASSSLRGAAAAAGAGRNVITHIKGFEGPLPFHLETGYVEVDEEHGTRLFYYFIESERNPAEDPLILWITGGPGCSALSGLLFEIGPLKFDVAGYTEGFPRLVYFEDSWTKVSNVIFLDAPVGTGFSYSREEAGLNVSLTESGRQHHVFLRKWVAEHPEFASNPLYIGGDSYSGYTVPVTAMDIATSSDDEEPPKLNLVGYLVGNAATDDRYDTGGKVPFMHGMGLISDELYESAKQGCGGDFYVAPDPTNARCASAMMAINMVTFAVNPVHILEPFCGAAVRADGGSIFQGYGGGARRSMLVRDDVRHPGFFAKQRLGLPVECRDNGYRLSYIWADDPEVREALGIHEGSIGSWSRCTMLSHYRHDVTTVIPYHVNLTKAGYRALVYKYVRTC

SEQ ID NO: 38188 - protein, 422 aa, Zea mays subsp. mays
  peptide (1)..(422): Ceres Seq. ID no. 12376550
  misc_feature (112)..(311): NCBI GI NO: 37530318 NR Description: putative acyltransferase
  misc_feature (345)..(416): NCBI GI NO: 37530318 NR Description: putative acyltransferase
  misc_feature (18)..(264): NCBI GI NO: 37530314 NR Description: putative serine carboxypeptidase
  misc_feature (345)..(416): NCBI GI NO: 37530314 NR Description: putative serine carboxypeptidase
  misc_feature (46)..(306): NCBI GI NO: 15219427 NR Description: putative serine carboxypeptidase
  misc_feature (351)..(416): NCBI GI NO: 15219427 NR Description: putative serine carboxypeptidase
  misc_feature (46)..(306): NCBI GI NO: 15219433 NR Description: putative serine carboxypeptidase
  misc_feature (351)..(416): NCBI GI NO: 15219433 NR Description: putative serine carboxypeptidase
  misc_feature (46)..(416): NCBI GI NO: 15217581 NR Description: serine carboxypeptidase, putative
  misc_feature (46)..(306): NCBI GI NO: 15219435 NR Description: putative serine carboxypeptidase
MGDYYYSRRSPHLLPAAVLALLAVVVVVVASSSLRGAAAAAGAGRNVITHIKGFEGPLPFHLETGYVEVDEEHGTRLFYYFIESERNPAEDPLILWITGGPGCSALSGLLFEIGPLKFDVAGYTEGFPRLVYFEDSWTKVSNVIFLDAPVGTGFSYSREEAGLNVSLTESGRQHHVFLRKWVAEHPEFASNPLYIGGDSYSGYTVPVTAMDIATSSDDEEPPKLNLVGYLVGNAATDDRYDTGGKVPFMHGMGLISDELYESAKQGCGGDFYVAPDPTNARCASAMMAINMVTFAVNPVHILEPFCGAAVRADGGSIFQGYGGGARRSMLVRDDVRHPGFFAKQRLGLPVECRDNGYRLSYIWADDPEVREALGIHEGSIGSWSRCTMLSHYRHDVTTVIPYHVNLTKAGYRALVYKYVRTC

SEQ ID NO: 38189 - DNA, 1481 bp, Zea mays subsp. mays
  misc_feature (1)..(1481): Ceres Seq. ID no. 12376576
  misc_feature (635)..(635): n is a, c, t, g, unknown, or other
  misc_feature (567)..(567): n is a, c, t, g, unknown, or other
  misc_feature (506)..(506): n is a, c, t, g, unknown, or other
  misc_feature (381)..(381): n is a, c, t, g, unknown, or other
  misc_feature (568)..(568): n is a, c, t, g, unknown, or other
  misc_feature (634)..(634): n is a, c, t, g, unknown, or other
  misc_feature (507)..(507): n is a, c, t, g, unknown, or other
atccagcgcggctccactcaaagcttgagccttccttttcttttcttgtttttgttttattttcttggtaggggggagtcgtcttctccatctctccttagcctaggagaaggagagatccagaggcaaaagcttcagggtttgtacaaattctagatctaaccggactaaccagaaaacaaaacaaaaaaagacgaaagcatgagccacttcgccgccgccatgaagagcccccttgcggtcgccgtcgcagcgcccgccgccgccgccgacgccaagagcccgctcttctgccccaagccgcggcgccccgcggcgccgctgcggtgccaccagagcggcggcttctccgacgccggcacggatctgctcgacctcctnctctcgaagggcgacgagagcggcctgtcgtcggcgtccccgcagccgccgctgttctgcggctcgccgccgcggcgagcgtcgaaccccgtggtccacgacagcaggttcggcgcggactgccnncccatgcccgtgccgggactgcccgtgcaccggcccagcccgcgcccgtcggctggcggnnccgtccatgtcgccgcgagggtgcgcccgcgcgcggttcgcgttccagcccgccgcggtccgcgtnnagggttttgactgcctcgaccgcggccgcggcggccgtggccatggcatcaccgccatggcctagactgtgcacatacaacagccagcaccctgagaccctcctcccccgcccctccatccatggcacgcaagagccaggagcacctggttggaggtagaagaagagggggggggggggggggggctgttaggggaggaattgagagggatcggtttgtcctaaatcttaacccccctaaaaagtaaaaaaaaactagtacttttatataaacccgtcccatcctcccatccccaacaattacagcgagtttaggtaattttatcacagatccttttttgtatgtaaataaagttcgaggttcagaaattatgtagaaaaaatgtagaggggaggaggagcagggacaaaagggcttacaaaaagcagagaagggatgattaatcagagtttcctctctcatgtgtcactgcccctcctctctggaaggattaattagccattgggtttggtgggagggagttcgggaatagttaggtagtatgtcctagttcgtcaattaatgatgctttcttttttgttttttgatggggaattgttttttctttgttgtccgtccgtccatccatgcaaccaagaaatttcatggagaatctgtacaaaagagtggctagctattacgagagtccggtctgagagaagcaacacgagagaagtcagtggatgagcttagagaaagacattcacacgctgcgagggttgataatttgtgatattttcctctttttttcttcctgattttgtatattgtaatatcctgcttgattttccaatgaatgaatcaatc

SEQ ID NO: 38190 - protein, 147 aa, Zea mays subsp. mays
  peptide (1)..(147): Ceres Seq. ID no. 12376577
  misc_feature (24)..(114): NCBI GI NO: 11762168 NR Description: AT5g16110 [Arabidopsis thaliana]
  misc_feature (24)..(114): NCBI GI NO: 30685676 NR Description: expressed protein [Arabidopsis thaliana]
  misc_feature (31)..(137): NCBI GI NO: 18396232 NR Description: Expressed protein; protein id: At3g02555
  misc_feature (60)..(60): Xaa is any aa, unknown or other
  misc_feature (102)..(102): Xaa is any aa, unknown or other
  misc_feature (122)..(122): Xaa is any aa, unknown or other
  misc_feature (123)..(123): Xaa is any aa, unknown or other
  misc_feature (145)..(145): Xaa is any aa, unknown or other
MSHFAAAMKSPLAVAVAAPAAAADAKSPLFCPKPRRPAAPLRCHQSGGFSDAGTDLLDLXLSKGDESGLSSASPQPPLFCGSPPRRASNPVVHDSRFGADCXPMPVPGLPVHRPSPRPSAGXXVHVAARVRPRAVRVPARRGPRXGF

SEQ ID NO: 38191 - protein, 140 aa, Zea mays subsp. mays
  peptide (1)..(140): Ceres Seq. ID no. 12376578
  misc_feature (17)..(107): NCBI GI NO: 11762168 NR Description: AT5g16110 [Arabidopsis thaliana]
  misc_feature (17)..(107): NCBI GI NO: 30685676 NR Description: expressed protein [Arabidopsis thaliana]
  misc_feature (24)..(130): NCBI GI NO: 18396232 NR Description: Expressed protein; protein id: At3g02555
  misc_feature (53)..(53): Xaa is any aa, unknown or other
  misc_feature (95)..(95): Xaa is any aa, unknown or other
  misc_feature (115)..(115): Xaa is any aa, unknown or other
  misc_feature (116)..(116): Xaa is any aa, unknown or other
  misc_feature (138)..(138): Xaa is any aa, unknown or other
MKSPLAVAVAAPAAAADAKSPLFCPKPRRPAAPLRCHQSGGFSDAGTDLLDLXLSKGDESGLSSASPQPPLFCGSPPRRASNPVVHDSRFGADCXPMPVPGLPVHRPSPRPSAGXXVHVAARVRPRAVRVPARRGPRXGF

SEQ ID NO: 38192 - DNA, 1965 bp, Zea mays subsp. mays
  misc_feature (1)..(1965): Ceres Seq. ID no. 12406126
aaggcctcaacacacacacacactctctcgcttgacctacccccctccgccccccgccgggcctgcagggtgttcgacgcttcgcccgcccgcccgagcgccgccacggcatggcttcctccatctccgccgccgctaaggcctccgcggcctttgcccaaaagaaggagctggccgcgccggcgccgcaccgcgcgggctcgagccgtcggaccaagccgtgccgcgtgcgcgccgtcgcgtcgcccgcgcgcaccccccgcgccccgtcgtccaccggctcggtgaagaccgcgatgacgatgacggagaagatcctggcgagggcgtcggagcgcgcggcgctggagcccggggagaacgtgtgggtggacatcgacgtgctcatgacgcacgacgtctgcgggcccggcaccatcggcatcttcaagaaggagttcggggaggatgccaaggtctgggaccgcgagaaggtcgtcatcatccccgaccactacatcttcaccagcgacgagcgcgccaaccgcaacgtcgatatcctcagggacttctgtctggagcagaacatcaagtacttctatgatatcaaggacctcagcgatttcagggctaatccagactacaagggtgtctgccacattgcacttgctcaggaaggccactgccgaccaggcgaggttctcctgggtactgattctcatacgtgcaatgctggagcctttggtcaatttgcaaccggaattggaaacactgatgcaggttttgtgatgggcactggaaaggctcttctcaaggtgccacctactatcaggtttgtattagatggagaaatgccgccttatttacttgcgaaggatctgattttgcaaattattggtgagatttcagtatctggtgcaacctacaaatcgatggagtttgttggatcaactgtagaaagtctaaccatggaagaacgtatgacactatgcaacatggttgttgaagctggtggaaagaacggtgtcgtgcctgctgatgaaactacatttaaataccttgagggtaggacatcagttgattatcaacctgtctacagtgatgctgaggccagattttttagtgactaccggtttgatgtatcgaaactggagccagtagttgccaagccacattcgcctgacaaccgtgccctagcaagagaatgcaaagatgtcaagatcgaccgagtctatattggttcctgcactggtggcaagactgaggacttccttgctgccgcaaaggtgttcttagcctcgggaaagaaggttaaagttcccacattccttgtccctgccacacaaaaggtgtggatggacgtatatagccttcctgtaccaggatctggcggcaaaacttgcgcccagatattcgaggaggctggttgtgatacaccagcaagtcctaattgcggcgcttgtctgggtggccctcgcgatacgtatgcacggatgaatgaacctacggtctgcgtgtccaccacgaacaggaacttcccgggcaggatggggcacaaggaagggcagatctacctggcgtccccctacaccgctgcagcctcggccctgacggggtacgtcacggaccccagggacttcctcatgtgaaacgatcttgaaacagccacagagtgcctgcaccgctgttttttgtgttgaaccttagtttaggcgtgtgcccttcgttgagaaataaactcccatgtcgggaggctgccattgccatttatgttttttgcgttatatttattacagtgactgccgataacgtagttgagcgttacaagggaaatacattcattcttcccagtatcgatggcagtcactagactccgttcttacaaaaaaaaaggcatgtcgagagatcttgtagttcatacacttgttaaaacacttttttgtacaatgtatgggaaagaagctcagtcgatctttcttgttttgc

SEQ ID NO: 38193 - protein, 505 aa, Zea mays subsp. mays
  peptide (1)..(505): Ceres Seq. ID no. 12406127
  misc_feature (64)..(495): Pfam Name: aconitate hydratase Pfam Description: Aconitase family
  misc_feature (1)..(504): NCBI GI NO: 18414006 NR Description: putative protein; protein id: At4g13430
  misc_feature (1)..(504): NCBI GI NO: 7450363 NR Description: hypothetical protein T9E8
  misc_feature (63)..(504): NCBI GI NO: 23043646 NR Description: hypothetical protein
  misc_feature (62)..(504): NCBI GI NO: 21673449 NR Description: 3-isopropylmalate dehydratase
  misc_feature (64)..(504): NCBI GI NO: 20094876 NR Description: 3-isopropylmalate dehydratase large subunit
  misc_feature (63)..(502): NCBI GI NO: 15668676 NR Description: 3-isopropylmalate dehydratase (leuC)
  misc_feature (62)..(500): NCBI GI NO: 15679385 NR Description: 3-isopropylmalate dehydratase, LeuD subunit
  misc_feature (63)..(500): NCBI GI NO: 15606262 NR Description: large subunit of isopropylmalate isomerase
  misc_feature (63)..(502): NCBI GI NO: 18977310 NR Description: 3-isopropylmalate dehydratase large subunit;
  misc_feature (62)..(504): NCBI GI NO: 23112852 NR Description: hypothetical protein
MASSISAAAKASAAFAQKKELAAPAPHRAGSSRRTKPCRVRAVASPARTPRAPSSTGSVKTAMTMTEKILARASERAALEPGENVWVDIDVLMTHDVCGPGTIGIFKKEFGEDAKVWDREKVVIIPDHYIFTSDERANRNVDILRDFCLEQNIKYFYDIKDLSDFRANPDYKGVCHIALAQEGHCRPGEVLLGTDSHTCNAGAFGQFATGIGNTDAGFVMGTGKALLKVPPTIRFVLDGEMPPYLLAKDLILQIIGEISVSGATYKSMEFVGSTVESLTMEERMTLCNMVVEAGGKNGVVPADETTFKYLEGRTSVDYQPVYSDAEARFFSDYRFDVSKLEPVVAKPHSPDNRALARECKDVKIDRVYIGSCTGGKTEDFLAAAKVFLASGKKVKVPTFLVPATQKVWMDVYSLPVPGSGGKTCAQIFEEAGCDTPASPNCGACLGGPRDTYARMNEPTVCVSTTNRNFPGRMGHKEGQIYLASPYTAAASALTGYVTDPRDFLM

SEQ ID NO: 38194 - protein, 443 aa, Zea mays subsp. mays
  peptide (1)..(443): Ceres Seq. ID no. 12406128
  misc_feature (2)..(433): Pfam Name: aconitate hydratase Pfam Description: Aconitase family
  misc_feature (1)..(442): NCBI GI NO: 18414006 NR Description: putative protein; protein id: At4g13430
  misc_feature (1)..(442): NCBI GI NO: 7450363 NR Description: hypothetical protein T9E8
  misc_feature (1)..(442): NCBI GI NO: 23043646 NR Description: hypothetical protein
  misc_feature (1)..(442): NCBI GI NO: 21673449 NR Description: 3-isopropylmalate dehydratase
  misc_feature (2)..(442): NCBI GI NO: 20094876 NR Description: 3-isopropylmalate dehydratase large subunit
  misc_feature (1)..(440): NCBI GI NO: 15668676 NR Description: 3-isopropylmalate dehydratase (leuC)
  misc_feature (1)..(438): NCBI GI NO: 15679385 NR Description: 3-isopropylmalate dehydratase, LeuD subunit
  misc_feature (1)..(438): NCBI GI NO: 15606262 NR Description: large subunit of isopropylmalate isomerase
  misc_feature (1)..(440): NCBI GI NO: 18977310 NR Description: 3-isopropylmalate dehydratase large subunit;
  misc_feature (1)..(442): NCBI GI NO: 23112852 NR Description: hypothetical protein
MTMTEKILARASERAALEPGENVWVDIDVLMTHDVCGPGTIGIFKKEFGEDAKVWDREKVVIIPDHYIFTSDERANRNVDILRDFCLEQNIKYFYDIKDLSDFRANPDYKGVCHIALAQEGHCRPGEVLLGTDSHTCNAGAFGQFATGIGNTDAGFVMGTGKALLKVPPTIRFVLDGEMPPYLLAKDLILQIIGEISVSGATYKSMEFVGSTVESLTMEERMTLCNMVVEAGGKNGVVPADETTFKYLEGRTSVDYQPVYSDAEARFFSDYRFDVSKLEPVVAKPHSPDNRALARECKDVKIDRVYIGSCTGGKTEDFLAAAKVFLASGKKVKVPTFLVPATQKVWMDVYSLPVPGSGGKTCAQIFEEAGCDTPASPNCGACLGGPRDTYARMNEPTVCVSTTNRNFPGRMGHKEGQIYLASPYTAAASALTGYVTDPRDFLM

SEQ ID NO: 38195 - protein, 441 aa, Zea mays subsp. mays
  peptide (1)..(441): Ceres Seq. ID no. 12406129
  misc_feature (1)..(431): Pfam Name: aconitate hydratase Pfam Description: Aconitase family
  misc_feature (1)..(440): NCBI GI NO: 18414006 NR Description: putative protein; protein id: At4g13430
  misc_feature (1)..(440): NCBI GI NO: 7450363 NR Description: hypothetical protein T9E8
  misc_feature (1)..(440): NCBI GI NO: 23043646 NR Description: hypothetical protein
  misc_feature (1)..(440): NCBI GI NO: 21673449 NR Description: 3-isopropylmalate dehydratase
  misc_feature (1)..(440): NCBI GI NO: 20094876 NR Description: 3-isopropylmalate dehydratase large subunit
  misc_feature (1)..(438): NCBI GI NO: 15668676 NR Description: 3-isopropylmalate dehydratase (leuC)
  misc_feature (1)..(436): NCBI GI NO: 15679385 NR Description: 3-isopropylmalate dehydratase, LeuD subunit
  misc_feature (1)..(436): NCBI GI NO: 15606262 NR Description: large subunit of isopropylmalate isomerase
  misc_feature (1)..(438): NCBI GI NO: 18977310 NR Description: 3-isopropylmalate dehydratase large subunit;
  misc_feature (1)..(440): NCBI GI NO: 23112852 NR Description: hypothetical protein
MTEKILARASERAALEPGENVWVDIDVLMTHDVCGPGTIGIFKKEFGEDAKVWDREKVVIIPDHYIFTSDERANRNVDILRDFCLEQNIKYFYDIKDLSDFRANPDYKGVCHIALAQEGHCRPGEVLLGTDSHTCNAGAFGQFATGIGNTDAGFVMGTGKALLKVPPTIRFVLDGEMPPYLLAKDLILQIIGEISVSGATYKSMEFVGSTVESLTMEERMTLCNMVVEAGGKNGVVPADETTFKYLEGRTSVDYQPVYSDAEARFFSDYRFDVSKLEPVVAKPHSPDNRALARECKDVKIDRVYIGSCTGGKTEDFLAAAKVFLASGKKVKVPTFLVPATQKVWMDVYSLPVPGSGGKTCAQIFEEAGCDTPASPNCGACLGGPRDTYARMNEPTVCVSTTNRNFPGRMGHKEGQIYLASPYTAAASALTGYVTDPRDFLM

SEQ ID NO: 38196 - DNA, 1799 bp, Zea mays subsp. mays
  misc_feature (1)..(1799): Ceres Seq. ID no. 12358658
ctataaataaataccgcccaccaacatctggtggtatcaaagaatctcctctgtatctctggcagccgcatcgtctcaatctcagtcactcccggacacgcgcacgagccaccccgcacccaactaaccaacccatggacgcgggcggaacgccgccgctgctgttcctcctggccgcggcggccgccctgctgggcgcggcgctcaggtggctgctcctggcctggcggtcggcggcgaggacggggcggctgccaccgggcagcacggggctgccgctcatcggggagacgctgcgcctcatcgcggcgtacaagacgccgaacccggagccgttcatcgacgagcgcgtggcgcggcacggcagcggggtgttcacgacgcacgtgttcggcgagcgcaccgtgttctccgcggacccggccttcaaccgcctgctcctggccgccgagggccgcgccgtcagctgcagctacccgtcgtccatcgccacgctgctgggcccgcgctcgctgctcctcaccgccggccccgcgcacaagcgcctccactcgctcacgctcgcccgcctcggccggccggcctcgccgccgctgctggcgcacatcgaccgcctcgtcctcgccaccctgcgggactggggccggccaggcgccggcgccgtcgtccgcctcctcgacgaggccaagaagatcaccttcaacctcactgtctggcagctcgtcagcatcgagcctgggccctggaccgagagcctccgccgcgagtacgtcaagctcgtcgacggcttcttctccatccccttccccttcgcctacctcctccctttcaccgcctacggccaggccctcaaggcgaggaagaaggtggctggagctcttcgggaggtgataaggaagaggatgggcgaggaggccggaactggccctggcgccggtagaaatggggagaagaaggacatggtggaggagcttctggaagcagagggtgggagcttctcggtggaggagatggtggatttctgcctgtctctgctggtgggctggctacgagaccacctccgtgctcatgacgctcgccgtcaagttcctcaccgagacgcccactgcactggcgcagctcaaggaagagcacgacagcatcagacacaggaaaggcaaggacgagcagcctctgcaatggagcgattacaagtcgatgccgtttacacaatgcgtgatcagtgagacgctgcgcgtggctaacttgatcagcggggtgttcaggcgggcgaacaccgacatccatttcaaagattacgttatcccaaagggctgcagaatcttcgcgtcgttccgagccgtgcacctgagccccgagcactacgagaacgctcgagccttcgacccctggagatggcagcagagcaagaaggagggagtactagtagtagggcaggacgcgcagcagggggcccagggccagcgtgttcactcccttcggcggggggcctcgcctgtgcccgggccacgagcttgcccgcgtcgtggtctccgttttcctccaccgcctggtgacgcgcttcagctgggaagaggctgaggaggacagggtcgtcttcttccccaccacccgcaccctcaaagggtaccccatcatcctgcggcggcgaccgggttgggatttctgacctagctcatcatgttacaatagagtcgatccatctatagttgttacactcatctctctctctctctctctctctgtctgtaataacactactgtctaatataaacaagcatctccgctctattctgttc

SEQ ID NO: 38197 - protein, 407 aa, Zea mays subsp. mays
  peptide (1)..(407): Ceres Seq. ID no. 12358659
  misc_feature (263)..(346): Pfam Name: Pfam Description:  Cytochrome P450
  misc_feature (63)..(346): NCBI GI NO: 15239203 NR Description: cytochrome p450, putative; protein id: At5g05690
  misc_feature (51)..(346): NCBI GI NO: 9587211 NR Description: cytochrome P450 [Vigna radiata]
  misc_feature (84)..(345): NCBI GI NO: 34902330 NR Description: Putative steroid 22-alpha-hydroxylase
  misc_feature (78)..(346): NCBI GI NO: 34903584 NR Description: cytochrome P450-like protein
  misc_feature (84)..(346): NCBI GI NO: 25282635 NR Description: cytochrome P450 like protein
  misc_feature (52)..(300): NCBI GI NO: 15229822 NR Description: steroid 22-alpha-hydroxylase
  misc_feature (52)..(300): NCBI GI NO: 2935342 NR Description: steroid 22-alpha-hydroxylase; DWF4; CYP90B1
  misc_feature (80)..(346): NCBI GI NO: 13878393 NR Description: Cytochrome P450 90C1 (ROTUNDIFOLIA3)
  misc_feature (80)..(346): NCBI GI NO: 18419825 NR Description: rotundifolia3 (rot3); protein id: At4g36380
  misc_feature (83)..(301): NCBI GI NO: 18400142 NR Description: cytochrome P450, putative; protein id: At3g13730
INKYRPPTSGGIKESPLYLWQPHRLNLSHSRTRARATPHPTNQPMDAGGTPPLLFLLAAAAALLGAALRWLLLAWRSAARTGRLPPGSTGLPLIGETLRLIAAYKTPNPEPFIDERVARHGSGVFTTHVFGERTVFSADPAFNRLLLAAEGRAVSCSYPSSIATLLGPRSLLLTAGPAHKRLHSLTLARLGRPASPPLLAHIDRLVLATLRDWGRPGAGAVVRLLDEAKKITFNLTVWQLVSIEPGPWTESLRREYVKLVDGFFSIPFPFAYLLPFTAYGQALKARKKVAGALREVIRKRMGEEAGTGPGAGRNGEKKDMVEELLEAEGGSFSVEEMVDFCLSLLVGWLRDHLRAHDARRQVPHRDAHCTGAAQGRARQHQTQERQGRAASAMERLQVDAVYTMRDQ

SEQ ID NO: 38198 - protein, 363 aa, Zea mays subsp. mays
  peptide (1)..(363): Ceres Seq. ID no. 12358660
  misc_feature (219)..(302): Pfam Name: Pfam Description:  Cytochrome P450
  misc_feature (19)..(302): NCBI GI NO: 15239203 NR Description: cytochrome p450, putative; protein id: At5g05690
  misc_feature (7)..(302): NCBI GI NO: 9587211 NR Description: cytochrome P450 [Vigna radiata]
  misc_feature (40)..(301): NCBI GI NO: 34902330 NR Description: Putative steroid 22-alpha-hydroxylase
  misc_feature (34)..(302): NCBI GI NO: 34903584 NR Description: cytochrome P450-like protein
  misc_feature (40)..(302): NCBI GI NO: 25282635 NR Description: cytochrome P450 like protein
  misc_feature (8)..(256): NCBI GI NO: 15229822 NR Description: steroid 22-alpha-hydroxylase
  misc_feature (8)..(256): NCBI GI NO: 2935342 NR Description: steroid 22-alpha-hydroxylase; DWF4; CYP90B1
  misc_feature (36)..(302): NCBI GI NO: 13878393 NR Description: Cytochrome P450 90C1 (ROTUNDIFOLIA3)
  misc_feature (36)..(302): NCBI GI NO: 18419825 NR Description: rotundifolia3 (rot3); protein id: At4g36380
  misc_feature (39)..(257): NCBI GI NO: 18400142 NR Description: cytochrome P450, putative; protein id: At3g13730
MDAGGTPPLLFLLAAAAALLGAALRWLLLAWRSAARTGRLPPGSTGLPLIGETLRLIAAYKTPNPEPFIDERVARHGSGVFTTHVFGERTVFSADPAFNRLLLAAEGRAVSCSYPSSIATLLGPRSLLLTAGPAHKRLHSLTLARLGRPASPPLLAHIDRLVLATLRDWGRPGAGAVVRLLDEAKKITFNLTVWQLVSIEPGPWTESLRREYVKLVDGFFSIPFPFAYLLPFTAYGQALKARKKVAGALREVIRKRMGEEAGTGPGAGRNGEKKDMVEELLEAEGGSFSVEEMVDFCLSLLVGWLRDHLRAHDARRQVPHRDAHCTGAAQGRARQHQTQERQGRAASAMERLQVDAVYTMRDQ

SEQ ID NO: 38199 - protein, 212 aa, Zea mays subsp. mays
  peptide (1)..(212): Ceres Seq. ID no. 12358661
  misc_feature (34)..(155): Pfam Name: Pfam Description:  Cytochrome P450
  misc_feature (34)..(155): NCBI GI NO: 15239203 NR Description: cytochrome p450, putative; protein id: At5g05690
  misc_feature (34)..(158): NCBI GI NO: 9587211 NR Description: cytochrome P450 [Vigna radiata]
  misc_feature (33)..(176): NCBI GI NO: 34902330 NR Description: Putative steroid 22-alpha-hydroxylase
  misc_feature (37)..(154): NCBI GI NO: 34903584 NR Description: cytochrome P450-like protein
  misc_feature (35)..(154): NCBI GI NO: 25282635 NR Description: cytochrome P450 like protein
  misc_feature (33)..(154): NCBI GI NO: 15229822 NR Description: steroid 22-alpha-hydroxylase
  misc_feature (33)..(154): NCBI GI NO: 2935342 NR Description: steroid 22-alpha-hydroxylase; DWF4; CYP90B1
  misc_feature (35)..(154): NCBI GI NO: 13878393 NR Description: Cytochrome P450 90C1 (ROTUNDIFOLIA3)
  misc_feature (35)..(154): NCBI GI NO: 18419825 NR Description: rotundifolia3 (rot3); protein id: At4g36380
  misc_feature (35)..(154): NCBI GI NO: 18400142 NR Description: cytochrome P450, putative; protein id: At3g13730
MGRRRTWWRSFWKQRVGASRWRRWWISACLCWWAGYETTSVLMTLAVKFLTETPTALAQLKEEHDSIRHRKGKDEQPLQWSDYKSMPFTQCVISETLRVANLISGVFRRANTDIHFKDYVIPKGCRIFASFRAVHLSPEHYENARAFDPWRWQQSKKEGVLVVGQDAQQGAQGQRVHSLRRGASPVPGPRACPRRGLRFPPPPGDALQLGRG

SEQ ID NO: 38200 - DNA, 1457 bp, Zea mays subsp. mays
  misc_feature (1)..(1457): Ceres Seq. ID no. 12566276
gccgtctcgtctgaccgtacgtctttggtgatgaagcatcgatccgggagaaggttcagcattagctctagctagagctagatagccggaggaggagctagtaggaagaggcatggataatcatcaacttgtcgccatggcagcggtggctcagccggcgagcccgacctcgccgcacgtcgcgcacaagatcccgcccggcgacgggccttacgcgagggccaagcacttccagctggtggagaaggacctggacgcgtcgatcgcgtggttctggaaggcgatcagcgcgggcgacaagttggacagcgcgctcaaggacatggcggtggtgatgaagcagcgcgggtacctggcggaggccatcgacgccatcaggtcgctgcggcacctgtgcccgaagcagtcccaggagccgctggacaacatcctcctggacctctacaaggccagcgggcggaccaaggaggagatcgagctgctcaagcagaagctccgcaagatctacctcggcgaggcgttccatggcaggaccaccaagcgcgcccgctcgcacggccgcaagatccacgtctccgtcaagcaagagacatcgcgcgtcctgggcaacctcgcgtgggcgtacatgcagcagcgcaacttcatggcggcggaggtggtgtaccggaaggcgcagatgatcgacccggacgccaacaaggcgtgcaacctcgccctctgcctcatcgagcaggcccggctcgccgacgccgagctcgtcctcgccgacgtgctcgccgggaggtacctgcaggcccgcgaccagcaggacggcaagatcgtccggaaagtggaggagctgctggcccggatcatggcgcatacgacgtggccgggcggtggcggcggtgacggacgacgacgcccggcggataagagcgggagcgggagcgagagcgacgacgatgactgggtcgagaaccagatgctggctttgctcgacgtggcggtgccgtaccggaagaagagcaggaggctgccggtctttgaggagatctcgcgagcagaatagcagatggctgatatagattagcagcagcatcatcatctttcgatcgagctccatgcatatatcgtttgagcgagcgcggatcctctggacctaactgcagtctgcagataggtaggtaggtaggtctgagctgatccagacccacatgtcagtgaccggacgcagaggatctgcttccattattatttgatcgactcctgtccagctcaaccttttggaccaactccgtggcgatagcagtagcagcagcagaaaggtaaagcgcgcgtgtgtgtgtgtgcccctgtgaatctgtggatcggagacagtgtgcagtagcatagcatcagcagcaaggtatttaaagcgtgcaagtgtgtgtataactgtatatacgcttcttatatgcatctgtggatattttgcg

SEQ ID NO: 38201 - protein, 312 aa, Zea mays subsp. mays
  peptide (1)..(312): Ceres Seq. ID no. 12566277
  misc_feature (161)..(194): Pfam Name: Pfam Description:  TPR Domain
  misc_feature (22)..(258): NCBI GI NO: 3859116 NR Description: unknown [Oryza sativa]
  misc_feature (22)..(247): NCBI GI NO: 9758884 NR Description: gb|AAC72543
  misc_feature (22)..(247): NCBI GI NO: 30695554 NR Description: male sterility MS5 family [Arabidopsis thaliana]
  misc_feature (22)..(220): NCBI GI NO: 15230439 NR Description: MS5-like protein; protein id: At3g51280.1
  misc_feature (22)..(247): NCBI GI NO: 3859112 NR Description: male sterility MS5 [Arabidopsis thaliana]
  misc_feature (22)..(247): NCBI GI NO: 4028970 NR Description: pollenless3 [Arabidopsis thaliana]
  misc_feature (31)..(220): NCBI GI NO: 29467532 NR Description: P0582D05.25
  misc_feature (7)..(245): NCBI GI NO: 15241471 NR Description: male sterility MS5
  misc_feature (22)..(220): NCBI GI NO: 15233432 NR Description: putative protein; protein id: At4g20900.1
  misc_feature (124)..(220): NCBI GI NO: 25455795 NR Description: MS5-like protein
MDNHQLVAMAAVAQPASPTSPHVAHKIPPGDGPYARAKHFQLVEKDLDASIAWFWKAISAGDKLDSALKDMAVVMKQRGYLAEAIDAIRSLRHLCPKQSQEPLDNILLDLYKASGRTKEEIELLKQKLRKIYLGEAFHGRTTKRARSHGRKIHVSVKQETSRVLGNLAWAYMQQRNFMAAEVVYRKAQMIDPDANKACNLALCLIEQARLADAELVLADVLAGRYLQARDQQDGKIVRKVEELLARIMAHTTWPGGGGGDGRRRPADKSGSGSESDDDDWVENQMLALLDVAVPYRKKSRRLPVFEEISRAE

SEQ ID NO: 38202 - protein, 304 aa, Zea mays subsp. mays
  peptide (1)..(304): Ceres Seq. ID no. 12566278
  misc_feature (153)..(186): Pfam Name: Pfam Description:  TPR Domain
  misc_feature (14)..(250): NCBI GI NO: 3859116 NR Description: unknown [Oryza sativa]
  misc_feature (14)..(239): NCBI GI NO: 9758884 NR Description: gb|AAC72543
  misc_feature (14)..(239): NCBI GI NO: 30695554 NR Description: male sterility MS5 family [Arabidopsis thaliana]
  misc_feature (14)..(212): NCBI GI NO: 15230439 NR Description: MS5-like protein; protein id: At3g51280.1
  misc_feature (14)..(239): NCBI GI NO: 3859112 NR Description: male sterility MS5 [Arabidopsis thaliana]
  misc_feature (14)..(239): NCBI GI NO: 4028970 NR Description: pollenless3 [Arabidopsis thaliana]
  misc_feature (23)..(212): NCBI GI NO: 29467532 NR Description: P0582D05.25
  misc_feature (1)..(237): NCBI GI NO: 15241471 NR Description: male sterility MS5
  misc_feature (14)..(212): NCBI GI NO: 15233432 NR Description: putative protein; protein id: At4g20900.1
  misc_feature (116)..(212): NCBI GI NO: 25455795 NR Description: MS5-like protein
MAAVAQPASPTSPHVAHKIPPGDGPYARAKHFQLVEKDLDASIAWFWKAISAGDKLDSALKDMAVVMKQRGYLAEAIDAIRSLRHLCPKQSQEPLDNILLDLYKASGRTKEEIELLKQKLRKIYLGEAFHGRTTKRARSHGRKIHVSVKQETSRVLGNLAWAYMQQRNFMAAEVVYRKAQMIDPDANKACNLALCLIEQARLADAELVLADVLAGRYLQARDQQDGKIVRKVEELLARIMAHTTWPGGGGGDGRRRPADKSGSGSESDDDDWVENQMLALLDVAVPYRKKSRRLPVFEEISRAE

SEQ ID NO: 38203 - protein, 242 aa, Zea mays subsp. mays
  peptide (1)..(242): Ceres Seq. ID no. 12566279
  misc_feature (91)..(124): Pfam Name: Pfam Description:  TPR Domain
  misc_feature (1)..(188): NCBI GI NO: 3859116 NR Description: unknown [Oryza sativa]
  misc_feature (1)..(177): NCBI GI NO: 9758884 NR Description: gb|AAC72543
  misc_feature (1)..(177): NCBI GI NO: 30695554 NR Description: male sterility MS5 family [Arabidopsis thaliana]
  misc_feature (1)..(150): NCBI GI NO: 15230439 NR Description: MS5-like protein; protein id: At3g51280.1
  misc_feature (1)..(177): NCBI GI NO: 3859112 NR Description: male sterility MS5 [Arabidopsis thaliana]
  misc_feature (1)..(177): NCBI GI NO: 4028970 NR Description: pollenless3 [Arabidopsis thaliana]
  misc_feature (1)..(150): NCBI GI NO: 29467532 NR Description: P0582D05.25
  misc_feature (1)..(175): NCBI GI NO: 15241471 NR Description: male sterility MS5
  misc_feature (1)..(150): NCBI GI NO: 15233432 NR Description: putative protein; protein id: At4g20900.1
  misc_feature (54)..(150): NCBI GI NO: 25455795 NR Description: MS5-like protein
MAVVMKQRGYLAEAIDAIRSLRHLCPKQSQEPLDNILLDLYKASGRTKEEIELLKQKLRKIYLGEAFHGRTTKRARSHGRKIHVSVKQETSRVLGNLAWAYMQQRNFMAAEVVYRKAQMIDPDANKACNLALCLIEQARLADAELVLADVLAGRYLQARDQQDGKIVRKVEELLARIMAHTTWPGGGGGDGRRRPADKSGSGSESDDDDWVENQMLALLDVAVPYRKKSRRLPVFEEISRAE

SEQ ID NO: 38204 - DNA, 699 bp, Zea mays subsp. mays
  misc_feature (1)..(699): Ceres Seq. ID no. 12346538
accaatgggcaacagccttaggtgctgcctggcctgcgtcctcccctgcggcgcgctggacctgatcaggatcgtccacctcaacggccgcatcgaggagtacggccggccggtggccgccggcgagatcctggccgccaacccgaaccacgtcctcagcaagccgtgctcccagggcgtcgccgtgcggaggatcctcatcgtgtcgccggactccgagctagagcgcggcgagatatacttcctcatcccggcctcgtcggtgccgccggagaagaagccgcagccgcagcgacagcagaagagcgtcgtcctggccggctcgcacggcaaccaggcggtggtcaacaagaaggcatcgtcgtcgcaccggagacgacgcaccgccggctgcagaaccaccgtatggaagccacacctcgagtgcattgttgagggggacacttaggcagaggtggacgatgatccattcttttgctctcttttttttttttttggtttttgtggatcaagcgggggggctaatggctaatgcaatgtaacaccactagcagcatggtgttttgcccacttaatttgtgtggttagtcagcatttttaatcttttttcttgggtaaatgtatatccatgtaatgttttcccccttcctacatatgatgggaatgcagaggaagggttgttgccagttctttcttctt

SEQ ID NO: 38205 - protein, 148 aa, Zea mays subsp. mays
  peptide (1)..(148): Ceres Seq. ID no. 12346539
  misc_feature (2)..(93): NCBI GI NO: 34896112 NR Description: P0701D05.10
  misc_feature (117)..(145): NCBI GI NO: 34896112 NR Description: P0701D05.10
  misc_feature (2)..(100): NCBI GI NO: 18390706 NR Description: expressed protein; protein id: At1g06980
  misc_feature (2)..(99): NCBI GI NO: 15227725 NR Description: hypothetical protein; protein id: At2g30230.1
  misc_feature (2)..(109): NCBI GI NO: 34907910 NR Description: P0439E11.22
  misc_feature (117)..(145): NCBI GI NO: 34907910 NR Description: P0439E11.22
  misc_feature (4)..(98): NCBI GI NO: 34909702 NR Description: B1131G08.9
  misc_feature (2)..(130): NCBI GI NO: 18396990 NR Description: Expressed protein; protein id: At1g29195
  misc_feature (26)..(145): NCBI GI NO: 34896398 NR Description: hypothetical protein
PMGNSLRCCLACVLPCGALDLIRIVHLNGRIEEYGRPVAAGEILAANPNHVLSKPCSQGVAVRRILIVSPDSELERGEIYFLIPASSVPPEKKPQPQRQQKSVVLAGSHGNQAVVNKKASSSHRRRRTAGCRTTVWKPHLECIVEGDT

SEQ ID NO: 38206 - protein, 147 aa, Zea mays subsp. mays
  peptide (1)..(147): Ceres Seq. ID no. 12346540
  misc_feature (1)..(92): NCBI GI NO: 34896112 NR Description: P0701D05.10
  misc_feature (116)..(144): NCBI GI NO: 34896112 NR Description: P0701D05.10
  misc_feature (1)..(99): NCBI GI NO: 18390706 NR Description: expressed protein; protein id: At1g06980
  misc_feature (1)..(98): NCBI GI NO: 15227725 NR Description: hypothetical protein; protein id: At2g30230.1
  misc_feature (1)..(108): NCBI GI NO: 34907910 NR Description: P0439E11.22
  misc_feature (116)..(144): NCBI GI NO: 34907910 NR Description: P0439E11.22
  misc_feature (3)..(97): NCBI GI NO: 34909702 NR Description: B1131G08.9
  misc_feature (1)..(129): NCBI GI NO: 18396990 NR Description: Expressed protein; protein id: At1g29195
  misc_feature (25)..(144): NCBI GI NO: 34896398 NR Description: hypothetical protein
MGNSLRCCLACVLPCGALDLIRIVHLNGRIEEYGRPVAAGEILAANPNHVLSKPCSQGVAVRRILIVSPDSELERGEIYFLIPASSVPPEKKPQPQRQQKSVVLAGSHGNQAVVNKKASSSHRRRRTAGCRTTVWKPHLECIVEGDT

SEQ ID NO: 38207 - DNA, 1771 bp, Zea mays subsp. mays
  misc_feature (1)..(1771): Ceres Seq. ID no. 12381090
gcacgagaccattacctagaacatcctaatcgaaaaatcgaatcgcgaccaaaccaaatcctccaccccggcgcgctgccccatcacccttcccgctgtgctcacgcaccaaaccccactccgttcctcactgcaatccaccgccccagctctttcgcgcaatggcggccgtcgcggcgccggcgccgccaccgccggcggcagctgagcctggaggacctcaaggtggtgtccgtgctcgggcgcggcgccaagggcgtcgtgttccacgtcgtgcacgctcccggggaaccggacggcgagggcgagggcgccgccgcagccgcggccatggcgctcaaggcggtctcgcgggaggcagcgcggcacaagaaggcggccagcggggacggggacggccaccgccggatctggttcgagcgggatgtgctcctggcgctgcgccacccgctgctcccttccctgcgaggcatcctcgccaccgacgcgatcgtcggcttcgccatggaccgctgcggcggcggggacctcaactcgctgcggcggcggcagacggagaagatgttctccgactccgtcatacggttctacgcggcggagctggtgctggcgctcgagtacctgcacagtctcggcgtcgtgtaccgggacctcaagccggagaacgtcctcatccaggacagcggccacatcatgctcgtcgacttcgacctctccacgcggctcccggccgcagccgcaggagccagacgcgccggccaccagtcccaagccggcgcctccggtcgccgcgccgtccccgagccgcggcagagcaaggaagccggcgggcgccgccctgtgcttcccattccgcaccaccggcagcgctgcgaagcctgccgcggactcgccgtcgccgctgtccacctcgcggacggcctcgtcgtcgtcgtcgtcctcgacggcgaccacggcctcctcctcggcggcgtcggccggcacgcggactcccgcgaagtcgaactcgttcgtggggacggaggactacgtggcgccggagatcatcgccgggcgcgggcacgacttcgccgtggactggtggggcctgggcgtggtgctctacgagatgctctacggccgcacgccgttccgggggcagaaccgcaaggagaccttctaccgcgtcctcgccaagcagccggagctcgtcggcgagcagacgccgctgcgcgacctcatcgcccgcctcctcgagaaggaccccgagaggcgcatcggcgcgcgcggcgtcaaggcccaccccttcttcggcggcgtcgactggaacgcatcctgcaggtggcgcgcccgccgttcatcccggcgccgccgcaggacgaggacggcgacgaggcgctcgacgtcgagaaggtcgtccgcgaggtgttcgcgtccaaggagggcgagggagggaaggcttcgcctgtggcagacggaggccctgtgggcggcgacggcgacgggaggagagatcattccaaagatggtgatttctcagtgtttttctgagctatttattttctttagatttgttctttctttttctttagatttgtactgtatgaacatgatggcatttagcaactgaggttaggagtgagtacggcgcaatggccggtggagtacataaattaaagaggtgcaggtgctcccgctcaatggggtatagccaatatatagggtttttttttgctgtgtactttgcttgatcataataaataataatgatagcgcagttgtgctcaaacgc

SEQ ID NO: 38208 - protein, 509 aa, Zea mays subsp. mays
  peptide (1)..(509): Ceres Seq. ID no. 12381091
  misc_feature (74)..(242): Pfam Name: Pfam Description:  Protein kinase domain
  misc_feature (67)..(243): NCBI GI NO: 38344243 NR Description: OJ991113_30.20
  misc_feature (436)..(509): NCBI GI NO: 38344243 NR Description: OJ991113_30.20
  misc_feature (67)..(242): NCBI GI NO: 15230825 NR Description: protein kinase, putative; protein id: At3g25250.1
  misc_feature (111)..(243): NCBI GI NO: 15235548 NR Description: putative protein; protein id: At4g13000.1
  misc_feature (56)..(242): NCBI GI NO: 18403402 NR Description: putative serine threonine protein kinase
  misc_feature (69)..(242): NCBI GI NO: 15232374 NR Description: unknown protein; protein id: At3g20830.1
  misc_feature (63)..(341): NCBI GI NO: 37536874 NR Description: putative protein kinase
  misc_feature (63)..(241): NCBI GI NO: 15219253 NR Description: putative protein kinase; protein id: At1g16440.1
  misc_feature (84)..(255): NCBI GI NO: 1750190 NR Description: putative serine/threonine protein kinase
  misc_feature (140)..(269): NCBI GI NO: 38346163 NR Description: OSJNBa0079A21.10
ARDHYLEHPNRKIESRPNQILHPGALPHHPSRCAHAPNPTPFLTAIHRPSSFAQWRPSRRRRRHRRRQLSLEDLKVVSVLGRGAKGVVFHVVHAPGEPDGEGEGAAAAAAMALKAVSREAARHKKAASGDGDGHRRIWFERDVLLALRHPLLPSLRGILATDAIVGFAMDRCGGGDLNSLRRRQTEKMFSDSVIRFYAAELVLALEYLHSLGVVYRDLKPENVLIQDSGHIMLVDFDLSTRLPAAAAGARRAGHQSQAGASGRRAVPEPRQSKEAGGRRPVLPIPHHRQRCEACRGLAVAAVHLADGLVVVVVLDGDHGLLLGGVGRHADSREVELVRGDGGLRGAGDHRRARARLRRGLVGPGRGALRDALRPHAVPGAEPQGDLLPRPRQAAGARRRADAAARPHRPPPREGPREAHRRARRQGPPLLRRRRLERILQVARPPFIPAPPQDEDGDEALDVEKVVREVFASKEGEGGKASPVADGGPVGGDGDGRRDHSKDGDFSVFF

SEQ ID NO: 38209 - protein, 449 aa, Zea mays subsp. mays
  peptide (1)..(449): Ceres Seq. ID no. 12381092
  misc_feature (295)..(383): Pfam Name: Pfam Description:  Equine herpesvirus glycoprotein gp2
  misc_feature (1)..(448): NCBI GI NO: 6690017 NR Description: NTR [Herpesvirus papio]
  misc_feature (1)..(434): NCBI GI NO: 6690017 NR Description: NTR [Herpesvirus papio]
  misc_feature (1)..(380): NCBI GI NO: 6690017 NR Description: NTR [Herpesvirus papio]
  misc_feature (1)..(390): NCBI GI NO: 30424862 NR Description: RIKEN cDNA 5033413A03 [Mus musculus]
  misc_feature (1)..(394): NCBI GI NO: 30424862 NR Description: RIKEN cDNA 5033413A03 [Mus musculus]
  misc_feature (1)..(214): NCBI GI NO: 6690017 NR Description: NTR [Herpesvirus papio]
  misc_feature (92)..(445): NCBI GI NO: 30424862 NR Description: RIKEN cDNA 5033413A03 [Mus musculus]
  misc_feature (154)..(448): NCBI GI NO: 30424862 NR Description: RIKEN cDNA 5033413A03 [Mus musculus]
  misc_feature (144)..(445): NCBI GI NO: 30424862 NR Description: RIKEN cDNA 5033413A03 [Mus musculus]
MAAVAAPAPPPPAAAEPGGPQGGVRARARRQGRRVPRRARSRGTGRRGRGRRRSRGHGAQGGLAGGSAAQEGGQRGRGRPPPDLVRAGCAPGAAPPAAPFPARHPRHRRDRRLRHGPLRRRGPQLAAAAADGEDVLRLRHTVLRGGAGAGARVPAQSRRRVPGPQAGERPHPGQRPHHARRLRPLHAAPGRSRRSQTRRPPVPSRRLRSPRRPRAAAEQGSRRAPPCASHSAPPAALRSLPRTRRRRCPPRGRPRRRRRPRRRPRPPPRRRRPARGLPRSRTRSWGRRTTWRRRSSPGAGTTSPWTGGAWAWCSTRCSTAARRSGGRTARRPSTASSPSSRSSSASRRRCATSSPASSRRTPRGASARAASRPTPSSAASTGTHPAGGAPAVHPGAAAGRGRRRGARRREGRPRGVRVQGGRGREGFACGRRRPCGRRRRREERSFQRW

SEQ ID NO: 38210 - protein, 399 aa, Zea mays subsp. mays
  peptide (1)..(399): Ceres Seq. ID no. 12381093
  misc_feature (1)..(132): Pfam Name: Pfam Description:  Protein kinase domain
  misc_feature (1)..(133): NCBI GI NO: 38344243 NR Description: OJ991113_30.20
  misc_feature (326)..(399): NCBI GI NO: 38344243 NR Description: OJ991113_30.20
  misc_feature (1)..(132): NCBI GI NO: 15230825 NR Description: protein kinase, putative; protein id: At3g25250.1
  misc_feature (1)..(133): NCBI GI NO: 15235548 NR Description: putative protein; protein id: At4g13000.1
  misc_feature (1)..(132): NCBI GI NO: 18403402 NR Description: putative serine threonine protein kinase
  misc_feature (1)..(132): NCBI GI NO: 15232374 NR Description: unknown protein; protein id: At3g20830.1
  misc_feature (1)..(231): NCBI GI NO: 37536874 NR Description: putative protein kinase
  misc_feature (1)..(131): NCBI GI NO: 15219253 NR Description: putative protein kinase; protein id: At1g16440.1
  misc_feature (1)..(145): NCBI GI NO: 1750190 NR Description: putative serine/threonine protein kinase
  misc_feature (30)..(159): NCBI GI NO: 38346163 NR Description: OSJNBa0079A21.10
MALKAVSREAARHKKAASGDGDGHRRIWFERDVLLALRHPLLPSLRGILATDAIVGFAMDRCGGGDLNSLRRRQTEKMFSDSVIRFYAAELVLALEYLHSLGVVYRDLKPENVLIQDSGHIMLVDFDLSTRLPAAAAGARRAGHQSQAGASGRRAVPEPRQSKEAGGRRPVLPIPHHRQRCEACRGLAVAAVHLADGLVVVVVLDGDHGLLLGGVGRHADSREVELVRGDGGLRGAGDHRRARARLRRGLVGPGRGALRDALRPHAVPGAEPQGDLLPRPRQAAGARRRADAAARPHRPPPREGPREAHRRARRQGPPLLRRRRLERILQVARPPFIPAPPQDEDGDEALDVEKVVREVFASKEGEGGKASPVADGGPVGGDGDGRRDHSKDGDFSVFF

SEQ ID NO: 38211 - DNA, 1622 bp, Zea mays subsp. mays
  misc_feature (1)..(1622): Ceres Seq. ID no. 12349591
gagaaggaagaagctcaggcgaagcgaggcagagggatgtcgtgacgacgaaaccgaagccgagaacggaagcgagccttacatatacccggccccgtcccagtgccctcggcttccgccccagataccaaaccctaaccttagtcggccgttccgcaggcccgccggcggcgacgccttgtgtgccgcgtccgtgattctcttgcacagggaagcgtttggaaggggactccctgcctagtgcactggccgcagcgacgcgcggccgaggcgcggatcggggaggggaggacggctgtggcgagatggcgggtgacgtcgcgacctcgccagccccggcgccgctgtccgtgtcctcatcgtcgcagaaccaccaccaccacggccccacgaccgcccgcggtctcctctgccacgccggcgccggtgcctccgctggtgtggtggcggcgacgttcgtgtgcccactcgatgtcatcaagaccaggttccaggtccacggctggcccaagcttgccacaggtagtgtaattattgggagcttgcagcagattgctcaacaagaaggtttccggggaatgtatcgcggcctatccccaactattctggcactcttgcctaactgggcggtttactttactgtgtatgagcagcttaaaagttttctttcttccaacgatggaagccatcaactttctttaggggcaaatgttgttgctgcatcatgtgctggagctgcaacaactattgtaacaaatccactttgggttgtgaagacaagatttcagacccaaggaattagagccgggccaatcccgtataaaggtacacttgctgccttgagaagaatagcacatgaagaaggcatccgagggctatacagtggcctggtccctgccttggctggtatcagtcacgttgctattcagttccctgtgtacgagaagataaaagcttatctggctgagcgagataatactactgtagaagcattgagttttggtgatgtcgctgttgcttcgtctctggctaaagtagctgcgtcaacattgacatatcctcatgaggttgttcgatcaaggctgcaagaccagcgagcaaactctgatgccagatacaaaggtgtaatagactgtgtcagaaaggtttatcataaagagggtgtggctggcttctaccgtggatgtgccacaaatctgttgcggacgacccctgctgcagtgataactttcactagcttcgagatgatccataggtcccttcttgatctattccctgctgaacctgaacctcacatccaacctctaaagcattgaccatacaacatttgtaccctatccatgcggcagattaggaccccagtaaccatccagcaacagcaatgttgtttactgtgccagatggctcttgtaaaagagagaattgtttttttccccagataatagctgccattcaaaagttgaaacaatagtgtaggcagagcattagcatctgtgtacgtaatagatttgttagcatgcatttggggtggaggtatatgagcgatgttgggtattttttatgatgatgacgaaaagaaaaatgttacgacatatgaaggaatgattactatattcttttcc

SEQ ID NO: 38212 - protein, 336 aa, Zea mays subsp. mays
  peptide (1)..(336): Ceres Seq. ID no. 12349592
  misc_feature (20)..(326): NCBI GI NO: 18407372 NR Description: mitochondrial carrier protein family
  misc_feature (32)..(326): NCBI GI NO: 18395659 NR Description: mitochondrial carrier protein family
  misc_feature (32)..(326): NCBI GI NO: 11067279 NR Description: unknown protein [Arabidopsis thaliana]
  misc_feature (71)..(326): NCBI GI NO: 7487567 NR Description: probable mitochondrial carrier protein
  misc_feature (44)..(324): NCBI GI NO: 34914648 NR Description: OSJNBa0054L14.23
  misc_feature (125)..(326): NCBI GI NO: 25403521 NR Description: probable mitochondrial carrier protein
  misc_feature (40)..(319): NCBI GI NO: 6322185 NR Description: Hypothetical ORF; Yil006wp
  misc_feature (40)..(323): NCBI GI NO: 6320831 NR Description: Hypothetical ORF; Yel006wp
  misc_feature (37)..(303): NCBI GI NO: 24652037 NR Description: CG8026-PA [Drosophila melanogaster]
  misc_feature (285)..(320): NCBI GI NO: 24652037 NR Description: CG8026-PA [Drosophila melanogaster]
MAGDVATSPAPAPLSVSSSSQNHHHHGPTTARGLLCHAGAGASAGVVAATFVCPLDVIKTRFQVHGWPKLATGSVIIGSLQQIAQQEGFRGMYRGLSPTILALLPNWAVYFTVYEQLKSFLSSNDGSHQLSLGANVVAASCAGAATTIVTNPLWVVKTRFQTQGIRAGPIPYKGTLAALRRIAHEEGIRGLYSGLVPALAGISHVAIQFPVYEKIKAYLAERDNTTVEALSFGDVAVASSLAKVAASTLTYPHEVVRSRLQDQRANSDARYKGVIDCVRKVYHKEGVAGFYRGCATNLLRTTPAAVITFTSFEMIHRSLLDLFPAEPEPHIQPLKH

SEQ ID NO: 38213 - protein, 245 aa, Zea mays subsp. mays
  peptide (1)..(245): Ceres Seq. ID no. 12349593
  misc_feature (1)..(235): NCBI GI NO: 18407372 NR Description: mitochondrial carrier protein family
  misc_feature (1)..(235): NCBI GI NO: 18395659 NR Description: mitochondrial carrier protein family
  misc_feature (1)..(235): NCBI GI NO: 11067279 NR Description: unknown protein [Arabidopsis thaliana]
  misc_feature (1)..(235): NCBI GI NO: 7487567 NR Description: probable mitochondrial carrier protein
  misc_feature (1)..(233): NCBI GI NO: 34914648 NR Description: OSJNBa0054L14.23
  misc_feature (34)..(235): NCBI GI NO: 25403521 NR Description: probable mitochondrial carrier protein
  misc_feature (1)..(228): NCBI GI NO: 6322185 NR Description: Hypothetical ORF; Yil006wp
  misc_feature (1)..(232): NCBI GI NO: 6320831 NR Description: Hypothetical ORF; Yel006wp
  misc_feature (1)..(212): NCBI GI NO: 24652037 NR Description: CG8026-PA [Drosophila melanogaster]
  misc_feature (194)..(229): NCBI GI NO: 24652037 NR Description: CG8026-PA [Drosophila melanogaster]
MYRGLSPTILALLPNWAVYFTVYEQLKSFLSSNDGSHQLSLGANVVAASCAGAATTIVTNPLWVVKTRFQTQGIRAGPIPYKGTLAALRRIAHEEGIRGLYSGLVPALAGISHVAIQFPVYEKIKAYLAERDNTTVEALSFGDVAVASSLAKVAASTLTYPHEVVRSRLQDQRANSDARYKGVIDCVRKVYHKEGVAGFYRGCATNLLRTTPAAVITFTSFEMIHRSLLDLFPAEPEPHIQPLKH

SEQ ID NO: 38214 - DNA, 1381 bp, Zea mays subsp. mays
  misc_feature (1)..(1381): Ceres Seq. ID no. 12349594
gacctgtcgtcttcgtctccggcagagcaaagcggcggcgaggcgggagatatagaggagagacgagagcgggatggggtacctgtggagggtgcggctgtcttcatttgctgccggcgcggcgacggcttcggcggcggggttcttcctcctctacaaggaccacctgctcgcccgcgctgccgacgccgagtccaactccgcctcctactccccgccgctcgccacagccgacaccgctttctccgcgccgccgcgcgccgtggcgcccgccgacctccagctctccgggtcctacgcctccgacatctacacctacctccgctccctggaggtggatccgcagcggcggtccagatccgattacatcgaggcggtgcaggcggacgtcacggcccacatgcggagcatcctcgtcgactggctcgtcgaggtcgccgaggagtacaagctcgtcgcggacacgctctacctcaccatctcttatgtcgaccgcttcctctccgtcaacgcgctcggccgtgacaagctgcagctccttggcgttgcctccatgctcattgccgcgaagttcgaggagatcagcccgccgcacccggaggacttctgctacatcacagacaacacctacaccaaagaggagctcctcaagatggagagcgacatactcaagcttctcaagttcgagttgggcaatcctacaatcaagaccttcctgagacgtttcataagatctgcccatgaagacaagaagggctccatcttgttaatggaattcttggggagctacctcgctgagctgagtctactagattatggctgcctccggttcttgccatcagtagttgctgcttcagtcatgtttgttgctaggctgaccattgatccaaataccaatccgtggaacacaaagctgcagaagatgactggctacaaagtttctgaactcaaggattgcatcgtagccatacatgacttgcagctcaacaggaaatgtccatcattaacggcaattcgagacaagtacaagcagcacaagttcaaatgcgtgtcattgatcctcgtgcctgtcgtgatccctacttcatactttgaagacttagctgagtagctgctctcggactgtaccgctgtaaggctaacaatctgagctctccttgagctcttagggacaagcagaaaataaccgtttgatgagctttcctctcatttaagtagcgtggtgaaagctatttgtttgaggttctttaggattcgcgccgctgtgtcactcttagtgagaccaggcattctcttgctgtgaatcttgtatcatatcttagtcacaccttgccttggtccgttggcaacgaatgtaatgtttgatacgttagacccttcg

SEQ ID NO: 38215 - protein, 345 aa, Zea mays subsp. mays
  peptide (1)..(345): Ceres Seq. ID no. 12349595
  misc_feature (78)..(207): Pfam Name: Pfam Description:  Cyclin, N-terminal domain
  misc_feature (35)..(345): NCBI GI NO: 40538955 NR Description: putative A-type cyclin
  misc_feature (68)..(343): NCBI GI NO: 7438516 NR Description: cyclin A-type - Madagascar periwinkle
  misc_feature (68)..(345): NCBI GI NO: 7438513 NR Description: cyclin A-type (clone 59) - common tobacco
  misc_feature (41)..(341): NCBI GI NO: 7242793 NR Description: cyclin A3.1 [Pisum sativum]
  misc_feature (68)..(343): NCBI GI NO: 15239172 NR Description: Cyclin A3;1; protein id: At5g43080.1
  misc_feature (68)..(343): NCBI GI NO: 15220147 NR Description: Cyclin A3;4; protein id: At1g47230
  misc_feature (68)..(343): NCBI GI NO: 116167 NR Description: G2/MITOTIC-SPECIFIC CYCLIN C13-1 (A-LIKE CYCLIN)
  misc_feature (70)..(342): NCBI GI NO: 7438514 NR Description: cyclin a1-type, mitosis-specific - soybean
  misc_feature (68)..(342): NCBI GI NO: 7438508 NR Description: mitosis-specific cyclin CYS
  misc_feature (68)..(342): NCBI GI NO: 7438511 NR Description: cyclin A-type (clone 105) - common tobacco
MGYLWRVRLSSFAAGAATASAAGFFLLYKDHLLARAADAESNSASYSPPLATADTAFSAPPRAVAPADLQLSGSYASDIYTYLRSLEVDPQRRSRSDYIEAVQADVTAHMRSILVDWLVEVAEEYKLVADTLYLTISYVDRFLSVNALGRDKLQLLGVASMLIAAKFEEISPPHPEDFCYITDNTYTKEELLKMESDILKLLKFELGNPTIKTFLRRFIRSAHEDKKGSILLMEFLGSYLAELSLLDYGCLRFLPSVVAASVMFVARLTIDPNTNPWNTKLQKMTGYKVSELKDCIVAIHDLQLNRKCPSLTAIRDKYKQHKFKCVSLILVPVVIPTSYFEDLAE

SEQ ID NO: 38216 - protein, 238 aa, Zea mays subsp. mays
  peptide (1)..(238): Ceres Seq. ID no. 12349596
  misc_feature (50)..(238): Pfam Name: BLLF1 Pfam Description: Herpes virus major outer envelope glycoprotein
  misc_feature (32)..(173): NCBI GI NO: 3914142 NR Description: EARLY NODULIN 20 PRECURSOR (N-20)
PVVFVSGRAKRRRGGRYRGETRAGWGTCGGCGCLHLLPARRRLRRRGSSSSTRTTCSPALPTPSPTPPPTPRRSPQPTPLSPRRRAPWRPPTSSSPGPTPPTSTPTSAPWRWIRSGGPDPITSRRCRRTSRPTCGASSSTGSSRSPRSTSSSRTRSTSPSLMSTASSPSTRSAVTSCSSLALPPCSLPRSSRRSARRTRRTSATSQTTPTPKRSSSRWRATYSSFSSSSWAILQSRPS

SEQ ID NO: 38217 - protein, 236 aa, Zea mays subsp. mays
  peptide (1)..(236): Ceres Seq. ID no. 12349597
  misc_feature (1)..(98): Pfam Name: Pfam Description:  Cyclin, N-terminal domain
  misc_feature (1)..(236): NCBI GI NO: 40538955 NR Description: putative A-type cyclin
  misc_feature (1)..(234): NCBI GI NO: 7438516 NR Description: cyclin A-type - Madagascar periwinkle
  misc_feature (1)..(236): NCBI GI NO: 7438513 NR Description: cyclin A-type (clone 59) - common tobacco
  misc_feature (1)..(232): NCBI GI NO: 7242793 NR Description: cyclin A3.1 [Pisum sativum]
  misc_feature (1)..(234): NCBI GI NO: 15239172 NR Description: Cyclin A3;1; protein id: At5g43080.1
  misc_feature (1)..(234): NCBI GI NO: 15220147 NR Description: Cyclin A3;4; protein id: At1g47230
  misc_feature (1)..(234): NCBI GI NO: 116167 NR Description: G2/MITOTIC-SPECIFIC CYCLIN C13-1 (A-LIKE CYCLIN)
  misc_feature (1)..(233): NCBI GI NO: 7438514 NR Description: cyclin a1-type, mitosis-specific - soybean
  misc_feature (1)..(233): NCBI GI NO: 7438508 NR Description: mitosis-specific cyclin CYS
  misc_feature (1)..(233): NCBI GI NO: 7438511 NR Description: cyclin A-type (clone 105) - common tobacco
MRSILVDWLVEVAEEYKLVADTLYLTISYVDRFLSVNALGRDKLQLLGVASMLIAAKFEEISPPHPEDFCYITDNTYTKEELLKMESDILKLLKFELGNPTIKTFLRRFIRSAHEDKKGSILLMEFLGSYLAELSLLDYGCLRFLPSVVAASVMFVARLTIDPNTNPWNTKLQKMTGYKVSELKDCIVAIHDLQLNRKCPSLTAIRDKYKQHKFKCVSLILVPVVIPTSYFEDLAE

SEQ ID NO: 38218 - DNA, 1230 bp, Zea mays subsp. mays
  misc_feature (1)..(1230): Ceres Seq. ID no. 12434921
gcacgagaccattacctagaacatcctaatcgaaaaacgacgacgagaatccccccatcccccaccaggccacaaaaaccaggtcgccgatgccgcctaccgtctgacatcgatcacccaggcagatcgcgcgcaagccacccaaacaaatccaaaaccgaatcctgatccgatcccgtcgatcggcggcggcggcgatggaggcccggcccggcgcgtggcgcctgcagcagcggggccccggcgcgcccgtcgcgggcctgcccatcggcttccgcttccgccccaccgacgaggagctgctgctgcactacctccgccgcaaggcgctggcctgcccgctcccggcgggcgtcatcccggacgccgacctcgcgcgcctcgacccgtcggacctcctcctccccgccgccgcaccacctgcggggggagccgccgacgacgccagcggggagcacttcttcttccaccgcccggcgacgcggtgctggcgcaggggaggcggcgcggccagggcggccggcgccggcgtctggaggccgtccgggaaggagaccgtcgtcgtgtcgccgcgctgcaagcgcccccgtcggcaccaagcggacgctcgtcttctgcccgcgccgccgtggcggcggcggcgcccgcaccgactgggtcatgcacgagtaccgcctcctccccgccggcctccacctccacggctgcgccgccaacgcgcctccgcccactaatgtgagctcccatggcggtggcgcggcggcggccgactgggtggtctgtcgcattttcaggagggccaggccagcccaccgcgcccgccttggtgacgcgcaagaagaagaagaagagcacgcggcggtggagagcgcgtcgtccacgtcgtcgtgcgtcaccgacgcctccgggaccatcggccaggacgatgacggcgacgaagggatcagtggcagctgcagcgtcgcctcctctaattgagaccgactagaagaaacaagagttggctagcccgcccgtcgaccaaatcacgggcgccgtgtcctaattgccgtagcaccctctcagtctcagtccctagtagcaatcaatagagagaagaagcttgagctccaacaaaccgacaacaacatcataaaaaggctaagcgctttgctgccatgttatgttgttgctggagctcgtcgcgaatccagagtgttaattagcgagaaaatcaatcagttcccttcc

SEQ ID NO: 38219 - protein, 178 aa, Zea mays subsp. mays
  peptide (1)..(178): Ceres Seq. ID no. 12434922
  misc_feature (77)..(130): Pfam Name: NAM Pfam Description: No apical meristem
  misc_feature (1)..(67): NCBI GI NO: 34907026 NR Description: contains EST C27594(C52325)~unknown protein
  misc_feature (77)..(130): NCBI GI NO: 34907026 NR Description: contains EST C27594(C52325)~unknown protein
  misc_feature (17)..(124): NCBI GI NO: 15218843 NR Description: jasmonic acid, putative; protein id: At1g65910.1
  misc_feature (17)..(126): NCBI GI NO: 34902214 NR Description: Hypothetical protein
  misc_feature (14)..(124): NCBI GI NO: 15219110 NR Description: NAM-like protein; protein id: At1g52880
  misc_feature (14)..(124): NCBI GI NO: 21554226 NR Description: NAM-like protein [Arabidopsis thaliana]
  misc_feature (14)..(124): NCBI GI NO: 20466640 NR Description: NAM-like protein [Arabidopsis thaliana]
  misc_feature (22)..(127): NCBI GI NO: 38175531 NR Description: putative development regulation gene OsNAC4
  misc_feature (10)..(124): NCBI GI NO: 18416983 NR Description: putative protein; protein id: At4g27410
  misc_feature (18)..(124): NCBI GI NO: 23397295 NR Description: unknown protein [Arabidopsis thaliana]
MEARPGAWRLQQRGPGAPVAGLPIGFRFRPTDEELLLHYLRRKALACPLPAGVIPDADLARLDPSDLLLPAAAPPAGGAADDASGEHFFFHRPATRCWRRGGGAARAAGAGVWRPSGKETVVVSPRCKRPRRHQADARLLPAPPWRRRRPHRLGHARVPPPPRRPPPPRLRRQRASAH

SEQ ID NO: 38220 - protein, 105 aa, Zea mays subsp. mays
  peptide (1)..(105): Ceres Seq. ID no. 12434923
  misc_feature (1)..(98): NCBI GI NO: 34907026 NR Description: contains EST C27594(C52325)~unknown protein
  misc_feature (28)..(80): NCBI GI NO: 18416983 NR Description: putative protein; protein id: At4g27410
  misc_feature (28)..(80): NCBI GI NO: 23397295 NR Description: unknown protein [Arabidopsis thaliana]
  misc_feature (28)..(80): NCBI GI NO: 7486254 NR Description: hypothetical protein F27G19
  misc_feature (1)..(20): NCBI GI NO: 21105746 NR Description: nam-like protein 9 [Petunia x hybrida]
  misc_feature (1)..(91): NCBI GI NO: 34899790 NR Description: OJ1773_H01.21
  misc_feature (1)..(54): NCBI GI NO: 34784016 NR Description: Unknown (protein for MGC:63802) [Danio rerio]
MHEYRLLPAGLHLHGCAANAPPPTNVSSHGGGAAAADWVVCRIFRRARPAHRARLGDAQEEEEEHAAVESASSTSSCVTDASGTIGQDDDGDEGISGSCSVASSN

SEQ ID NO: 38221 - DNA, 1449 bp, Zea mays subsp. mays
  misc_feature (1)..(1449): Ceres Seq. ID no. 12366087
acattttttactgcgagaggctcctcgtcccactttgcattgcacccccgcaagctctcttcactctccccagctcaactcaaatgcaagcaaagatcgagcagaaacggcagcggctgctgggcatcgcgcccgatctgccgctgcacaagctccagctcgtcgtcgccccgaccgcggcctcgctcccggcgctcgccgtggtcgccctcctcctcctcctcctcgccacggcgcgccgtccgtgctccttcctcgacgcgtaccgctccggcgtcgtctccctgccttccccgtccagaacctcgccgccccacctcgggcgctctgcggccgccaacagggtgccgagcgggtgcgacatcttccgcccgggccagtgggttcccgacgacgacgcgccgtactacaccaacctcacctgcccgctcatccaggagcaccagaactgcatgaagtacggccgccccgaccgcggattccttcgctggcggtggcgccccgatggctgcgacctgccccgcttcgacgccgccgccttcctggacgccgtccgggacacgtcgctggcgttcgtcggggactcgctcgccaggaaccacatgcagtccctcatgtgcctcctgtccaaggtggcgtaccccaaagacgtctcgacgacgacgaacccagagttccggacgatgcgctacgaggcgtacaacttcaccatggccatcttctggtcgccgttcctggtccgggggcaccagccggacccgcggcgccacatgtgggacatctacctggacgagccggacgcggcgtggcgcgacgccgtctcgggcttcgaccgcgtggtcctgtcggcggcgacctggttcacccggccggccatgttctacgaggccggcggggggcgcgtccgcgtcgtggggtgccactactgcctggtcccgggcgtccccgaccggacgctgcgctactcgctgcgcatggcgctccgctccgcgctccgcgtgctcacggggccccggttcaacaggacggtgatcctgcggacgctgtcgccgacgtcgcacttcgagggcggggagtgggaccggggcggggactgccggcggacgcggccgttcgcgcccaacgagacgcgggtggcggggctggacctcgacctccacgcggtgcaggtggaggagttctccagggcaagggccgaggcggaggcgtccggcggggggacgaggctggcgctcatggacaccacggcggccatggtgcttcggccggacggccacccgagccggtacggccactggccgcacgagaacgtgacgctgtacaacgactgcgtgcactggtgcctccccggccccatcgacgcctggaacgacatgctgctccagatgctcctcgcggacccatcttgatgtccgtgtgtttcttccgctagctccaatttgtcccagg

SEQ ID NO: 38222 - protein, 476 aa, Zea mays subsp. mays
  peptide (1)..(476): Ceres Seq. ID no. 12366088
  misc_feature (309)..(437): Pfam Name: Pfam Description:  Herpesvirus UL87 family
HFLLREAPRPTLHCTPASSLHSPQLNSNASKDRAETAAAAGHRARSAAAQAPARRRPDRGLAPGARRGRPPPPPPRHGAPSVLLPRRVPLRRRLPAFPVQNLAAPPRALCGRQQGAERVRHLPPGPVGSRRRRAVLHQPHLPAHPGAPELHEVRPPRPRIPSLAVAPRWLRPAPLRRRRLPGRRPGHVAGVRRGLARQEPHAVPHVPPVQGGVPQRRLDDDEPRVPDDALRGVQLHHGHLLVAVPGPGAPAGPAAPHVGHLPGRAGRGVARRRLGLRPRGPVGGDLVHPAGHVLRGRRGARPRRGVPLLPGPGRPRPDAALLAAHGAPLRAPRAHGAPVQQDGDPADAVADVALRGRGVGPGRGLPADAAVRAQRDAGGGAGPRPPRGAGGGVLQGKGRGGGVRRGDEAGAHGHHGGHGASAGRPPEPVRPLAARERDAVQRLRALVPPRPHRRLERHAAPDAPRGPILMSVCFFR

SEQ ID NO: 38223 - protein, 468 aa, Zea mays subsp. mays
  peptide (1)..(468): Ceres Seq. ID no. 12366089
  misc_feature (287)..(463): Pfam Name: Pfam Description:  Arabidopsis proteins of unknown function
  misc_feature (50)..(468): NCBI GI NO: 34898638 NR Description: contains ESTsAU089699
  misc_feature (94)..(463): NCBI GI NO: 34911888 NR Description: OSJNBb0032K15.21
  misc_feature (91)..(464): NCBI GI NO: 34911880 NR Description: OSJNBb0032K15.17
  misc_feature (119)..(466): NCBI GI NO: 15237211 NR Description: putative protein; protein id: At5g15890.1
  misc_feature (50)..(463): NCBI GI NO: 15237213 NR Description: putative protein; protein id: At5g15900.1
  misc_feature (90)..(464): NCBI GI NO: 30678135 NR Description: expressed protein [Arabidopsis thaliana]
  misc_feature (259)..(463): NCBI GI NO: 34898640 NR Description: hypothetical protein~similar to Oryza sativachromosome 1
  misc_feature (125)..(247): NCBI GI NO: 34898640 NR Description: hypothetical protein~similar to Oryza sativachromosome 1
  misc_feature (119)..(463): NCBI GI NO: 15223079 NR Description: unknown protein; protein id: At1g70230
  misc_feature (130)..(464): NCBI GI NO: 25518737 NR Description: hypothetical protein F6F3.23
IFYCERLLVPLCIAPPQALFTLPSSTQMQAKIEQKRQRLLGIAPDLPLHKLQLVVAPTAASLPALAVVALLLLLLATARRPCSFLDAYRSGVVSLPSPSRTSPPHLGRSAAANRVPSGCDIFRPGQWVPDDDAPYYTNLTCPLIQEHQNCMKYGRPDRGFLRWRWRPDGCDLPRFDAAAFLDAVRDTSLAFVGDSLARNHMQSLMCLLSKVAYPKDVSTTTNPEFRTMRYEAYNFTMAIFWSPFLVRGHQPDPRRHMWDIYLDEPDAAWRDAVSGFDRVVLSAATWFTRPAMFYEAGGGRVRVVGCHYCLVPGVPDRTLRYSLRMALRSALRVLTGPRFNRTVILRTLSPTSHFEGGEWDRGGDCRRTRPFAPNETRVAGLDLDLHAVQVEEFSRARAEAEASGGGTRLALMDTTAAMVLRPDGHPSRYGHWPHENVTLYNDCVHWCLPGPIDAWNDMLLQMLLADPS

SEQ ID NO: 38224 - protein, 441 aa, Zea mays subsp. mays
  peptide (1)..(441): Ceres Seq. ID no. 12366090
  misc_feature (260)..(436): Pfam Name: Pfam Description:  Arabidopsis proteins of unknown function
  misc_feature (23)..(441): NCBI GI NO: 34898638 NR Description: contains ESTsAU089699
  misc_feature (67)..(436): NCBI GI NO: 34911888 NR Description: OSJNBb0032K15.21
  misc_feature (64)..(437): NCBI GI NO: 34911880 NR Description: OSJNBb0032K15.17
  misc_feature (92)..(439): NCBI GI NO: 15237211 NR Description: putative protein; protein id: At5g15890.1
  misc_feature (23)..(436): NCBI GI NO: 15237213 NR Description: putative protein; protein id: At5g15900.1
  misc_feature (63)..(437): NCBI GI NO: 30678135 NR Description: expressed protein [Arabidopsis thaliana]
  misc_feature (232)..(436): NCBI GI NO: 34898640 NR Description: hypothetical protein~similar to Oryza sativachromosome 1
  misc_feature (98)..(220): NCBI GI NO: 34898640 NR Description: hypothetical protein~similar to Oryza sativachromosome 1
  misc_feature (92)..(436): NCBI GI NO: 15223079 NR Description: unknown protein; protein id: At1g70230
  misc_feature (103)..(437): NCBI GI NO: 25518737 NR Description: hypothetical protein F6F3.23
MQAKIEQKRQRLLGIAPDLPLHKLQLVVAPTAASLPALAVVALLLLLLATARRPCSFLDAYRSGVVSLPSPSRTSPPHLGRSAAANRVPSGCDIFRPGQWVPDDDAPYYTNLTCPLIQEHQNCMKYGRPDRGFLRWRWRPDGCDLPRFDAAAFLDAVRDTSLAFVGDSLARNHMQSLMCLLSKVAYPKDVSTTTNPEFRTMRYEAYNFTMAIFWSPFLVRGHQPDPRRHMWDIYLDEPDAAWRDAVSGFDRVVLSAATWFTRPAMFYEAGGGRVRVVGCHYCLVPGVPDRTLRYSLRMALRSALRVLTGPRFNRTVILRTLSPTSHFEGGEWDRGGDCRRTRPFAPNETRVAGLDLDLHAVQVEEFSRARAEAEASGGGTRLALMDTTAAMVLRPDGHPSRYGHWPHENVTLYNDCVHWCLPGPIDAWNDMLLQMLLADPS

SEQ ID NO: 38225 - DNA, 1374 bp, Zea mays subsp. mays
  misc_feature (1)..(1374): Ceres Seq. ID no. 12352823
accaaaccgccccgccgagcgacccagtccgtcagcgagcacccctgtcgccgaagcccaggcagcagcagcgggcagcggcgtccgtccggtccgcgcgcgttcgttccccacttcccctccccgaccggcagattccccgtccacgcccccgccttaaaacgcccgccactaatcccgtttctcactgcccttccgcggctgtgctgtgctgttctgtgctctgctctgctctgctccccgtctttcctcctctcccggtctttcctcctctccccttcccgcccagcgcgtccccccgaggaaccaaccccgcggcatggggatcgtggaggaggcgcacaacctgcgagtggtgggcgaggggaagcgcggggtcatcgtgctggcgcacggcttcggcaccgaccagtccgtgtggaagcacctggtgccgcacctcgtcgcccgactaccgcgtcgtgctcttcgacaccatgggcgccggccccaccaacccggactacttcgacttctcccgctacgccacgctcgagggctacgcgctcgacctcctcgccatcctccaggagctcggcgtccgctcctgcatctacgtcggccactccgtctccgcggtcatcggcgcgctcgcctccatctccaggcctgacctcttcaccaagctcgtgctcctctccgcgtccccaaggtacctcaatgatgtggactactatggcgggtttgagcaagatgagcttgatgagctgtttgaggcgatgcgatcaaactacaaggcctggtgctcaggttttgcgcccctgtgtgttggcggagacatggaatcagtggcagttcaggagtttagcaggacgctcttcaatatacgtccggacattgcgcttagtgttgcccagacgatcttccagagcgacgtgcgcagcctcctcccgcacgtcactgtcccatgccacattgttcagagcaccaaggatctcgcggtgccggtcgtggtgtctgagtacctgcacaggcaccttggtggcgactccatcgtggaggtgatgccctctgaaggccatcttccccagcttagctctccggacattgtaatccctgtcttactccgacacatccagcacgatatcgcagtctaggttggtcaatcgttcctccaagacgatgagcatccgaagctgtctacttgtctgtttgtatcttgcttaattgttcaacgtaggatcgcatctatttgatgttctaataaggtttcaaaggtgttatgtagtgttggcggtggaaagtgtagcatatatgtatgtgttatccattggtcgtctaatgtaggctaccatgttggatgctctgacatctgaagtccttcagaagctcttc

SEQ ID NO: 38226 - protein, 377 aa, Zea mays subsp. mays
  peptide (1)..(377): Ceres Seq. ID no. 12352824
  misc_feature (151)..(369): Pfam Name: Pfam Description:  alpha/beta hydrolase fold
  misc_feature (231)..(377): NCBI GI NO: 40736991 NR Description: putative hydrolases
  misc_feature (150)..(232): NCBI GI NO: 40736991 NR Description: putative hydrolases
  misc_feature (150)..(377): NCBI GI NO: 15235567 NR Description: putative protein; protein id: At4g37470
  misc_feature (150)..(360): NCBI GI NO: 18396732 NR Description: expressed protein; protein id: At3g03990
  misc_feature (150)..(360): NCBI GI NO: 21593927 NR Description: unknown [Arabidopsis thaliana]
  misc_feature (141)..(364): NCBI GI NO: 24216360 NR Description: Predicted hydrolases or acyltransferases
  misc_feature (148)..(372): NCBI GI NO: 15230110 NR Description: unknown protein; protein id: At3g24420.1
  misc_feature (150)..(360): NCBI GI NO: 22987307 NR Description: hypothetical protein [Burkholderia fungorum]
  misc_feature (151)..(371): NCBI GI NO: 22298700 NR Description: ORF_ID:tlr1157~hypothetical protein
  misc_feature (150)..(361): NCBI GI NO: 29827464 NR Description: putative hydrolase
QTAPPSDPVRQRAPLSPKPRQQQRAAASVRSARVRSPLPLPDRQIPRPRPRLKTPATNPVSHCPSAAVLCCSVLCSALLPVFPPLPVFPPLPFPPSASPRGTNPAAWGSWRRRTTCEWWARGSAGSSCWRTASAPTSPCGSTWCRTSSPDYRVVLFDTMGAGPTNPDYFDFSRYATLEGYALDLLAILQELGVRSCIYVGHSVSAVIGALASISRPDLFTKLVLLSASPRYLNDVDYYGGFEQDELDELFEAMRSNYKAWCSGFAPLCVGGDMESVAVQEFSRTLFNIRPDIALSVAQTIFQSDVRSLLPHVTVPCHIVQSTKDLAVPVVVSEYLHRHLGGDSIVEVMPSEGHLPQLSSPDIVIPVLLRHIQHDIAV

SEQ ID NO: 38227 - protein, 347 aa, Zea mays subsp. mays
  peptide (1)..(347): Ceres Seq. ID no. 12352825
  misc_feature (110)..(215): Pfam Name: Pfam Description:  Cupin
  misc_feature (141)..(229): NCBI GI NO: 30140331 NR Description: putative arabinagalactan protein [Lotus japonicus]
  misc_feature (3)..(347): NCBI GI NO: 11360318 NR Description: probable mucin DKFZp434C196.1 - human (fragment)
  misc_feature (142)..(344): NCBI GI NO: 11359723 NR Description: proteophosphoglycan, membrane-associated
  misc_feature (142)..(326): NCBI GI NO: 5420387 NR Description: proteophosphoglycan [Leishmania major]
  misc_feature (36)..(229): NCBI GI NO: 15233976 NR Description: extensin-like protein; protein id: At4g18670.1
TKPPRRATQSVSEHPCRRSPGSSSGQRRPSGPRAFVPHFPSPTGRFPVHAPALKRPPLIPFLTALPRLCCAVLCSALLCSPSFLLSRSFLLSPSRPARPPEEPTPRHGDRGGGAQPASGGRGEARGHRAGARLRHRPVRVEAPGAAPRRPTTASCSSTPWAPAPPTRTTSTSPATPRSRATRSTSSPSSRSSASAPASTSATPSPRSSARSPPSPGLTSSPSSCSSPRPQGTSMMWTTMAGLSKMSLMSCLRRCDQTTRPGAQVLRPCVLAETWNQWQFRSLAGRSSIYVRTLRLVLPRRSSRATCAASSRTSLSHATLFRAPRISRCRSWCLSTCTGTLVATPSWR

SEQ ID NO: 38228 - protein, 219 aa, Zea mays subsp. mays
  peptide (1)..(219): Ceres Seq. ID no. 12352826
  misc_feature (1)..(211): Pfam Name: Pfam Description:  alpha/beta hydrolase fold
  misc_feature (73)..(219): NCBI GI NO: 40736991 NR Description: putative hydrolases
  misc_feature (1)..(74): NCBI GI NO: 40736991 NR Description: putative hydrolases
  misc_feature (1)..(219): NCBI GI NO: 15235567 NR Description: putative protein; protein id: At4g37470
  misc_feature (1)..(202): NCBI GI NO: 18396732 NR Description: expressed protein; protein id: At3g03990
  misc_feature (1)..(202): NCBI GI NO: 21593927 NR Description: unknown [Arabidopsis thaliana]
  misc_feature (1)..(206): NCBI GI NO: 24216360 NR Description: Predicted hydrolases or acyltransferases
  misc_feature (1)..(214): NCBI GI NO: 15230110 NR Description: unknown protein; protein id: At3g24420.1
  misc_feature (1)..(202): NCBI GI NO: 22987307 NR Description: hypothetical protein [Burkholderia fungorum]
  misc_feature (1)..(213): NCBI GI NO: 22298700 NR Description: ORF_ID:tlr1157~hypothetical protein
  misc_feature (1)..(203): NCBI GI NO: 29827464 NR Description: putative hydrolase
MGAGPTNPDYFDFSRYATLEGYALDLLAILQELGVRSCIYVGHSVSAVIGALASISRPDLFTKLVLLSASPRYLNDVDYYGGFEQDELDELFEAMRSNYKAWCSGFAPLCVGGDMESVAVQEFSRTLFNIRPDIALSVAQTIFQSDVRSLLPHVTVPCHIVQSTKDLAVPVVVSEYLHRHLGGDSIVEVMPSEGHLPQLSSPDIVIPVLLRHIQHDIAV

SEQ ID NO: 38229 - DNA, 1419 bp, Zea mays subsp. mays
  misc_feature (1)..(1419): Ceres Seq. ID no. 12353172
ccggcaaatcccgtatccaaatccaatagggtaaacctagccgcccatctgcccgccatgaaggcgtcgatcaagttccgcgacgacgaccgcccgctgctgcgcgccaaggtgccggtcggcgtgctggggctgcctttcttctcgggcctcgtggcggggggagacgccaaggacctccgcttcgacctctccaccgccttcacctccggcccggcgctccgcctctcgtaccgccccaacgaaccgctccagccctttgccctctccatccgcacggggctggggccgctggggtcccctgtccgagcccccttcgccctcgccgccgaattcaacctcacctcctcgaacccgcccgccttctcgctcgttttcaagccccggatcggagacttcgccgtcgccagctccgtccgctccccgccgccgccgccgcccgcatcaactctgcccccgctgtcggtcaagatgtccgacctcgtcaccaacggcgacgaccacgaccgcaaagcgcacggtaacgggttctccttctctgggaatgggttcgcggcgaacgtggcggccgccgccgggaccggcggcggcggcgtgggcgcgctgctgtccaggatgcggctcacgaccaggagtgtgctgccactgtggagtaaggcgagcctgcggttccagtgggggctgcgcgtgccgccggagatcaaggccgcgctcgcagacgacgggtacgggcgcaaggctgggagcctcgccatcagcaagctgccgctgctggtgatgaacaagatcaccatcgagcacacgcccaaggtgccttcgcagtctgaaacggataagaagaggaagaaagatgccccaccagcagccgagggcgaggtgttctcactaatgaagaggcaattggaggagctgaatgctgagagcaccatgctgcgtctggcagtcgaggacttgcgtgcagaggttggagccagcaaaggcgatggacgtaagctgccagcaacagtgccacatccacagcgttcattcgtgtcgaaaccagatcaccattttcacagcgatgctaaggatttgggagacagtgggacgaaaccggcctccaatgatgcaagtgaggggttgaagaaggcgctggaggccagacgaaagtaggaaacacctagataggggggccatagggcttgctgacactgcaagcgctacaatatgatatggctgctgacggctgtgtcaagttttgtgcttaataataatgcttcctcaatggagaagattggtaagggctgtgaggtagccattttccataggtgatgtagtagttttgcctatattctatttccattgtttgtgttaggatattatccgttctgtataaatccgcaacttgcgatctaaaatgaatgaaggattagttttttt

SEQ ID NO: 38230 - protein, 383 aa, Zea mays subsp. mays
  peptide (1)..(383): Ceres Seq. ID no. 12353173
  misc_feature (20)..(381): NCBI GI NO: 28411873 NR Description: OSJNBa0016N23.25
  misc_feature (20)..(372): NCBI GI NO: 15230911 NR Description: putative protein; protein id: At3g57990
  misc_feature (70)..(142): NCBI GI NO: 21740989 NR Description: OSJNBa0019K04.27
PANPVSKSNRVNLAAHLPAMKASIKFRDDDRPLLRAKVPVGVLGLPFFSGLVAGGDAKDLRFDLSTAFTSGPALRLSYRPNEPLQPFALSIRTGLGPLGSPVRAPFALAAEFNLTSSNPPAFSLVFKPRIGDFAVASSVRSPPPPPPASTLPPLSVKMSDLVTNGDDHDRKAHGNGFSFSGNGFAANVAAAAGTGGGGVGALLSRMRLTTRSVLPLWSKASLRFQWGLRVPPEIKAALADDGYGRKAGSLAISKLPLLVMNKITIEHTPKVPSQSETDKKRKKDAPPAAEGEVFSLMKRQLEELNAESTMLRLAVEDLRAEVGASKGDGRKLPATVPHPQRSFVSKPDHHFHSDAKDLGDSGTKPASNDASEGLKKALEARRK

SEQ ID NO: 38231 - protein, 364 aa, Zea mays subsp. mays
  peptide (1)..(364): Ceres Seq. ID no. 12353174
  misc_feature (1)..(362): NCBI GI NO: 28411873 NR Description: OSJNBa0016N23.25
  misc_feature (1)..(353): NCBI GI NO: 15230911 NR Description: putative protein; protein id: At3g57990
  misc_feature (51)..(123): NCBI GI NO: 21740989 NR Description: OSJNBa0019K04.27
MKASIKFRDDDRPLLRAKVPVGVLGLPFFSGLVAGGDAKDLRFDLSTAFTSGPALRLSYRPNEPLQPFALSIRTGLGPLGSPVRAPFALAAEFNLTSSNPPAFSLVFKPRIGDFAVASSVRSPPPPPPASTLPPLSVKMSDLVTNGDDHDRKAHGNGFSFSGNGFAANVAAAAGTGGGGVGALLSRMRLTTRSVLPLWSKASLRFQWGLRVPPEIKAALADDGYGRKAGSLAISKLPLLVMNKITIEHTPKVPSQSETDKKRKKDAPPAAEGEVFSLMKRQLEELNAESTMLRLAVEDLRAEVGASKGDGRKLPATVPHPQRSFVSKPDHHFHSDAKDLGDSGTKPASNDASEGLKKALEARRK

SEQ ID NO: 38232 - protein, 226 aa, Zea mays subsp. mays
  peptide (1)..(226): Ceres Seq. ID no. 12353175
  misc_feature (1)..(224): NCBI GI NO: 28411873 NR Description: OSJNBa0016N23.25
  misc_feature (1)..(215): NCBI GI NO: 15230911 NR Description: putative protein; protein id: At3g57990
MSDLVTNGDDHDRKAHGNGFSFSGNGFAANVAAAAGTGGGGVGALLSRMRLTTRSVLPLWSKASLRFQWGLRVPPEIKAALADDGYGRKAGSLAISKLPLLVMNKITIEHTPKVPSQSETDKKRKKDAPPAAEGEVFSLMKRQLEELNAESTMLRLAVEDLRAEVGASKGDGRKLPATVPHPQRSFVSKPDHHFHSDAKDLGDSGTKPASNDASEGLKKALEARRK

SEQ ID NO: 38233 - DNA, 1621 bp, Zea mays subsp. mays
  misc_feature (1)..(1621): Ceres Seq. ID no. 12366091
caaaaatgggattggcttgccatattgcggaaattcatagccaggtaattgaggtggaggggtgcatgcaagtgtttttttcttctagtgctaggttgcattcttgcttcatattttttcttgaagctgttgctgcttgtactagtatctcgtactgctattcctttcacttactgttgggaccatgcttcgtcgccgaaggtcctgcagaaagaaacagcttcggctgaagttgctcgtacgcgatgccgaatgtgccatttcgtgaagcttcggaattacaaaccgacttaaagatagaatgaccttttagtccataagagtccgagtcattgttgtaaacttttacgagggctacgattgtaattcctcacgggttgtgtcctgtgcctataaatagtgaacaatattcctttactgttcatgcatccctgtaattgcaattgcatcactcggaaattaccctttgtcaaggcagaggtataaatgtgtctaaatattatgtttgaacatcttaaatttatagtatataaatgatgctatttatctccaatttacttgtctttaatgccttatgtcttacgttattttatattatctttgtgagttgaattatgaaggttaattctgccattataaccttcgtccgaagtacatccttagggaaataatgcttcagcggacgaagggcattgaaatttaacattttatgttgtcttgttcttaattcatagcatttgagaacaagtctccaacacttacaatttgctttgtctaggcgtcagtagagaacaacgcatgggaactgaaaataatacattgaggagctgtacttgcgatctgttaagcaggttctgctccttgtccatatcaaaggtggagttgatgcagctgcagctctttcttttcttgtactggtctgagctcaagggtaaggttactactggcctggcgttggttctgagcccatatggtggcaccccggtcgcctctgatatctttcgagaaggcctgatccctgataaggatacaaggaggatcatggagctcatggtatgcaaactaatcaagacgaacaagcagggtgacatcagggtcttggaggacacctcacacatgctaagacaaaggactgcatcaccaagcacaaacttcccgtcggtgagctcttcaaaggacttcatcgatgtgtcggcagccatggtggtcatgggcttacggccctccacctgcggctgcactatggggagaggagcaccgggctggtgacgaggcgtgatgccgaggtgcctgggttggtggtggtgaggcccgagagaaggctcgaccacgcgtggatggtttactccacgctgaagatgtgtagcgatgaggccgatgcaagcgagatgtgtgcgaggctctgctggccttgctcgttgagatcgacaggaagaaatttggctggccgtccggtcatgttggagtcctcgatggttttggttatagatgcaaatgtgtcgaaccagatagcacatgctacaaatgatcgatttgtttcctttgttcaaagcaaatatactgtggcaatatgctacttggctatgtaatgttcttcacattttaacttagttctatttgc

SEQ ID NO: 38234 - protein, 156 aa, Zea mays subsp. mays
  peptide (1)..(156): Ceres Seq. ID no. 12366092
  misc_feature (36)..(110): NCBI GI NO: 7486943 NR Description: hypothetical protein At2g44970
  misc_feature (36)..(110): NCBI GI NO: 18377628 NR Description: unknown protein [Arabidopsis thaliana]
  misc_feature (36)..(110): NCBI GI NO: 30689883 NR Description: expressed protein [Arabidopsis thaliana]
MGTENNTLRSCTCDLLSRFCSLSISKVELMQLQLFLFLYWSELKGKVTTGLALVLSPYGGTPVASDIFREGLIPDKDTRRIMELMVCKLIKTNKQGDIRVLEDTSHMLRQRTASPSTNFPSVSSSKDFIDVSAAMVVMGLRPSTCGCTMGRGAPGW

SEQ ID NO: 38235 - protein, 127 aa, Zea mays subsp. mays
  peptide (1)..(127): Ceres Seq. ID no. 12366093
  misc_feature (7)..(81): NCBI GI NO: 7486943 NR Description: hypothetical protein At2g44970
  misc_feature (7)..(81): NCBI GI NO: 18377628 NR Description: unknown protein [Arabidopsis thaliana]
  misc_feature (7)..(81): NCBI GI NO: 30689883 NR Description: expressed protein [Arabidopsis thaliana]
MQLQLFLFLYWSELKGKVTTGLALVLSPYGGTPVASDIFREGLIPDKDTRRIMELMVCKLIKTNKQGDIRVLEDTSHMLRQRTASPSTNFPSVSSSKDFIDVSAAMVVMGLRPSTCGCTMGRGAPGW

SEQ ID NO: 38236 - protein, 83 aa, Zea mays subsp. mays
  peptide (1)..(83): Ceres Seq. ID no. 12366094
  misc_feature (1)..(22): NCBI GI NO: 7486943 NR Description: hypothetical protein At2g44970
  misc_feature (1)..(22): NCBI GI NO: 18377628 NR Description: unknown protein [Arabidopsis thaliana]
  misc_feature (1)..(22): NCBI GI NO: 30689883 NR Description: expressed protein [Arabidopsis thaliana]
MVYSTLKMCSDEADASEMCARLCWPCSLRSTGRNLAGRPVMLESSMVLVIDANVSNQIAHATNDRFVSFVQSKYTVAICYLAM

SEQ ID NO: 38237 - DNA, 1605 bp, Zea mays subsp. mays
  misc_feature (1)..(1605): Ceres Seq. ID no. 15180809
agaacatcctaatcgaaaagaaaccccagagctttaaagcttttccgattccgcaatgctcaccgttcggttccttctcgtaccgagccgcgggtagccagccaaccgccgacgcagtccacaagcgatgaagcgcttcttccagccagtgcccaaggacggctccccgtccaagaagcggctagcgggtgctgctgaaccgggcgacggccccacatcagccggtgccgccaccggcgctggcggggatgtagaggggaggcccaccgaggagccgttcaagttcctgacgtggaacgccaacagcctgctcctccggatgaagagcgactggcctgctttctcgcagctcgtcgcccgccttgaccccgacgtcatttgtgtccaggaagtgcggatgccggcagctggttccaaaggggcacctaaaaaccccagtgaactaaaagatgacacaagcttgtcacgggatgaaaagcaggtagttctacgtgctttgtcagcttcacctttcaaagactaccgtgtctggtggtctctttcagattcaaaatatgctgggacagctatgtttataaagaaaaagtttgagcctaagaaggtgtctttcaacttggatagaacatcttctaagcatgaagccgatgggcgtgttataattgcggaatttgaatcattccttttactgaacacttattctccaaacaatggatggaaggaggaggaaaatgcatttcaaagaagacgtaagtgggacaagaggatgctagaatttgttcaacacgtggataaacccttaatctggtgtggggacttgaatgtcagtcatgaagaaatcgacgtcagccatcctgatttctttagcagcgctaagctgaatggatacaccccacccaataaagaggactgtggacagccaggattcaccccagcagagagacggcgttttggcaacatattattccaaggaaagctggtagatgcttacaggcacctgcacaaagaaaaggacatagacggtggcttctcttggtccggtcatccaattggcaagtaccgaggaaagagaatgaggatcgactacttccttgtttcggaacagttaaaggacagaatagtttcatgtgaaatgcatggccgtggcattgaattggatggattttatggaagtgaccactgccctgtttcgcttgagctttccgaagctgtagcagaagaagcaccaggacagcccaagccatccatctaaatataccaccatggtggtcattgttgagacatttccggtccttcattaaacctgactgttccatgcattgcctactctaggtagctgaggtttgattgtaggtattattatgatcccagtaggttaccagttcctgtggtcagggctggtatagtttagggatcattgccatttaagcagtgcaatttggacatctcattctgcttgaaatgttgtttgtctaagagcagccatggactacctaatacctcatggggatcgaagagattaatcccttcgtatccaattttaactagcaagggatttaatccacccctaacaagcacaataaaatcttgttcgttttttctaccaca

SEQ ID NO: 38238 - protein, 373 aa, Zea mays subsp. mays
  peptide (1)..(373): Ceres Seq. ID no. 15180810
  misc_feature (118)..(357): Pfam Name: Pfam Description:  Endonuclease/Exonuclease/phosphatase family
  misc_feature (118)..(371): NCBI GI NO: 18481705 NR Description: putative T29H11.60 protein [Sorghum bicolor]
  misc_feature (1)..(89): NCBI GI NO: 18481705 NR Description: putative T29H11.60 protein [Sorghum bicolor]
  misc_feature (1)..(368): NCBI GI NO: 7487536 NR Description: hypothetical protein T29H11
  misc_feature (107)..(368): NCBI GI NO: 18408629 NR Description: endonuclease/exonuclease/phosphatase family
  misc_feature (1)..(118): NCBI GI NO: 18408629 NR Description: endonuclease/exonuclease/phosphatase family
  misc_feature (1)..(290): NCBI GI NO: 14578320 NR Description: PV1H14200_P [Plasmodium vivax]
  misc_feature (295)..(368): NCBI GI NO: 14578320 NR Description: PV1H14200_P [Plasmodium vivax]
  misc_feature (120)..(359): NCBI GI NO: 23490314 NR Description: putative AP endonuclease-related
  misc_feature (54)..(102): NCBI GI NO: 23490314 NR Description: putative AP endonuclease-related
  misc_feature (101)..(357): NCBI GI NO: 23957727 NR Description: AP endonuclease
MKRFFQPVPKDGSPSKKRLAGAAEPGDGPTSAGAATGAGGDVEGRPTEEPFKFLTWNANSLLLRMKSDWPAFSQLVARLDPDVICVQEVRMPAAGSKGAPKNPSELKDDTSLSRDEKQVVLRALSASPFKDYRVWWSLSDSKYAGTAMFIKKKFEPKKVSFNLDRTSSKHEADGRVIIAEFESFLLLNTYSPNNGWKEEENAFQRRRKWDKRMLEFVQHVDKPLIWCGDLNVSHEEIDVSHPDFFSSAKLNGYTPPNKEDCGQPGFTPAERRRFGNILFQGKLVDAYRHLHKEKDIDGGFSWSGHPIGKYRGKRMRIDYFLVSEQLKDRIVSCEMHGRGIELDGFYGSDHCPVSLELSEAVAEEAPGQPKPSI

SEQ ID NO: 38239 - protein, 309 aa, Zea mays subsp. mays
  peptide (1)..(309): Ceres Seq. ID no. 15180811
  misc_feature (54)..(293): Pfam Name: Pfam Description:  Endonuclease/Exonuclease/phosphatase family
  misc_feature (54)..(307): NCBI GI NO: 18481705 NR Description: putative T29H11.60 protein [Sorghum bicolor]
  misc_feature (1)..(25): NCBI GI NO: 18481705 NR Description: putative T29H11.60 protein [Sorghum bicolor]
  misc_feature (1)..(304): NCBI GI NO: 7487536 NR Description: hypothetical protein T29H11
  misc_feature (43)..(304): NCBI GI NO: 18408629 NR Description: endonuclease/exonuclease/phosphatase family
  misc_feature (1)..(54): NCBI GI NO: 18408629 NR Description: endonuclease/exonuclease/phosphatase family
  misc_feature (1)..(226): NCBI GI NO: 14578320 NR Description: PV1H14200_P [Plasmodium vivax]
  misc_feature (231)..(304): NCBI GI NO: 14578320 NR Description: PV1H14200_P [Plasmodium vivax]
  misc_feature (56)..(295): NCBI GI NO: 23490314 NR Description: putative AP endonuclease-related
  misc_feature (1)..(38): NCBI GI NO: 23490314 NR Description: putative AP endonuclease-related
  misc_feature (37)..(293): NCBI GI NO: 23957727 NR Description: AP endonuclease
MKSDWPAFSQLVARLDPDVICVQEVRMPAAGSKGAPKNPSELKDDTSLSRDEKQVVLRALSASPFKDYRVWWSLSDSKYAGTAMFIKKKFEPKKVSFNLDRTSSKHEADGRVIIAEFESFLLLNTYSPNNGWKEEENAFQRRRKWDKRMLEFVQHVDKPLIWCGDLNVSHEEIDVSHPDFFSSAKLNGYTPPNKEDCGQPGFTPAERRRFGNILFQGKLVDAYRHLHKEKDIDGGFSWSGHPIGKYRGKRMRIDYFLVSEQLKDRIVSCEMHGRGIELDGFYGSDHCPVSLELSEAVAEEAPGQPKPSI

SEQ ID NO: 38240 - protein, 283 aa, Zea mays subsp. mays
  peptide (1)..(283): Ceres Seq. ID no. 15180812
  misc_feature (28)..(267): Pfam Name: Pfam Description:  Endonuclease/Exonuclease/phosphatase family
  misc_feature (28)..(281): NCBI GI NO: 18481705 NR Description: putative T29H11.60 protein [Sorghum bicolor]
  misc_feature (1)..(278): NCBI GI NO: 7487536 NR Description: hypothetical protein T29H11
  misc_feature (17)..(278): NCBI GI NO: 18408629 NR Description: endonuclease/exonuclease/phosphatase family
  misc_feature (1)..(28): NCBI GI NO: 18408629 NR Description: endonuclease/exonuclease/phosphatase family
  misc_feature (1)..(200): NCBI GI NO: 14578320 NR Description: PV1H14200_P [Plasmodium vivax]
  misc_feature (205)..(278): NCBI GI NO: 14578320 NR Description: PV1H14200_P [Plasmodium vivax]
  misc_feature (30)..(269): NCBI GI NO: 23490314 NR Description: putative AP endonuclease-related
  misc_feature (1)..(12): NCBI GI NO: 23490314 NR Description: putative AP endonuclease-related
  misc_feature (11)..(267): NCBI GI NO: 23957727 NR Description: AP endonuclease
  misc_feature (1)..(204): NCBI GI NO: 23957727 NR Description: AP endonuclease
MPAAGSKGAPKNPSELKDDTSLSRDEKQVVLRALSASPFKDYRVWWSLSDSKYAGTAMFIKKKFEPKKVSFNLDRTSSKHEADGRVIIAEFESFLLLNTYSPNNGWKEEENAFQRRRKWDKRMLEFVQHVDKPLIWCGDLNVSHEEIDVSHPDFFSSAKLNGYTPPNKEDCGQPGFTPAERRRFGNILFQGKLVDAYRHLHKEKDIDGGFSWSGHPIGKYRGKRMRIDYFLVSEQLKDRIVSCEMHGRGIELDGFYGSDHCPVSLELSEAVAEEAPGQPKPSI

SEQ ID NO: 38241 - DNA, 1709 bp, Zea mays subsp. mays
  misc_feature (1)..(1709): Ceres Seq. ID no. 12372989
gctcgctcgctcgctctcctccgctcgattccagtggccctgctcccctcgtcgtccctctcccgagcgagagcagcaccggcagttcggacaggagctgaagccttggaggagtaaaggtgtggtcttgccatggagcagccgcagcagcacaagggaggagcggttccggcgcctgcagcggcggccgcgaacggggccggggccggggccgcggagctgatcgggtacgtcgacgtgcacgtgcgtagcgcgcgggacatccagaacatctgcatctaccacaagcaggacgtgtacgcgcggctctcgctgccgggagacggcgcgccggcggcgtccacgcaggtggtcaacggcgggggccgcaacccggtgttcgaccagtcgctgcgcctcggcgtgcgcgcgggggacgtcgacgccgcgctccgctgcgaggtgtggatgctcagccgggtcaagaactacctgcaggaccagctgctgggcttcgcgctcgtgccgctcccggaggtcgtcgccgccgacggcggcacgctcgcccgcgacttcccgctcaccaccagcgacctcttccagaccccctcgggcttcctgcagctcgagctctcctacatcggggtcgtgccggaggtcgtgcccatctcgccgacgcccaagccggcgctggccgacccggacgaggaggagccggggaacaacgccgccgacggcgtcgggaacgggaaggagtacgagaagatcgagttcccggacctgaatctcgtggaggagaaccagatcatggtctccgagtacaccaggctgccgtgcgcggccgtggaaacgcagagctgcgacagcctcctgacctcggagcacgatgacggcgccacggccctgagccgggacgccgccgtgcgcctcgtggagagcttctcgacggacaacagcaccgccgactcggtgggcgccttccagagcgacacgccggttagcagcgtgtctaccacggagttcccggccacccctcagtctaactccagctcggagccgtccgggaacgcccactcgtcggcttaccacaaggcgaaggcggcgtcggagaccgccgacgcggaggtcgactcgtcccgcaccgtccaggaggtcgcggcggcgaactcgccctgcgccgcgtcggaggctgccgtgcacaagccggtgatcagcgtcaacatcgagcaggaggtgaaggtggacgggaaccaaatcatggacatgtacatgaagagtatgcagcaattcacggattccctggccaaaatgaagcttccagccttggacatagacaacggtagcagcgggatgagcagtcccgcagcagccacacccagcgcagactccactggtgccgactcgaccgcggtgaagaagccgaccgccgccgggcagcaggagaagccctctcccaaggtgttctacggcagccgggcgttcttctgatctccggttcgctgatcagcggtagcacaccgctccagccgccgagtaacgaagcaaagagacggcatttgcagtcgtctcagctgaatcttactagcgcagaggaataacaccttctcaggctcttgttctaggtttgtcagatcggggatgagttactgtcttaatgtatccgtcagtacttatgaaaaatggtttggtttctctgttttagtaatgatatttagatccttttttctgtt

SEQ ID NO: 38242 - protein, 444 aa, Zea mays subsp. mays
  peptide (1)..(444): Ceres Seq. ID no. 12372990
  misc_feature (34)..(123): Pfam Name: Pfam Description:  C2 domain
  misc_feature (3)..(444): NCBI GI NO: 34901084 NR Description: contains ESTsAU183957
  misc_feature (31)..(187): NCBI GI NO: 18403117 NR Description: Expressed protein; protein id: At1g50570
  misc_feature (275)..(413): NCBI GI NO: 18403117 NR Description: Expressed protein; protein id: At1g50570
  misc_feature (31)..(187): NCBI GI NO: 21593485 NR Description: unknown [Arabidopsis thaliana]
  misc_feature (275)..(413): NCBI GI NO: 21593485 NR Description: unknown [Arabidopsis thaliana]
  misc_feature (31)..(187): NCBI GI NO: 25405379 NR Description: unknown protein [imported] - Arabidopsis thaliana
  misc_feature (275)..(413): NCBI GI NO: 25405379 NR Description: unknown protein [imported] - Arabidopsis thaliana
  misc_feature (31)..(309): NCBI GI NO: 24414275 NR Description: Unknown protein
  misc_feature (26)..(333): NCBI GI NO: 28393796 NR Description: unknown protein [Arabidopsis thaliana]
  misc_feature (26)..(333): NCBI GI NO: 9758185 NR Description: gene_id:MTE17
MEQPQQHKGGAVPAPAAAAANGAGAGAAELIGYVDVHVRSARDIQNICIYHKQDVYARLSLPGDGAPAASTQVVNGGGRNPVFDQSLRLGVRAGDVDAALRCEVWMLSRVKNYLQDQLLGFALVPLPEVVAADGGTLARDFPLTTSDLFQTPSGFLQLELSYIGVVPEVVPISPTPKPALADPDEEEPGNNAADGVGNGKEYEKIEFPDLNLVEENQIMVSEYTRLPCAAVETQSCDSLLTSEHDDGATALSRDAAVRLVESFSTDNSTADSVGAFQSDTPVSSVSTTEFPATPQSNSSSEPSGNAHSSAYHKAKAASETADAEVDSSRTVQEVAAANSPCAASEAAVHKPVISVNIEQEVKVDGNQIMDMYMKSMQQFTDSLAKMKLPALDIDNGSSGMSSPAAATPSADSTGADSTAVKKPTAAGQQEKPSPKVFYGSRAFF

SEQ ID NO: 38243 - protein, 339 aa, Zea mays subsp. mays
  peptide (1)..(339): Ceres Seq. ID no. 12372991
  misc_feature (1)..(339): NCBI GI NO: 34901084 NR Description: contains ESTsAU183957
  misc_feature (1)..(82): NCBI GI NO: 18403117 NR Description: Expressed protein; protein id: At1g50570
  misc_feature (170)..(308): NCBI GI NO: 18403117 NR Description: Expressed protein; protein id: At1g50570
  misc_feature (1)..(82): NCBI GI NO: 21593485 NR Description: unknown [Arabidopsis thaliana]
  misc_feature (170)..(308): NCBI GI NO: 21593485 NR Description: unknown [Arabidopsis thaliana]
  misc_feature (1)..(82): NCBI GI NO: 25405379 NR Description: unknown protein [imported] - Arabidopsis thaliana
  misc_feature (170)..(308): NCBI GI NO: 25405379 NR Description: unknown protein [imported] - Arabidopsis thaliana
  misc_feature (1)..(204): NCBI GI NO: 24414275 NR Description: Unknown protein
  misc_feature (1)..(228): NCBI GI NO: 28393796 NR Description: unknown protein [Arabidopsis thaliana]
  misc_feature (1)..(228): NCBI GI NO: 9758185 NR Description: gene_id:MTE17
MLSRVKNYLQDQLLGFALVPLPEVVAADGGTLARDFPLTTSDLFQTPSGFLQLELSYIGVVPEVVPISPTPKPALADPDEEEPGNNAADGVGNGKEYEKIEFPDLNLVEENQIMVSEYTRLPCAAVETQSCDSLLTSEHDDGATALSRDAAVRLVESFSTDNSTADSVGAFQSDTPVSSVSTTEFPATPQSNSSSEPSGNAHSSAYHKAKAASETADAEVDSSRTVQEVAAANSPCAASEAAVHKPVISVNIEQEVKVDGNQIMDMYMKSMQQFTDSLAKMKLPALDIDNGSSGMSSPAAATPSADSTGADSTAVKKPTAAGQQEKPSPKVFYGSRAFF

SEQ ID NO: 38244 - protein, 226 aa, Zea mays subsp. mays
  peptide (1)..(226): Ceres Seq. ID no. 12372992
  misc_feature (1)..(226): NCBI GI NO: 34901084 NR Description: contains ESTsAU183957
  misc_feature (57)..(195): NCBI GI NO: 18403117 NR Description: Expressed protein; protein id: At1g50570
  misc_feature (57)..(195): NCBI GI NO: 21593485 NR Description: unknown [Arabidopsis thaliana]
  misc_feature (57)..(195): NCBI GI NO: 25405379 NR Description: unknown protein [imported] - Arabidopsis thaliana
  misc_feature (1)..(91): NCBI GI NO: 24414275 NR Description: Unknown protein
  misc_feature (1)..(115): NCBI GI NO: 28393796 NR Description: unknown protein [Arabidopsis thaliana]
  misc_feature (1)..(115): NCBI GI NO: 9758185 NR Description: gene_id:MTE17
  misc_feature (1)..(115): NCBI GI NO: 30696612 NR Description: C2 domain-containing protein
  misc_feature (88)..(226): NCBI GI NO: 18416832 NR Description: putative protein; protein id: At5g12300.1
  misc_feature (1)..(115): NCBI GI NO: 34906644 NR Description: P0431G06.18
MVSEYTRLPCAAVETQSCDSLLTSEHDDGATALSRDAAVRLVESFSTDNSTADSVGAFQSDTPVSSVSTTEFPATPQSNSSSEPSGNAHSSAYHKAKAASETADAEVDSSRTVQEVAAANSPCAASEAAVHKPVISVNIEQEVKVDGNQIMDMYMKSMQQFTDSLAKMKLPALDIDNGSSGMSSPAAATPSADSTGADSTAVKKPTAAGQQEKPSPKVFYGSRAFF

SEQ ID NO: 38245 - DNA, 1157 bp, Zea mays subsp. mays
  misc_feature (1)..(1157): Ceres Seq. ID no. 12353179
ctctctctagtccagatttccagcggtccagaccgagagctcggctccctacacgacatcatcatggacgccgccccgctcctcgctctcctcctcgcggccgtgtccctctccgcggcggcggcgggcgacggcgcgcacccgggctactccgacgagggcacctgcacggtggacgccgccggagcgggcgtgggctcgggcccggagctgcggcgcctggaggagcgccggcccgggcgcatcatcgacatcacgcacgcgtacgtgccggaccttctggcgttcgcgccgggggctgtcacggggcccttggtccacctcaaggagtccatggcgaacgggtccgagtacaacctgtcggagctgcggttggagtgccacatgggcacccacgtcgacgcgccaggccacatgaaccaaggccacttcgccgccggcctcgacgtggacacgctcgacctcgacgtcctcaactgacctgcgttgctggttgatgttccgagggacacaaatataacagctgaagcgatggaattcctgaatatccctagaggagttcgccgagttctattcaggacgctgaacactgacaggaagttgatgtggaggaagggaggtgacatgagctatgttgggtttacagaggatggcgcacagtggctagttgacaacactgacataaagctagtcggaatcgacagtctatcggttgcagcatttgagcacttgatctctgcccatgtggtcttcttcaagaccccggatataatccctgtcgaaggcctgaagctagacaacattgagacgggaatatacatgctgcattgtttacctctcagactggttggagccgagggtgcaccgaccagatgcatcctcatcaagtgatcacccccctgctcttgctggaggtgacattgtatcatgccagctgagctgatgcttcatcgtggccaacgcattgattcgcagtcttcgtcttcgtctatatgaaacatagtgttgtatgcccatgtagatatgcttgtacggacaatagagacacagcaatacttccatcaaggaaatacttttgggtaagccggtaatgtaaaagacagacatacagttgactgaataaactagaggcctgagaggctgaggcctcgtgcttc

SEQ ID NO: 38246 - protein, 164 aa, Zea mays subsp. mays
  peptide (1)..(164): Ceres Seq. ID no. 12353180
LSSPDFQRSRPRARLPTRHHHGRRPAPRSPPRGRVPLRGGGGRRRAPGLLRRGHLHGGRRRSGRGLGPGAAAPGGAPARAHHRHHARVRAGPSGVRAGGCHGALGPPQGVHGERVRVQPVGAAVGVPHGHPRRRARPHEPRPLRRRPRRGHARPRRPQLTCVAG

SEQ ID NO: 38247 - protein, 159 aa, Zea mays subsp. mays
  peptide (1)..(159): Ceres Seq. ID no. 12353181
  misc_feature (82)..(159): Pfam Name: Pfam Description:  Putative cyclase
  misc_feature (25)..(159): NCBI GI NO: 35215089 NR Description: hypothetical protein
  misc_feature (24)..(159): NCBI GI NO: 18418598 NR Description: putative protein; protein id: At4g35220
  misc_feature (69)..(159): NCBI GI NO: 18418393 NR Description: putative protein; protein id: At4g34180
  misc_feature (81)..(159): NCBI GI NO: 15219416 NR Description: hypothetical protein; protein id: At1g44542.1
  misc_feature (69)..(159): NCBI GI NO: 7486287 NR Description: hypothetical protein F28A23
  misc_feature (81)..(159): NCBI GI NO: 23016903 NR Description: hypothetical protein
  misc_feature (81)..(159): NCBI GI NO: 39998438 NR Description: cyclase, putative [Geobacter sulfurreducens PCA]
  misc_feature (82)..(159): NCBI GI NO: 16330650 NR Description: hypothetical protein [Synechocystis sp. PCC 6803]
  misc_feature (82)..(159): NCBI GI NO: 23056289 NR Description: hypothetical protein [Geobacter metallireducens]
  misc_feature (24)..(159): NCBI GI NO: 7486023 NR Description: hypothetical protein F23E12
LSLVQISSGPDRELGSLHDIIMDAAPLLALLLAAVSLSAAAAGDGAHPGYSDEGTCTVDAAGAGVGSGPELRRLEERRPGRIIDITHAYVPDLLAFAPGAVTGPLVHLKESMANGSEYNLSELRLECHMGTHVDAPGHMNQGHFAAGLDVDTLDLDVLN

SEQ ID NO: 38248 - protein, 138 aa, Zea mays subsp. mays
  peptide (1)..(138): Ceres Seq. ID no. 12353182
  misc_feature (61)..(138): Pfam Name: Pfam Description:  Putative cyclase
  misc_feature (4)..(138): NCBI GI NO: 35215089 NR Description: hypothetical protein
  misc_feature (3)..(138): NCBI GI NO: 18418598 NR Description: putative protein; protein id: At4g35220
  misc_feature (48)..(138): NCBI GI NO: 18418393 NR Description: putative protein; protein id: At4g34180
  misc_feature (60)..(138): NCBI GI NO: 15219416 NR Description: hypothetical protein; protein id: At1g44542.1
  misc_feature (48)..(138): NCBI GI NO: 7486287 NR Description: hypothetical protein F28A23
  misc_feature (60)..(138): NCBI GI NO: 23016903 NR Description: hypothetical protein
  misc_feature (60)..(138): NCBI GI NO: 39998438 NR Description: cyclase, putative [Geobacter sulfurreducens PCA]
  misc_feature (61)..(138): NCBI GI NO: 16330650 NR Description: hypothetical protein [Synechocystis sp. PCC 6803]
  misc_feature (61)..(138): NCBI GI NO: 23056289 NR Description: hypothetical protein [Geobacter metallireducens]
  misc_feature (3)..(138): NCBI GI NO: 7486023 NR Description: hypothetical protein F23E12
MDAAPLLALLLAAVSLSAAAAGDGAHPGYSDEGTCTVDAAGAGVGSGPELRRLEERRPGRIIDITHAYVPDLLAFAPGAVTGPLVHLKESMANGSEYNLSELRLECHMGTHVDAPGHMNQGHFAAGLDVDTLDLDVLN

SEQ ID NO: 38249 - DNA, 1522 bp, Zea mays subsp. mays
  misc_feature (1)..(1522): Ceres Seq. ID no. 12372985
aacacctttcatcacaaccacaaagacagccagccagccagccatcattgatcatagcatcagcagcttagtataccgtaccgctccacatccgagtgctagaagatcagaagaagcccggcccggccagtacctatagctgcctagcggccggcgcgaacgaagcagagatatggcgagagcgctgccgctggtgctcgcggcgtccgtcctgctggcggccgcgctgctgctgctggccttcgcgccggcgccggccgccgcggtcgacttcggcgcggaggacctggcgtcggaggaggcgctgtgggcgctgtacgagcgctggcgcggccgccacgcgctggcgcgggacctgggcgacaaggcgcgccgcttcaacgtcttcaaggccaacgtgcgcctcatccacgagttcaaccgccgggacgagccctacaagctccgcctcaaccgcttcggcgacatgaccgccgacgagttccgacgccactacgcgggctccagggtcgcgcaccatcgcatgttccgcggcgacaggcagggctcctcggcgtcggcgtcgttcatgtacgccgacgcgcgcgatgtcccggcctccgtcgactggaggcagaagggcgctgtcaccgacgtcaaggaccagggccagtgcggtagctgctgggcgttctcgacgatcgccgccgtggagggcatcaacgcgatcaagaccaagaacctgacgtcgctgtcggagcagcagctggtggactgcgacaccaaggccaacgccggctgcaacgggggcctcatggactacgcgttccagtacatcgccaagcacggcggggtggcggcggaggacgcgtacccgtacagagcgcgccaggcgtcctgcaagaagtcgccggccccggtcgtcaccatcgacggctacgaggacgtgccggccaacgacgagtcggcgctcaagaaggcggtggcgcaccagcccgtgtccgtcgccatcgaggccagcggctcgcacttccagttctactccgagggggtgttctccggcaggtgcgggacggagctggaccacggcgtcacggcggtcggctacggggtcaccgcggacggcaccaagtactggctggtcaagaactcgtggggccccgagtggggcgagaaggggtacatccgcatggcgcgcgacgtggccgccaaggagggacactgcggcatcgccatggaggcatcctaccccgtcaagacctcgcccaaccccaaggtccacgccgtcgtcgacgaggacggctccagccacgacgagctctgaattgcgcactacactactacgtactagctatagcctatatagctatactatgattgatccatgtatgctcggacaggaacatcgccgactgtgaatgtctgaatggcatacgcacatcgtacacctgcattcatgtaataccagtcgagagttgatctaccagcaactttcatttcattcggttattattatattatttaactactgcttcctccgtcc

SEQ ID NO: 38250 - protein, 376 aa, Zea mays subsp. mays
  peptide (1)..(376): Ceres Seq. ID no. 12372986
  misc_feature (140)..(354): Pfam Name: Pfam Description:  Papain family cysteine protease
  misc_feature (9)..(361): NCBI GI NO: 40806500 NR Description: putative cysteine protease 2 [Iris hollandica]
  misc_feature (15)..(368): NCBI GI NO: 4731374 NR Description: papain-like cysteine protease
  misc_feature (9)..(368): NCBI GI NO: 1169186 NR Description: Thiol protease SEN102 precursor
  misc_feature (13)..(376): NCBI GI NO: 7435798 NR Description: probable cysteine proteinase (EC 3
  misc_feature (12)..(368): NCBI GI NO: 537437 NR Description: cysteine proteinase [Hemerocallis hybrid cultivar]
  misc_feature (15)..(368): NCBI GI NO: 1173630 NR Description: cysteine proteinase
  misc_feature (13)..(360): NCBI GI NO: 18423124 NR Description: cysteine proteinase; protein id: At5g50260
  misc_feature (13)..(359): NCBI GI NO: 7435817 NR Description: cysteine endopeptidase (EC 3
  misc_feature (13)..(376): NCBI GI NO: 7435797 NR Description: cysteine proteinase (EC 3.4.22.-) - barley
  misc_feature (13)..(376): NCBI GI NO: 4100157 NR Description: cysteine proteinase precursor [Hordeum vulgare]
MARALPLVLAASVLLAAALLLLAFAPAPAAAVDFGAEDLASEEALWALYERWRGRHALARDLGDKARRFNVFKANVRLIHEFNRRDEPYKLRLNRFGDMTADEFRRHYAGSRVAHHRMFRGDRQGSSASASFMYADARDVPASVDWRQKGAVTDVKDQGQCGSCWAFSTIAAVEGINAIKTKNLTSLSEQQLVDCDTKANAGCNGGLMDYAFQYIAKHGGVAAEDAYPYRARQASCKKSPAPVVTIDGYEDVPANDESALKKAVAHQPVSVAIEASGSHFQFYSEGVFSGRCGTELDHGVTAVGYGVTADGTKYWLVKNSWGPEWGEKGYIRMARDVAAKEGHCGIAMEASYPVKTSPNPKVHAVVDEDGSSHDEL

SEQ ID NO: 38251 - protein, 278 aa, Zea mays subsp. mays
  peptide (1)..(278): Ceres Seq. ID no. 12372987
  misc_feature (42)..(256): Pfam Name: Pfam Description:  Papain family cysteine protease
  misc_feature (1)..(263): NCBI GI NO: 40806500 NR Description: putative cysteine protease 2 [Iris hollandica]
  misc_feature (1)..(270): NCBI GI NO: 4731374 NR Description: papain-like cysteine protease
  misc_feature (1)..(270): NCBI GI NO: 1169186 NR Description: Thiol protease SEN102 precursor
  misc_feature (1)..(278): NCBI GI NO: 7435798 NR Description: probable cysteine proteinase (EC 3
  misc_feature (1)..(270): NCBI GI NO: 537437 NR Description: cysteine proteinase [Hemerocallis hybrid cultivar]
  misc_feature (1)..(270): NCBI GI NO: 1173630 NR Description: cysteine proteinase
  misc_feature (1)..(262): NCBI GI NO: 18423124 NR Description: cysteine proteinase; protein id: At5g50260
  misc_feature (1)..(261): NCBI GI NO: 7435817 NR Description: cysteine endopeptidase (EC 3
  misc_feature (1)..(278): NCBI GI NO: 7435797 NR Description: cysteine proteinase (EC 3.4.22.-) - barley
  misc_feature (1)..(278): NCBI GI NO: 4100157 NR Description: cysteine proteinase precursor [Hordeum vulgare]
MTADEFRRHYAGSRVAHHRMFRGDRQGSSASASFMYADARDVPASVDWRQKGAVTDVKDQGQCGSCWAFSTIAAVEGINAIKTKNLTSLSEQQLVDCDTKANAGCNGGLMDYAFQYIAKHGGVAAEDAYPYRARQASCKKSPAPVVTIDGYEDVPANDESALKKAVAHQPVSVAIEASGSHFQFYSEGVFSGRCGTELDHGVTAVGYGVTADGTKYWLVKNSWGPEWGEKGYIRMARDVAAKEGHCGIAMEASYPVKTSPNPKVHAVVDEDGSSHDEL

SEQ ID NO: 38252 - protein, 259 aa, Zea mays subsp. mays
  peptide (1)..(259): Ceres Seq. ID no. 12372988
  misc_feature (23)..(237): Pfam Name: Pfam Description:  Papain family cysteine protease
  misc_feature (1)..(244): NCBI GI NO: 40806500 NR Description: putative cysteine protease 2 [Iris hollandica]
  misc_feature (1)..(251): NCBI GI NO: 4731374 NR Description: papain-like cysteine protease
  misc_feature (1)..(251): NCBI GI NO: 1169186 NR Description: Thiol protease SEN102 precursor
  misc_feature (1)..(259): NCBI GI NO: 7435798 NR Description: probable cysteine proteinase (EC 3
  misc_feature (1)..(251): NCBI GI NO: 537437 NR Description: cysteine proteinase [Hemerocallis hybrid cultivar]
  misc_feature (1)..(251): NCBI GI NO: 1173630 NR Description: cysteine proteinase
  misc_feature (1)..(243): NCBI GI NO: 18423124 NR Description: cysteine proteinase; protein id: At5g50260
  misc_feature (1)..(242): NCBI GI NO: 7435817 NR Description: cysteine endopeptidase (EC 3
  misc_feature (1)..(259): NCBI GI NO: 7435797 NR Description: cysteine proteinase (EC 3.4.22.-) - barley
  misc_feature (1)..(259): NCBI GI NO: 4100157 NR Description: cysteine proteinase precursor [Hordeum vulgare]
MFRGDRQGSSASASFMYADARDVPASVDWRQKGAVTDVKDQGQCGSCWAFSTIAAVEGINAIKTKNLTSLSEQQLVDCDTKANAGCNGGLMDYAFQYIAKHGGVAAEDAYPYRARQASCKKSPAPVVTIDGYEDVPANDESALKKAVAHQPVSVAIEASGSHFQFYSEGVFSGRCGTELDHGVTAVGYGVTADGTKYWLVKNSWGPEWGEKGYIRMARDVAAKEGHCGIAMEASYPVKTSPNPKVHAVVDEDGSSHDEL

SEQ ID NO: 38253 - DNA, 1682 bp, Zea mays subsp. mays
  misc_feature (1)..(1682): Ceres Seq. ID no. 12352831
acaaacgccatcatcgcaccgactctgatccaatttcacacgcatactagcgccgccggtagcagcaccggcagccgcgttcccctccgccatggatcccgcgaacagcagcgcgggcgccgagctcgacgacgcgtccgagtggcgcacccgggcgctgggcggcacggagtacagctggctccgcgccgtgccgggcggcacgggcaccacgctgctcgcgctccgcctatcccacggcgacgcggccgaggcggcgctgcgctccctgcgggacgcgcaccccgtcctccgcgcccgcctccggacctcttctccctccggcccgacgctggcgttccccgatccggcaccgccgttcctgctggcgccgatcccggccccgggctccgcgcccgacttccacgcgctcctcgagcacgagctcaaccgcaacccgtgggccgacgaccccgcgtcctccgacgacgccccggtcctcttcgcgacgctctacgagctcccagccgccacgggcggcgcggcgctgttcgtccggatccacacggtcgcgtgcgaccgctcggcggcgagtgcgctggccagggagctcgtcgcgctgctggccggcgccggcggcgaggagcccgacccggaggatgcggcggcggaagcggggctggaggcgaggatccctcagagggacatctggaagccgttctgggcgcgcgggttggatatggtgggctactccatcaacggcctgcggacgtccacgctgccgttcgtggagaccggcacggagaggtccacgcagatgctgcggctcgggctcggcctcgacgagacgacgaggctgctcgacgcgtgcaaggagaatggggtgaggttgtgctccgccgtggccgccgcgacgatgctcgccgcgcggcagtcgaagccgatggagagcggccagcaggagacgtactctgtcgtgacccttatcaattgccgcaagtttcttgagccagtcttggaggaccgcaacgttgggttcttctactctgccatcaccaacacgcacacgatccacggcggggaagggctgtgggagctggccaagaggtgccaggactcgtacaccagcgccaagagcaacaagaaacacctcaccgacatcagcgacctcaacttcctcatgtgccgggccatcgagaacccccagctgacgaccgccggcgcgctccggacggcgctcgtctccgtgttcgaggaccccgtggtcgccgacgtggccgaggcgcagagcaaggccggcgtggaggactgcgtctgctgcgccaccgtgcacggcatcggcccgtcgatcggcgtgttcgactcgatcaaggacggcaagctggactgggcgtgcgtctacccttctcctctgcactccaggaagcaggtccaggagatattcgacaaggtgaagcagattttgcgccatgcggctgcggctgaggagaattttgaagactgcacctaagtacctaacgatgtcgtcgggagctttatggggcatctcggtagagctattgctccatttgtgtctttgtgaggcattcttttctcgtgagggttgtaatgtaagtatagtgaaccttgtgttagcctttttattctttcaattctcggcgcaatgaaaattttccggtgggaggctggtagctttatgatcc

SEQ ID NO: 38254 - protein, 465 aa, Zea mays subsp. mays
  peptide (1)..(465): Ceres Seq. ID no. 12352832
  misc_feature (54)..(465): NCBI GI NO: 34908510 NR Description: P0679C12.25
  misc_feature (107)..(457): NCBI GI NO: 11357759 NR Description: hypothetical protein F3C22
  misc_feature (107)..(457): NCBI GI NO: 18409645 NR Description: expressed protein; protein id: At3g52610
  misc_feature (20)..(117): NCBI GI NO: 11357759 NR Description: hypothetical protein F3C22
  misc_feature (20)..(117): NCBI GI NO: 18409645 NR Description: expressed protein; protein id: At3g52610
  misc_feature (98)..(457): NCBI GI NO: 14334448 NR Description: unknown protein [Arabidopsis thaliana]
  misc_feature (20)..(117): NCBI GI NO: 14334448 NR Description: unknown protein [Arabidopsis thaliana]
  misc_feature (1)..(124): NCBI GI NO: 34908510 NR Description: P0679C12.25
  misc_feature (107)..(227): NCBI GI NO: 7485998 NR Description: hypothetical protein F22O6
  misc_feature (20)..(117): NCBI GI NO: 7485998 NR Description: hypothetical protein F22O6
MDPANSSAGAELDDASEWRTRALGGTEYSWLRAVPGGTGTTLLALRLSHGDAAEAALRSLRDAHPVLRARLRTSSPSGPTLAFPDPAPPFLLAPIPAPGSAPDFHALLEHELNRNPWADDPASSDDAPVLFATLYELPAATGGAALFVRIHTVACDRSAASALARELVALLAGAGGEEPDPEDAAAEAGLEARIPQRDIWKPFWARGLDMVGYSINGLRTSTLPFVETGTERSTQMLRLGLGLDETTRLLDACKENGVRLCSAVAAATMLAARQSKPMESGQQETYSVVTLINCRKFLEPVLEDRNVGFFYSAITNTHTIHGGEGLWELAKRCQDSYTSAKSNKKHLTDISDLNFLMCRAIENPQLTTAGALRTALVSVFEDPVVADVAEAQSKAGVEDCVCCATVHGIGPSIGVFDSIKDGKLDWACVYPSPLHSRKQVQEIFDKVKQILRHAAAAEENFEDCT

SEQ ID NO: 38255 - protein, 328 aa, Zea mays subsp. mays
  peptide (1)..(328): Ceres Seq. ID no. 12352833
  misc_feature (26)..(328): NCBI GI NO: 23106420 NR Description: hypothetical protein [Azotobacter vinelandii]
  misc_feature (20)..(298): NCBI GI NO: 29247944 NR Description: GLP_26_54603_52153 [Giardia lamblia ATCC 50803]
  misc_feature (17)..(213): NCBI GI NO: 23018055 NR Description: hypothetical protein [Thermobifida fusca]
TNAIIAPTLIQFHTHTSAAGSSTGSRVPLRHGSREQQRGRRARRRVRVAHPGAGRHGVQLAPRRAGRHGHHAARAPPIPRRRGRGGAALPAGRAPRPPRPPPDLFSLRPDAGVPRSGTAVPAGADPGPGLRARLPRAPRARAQPQPVGRRPRVLRRRPGPLRDALRAPSRHGRRGAVRPDPHGRVRPLGGECAGQGARRAAGRRRRRGARPGGCGGGSGAGGEDPSEGHLEAVLGARVGYGGLLHQRPADVHAAVRGDRHGEVHADAAARARPRRDDEAARRVQGEWGEVVLRRGRRDDARRAAVEADGERPAGDVLCRDPYQLPQVS

SEQ ID NO: 38256 - protein, 256 aa, Zea mays subsp. mays
  peptide (1)..(256): Ceres Seq. ID no. 12352834
  misc_feature (1)..(256): NCBI GI NO: 34908510 NR Description: P0679C12.25
  misc_feature (1)..(248): NCBI GI NO: 11357759 NR Description: hypothetical protein F3C22
  misc_feature (1)..(248): NCBI GI NO: 18409645 NR Description: expressed protein; protein id: At3g52610
  misc_feature (1)..(248): NCBI GI NO: 14334448 NR Description: unknown protein [Arabidopsis thaliana]
  misc_feature (1)..(18): NCBI GI NO: 7485998 NR Description: hypothetical protein F22O6
MVGYSINGLRTSTLPFVETGTERSTQMLRLGLGLDETTRLLDACKENGVRLCSAVAAATMLAARQSKPMESGQQETYSVVTLINCRKFLEPVLEDRNVGFFYSAITNTHTIHGGEGLWELAKRCQDSYTSAKSNKKHLTDISDLNFLMCRAIENPQLTTAGALRTALVSVFEDPVVADVAEAQSKAGVEDCVCCATVHGIGPSIGVFDSIKDGKLDWACVYPSPLHSRKQVQEIFDKVKQILRHAAAAEENFEDCT

SEQ ID NO: 38257 - DNA, 1759 bp, Zea mays subsp. mays
  misc_feature (1)..(1759): Ceres Seq. ID no. 12407100
gccgagaagcttcggactagctagcaagctagctagctacctacccgtgctttggttcggttggttggcgccatagccattgccgaggagcgagggagcagccgggcgggcagtcaggaggcggcgagtaagcatgctgggagcgagccccaggggcaggaaggccgccgcgccgccggtgaagctggggtcggcgaaggaggcgccggcggccggtggaggagggagcggctgcaaggtgccggcggaggaggtgtgggaggtgcggcccggcgggatgctggtgcagaagaggggcggcggcgacgacgagccgtcgcccaacgtgaagcccgtgcccaccatccgggtcaaggtcaagcacgccggcgtcacgcacgagatgtacatcagttccgaggcctccttcggggagctgaagaagctggtggccgccaagacggggctgcaccccgacgaccagaaggtgctgtacaaggacagggagcgtgactccaaggcgttcctggacacggctggcgtcagagaccgctccaaggtggtggtgctggaggaccccgaggcccgcgcgcgccgactcatcggggagcgccgcagcggccacctccagaaggccgccagggccgtcgccgcggtcaccgccgaggtcgacaagctggcacccaaggtggcggcgctggacgcgtcggtgcgcaggggggagaaggtcgcggagaaggacgtggtgcaggtgacggagctgctaatgaacgagctgctcaggctcgacgccgtggtcgcggacggcgacgtcaaggcgcagaggcggatgcaggtgaagcgcgtccagaagtacgtggagacgctggacgcggtggcggccaagaacgccgccctcgtcggcaagtccggcgagaaggccgcggccaagccggcgccggcgccggccccggccccgccgccgcggcagcagggacaggggcagacgcggtgggagatgttcgacctgctgtcgtcgctgccgtccacgtcctcggcctcgtcaacgacgaccgtgagctccacggcgtcctccggcgcgccgccgccgaaccgcccggactggatgctcttctgacgagtggacggcggtcccgcaccggccggccaccggcgcaaaagcgaaaggcgagtgcttgatcgatgcgatgcgatgcttgtgtgccaagaattgcaccccaaatctggtagctcgtcgagtgtcctgatgaggccatgattgggcaggcggggggctatctagcttggccacacagctgcattgcgttgggctgcatggtacccgtaccagccaattcgagttcatcaatcatgtggtgtgagagtatttttcttcttcacctctcctttttctttctttccttttgagcttttttttccctcctcctcctcctcctcctcctcttcttcttgttcatggaaggtttgggattcttttggagtgcatactatactattcagatagagaaacagaaagatggagttggttagggcaagtgaaacgtcttcagatagggaaataaataaaactagtcggtgtccaaactctgaagaaacgaacaaagaggtgcatggattgttagcttatcacactgttgtttgagagtgatgagagatgtatcgatcaagaggccacttggtcggtagtctgtcactccttgttgctgccgagtttcttcctcctcatcatcatcctgtataatgtaatcaagcaataatacaaaataaaaaaagcgttttg

SEQ ID NO: 38258 - protein, 320 aa, Zea mays subsp. mays
  peptide (1)..(320): Ceres Seq. ID no. 12407101
  misc_feature (161)..(241): Pfam Name: Pfam Description:  BAG domain
  misc_feature (1)..(320): NCBI GI NO: 25553557 NR Description: OSJNBa0038F22.4
  misc_feature (10)..(320): NCBI GI NO: 34898024 NR Description: ESTs AU082174
  misc_feature (26)..(273): NCBI GI NO: 15242267 NR Description: putative protein; protein id: At5g52060.1
  misc_feature (16)..(320): NCBI GI NO: 15240726 NR Description: putative protein; protein id: At5g07220
  misc_feature (28)..(320): NCBI GI NO: 21537107 NR Description: unknown [Arabidopsis thaliana]
  misc_feature (43)..(294): NCBI GI NO: 30697630 NR Description: BAG domain containing protein
  misc_feature (42)..(284): NCBI GI NO: 38344334 NR Description: OSJNBa0058K23.16
  misc_feature (42)..(284): NCBI GI NO: 6624711 NR Description: hypothetical protein
  misc_feature (43)..(246): NCBI GI NO: 21553443 NR Description: unknown [Arabidopsis thaliana]
  misc_feature (43)..(246): NCBI GI NO: 30697627 NR Description: BAG domain containing protein
MLGASPRGRKAAAPPVKLGSAKEAPAAGGGGSGCKVPAEEVWEVRPGGMLVQKRGGGDDEPSPNVKPVPTIRVKVKHAGVTHEMYISSEASFGELKKLVAAKTGLHPDDQKVLYKDRERDSKAFLDTAGVRDRSKVVVLEDPEARARRLIGERRSGHLQKAARAVAAVTAEVDKLAPKVAALDASVRRGEKVAEKDVVQVTELLMNELLRLDAVVADGDVKAQRRMQVKRVQKYVETLDAVAAKNAALVGKSGEKAAAKPAPAPAPAPPPRQQGQGQTRWEMFDLLSSLPSTSSASSTTTVSSTASSGAPPPNRPDWMLF

SEQ ID NO: 38259 - protein, 272 aa, Zea mays subsp. mays
  peptide (1)..(272): Ceres Seq. ID no. 12407102
  misc_feature (113)..(193): Pfam Name: Pfam Description:  BAG domain
  misc_feature (1)..(272): NCBI GI NO: 25553557 NR Description: OSJNBa0038F22.4
  misc_feature (1)..(272): NCBI GI NO: 34898024 NR Description: ESTs AU082174
  misc_feature (1)..(225): NCBI GI NO: 15242267 NR Description: putative protein; protein id: At5g52060.1
  misc_feature (1)..(272): NCBI GI NO: 15240726 NR Description: putative protein; protein id: At5g07220
  misc_feature (1)..(272): NCBI GI NO: 21537107 NR Description: unknown [Arabidopsis thaliana]
  misc_feature (1)..(246): NCBI GI NO: 30697630 NR Description: BAG domain containing protein
  misc_feature (1)..(236): NCBI GI NO: 38344334 NR Description: OSJNBa0058K23.16
  misc_feature (1)..(236): NCBI GI NO: 6624711 NR Description: hypothetical protein
  misc_feature (1)..(198): NCBI GI NO: 21553443 NR Description: unknown [Arabidopsis thaliana]
  misc_feature (1)..(198): NCBI GI NO: 30697627 NR Description: BAG domain containing protein
MLVQKRGGGDDEPSPNVKPVPTIRVKVKHAGVTHEMYISSEASFGELKKLVAAKTGLHPDDQKVLYKDRERDSKAFLDTAGVRDRSKVVVLEDPEARARRLIGERRSGHLQKAARAVAAVTAEVDKLAPKVAALDASVRRGEKVAEKDVVQVTELLMNELLRLDAVVADGDVKAQRRMQVKRVQKYVETLDAVAAKNAALVGKSGEKAAAKPAPAPAPAPPPRQQGQGQTRWEMFDLLSSLPSTSSASSTTTVSSTASSGAPPPNRPDWMLF

SEQ ID NO: 38260 - protein, 237 aa, Zea mays subsp. mays
  peptide (1)..(237): Ceres Seq. ID no. 12407103
  misc_feature (78)..(158): Pfam Name: Pfam Description:  BAG domain
  misc_feature (1)..(237): NCBI GI NO: 25553557 NR Description: OSJNBa0038F22.4
  misc_feature (1)..(237): NCBI GI NO: 34898024 NR Description: ESTs AU082174
  misc_feature (1)..(190): NCBI GI NO: 15242267 NR Description: putative protein; protein id: At5g52060.1
  misc_feature (1)..(237): NCBI GI NO: 15240726 NR Description: putative protein; protein id: At5g07220
  misc_feature (1)..(237): NCBI GI NO: 21537107 NR Description: unknown [Arabidopsis thaliana]
  misc_feature (1)..(211): NCBI GI NO: 30697630 NR Description: BAG domain containing protein
  misc_feature (1)..(201): NCBI GI NO: 38344334 NR Description: OSJNBa0058K23.16
  misc_feature (1)..(201): NCBI GI NO: 6624711 NR Description: hypothetical protein
  misc_feature (1)..(163): NCBI GI NO: 21553443 NR Description: unknown [Arabidopsis thaliana]
  misc_feature (1)..(163): NCBI GI NO: 30697627 NR Description: BAG domain containing protein
MYISSEASFGELKKLVAAKTGLHPDDQKVLYKDRERDSKAFLDTAGVRDRSKVVVLEDPEARARRLIGERRSGHLQKAARAVAAVTAEVDKLAPKVAALDASVRRGEKVAEKDVVQVTELLMNELLRLDAVVADGDVKAQRRMQVKRVQKYVETLDAVAAKNAALVGKSGEKAAAKPAPAPAPAPPPRQQGQGQTRWEMFDLLSSLPSTSSASSTTTVSSTASSGAPPPNRPDWMLF

SEQ ID NO: 38261 - DNA, 1890 bp, Zea mays subsp. mays
  misc_feature (1)..(1890): Ceres Seq. ID no. 12352835
aattgctttataaataacataacatacaatataaaattgtatcgtctcctctccttcctgacattggcactggcagctgcactcaccggaagccatggaagacttgctctactactccctcaccatagccatctgcatcgcagtcatcgccctcctctccatccttcgttcgttcaccgctaccggaccgccgccggcgctcccgcccggcccgtcgctgctgtcgctgatcaccccgctcctcttcctcggccgaacgaacttcggcatcgagcggatcctctccgccgcgcggtcccgctacggccccgtcttcacgctctacctgctcccgtcccgcccggccatcttcatcgccgaccacgccgtggcgcaccgcgtgctggtgcagggcggcgccgccttcgccgacaggccgccggccagcctccccttccgcctcttctccagtgaccagcgcaacatcacatccggcgcctacggcccggtctggcgcgcgctccgtcacaacctcacgggcaacgtgttccacccgtcgcgcatgggccggttcgccgccgcccgccgccgcgcgctgcgggggctcgtcgccggcgtcgcgcgcgacgccggcagcggggccgtcgtcgtcgaggggctcctgcaccgggccatgttccacgtcctcgtcaccatgtgcttcggcgagggcctcgccaccgacgccgtcgtcgcgtccgtggaggcgctgcagcgggagttcctcacgtcggtgctcggctttcaagtgttcgacgtgtgccccgcgctcaccagcctcctgttccggcgccggtggaagcagatgctgtccctccgccgccggcaggaggagctcttcgcccctctcatacgggcgtgccgcgcgcaacgaggctccgacgccaacgccggcgcggacacgtacgtggacacgctgctcgacctccggatcccccgaggacggggggcaggaacctcacggagggcgagatggtgagcttgtgcgccgagttcgtggccgtcggcaccgacaacacggcgaccgaggcgcaatggatcatggccaacctcgtggcgcatccggagatccaagcaaggctccgggccgagatccaccaggtcaccggcggcgcgggcgtccaggagcaggacctgccgcggatgccgtaccttcgcgcagtggtcctggaggggctccgccgccacccgccgggccacttcgcgatcccgcacgccgcgaccggcatccaagacgacggcggcggcggcgaccacgcgaccatcgaaggcttccgcgtgccgcggcgcgcgtccctcaacttcacgctcgtcgcgctggggctcgacgaggcggtgtggcccgacccgctgcggttccggccggagcggttcctgccccggcggcgagggcgcggacgttgacctcaccggcgcgaaggaggtcaagatgataccgttcggcgccgggcggcggatctgccccgggatggcgctcgctctgctgcacctcgagttcttcgtggccagtctcgtcgccgagttcgagtggctccaggtccccggtgagccggtggagttcgccgagaagcaggagctgtccgtcgtgatgcgccggccgctccgtgccaccgtcgtccggtgcacaaggaacgccaactgaccacacgggttgtcgttgtcgaaccgaacgtctgcacttttctgctcttgtttgttgctgcatgcatgtgcttttctttcagtgaagttcagcgaatttcgtaaaaaattcgctaccaactttcctgtggacttgtggagtcatgttgttagcatgccctgctcttgttggctagaggctttcatgtatttgcactgcactgctctgattgtcctaaaagttataatatt

SEQ ID NO: 38262 - protein, 300 aa, Zea mays subsp. mays
  peptide (1)..(300): Ceres Seq. ID no. 12352836
  misc_feature (37)..(287): Pfam Name: Pfam Description:  Cytochrome P450
  misc_feature (1)..(293): NCBI GI NO: 28971944 NR Description: putative cytochrome P450
  misc_feature (9)..(287): NCBI GI NO: 15217771 NR Description: cytochrome p450, putative; protein id: At1g64900
  misc_feature (3)..(291): NCBI GI NO: 34895180 NR Description: putative cytochrome P450
  misc_feature (12)..(287): NCBI GI NO: 15224379 NR Description: cytochrome p450, putative; protein id: At2g12190.1
  misc_feature (36)..(287): NCBI GI NO: 15217800 NR Description: cytochrome p450, putative; protein id: At1g64940.1
  misc_feature (11)..(291): NCBI GI NO: 37536034 NR Description: putative cytochrome P450
  misc_feature (36)..(287): NCBI GI NO: 15217801 NR Description: cytochrome p450, putative; protein id: At1g64950
  misc_feature (36)..(287): NCBI GI NO: 15450601 NR Description: At1g64950/F13O11_25 [Arabidopsis thaliana]
  misc_feature (10)..(286): NCBI GI NO: 13661764 NR Description: putative cytochrome P450 [Lolium rigidum]
  misc_feature (23)..(287): NCBI GI NO: 1432145 NR Description: cytochrome P450 [Arabidopsis thaliana]
MEDLLYYSLTIAICIAVIALLSILRSFTATGPPPALPPGPSLLSLITPLLFLGRTNFGIERILSAARSRYGPVFTLYLLPSRPAIFIADHAVAHRVLVQGGAAFADRPPASLPFRLFSSDQRNITSGAYGPVWRALRHNLTGNVFHPSRMGRFAAARRRALRGLVAGVARDAGSGAVVVEGLLHRAMFHVLVTMCFGEGLATDAVVASVEALQREFLTSVLGFQVFDVCPALTSLLFRRRWKQMLSLRRRQEELFAPLIRACRAQRGSDANAGADTYVDTLLDLRIPRGRGAGTSRRARW

SEQ ID NO: 38263 - protein, 151 aa, Zea mays subsp. mays
  peptide (1)..(151): Ceres Seq. ID no. 12352837
  misc_feature (1)..(138): Pfam Name: Pfam Description:  Cytochrome P450
  misc_feature (1)..(144): NCBI GI NO: 28971944 NR Description: putative cytochrome P450
  misc_feature (1)..(138): NCBI GI NO: 15217771 NR Description: cytochrome p450, putative; protein id: At1g64900
  misc_feature (1)..(142): NCBI GI NO: 34895180 NR Description: putative cytochrome P450
  misc_feature (1)..(138): NCBI GI NO: 15224379 NR Description: cytochrome p450, putative; protein id: At2g12190.1
  misc_feature (1)..(138): NCBI GI NO: 15217800 NR Description: cytochrome p450, putative; protein id: At1g64940.1
  misc_feature (1)..(142): NCBI GI NO: 37536034 NR Description: putative cytochrome P450
  misc_feature (1)..(138): NCBI GI NO: 15217801 NR Description: cytochrome p450, putative; protein id: At1g64950
  misc_feature (1)..(138): NCBI GI NO: 15450601 NR Description: At1g64950/F13O11_25 [Arabidopsis thaliana]
  misc_feature (1)..(137): NCBI GI NO: 13661764 NR Description: putative cytochrome P450 [Lolium rigidum]
  misc_feature (1)..(138): NCBI GI NO: 1432145 NR Description: cytochrome P450 [Arabidopsis thaliana]
MGRFAAARRRALRGLVAGVARDAGSGAVVVEGLLHRAMFHVLVTMCFGEGLATDAVVASVEALQREFLTSVLGFQVFDVCPALTSLLFRRRWKQMLSLRRRQEELFAPLIRACRAQRGSDANAGADTYVDTLLDLRIPRGRGAGTSRRARW

SEQ ID NO: 38264 - protein, 150 aa, Zea mays subsp. mays
  peptide (1)..(150): Ceres Seq. ID no. 12352838
NCFINNITYNIKLYRLLSFLTLALAAALTGSHGRLALLLPHHSHLHRSHRPPLHPSFVHRYRTAAGAPARPVAAVADHPAPLPRPNELRHRADPLRRAVPLRPRLHALPAPVPPGHLHRRPRRGAPRAGAGRRRLRRQAAGQPPLPPLLQ

SEQ ID NO: 38265 - DNA, 1620 bp, Zea mays subsp. mays
  misc_feature (1)..(1620): Ceres Seq. ID no. 12363441
  misc_feature (181)..(181): n is a, c, t, g, unknown, or other
  misc_feature (193)..(193): n is a, c, t, g, unknown, or other
  misc_feature (212)..(212): n is a, c, t, g, unknown, or other
  misc_feature (213)..(213): n is a, c, t, g, unknown, or other
  misc_feature (202)..(202): n is a, c, t, g, unknown, or other
  misc_feature (211)..(211): n is a, c, t, g, unknown, or other
aacctgaggtggagagatcgcacgcgccctctgccgcttgttcgttcctcgcgctcgccaccaggcaccaccacacacatcccaatctcgcgagggcaagcagcagggtctgcggcggcggcggcggccgcgcttccggctccccttcccattggcctccacgatggcgctccgcctcaangacgtcgcgctntgcctctcnccgccgctnnncgcccgccgccgccgccgcagcagcggcaggttcgtcgccgtcgcctccatgacgtccgccgtctccaccaaggtcgagaataagaagccatttgctcctccaagggaggtacatgtccaggttacacattcaatgccacctcacaagattgaaattttcaagtcgcttgatgattgggctagagataatatcttgacgcatctcaagccagtcgagaagtgttggcagccacaggatttcctcccggacccagcatctgaaggatttcatgatgaagttaaggagctcagagaacgtgccaaggaaatccctgatgattattttgtttgtttggtgggagacatgattaccgaggaagctctaccaacataccagactatgcttaacaccctcgacggtgtcagagatgagacaggtgcaagccccactgcctgggctgtttggacgagggcatggactgctgaggagaacaggcatggtgatctgctcaacaagtatatgtacctcactgggagggtggatatgaggcagattgagaagacaattcagtatcttattggctctggaatggatcctaggactgagaataatccttatcttggtttcatctacacctccttccaagagcgggcgaccttcatctcacacgggaacactgctcgtcacgccaaggactttggcgacttaaagcttgcacaaatctgcggcatcatcgcctcagatgagaagcgacatgaaactgcgtacaccaagatcgtggagaagctgtttgagatcgaccctgatggtaccgtggtcgctctggctgacatgatgaggaagaagatctcaatgcctgcccacctgatgtttgacgggcaggacgacaagctgttcgagcacttctccatggtcgcgcagaggcttggcgtttacaccgccagggactacgccgacatcctcgagttcctcgtcgacaggtggaaggtggcgagcctgactggtctgtcgggtgaagggaacaaggcgcaggactacctttgcacccttgcttcaagaatcaggaggctggaggagagggcccagagcagagccaagaaagccggcacgctgcctttcagctgggtatacggtagggacgtccaactgtgagatcggaaacctgctgcggactgcttagacaagacctgctgtgtctgcgttacataggtctccaggttttgatcaaatggtcccgtgtcgtcttatagagcgataggagaacgtgttggtctgtggtgtagctttgtttttattttgtatttttctgctttgatgtacaacctgtggccgcatgaactggggcgtggagatgggagcgaccatgccgtactttgtctgtcgctggcggtgtgtttcggtatgttatttgagttgctcagatctgg

SEQ ID NO: 38266 - protein, 393 aa, Zea mays subsp. mays
  peptide (1)..(393): Ceres Seq. ID no. 12363442
  misc_feature (1)..(393): NCBI GI NO: 19386730 NR Description: putative stearoyl-acyl-carrier protein desaturase
  misc_feature (1)..(393): NCBI GI NO: 1785862 NR Description: stearoyl-Acyl-carrier protein desaturase
  misc_feature (1)..(393): NCBI GI NO: 3915024 NR Description: Acyl-
  misc_feature (1)..(393): NCBI GI NO: 951427 NR Description: stearoyl-acyl-carrier protein desaturase
  misc_feature (25)..(393): NCBI GI NO: 27804770 NR Description: putative stearoyl-acyl carrier protein desaturase
  misc_feature (1)..(393): NCBI GI NO: 134945 NR Description: Acyl-
  misc_feature (1)..(393): NCBI GI NO: 7433271 NR Description: acyl-
  misc_feature (14)..(393): NCBI GI NO: 512398 NR Description: Stearoyl-acyl carrier protein desaturase
  misc_feature (14)..(393): NCBI GI NO: 134943 NR Description: Acyl-
  misc_feature (1)..(393): NCBI GI NO: 134944 NR Description: Acyl-
  misc_feature (6)..(6): Xaa is any aa, unknown or other
  misc_feature (10)..(10): Xaa is any aa, unknown or other
  misc_feature (13)..(13): Xaa is any aa, unknown or other
  misc_feature (16)..(16): Xaa is any aa, unknown or other
  misc_feature (17)..(17): Xaa is any aa, unknown or other
MALRLXDVAXCLXPPXXARRRRRSSGRFVAVASMTSAVSTKVENKKPFAPPREVHVQVTHSMPPHKIEIFKSLDDWARDNILTHLKPVEKCWQPQDFLPDPASEGFHDEVKELRERAKEIPDDYFVCLVGDMITEEALPTYQTMLNTLDGVRDETGASPTAWAVWTRAWTAEENRHGDLLNKYMYLTGRVDMRQIEKTIQYLIGSGMDPRTENNPYLGFIYTSFQERATFISHGNTARHAKDFGDLKLAQICGIIASDEKRHETAYTKIVEKLFEIDPDGTVVALADMMRKKISMPAHLMFDGQDDKLFEHFSMVAQRLGVYTARDYADILEFLVDRWKVASLTGLSGEGNKAQDYLCTLASRIRRLEERAQSRAKKAGTLPFSWVYGRDVQL

SEQ ID NO: 38267 - protein, 360 aa, Zea mays subsp. mays
  peptide (1)..(360): Ceres Seq. ID no. 12363443
  misc_feature (1)..(360): NCBI GI NO: 19386730 NR Description: putative stearoyl-acyl-carrier protein desaturase
  misc_feature (1)..(360): NCBI GI NO: 1785862 NR Description: stearoyl-Acyl-carrier protein desaturase
  misc_feature (1)..(360): NCBI GI NO: 3915024 NR Description: Acyl-
  misc_feature (1)..(360): NCBI GI NO: 951427 NR Description: stearoyl-acyl-carrier protein desaturase
  misc_feature (1)..(360): NCBI GI NO: 27804770 NR Description: putative stearoyl-acyl carrier protein desaturase
  misc_feature (1)..(360): NCBI GI NO: 134945 NR Description: Acyl-
  misc_feature (1)..(360): NCBI GI NO: 7433271 NR Description: acyl-
  misc_feature (1)..(360): NCBI GI NO: 512398 NR Description: Stearoyl-acyl carrier protein desaturase
  misc_feature (1)..(360): NCBI GI NO: 134943 NR Description: Acyl-
  misc_feature (1)..(360): NCBI GI NO: 134944 NR Description: Acyl-
MTSAVSTKVENKKPFAPPREVHVQVTHSMPPHKIEIFKSLDDWARDNILTHLKPVEKCWQPQDFLPDPASEGFHDEVKELRERAKEIPDDYFVCLVGDMITEEALPTYQTMLNTLDGVRDETGASPTAWAVWTRAWTAEENRHGDLLNKYMYLTGRVDMRQIEKTIQYLIGSGMDPRTENNPYLGFIYTSFQERATFISHGNTARHAKDFGDLKLAQICGIIASDEKRHETAYTKIVEKLFEIDPDGTVVALADMMRKKISMPAHLMFDGQDDKLFEHFSMVAQRLGVYTARDYADILEFLVDRWKVASLTGLSGEGNKAQDYLCTLASRIRRLEERAQSRAKKAGTLPFSWVYGRDVQL

SEQ ID NO: 38268 - protein, 332 aa, Zea mays subsp. mays
  peptide (1)..(332): Ceres Seq. ID no. 12363444
  misc_feature (1)..(332): NCBI GI NO: 19386730 NR Description: putative stearoyl-acyl-carrier protein desaturase
  misc_feature (1)..(332): NCBI GI NO: 1785862 NR Description: stearoyl-Acyl-carrier protein desaturase
  misc_feature (1)..(332): NCBI GI NO: 3915024 NR Description: Acyl-
  misc_feature (1)..(332): NCBI GI NO: 951427 NR Description: stearoyl-acyl-carrier protein desaturase
  misc_feature (1)..(332): NCBI GI NO: 27804770 NR Description: putative stearoyl-acyl carrier protein desaturase
  misc_feature (1)..(332): NCBI GI NO: 134945 NR Description: Acyl-
  misc_feature (1)..(332): NCBI GI NO: 7433271 NR Description: acyl-
  misc_feature (1)..(332): NCBI GI NO: 512398 NR Description: Stearoyl-acyl carrier protein desaturase
  misc_feature (1)..(332): NCBI GI NO: 134943 NR Description: Acyl-
  misc_feature (1)..(332): NCBI GI NO: 134944 NR Description: Acyl-
MPPHKIEIFKSLDDWARDNILTHLKPVEKCWQPQDFLPDPASEGFHDEVKELRERAKEIPDDYFVCLVGDMITEEALPTYQTMLNTLDGVRDETGASPTAWAVWTRAWTAEENRHGDLLNKYMYLTGRVDMRQIEKTIQYLIGSGMDPRTENNPYLGFIYTSFQERATFISHGNTARHAKDFGDLKLAQICGIIASDEKRHETAYTKIVEKLFEIDPDGTVVALADMMRKKISMPAHLMFDGQDDKLFEHFSMVAQRLGVYTARDYADILEFLVDRWKVASLTGLSGEGNKAQDYLCTLASRIRRLEERAQSRAKKAGTLPFSWVYGRDVQL

SEQ ID NO: 38269 - DNA, 1097 bp, Zea mays subsp. mays
  misc_feature (1)..(1097): Ceres Seq. ID no. 12350672
cattgtgtaatcctcatcctccgtcgagatcaaggaagaaagaaagaaagaaagcaaccatggcggcaaccgcaatgtgcccctccccctcggccgcaataactcgccacatccatgctcgtcgctcctgtgctgctgcttccttgtccctccgccgctcgggcttcctggggcgcgtcgtgctggccgcggtgccggtggccgtggacgccacccggcgccgccgcgtctccgtgtcggtgcggatggcctgggacggtccgctctcgtcggtgcgcctcatcatgcagagcaggaacgcgaagctgagcgagaagctcaaggagcacatcgaggacaaggtgggtcgggcggtgtccaagcactgccacctggtccgggaggtagacgtgcgcctctccgcgcgcggcggcgagctcggccggggccccaagacgtcgcgctgcgagatcaccctcttcaccaagcgccatggcgtcctgcgcgccgaggaggacgccgagtccacctacgccagcatcgacctcgccgccgccatcgtcaagcgcaagctccgcaagatcaaggagaaggagacggaggtgcgccgcggcggagacgctgacggcgtctgggacgagatcccgccggccgacctgctgccccccgccgaggccgacgacctggaggcggccgtgggcgctgaggacgaggagacggtgctcgccaaggtggtgcgcaccaaggtgttcgagatgccgccgctcacggtggaggaggcgctggagcagctggagaacgtggaccacgacttctactgcttcagggacgaggccacggggcaggtgaacatcctctaccgcaggaaggaaggcggatacggcctcatcatccccaagaacgacggcaaagtggataccgttggcgttgtgccaccacccgccgtcgctgcggagccggagccggagccgtcctacgcagtgcacgccgctgacaacaacaactcctgaactgagcactcgtcgacgtctcatccaaccaaaaccaaaacgagagagaatgcttgcttggtactgtaaaaataaaacaaacgcagtcgtcgacgacgtctcatctgc

SEQ ID NO: 38270 - protein, 328 aa, Zea mays subsp. mays
  peptide (1)..(328): Ceres Seq. ID no. 12350673
  misc_feature (92)..(193): Pfam Name: Pfam Description:  Sigma 54 modulation protein / S30EA ribosomal protein
  misc_feature (18)..(295): NCBI GI NO: 30102988 NR Description: putative ribosomal protein
  misc_feature (18)..(319): NCBI GI NO: 134034 NR Description: Plastid-specific 30S ribosomal protein 1
  misc_feature (18)..(319): NCBI GI NO: 170131 NR Description: ribosomal protein 30S subunit
  misc_feature (75)..(304): NCBI GI NO: 18420800 NR Description: putative protein; protein id: At5g24490
  misc_feature (18)..(193): NCBI GI NO: 227070 NR Description: ribosomal protein CS-S5
  misc_feature (91)..(292): NCBI GI NO: 22298376 NR Description: ORF_ID:tlr0833~light repressed protein A homolog
  misc_feature (91)..(301): NCBI GI NO: 23041481 NR Description: hypothetical protein
  misc_feature (91)..(301): NCBI GI NO: 23125050 NR Description: hypothetical protein [Nostoc punctiforme]
  misc_feature (91)..(294): NCBI GI NO: 17230676 NR Description: light-repressed protein [Nostoc sp. PCC 7120]
  misc_feature (91)..(291): NCBI GI NO: 16331216 NR Description: light repressed protein
LCNPHPPSRSRKKERKKATMAATAMCPSPSAAITRHIHARRSCAAASLSLRRSGFLGRVVLAAVPVAVDATRRRRVSVSVRMAWDGPLSSVRLIMQSRNAKLSEKLKEHIEDKVGRAVSKHCHLVREVDVRLSARGGELGRGPKTSRCEITLFTKRHGVLRAEEDAESTYASIDLAAAIVKRKLRKIKEKETEVRRGGDADGVWDEIPPADLLPPAEADDLEAAVGAEDEETVLAKVVRTKVFEMPPLTVEEALEQLENVDHDFYCFRDEATGQVNILYRRKEGGYGLIIPKNDGKVDTVGVVPPPAVAAEPEPEPSYAVHAADNNNS

SEQ ID NO: 38271 - protein, 309 aa, Zea mays subsp. mays
  peptide (1)..(309): Ceres Seq. ID no. 12350674
  misc_feature (73)..(174): Pfam Name: Pfam Description:  Sigma 54 modulation protein / S30EA ribosomal protein
  misc_feature (1)..(276): NCBI GI NO: 30102988 NR Description: putative ribosomal protein
  misc_feature (1)..(300): NCBI GI NO: 134034 NR Description: Plastid-specific 30S ribosomal protein 1
  misc_feature (1)..(300): NCBI GI NO: 170131 NR Description: ribosomal protein 30S subunit
  misc_feature (56)..(285): NCBI GI NO: 18420800 NR Description: putative protein; protein id: At5g24490
  misc_feature (1)..(174): NCBI GI NO: 227070 NR Description: ribosomal protein CS-S5
  misc_feature (72)..(273): NCBI GI NO: 22298376 NR Description: ORF_ID:tlr0833~light repressed protein A homolog
  misc_feature (72)..(282): NCBI GI NO: 23041481 NR Description: hypothetical protein
  misc_feature (72)..(282): NCBI GI NO: 23125050 NR Description: hypothetical protein [Nostoc punctiforme]
  misc_feature (72)..(275): NCBI GI NO: 17230676 NR Description: light-repressed protein [Nostoc sp. PCC 7120]
  misc_feature (72)..(272): NCBI GI NO: 16331216 NR Description: light repressed protein
MAATAMCPSPSAAITRHIHARRSCAAASLSLRRSGFLGRVVLAAVPVAVDATRRRRVSVSVRMAWDGPLSSVRLIMQSRNAKLSEKLKEHIEDKVGRAVSKHCHLVREVDVRLSARGGELGRGPKTSRCEITLFTKRHGVLRAEEDAESTYASIDLAAAIVKRKLRKIKEKETEVRRGGDADGVWDEIPPADLLPPAEADDLEAAVGAEDEETVLAKVVRTKVFEMPPLTVEEALEQLENVDHDFYCFRDEATGQVNILYRRKEGGYGLIIPKNDGKVDTVGVVPPPAVAAEPEPEPSYAVHAADNNNS

SEQ ID NO: 38272 - protein, 304 aa, Zea mays subsp. mays
  peptide (1)..(304): Ceres Seq. ID no. 12350675
  misc_feature (68)..(169): Pfam Name: Pfam Description:  Sigma 54 modulation protein / S30EA ribosomal protein
  misc_feature (1)..(271): NCBI GI NO: 30102988 NR Description: putative ribosomal protein
  misc_feature (1)..(295): NCBI GI NO: 134034 NR Description: Plastid-specific 30S ribosomal protein 1
  misc_feature (1)..(295): NCBI GI NO: 170131 NR Description: ribosomal protein 30S subunit
  misc_feature (51)..(280): NCBI GI NO: 18420800 NR Description: putative protein; protein id: At5g24490
  misc_feature (1)..(169): NCBI GI NO: 227070 NR Description: ribosomal protein CS-S5
  misc_feature (67)..(268): NCBI GI NO: 22298376 NR Description: ORF_ID:tlr0833~light repressed protein A homolog
  misc_feature (67)..(277): NCBI GI NO: 23041481 NR Description: hypothetical protein
  misc_feature (67)..(277): NCBI GI NO: 23125050 NR Description: hypothetical protein [Nostoc punctiforme]
  misc_feature (67)..(270): NCBI GI NO: 17230676 NR Description: light-repressed protein [Nostoc sp. PCC 7120]
  misc_feature (67)..(267): NCBI GI NO: 16331216 NR Description: light repressed protein
MCPSPSAAITRHIHARRSCAAASLSLRRSGFLGRVVLAAVPVAVDATRRRRVSVSVRMAWDGPLSSVRLIMQSRNAKLSEKLKEHIEDKVGRAVSKHCHLVREVDVRLSARGGELGRGPKTSRCEITLFTKRHGVLRAEEDAESTYASIDLAAAIVKRKLRKIKEKETEVRRGGDADGVWDEIPPADLLPPAEADDLEAAVGAEDEETVLAKVVRTKVFEMPPLTVEEALEQLENVDHDFYCFRDEATGQVNILYRRKEGGYGLIIPKNDGKVDTVGVVPPPAVAAEPEPEPSYAVHAADNNNS

SEQ ID NO: 38273 - DNA, 874 bp, Zea mays subsp. mays
  misc_feature (1)..(874): Ceres Seq. ID no. 12355162
ccgtgaaaccaacgcccctctctccccgcgcacgagacccatcgcgaatggaagttgctcctgcggtgaagcaactcctccccatggcgcagggccccaactccccgtcctcctccaccacctcctcctcgccctcgccctcggccgccgcgccgtccccgccgccgcgccagcagcagtcgcagtcgcaggcgcccgtgccgcgcatcatcgacaccacgcccttccccaccaccttcgtgcaggccgacacggccagcttcaaggaggtcgtccagaggctcaccggctccgacacgccgccgcctgcccagaagcccgccaagacccacggccaccaccaccaccaccacggcggcggcggcgtcgggcccaagaagccggccttcaagctctacgagcgccggatcggcaagaacaacctcaagatgatcgcgccgctggcggggccgtcgccgcggaaggcggcgccggaggtgctgtcgcccagcgtgctcgacttcccttccctggcgctcggtagccccgtcacgccgctgctggccgaccccttcaaccggtcggcgtcggcgtccccgggcgagcaggacgaggccgcggcggccatcgcgcagaggggcttcttcctgcacccctcgccgaggggcgtcgagccgccgcggctgctgccgctgttccccgtcacgtcccccaagatggcgccgtggccgtcgcagcagtgatcgggggcgggcccccgctgccggagaattcctagtactgccgcttcagatactacttgtttaattaactccttggtgcgtcatgtatttttgctcatggtattcaactcttgagcgatcgcgaaggaacggaaagaaagatcacactcttg

SEQ ID NO: 38274 - protein, 239 aa, Zea mays subsp. mays
  peptide (1)..(239): Ceres Seq. ID no. 12355163
  misc_feature (20)..(238): NCBI GI NO: 34909488 NR Description: P0481E12.14
  misc_feature (38)..(141): NCBI GI NO: 15238851 NR Description: putative protein; protein id: At5g53830
  misc_feature (151)..(230): NCBI GI NO: 15238851 NR Description: putative protein; protein id: At5g53830
  misc_feature (55)..(237): NCBI GI NO: 15226165 NR Description: hypothetical protein; protein id: At2g33780.1
  misc_feature (55)..(237): NCBI GI NO: 21805688 NR Description: hypothetical protein [Arabidopsis thaliana]
  misc_feature (41)..(230): NCBI GI NO: 34903674 NR Description: B1015E06.22
  misc_feature (124)..(234): NCBI GI NO: 15232547 NR Description: unknown protein; protein id: At3g15300.1
VKPTPLSPRARDPSRMEVAPAVKQLLPMAQGPNSPSSSTTSSSPSPSAAAPSPPPRQQQSQSQAPVPRIIDTTPFPTTFVQADTASFKEVVQRLTGSDTPPPAQKPAKTHGHHHHHHGGGGVGPKKPAFKLYERRIGKNNLKMIAPLAGPSPRKAAPEVLSPSVLDFPSLALGSPVTPLLADPFNRSASASPGEQDEAAAAIAQRGFFLHPSPRGVEPPRLLPLFPVTSPKMAPWPSQQ

SEQ ID NO: 38275 - protein, 224 aa, Zea mays subsp. mays
  peptide (1)..(224): Ceres Seq. ID no. 12355164
  misc_feature (5)..(223): NCBI GI NO: 34909488 NR Description: P0481E12.14
  misc_feature (23)..(126): NCBI GI NO: 15238851 NR Description: putative protein; protein id: At5g53830
  misc_feature (136)..(215): NCBI GI NO: 15238851 NR Description: putative protein; protein id: At5g53830
  misc_feature (40)..(222): NCBI GI NO: 15226165 NR Description: hypothetical protein; protein id: At2g33780.1
  misc_feature (40)..(222): NCBI GI NO: 21805688 NR Description: hypothetical protein [Arabidopsis thaliana]
  misc_feature (26)..(215): NCBI GI NO: 34903674 NR Description: B1015E06.22
  misc_feature (109)..(219): NCBI GI NO: 15232547 NR Description: unknown protein; protein id: At3g15300.1
MEVAPAVKQLLPMAQGPNSPSSSTTSSSPSPSAAAPSPPPRQQQSQSQAPVPRIIDTTPFPTTFVQADTASFKEVVQRLTGSDTPPPAQKPAKTHGHHHHHHGGGGVGPKKPAFKLYERRIGKNNLKMIAPLAGPSPRKAAPEVLSPSVLDFPSLALGSPVTPLLADPFNRSASASPGEQDEAAAAIAQRGFFLHPSPRGVEPPRLLPLFPVTSPKMAPWPSQQ

SEQ ID NO: 38276 - protein, 212 aa, Zea mays subsp. mays
  peptide (1)..(212): Ceres Seq. ID no. 12355165
  misc_feature (1)..(211): NCBI GI NO: 34909488 NR Description: P0481E12.14
  misc_feature (11)..(114): NCBI GI NO: 15238851 NR Description: putative protein; protein id: At5g53830
  misc_feature (124)..(203): NCBI GI NO: 15238851 NR Description: putative protein; protein id: At5g53830
  misc_feature (28)..(210): NCBI GI NO: 15226165 NR Description: hypothetical protein; protein id: At2g33780.1
  misc_feature (28)..(210): NCBI GI NO: 21805688 NR Description: hypothetical protein [Arabidopsis thaliana]
  misc_feature (14)..(203): NCBI GI NO: 34903674 NR Description: B1015E06.22
  misc_feature (97)..(207): NCBI GI NO: 15232547 NR Description: unknown protein; protein id: At3g15300.1
MAQGPNSPSSSTTSSSPSPSAAAPSPPPRQQQSQSQAPVPRIIDTTPFPTTFVQADTASFKEVVQRLTGSDTPPPAQKPAKTHGHHHHHHGGGGVGPKKPAFKLYERRIGKNNLKMIAPLAGPSPRKAAPEVLSPSVLDFPSLALGSPVTPLLADPFNRSASASPGEQDEAAAAIAQRGFFLHPSPRGVEPPRLLPLFPVTSPKMAPWPSQQ

SEQ ID NO: 38277 - DNA, 864 bp, Zea mays subsp. mays
  misc_feature (1)..(864): Ceres Seq. ID no. 12362860
gcacgagaccattacctagaacatcctaatcgaaaaacctgcttattctggccttcgtctgacggacgcggcgctgcctcggccgccgctgccgcctccttctggccttcctccgacgccgcggagtcggaggcggcttcttgggcctgaaaggcctcgaggtccgcagccatggcgcgctcggcccggaggataggctcgtagtaggcggcgtgcgcgtccatgcacttccgcagcgcggccgtgacgtcttggcaccgctccacgacgtcaatgctggcatccgcggcatccgtctcctccacgcacttctcccacgcgacgaactcgtccttgcagccgccgcccttcatgaagagacagaacccgcactccccttgctcctcctcctcctccccctcccctgctccgctggccaccgcggaggcatcgatgaccaccgtctcagcagcctcttccgcgccgcctccaacagaaggagccgccgccgcatcgtctgcgccgccgccagctgcggcggtcgcggcgtcggaggcggagtgctggtgatcttctttggctggtgtagcggtggcctccggggaaggaggatcaggacgggaggcggctgtgtctagggaaagtgagggagaaggagaagcggcggttcccattgagctagggttcgggggctagcagatcgcggcggctgcgagactgtgatagggcgacgaacaaaagctagttatgatctgtaacgactaatgagtccgtcgataggggtgggcctaaacgtgtacaataccccatctattgaagaaacaaagcccaggccagcctagcccatatccattttgtaaaggtcattacgttctcatggaatgg

SEQ ID NO: 38278 - protein, 108 aa, Zea mays subsp. mays
  peptide (1)..(108): Ceres Seq. ID no. 12362861
  misc_feature (1)..(108): NCBI GI NO: 5420387 NR Description: proteophosphoglycan [Leishmania major]
  misc_feature (1)..(108): NCBI GI NO: 34809533 NR Description: Epa5p [Candida glabrata]
  misc_feature (1)..(108): NCBI GI NO: 15901602 NR Description: cell wall surface anchor family protein
  misc_feature (1)..(108): NCBI GI NO: 28828184 NR Description: similar to Leishmania major. Ppg3
  misc_feature (1)..(108): NCBI GI NO: 11359723 NR Description: proteophosphoglycan, membrane-associated
  misc_feature (1)..(108): NCBI GI NO: 15801378 NR Description: putative membrane protein of prophage CP-933X
  misc_feature (1)..(108): NCBI GI NO: 15830904 NR Description: putative tail fiber protein
MHFRSAAVTSWHRSTTSMLASAASVSSTHFSHATNSSLQPPPFMKRQNPHSPCSSSSSPSPAPLATAEASMTTVSAASSAPPPTEGAAAASSAPPPAAAVAASEAECW

SEQ ID NO: 38279 - protein, 91 aa, Zea mays subsp. mays
  peptide (1)..(91): Ceres Seq. ID no. 12362862
  misc_feature (1)..(91): NCBI GI NO: 5420387 NR Description: proteophosphoglycan [Leishmania major]
  misc_feature (1)..(91): NCBI GI NO: 34809533 NR Description: Epa5p [Candida glabrata]
  misc_feature (1)..(91): NCBI GI NO: 15901602 NR Description: cell wall surface anchor family protein
  misc_feature (1)..(91): NCBI GI NO: 28828184 NR Description: similar to Leishmania major. Ppg3
  misc_feature (1)..(91): NCBI GI NO: 11359723 NR Description: proteophosphoglycan, membrane-associated
  misc_feature (1)..(91): NCBI GI NO: 15801378 NR Description: putative membrane protein of prophage CP-933X
  misc_feature (1)..(91): NCBI GI NO: 15830904 NR Description: putative tail fiber protein
MLASAASVSSTHFSHATNSSLQPPPFMKRQNPHSPCSSSSSPSPAPLATAEASMTTVSAASSAPPPTEGAAAASSAPPPAAAVAASEAECW

SEQ ID NO: 38280 - protein, 65 aa, Zea mays subsp. mays
  peptide (1)..(65): Ceres Seq. ID no. 12362863
  misc_feature (1)..(65): NCBI GI NO: 5420387 NR Description: proteophosphoglycan [Leishmania major]
  misc_feature (1)..(65): NCBI GI NO: 34809533 NR Description: Epa5p [Candida glabrata]
  misc_feature (1)..(65): NCBI GI NO: 15901602 NR Description: cell wall surface anchor family protein
  misc_feature (1)..(65): NCBI GI NO: 28828184 NR Description: similar to Leishmania major. Ppg3
  misc_feature (1)..(65): NCBI GI NO: 11359723 NR Description: proteophosphoglycan, membrane-associated
  misc_feature (1)..(65): NCBI GI NO: 15801378 NR Description: putative membrane protein of prophage CP-933X
  misc_feature (1)..(65): NCBI GI NO: 15830904 NR Description: putative tail fiber protein
MKRQNPHSPCSSSSSPSPAPLATAEASMTTVSAASSAPPPTEGAAAASSAPPPAAAVAASEAECW

SEQ ID NO: 38281 - DNA, 1066 bp, Zea mays subsp. mays
  misc_feature (1)..(1066): Ceres Seq. ID no. 12382167
ggaccattacctagaacatcctaatcaaaaaattttgagtcgcttccgagcagacgtcctccttggataaggggataggcgcgaggaagagcggcctatccgcatccgcataaatcccagtcaaattgaacgagagcgccactcccctctgctaatcccagtcaaatcgaagcaagcatggccatggcggccgtgggcgtgggcggcgcagtggcgttcctcctcccgcagcgccgccagggcgccgtcccctggagcggcgggcggcggcgggcgcccgtggcggtgcgcgcgtcgtacgaggccggggtgggcgtgatggcgaccaaggtggggatgatgacctacttcgatccggagacggggaagccggtgccggtgaccgtggtcgggttccgggagggcggcaacgtggtgacgcaggtgaagacggccgccacggacgggtacgacgccgtccaggtcgggtaccacggcgtgcgcgaggacaagctcacccgcccggagctgggccacctgggcaaggccggcgccccgccgctgcgccacctgcaggagttccggctcaccgccgtcgacgccttcgagcccggccagcccctcgacttcgccgacctcttcaaggagggcgacctcatcgacgtctccggcaactccatcggcaaggggttccaaggtggcatcaagaggcacaacttcaagcgcgggctgatgacgcacggttccaagagccaccggcagctgggttccatcggagccgggacgacgccgggccgcgtgtacaaggggaagaagatgcccgggaggatgggaggaaccaagaccaagatcaggaagctcaagatcgtcaagatcgacaacaacctccgggtgctcatgatcaagggggccgtgccagggaagcccgggaacctcctccgcataacgccggccaagatcgtcggcaagaacatccccaagaactagacttcttttttcaggggggtgaatgttgagtgtttgtgtttgttaccctgctacaaactggatgtaatcctttgccaatttccagtttttgaacacatgc

SEQ ID NO: 38282 - protein, 262 aa, Zea mays subsp. mays
  peptide (1)..(262): Ceres Seq. ID no. 12382168
  misc_feature (51)..(249): Pfam Name: Pfam Description:  Ribosomal protein L3
  misc_feature (36)..(262): NCBI GI NO: 7440606 NR Description: ribosomal protein L3 precursor
  misc_feature (16)..(262): NCBI GI NO: 15224205 NR Description: 50S ribosomal protein L3; protein id: At2g43030
  misc_feature (16)..(262): NCBI GI NO: 21553426 NR Description: 50S ribosomal protein L3 [Arabidopsis thaliana]
  misc_feature (45)..(257): NCBI GI NO: 3122742 NR Description: 50S ribosomal protein L3
  misc_feature (45)..(257): NCBI GI NO: 22297625 NR Description: 50S ribosomal protein L3
  misc_feature (45)..(257): NCBI GI NO: 16329941 NR Description: 50S ribosomal protein L3
  misc_feature (45)..(257): NCBI GI NO: 17231707 NR Description: 50S ribosomal protein L3 [Nostoc sp. PCC 7120]
  misc_feature (45)..(256): NCBI GI NO: 23124126 NR Description: hypothetical protein [Nostoc punctiforme]
  misc_feature (45)..(257): NCBI GI NO: 37519654 NR Description: 50S ribosomal protein L3 [Gloeobacter violaceus]
  misc_feature (45)..(257): NCBI GI NO: 23042768 NR Description: hypothetical protein
MAMAAVGVGGAVAFLLPQRRQGAVPWSGGRRRAPVAVRASYEAGVGVMATKVGMMTYFDPETGKPVPVTVVGFREGGNVVTQVKTAATDGYDAVQVGYHGVREDKLTRPELGHLGKAGAPPLRHLQEFRLTAVDAFEPGQPLDFADLFKEGDLIDVSGNSIGKGFQGGIKRHNFKRGLMTHGSKSHRQLGSIGAGTTPGRVYKGKKMPGRMGGTKTKIRKLKIVKIDNNLRVLMIKGAVPGKPGNLLRITPAKIVGKNIPKN

SEQ ID NO: 38283 - protein, 260 aa, Zea mays subsp. mays
  peptide (1)..(260): Ceres Seq. ID no. 12382169
  misc_feature (49)..(247): Pfam Name: Pfam Description:  Ribosomal protein L3
  misc_feature (34)..(260): NCBI GI NO: 7440606 NR Description: ribosomal protein L3 precursor
  misc_feature (14)..(260): NCBI GI NO: 15224205 NR Description: 50S ribosomal protein L3; protein id: At2g43030
  misc_feature (14)..(260): NCBI GI NO: 21553426 NR Description: 50S ribosomal protein L3 [Arabidopsis thaliana]
  misc_feature (43)..(255): NCBI GI NO: 3122742 NR Description: 50S ribosomal protein L3
  misc_feature (43)..(255): NCBI GI NO: 22297625 NR Description: 50S ribosomal protein L3
  misc_feature (43)..(255): NCBI GI NO: 16329941 NR Description: 50S ribosomal protein L3
  misc_feature (43)..(255): NCBI GI NO: 17231707 NR Description: 50S ribosomal protein L3 [Nostoc sp. PCC 7120]
  misc_feature (43)..(254): NCBI GI NO: 23124126 NR Description: hypothetical protein [Nostoc punctiforme]
  misc_feature (43)..(255): NCBI GI NO: 37519654 NR Description: 50S ribosomal protein L3 [Gloeobacter violaceus]
  misc_feature (43)..(255): NCBI GI NO: 23042768 NR Description: hypothetical protein
MAAVGVGGAVAFLLPQRRQGAVPWSGGRRRAPVAVRASYEAGVGVMATKVGMMTYFDPETGKPVPVTVVGFREGGNVVTQVKTAATDGYDAVQVGYHGVREDKLTRPELGHLGKAGAPPLRHLQEFRLTAVDAFEPGQPLDFADLFKEGDLIDVSGNSIGKGFQGGIKRHNFKRGLMTHGSKSHRQLGSIGAGTTPGRVYKGKKMPGRMGGTKTKIRKLKIVKIDNNLRVLMIKGAVPGKPGNLLRITPAKIVGKNIPKN

SEQ ID NO: 38284 - protein, 215 aa, Zea mays subsp. mays
  peptide (1)..(215): Ceres Seq. ID no. 12382170
  misc_feature (4)..(202): Pfam Name: Pfam Description:  Ribosomal protein L3
  misc_feature (1)..(215): NCBI GI NO: 7440606 NR Description: ribosomal protein L3 precursor
  misc_feature (1)..(215): NCBI GI NO: 15224205 NR Description: 50S ribosomal protein L3; protein id: At2g43030
  misc_feature (1)..(215): NCBI GI NO: 21553426 NR Description: 50S ribosomal protein L3 [Arabidopsis thaliana]
  misc_feature (1)..(210): NCBI GI NO: 3122742 NR Description: 50S ribosomal protein L3
  misc_feature (1)..(210): NCBI GI NO: 22297625 NR Description: 50S ribosomal protein L3
  misc_feature (1)..(210): NCBI GI NO: 16329941 NR Description: 50S ribosomal protein L3
  misc_feature (1)..(210): NCBI GI NO: 17231707 NR Description: 50S ribosomal protein L3 [Nostoc sp. PCC 7120]
  misc_feature (1)..(209): NCBI GI NO: 23124126 NR Description: hypothetical protein [Nostoc punctiforme]
  misc_feature (1)..(210): NCBI GI NO: 37519654 NR Description: 50S ribosomal protein L3 [Gloeobacter violaceus]
  misc_feature (1)..(210): NCBI GI NO: 23042768 NR Description: hypothetical protein
MATKVGMMTYFDPETGKPVPVTVVGFREGGNVVTQVKTAATDGYDAVQVGYHGVREDKLTRPELGHLGKAGAPPLRHLQEFRLTAVDAFEPGQPLDFADLFKEGDLIDVSGNSIGKGFQGGIKRHNFKRGLMTHGSKSHRQLGSIGAGTTPGRVYKGKKMPGRMGGTKTKIRKLKIVKIDNNLRVLMIKGAVPGKPGNLLRITPAKIVGKNIPKN

SEQ ID NO: 38285 - DNA, 888 bp, Zea mays subsp. mays
  misc_feature (1)..(888): Ceres Seq. ID no. 12372263
ctcattcgcgcgaccatggacacggacacggacacgacgacgtccaccggctcccgcctccatcccgcggccggacatgtacgctcattggccgcccggggcgccgagagcctcgtcacctgcgtcttcgcgacggtgggcacggtcctcggcgcgatcaccggtggcctcatcggcctggccacggagacgggcgtgctgcgcggcacgggcgtcggcggcatcacgggcgcgctggtgtccatggaggtcgtcgagtcgctgtggcgctccgacgagccggcaatctggagcgtcgtctacgtgctcgatgtcatctggagcttgctcaccggccgccttgtgcgcgagaaggtggaccccgccgtgctcagcgccgtcgagagccagatgagcgcagcggacacaccggccttgcatgcagaccacgccgacatcttcgacacgggcggcaccaacggcatggcgagggtcgccatggacgcgctccccgtcgttaggttcaccgagcgcagcaacgtcgacgccagcggcgagctcatcgcctgttcggtttgcctccaggaattccaagccggcgacagcgcgaggagcctgccggtgtgccgccacacgttccacctgccgtgcatcgacggctggctgctccggcacgcctcctgccccttgtgccgccgcgctgtctaggccgcgcccgttcctctaccctcaaggatagccgccaccagagcttctctgacaagcgacacccgttccttcaggctgtagccgtacgcacactggcagcgtgatttttctgtagctcatcagatgattcagatgggcgttatgtaaacattggttaatttttaacaaatgcaagtggtgcacatggcgatggccccatcc

SEQ ID NO: 38286 - protein, 228 aa, Zea mays subsp. mays
  peptide (1)..(228): Ceres Seq. ID no. 12372264
  misc_feature (183)..(224): Pfam Name: RING finger Pfam Description: Zinc finger, C3HC4 type
  misc_feature (12)..(226): NCBI GI NO: 18855037 NR Description: putative zinc finger protein [Oryza sativa]
  misc_feature (31)..(228): NCBI GI NO: 37536572 NR Description: hypothetical protein
  misc_feature (27)..(228): NCBI GI NO: 26452210 NR Description: unknown protein [Arabidopsis thaliana]
  misc_feature (37)..(228): NCBI GI NO: 30680091 NR Description: expressed protein [Arabidopsis thaliana]
  misc_feature (27)..(226): NCBI GI NO: 15239242 NR Description: putative protein; protein id: At5g66070.1
  misc_feature (37)..(226): NCBI GI NO: 26451101 NR Description: unknown protein [Arabidopsis thaliana]
  misc_feature (37)..(223): NCBI GI NO: 25411815 NR Description: hypothetical protein At2g17730
  misc_feature (38)..(223): NCBI GI NO: 7485279 NR Description: hypothetical protein A_TM017A05
  misc_feature (37)..(226): NCBI GI NO: 27524902 NR Description: NEP1-interacting protein [Arabidopsis thaliana]
  misc_feature (46)..(228): NCBI GI NO: 34901682 NR Description: P0434A03.5
LIRATMDTDTDTTTSTGSRLHPAAGHVRSLAARGAESLVTCVFATVGTVLGAITGGLIGLATETGVLRGTGVGGITGALVSMEVVESLWRSDEPAIWSVVYVLDVIWSLLTGRLVREKVDPAVLSAVESQMSAADTPALHADHADIFDTGGTNGMARVAMDALPVVRFTERSNVDASGELIACSVCLQEFQAGDSARSLPVCRHTFHLPCIDGWLLRHASCPLCRRAV

SEQ ID NO: 38287 - protein, 223 aa, Zea mays subsp. mays
  peptide (1)..(223): Ceres Seq. ID no. 12372265
  misc_feature (178)..(219): Pfam Name: RING finger Pfam Description: Zinc finger, C3HC4 type
  misc_feature (7)..(221): NCBI GI NO: 18855037 NR Description: putative zinc finger protein [Oryza sativa]
  misc_feature (26)..(223): NCBI GI NO: 37536572 NR Description: hypothetical protein
  misc_feature (22)..(223): NCBI GI NO: 26452210 NR Description: unknown protein [Arabidopsis thaliana]
  misc_feature (32)..(223): NCBI GI NO: 30680091 NR Description: expressed protein [Arabidopsis thaliana]
  misc_feature (22)..(221): NCBI GI NO: 15239242 NR Description: putative protein; protein id: At5g66070.1
  misc_feature (32)..(221): NCBI GI NO: 26451101 NR Description: unknown protein [Arabidopsis thaliana]
  misc_feature (32)..(218): NCBI GI NO: 25411815 NR Description: hypothetical protein At2g17730
  misc_feature (33)..(218): NCBI GI NO: 7485279 NR Description: hypothetical protein A_TM017A05
  misc_feature (32)..(221): NCBI GI NO: 27524902 NR Description: NEP1-interacting protein [Arabidopsis thaliana]
  misc_feature (41)..(223): NCBI GI NO: 34901682 NR Description: P0434A03.5
MDTDTDTTTSTGSRLHPAAGHVRSLAARGAESLVTCVFATVGTVLGAITGGLIGLATETGVLRGTGVGGITGALVSMEVVESLWRSDEPAIWSVVYVLDVIWSLLTGRLVREKVDPAVLSAVESQMSAADTPALHADHADIFDTGGTNGMARVAMDALPVVRFTERSNVDASGELIACSVCLQEFQAGDSARSLPVCRHTFHLPCIDGWLLRHASCPLCRRAV

SEQ ID NO: 38288 - protein, 165 aa, Zea mays subsp. mays
  peptide (1)..(165): Ceres Seq. ID no. 12372266
HSRDHGHGHGHDDVHRLPPPSRGRTCTLIGRPGRREPRHLRLRDGGHGPRRDHRWPHRPGHGDGRAARHGRRRHHGRAGVHGGRRVAVALRRAGNLERRLRARCHLELAHRPPCAREGGPRRAQRRREPDERSGHTGLACRPRRHLRHGRHQRHGEGRHGRAPRR

SEQ ID NO: 38289 - DNA, 946 bp, Zea mays subsp. mays
  misc_feature (1)..(946): Ceres Seq. ID no. 12402770
  misc_feature (755)..(755): n is a, c, t, g, unknown, or other
  misc_feature (491)..(491): n is a, c, t, g, unknown, or other
  misc_feature (754)..(754): n is a, c, t, g, unknown, or other
  misc_feature (494)..(494): n is a, c, t, g, unknown, or other
  misc_feature (488)..(488): n is a, c, t, g, unknown, or other
  misc_feature (633)..(633): n is a, c, t, g, unknown, or other
  misc_feature (528)..(528): n is a, c, t, g, unknown, or other
acaagcacatagccttatctgctctctctctctctccccagtccccacccgacgcgacgactccagttccaatccgtgctccgctaggtcaatcgaagagtccaaagatcccagctttcccatcccatggcgggcggcgacctcacgcctcctcctcctcctcccgaagagacgccgccggcagcggcggccgaggacctgatcgagatcgtggaggaagggtcggggcggctggacatcgcgcggtacgtggaccacgtgcgcgacctgtcggcgggcgccatcgcgacgttcgagggcacgacgcgggaccacttcgcggggcggcgcgtggtggagctccggtacgaggcgtacgcggccatggcgcggcgccgcctggcggccatactgcgggaggcccggtcgcggcacgcgctgcggcggctggccgtggcgcaccgcctgggcgccgtccccgccggcgaggccagcgtgttcgtggccgnctncgncacgcaccgcgccgacgccatggaggcctgccgntacgtcatcgacgagctcaaggcgtccgtgcccatctggaagaaggaggtgtacgacgacggcgaggtctggaaggagaaccgcgagttcctggaccgccactcnccgacggcgatgcgacggcgggcgggtgctgcgggagcaaggtcagggtccaggaggcttgacgctgatggatggcggcgcccggatccctctgtcgctccatcgcgtcgcgactcgcganncattggagcagggggtttcatgaaattctatgtactacttactcgatctccgttgattttgttctccatcttctttctttctttctgagagagactgcagcttgtacttgcacttgcacaccatgaagatgaaaggcaaatagatgctctgataaaagtcataactcataatggaatagtagttcagtttt

SEQ ID NO: 38290 - protein, 238 aa, Zea mays subsp. mays
  peptide (1)..(238): Ceres Seq. ID no. 12402771
  misc_feature (27)..(144): Pfam Name: Pfam Description:  MoaE protein
  misc_feature (19)..(175): NCBI GI NO: 15224353 NR Description: putative molybdopterin synthase large subunit
  misc_feature (68)..(161): NCBI GI NO: 29243132 NR Description: putative molybdopterin synthase large subunit
  misc_feature (10)..(163): NCBI GI NO: 4758732 NR Description: molybdenum cofactor synthesis 2 large subunitMOSC2B
  misc_feature (12)..(163): NCBI GI NO: 27687539 NR Description: similar to Molybdenum cofactor synthesis protein 2large subunit
  misc_feature (23)..(163): NCBI GI NO: 12832907 NR Description: unnamed protein product [Mus musculus]
  misc_feature (23)..(163): NCBI GI NO: 19353410 NR Description: Similar to molybdenum cofactor synthesis 2
  misc_feature (36)..(163): NCBI GI NO: 21356259 NR Description: CG10238-PA [Drosophila melanogaster]
  misc_feature (26)..(155): NCBI GI NO: 13540918 NR Description: Molybdopterin converting factor, large subunit
  misc_feature (38)..(158): NCBI GI NO: 15615581 NR Description: molybdopterin converting factor (subunit 2)
  misc_feature (23)..(163): NCBI GI NO: 17509279 NR Description: MoaE protein [Caenorhabditis elegans]
  misc_feature (121)..(121): Xaa is any aa, unknown or other
  misc_feature (122)..(122): Xaa is any aa, unknown or other
  misc_feature (123)..(123): Xaa is any aa, unknown or other
  misc_feature (134)..(134): Xaa is any aa, unknown or other
  misc_feature (169)..(169): Xaa is any aa, unknown or other
  misc_feature (210)..(210): Xaa is any aa, unknown or other
MAGGDLTPPPPPPEETPPAAAAEDLIEIVEEGSGRLDIARYVDHVRDLSAGAIATFEGTTRDHFAGRRVVELRYEAYAAMARRRLAAILREARSRHALRRLAVAHRLGAVPAGEASVFVAXXXTHRADAMEACXYVIDELKASVPIWKKEVYDDGEVWKENREFLDRHXPTAMRRRAGAAGARSGSRRLDADGWRRPDPSVAPSRRDSRXIGAGGFMKFYVLLTRSPLILFSIFFLSF

SEQ ID NO: 38291 - protein, 230 aa, Zea mays subsp. mays
  peptide (1)..(230): Ceres Seq. ID no. 12402772
  misc_feature (44)..(209): NCBI GI NO: 22960369 NR Description: hypothetical protein [Rhodobacter sphaeroides]
  misc_feature (25)..(220): NCBI GI NO: 22957039 NR Description: hypothetical protein [Rhodobacter sphaeroides]
  misc_feature (25)..(223): NCBI GI NO: 25989121 NR Description: putative PHA synthase [Streptomyces aureofaciens]
  misc_feature (51)..(222): NCBI GI NO: 9453857 NR Description: EBNA-1 [Cynomolgus Epstein-Barr Virus TsB-B6]
  misc_feature (162)..(162): Xaa is any aa, unknown or other
  misc_feature (163)..(163): Xaa is any aa, unknown or other
  misc_feature (164)..(164): Xaa is any aa, unknown or other
  misc_feature (176)..(176): Xaa is any aa, unknown or other
  misc_feature (211)..(211): Xaa is any aa, unknown or other
KHIALSALSLSPQSPPDATTPVPIRAPLGQSKSPKIPAFPSHGGRRPHASSSSSRRDAAGSGGRGPDRDRGGRVGAAGHRAVRGPRARPVGGRHRDVRGHDAGPLRGAARGGAPVRGVRGHGAAPPGGHTAGGPVAARAAAAGRGAPPGRRPRRRGQRVRGXXXHAPRRRHGGLPXRHRRAQGVRAHLEEGGVRRRRGLEGEPRVPGPPLXDGDATAGGCCGSKVRVQEA

SEQ ID NO: 38292 - protein, 159 aa, Zea mays subsp. mays
  peptide (1)..(159): Ceres Seq. ID no. 12402773
  misc_feature (1)..(65): Pfam Name: Pfam Description:  MoaE protein
  misc_feature (1)..(96): NCBI GI NO: 15224353 NR Description: putative molybdopterin synthase large subunit
  misc_feature (1)..(82): NCBI GI NO: 29243132 NR Description: putative molybdopterin synthase large subunit
  misc_feature (1)..(84): NCBI GI NO: 4758732 NR Description: molybdenum cofactor synthesis 2 large subunitMOSC2B
  misc_feature (1)..(84): NCBI GI NO: 27687539 NR Description: similar to Molybdenum cofactor synthesis protein 2large subunit
  misc_feature (1)..(84): NCBI GI NO: 12832907 NR Description: unnamed protein product [Mus musculus]
  misc_feature (1)..(84): NCBI GI NO: 19353410 NR Description: Similar to molybdenum cofactor synthesis 2
  misc_feature (1)..(84): NCBI GI NO: 21356259 NR Description: CG10238-PA [Drosophila melanogaster]
  misc_feature (1)..(76): NCBI GI NO: 13540918 NR Description: Molybdopterin converting factor, large subunit
  misc_feature (1)..(79): NCBI GI NO: 15615581 NR Description: molybdopterin converting factor (subunit 2)
  misc_feature (1)..(84): NCBI GI NO: 17509279 NR Description: MoaE protein [Caenorhabditis elegans]
  misc_feature (42)..(42): Xaa is any aa, unknown or other
  misc_feature (43)..(43): Xaa is any aa, unknown or other
  misc_feature (44)..(44): Xaa is any aa, unknown or other
  misc_feature (55)..(55): Xaa is any aa, unknown or other
  misc_feature (90)..(90): Xaa is any aa, unknown or other
  misc_feature (131)..(131): Xaa is any aa, unknown or other
MARRRLAAILREARSRHALRRLAVAHRLGAVPAGEASVFVAXXXTHRADAMEACXYVIDELKASVPIWKKEVYDDGEVWKENREFLDRHXPTAMRRRAGAAGARSGSRRLDADGWRRPDPSVAPSRRDSRXIGAGGFMKFYVLLTRSPLILFSIFFLSF

SEQ ID NO: 38293 - DNA, 974 bp, Zea mays subsp. mays
  misc_feature (1)..(974): Ceres Seq. ID no. 12357407
accatttcgatacgcgcgagggaacggggccggccggccggccggggatcggaactgaagtgtgggcacacaagagtcacaacagggggagtgggggacattccaatcagttccctgcgtgtgagcgatgcagcgggacgcgagaagctggtcgccggcgccggccacggacgccgccggcccttacgcgatgccttcgcccgtgcagccgtcgaccaagagcacgaaggagacggtgaagaatgcgctgtcgcggtgggggcggaaggtcggggaggcgaccaggaaggccgaggacctgtcgcgcaacacatggcagcacttgaggacggcgccgagcatcgcggaggccgcggtggggaggatcgcgcaggggaccaaggtgctggcggagggcggccacgacaggatattccgccaggccttcagcgccccgcccgacgagcagctgcgcaagtcctacgcttgctacctctccacggccgccggcccggtgatgggcgtcctgtacctgtccacggccagggtcgccttctgcagcgacagcccgctgtcctacgaggcttccggcggcgacagaacggagtggacccactacaaggtggcgattcctctccaacggctgcgggcggcgagcccgtccgccaacaagacgaagcccgcggagaagttcgtccagctggtgtcggtggacagccaagagttctggttcatgggcttcgtcaactacgacggcgcggtggcgcacctgcaggaagcgctgagcgggttccgcaacctgcaggcgtgacatggaggacctcaataaaatgctcagtgttgtcttgtacgtgctcgccacaactgattgatctgcgtgtgttgccgtgctagtgtttgcatcgtgttttgcgtgtgcggatttgcatgtcattttttgatttggttgccattgtcagcgagagaacagtccaatcattttattcagatttcag

SEQ ID NO: 38294 - protein, 290 aa, Zea mays subsp. mays
  peptide (1)..(290): Ceres Seq. ID no. 12357408
TISIRARERGRPAGRGSELKCGHTRVTTGGVGDIPISSLRVSDAAGREKLVAGAGHGRRRPLRDAFARAAVDQEHEGDGEECAVAVGAEGRGGDQEGRGPVAQHMAALEDGAEHRGGRGGEDRAGDQGAGGGRPRQDIPPGLQRPARRAAAQVLRLLPLHGRRPGDGRPVPVHGQGRLLQRQPAVLRGFRRRQNGVDPLQGGDSSPTAAGGEPVRQQDEARGEVRPAGVGGQPRVLVHGLRQLRRRGGAPAGSAERVPQPAGVTWRTSIKCSVLSCTCSPQLIDLRVLPC

SEQ ID NO: 38295 - protein, 220 aa, Zea mays subsp. mays
  peptide (1)..(220): Ceres Seq. ID no. 12357409
  misc_feature (94)..(173): Pfam Name: Pfam Description:  GRAM domain
  misc_feature (11)..(212): NCBI GI NO: 18399985 NR Description: Expressed protein; protein id: At2g22475
  misc_feature (11)..(212): NCBI GI NO: 21592789 NR Description: unknown [Arabidopsis thaliana]
  misc_feature (11)..(212): NCBI GI NO: 26452129 NR Description: unknown protein [Arabidopsis thaliana]
  misc_feature (9)..(220): NCBI GI NO: 34902414 NR Description: Putative FH protein interacting protein FIP1
  misc_feature (17)..(212): NCBI GI NO: 15217869 NR Description: FH protein interacting protein FIP1
  misc_feature (12)..(212): NCBI GI NO: 29788871 NR Description: putative ABA-responsive protein
  misc_feature (34)..(214): NCBI GI NO: 34906818 NR Description: contains EST C91668
  misc_feature (4)..(129): NCBI GI NO: 15236123 NR Description: putative protein; protein id: At4g40100.1
  misc_feature (159)..(212): NCBI GI NO: 15236123 NR Description: putative protein; protein id: At4g40100.1
  misc_feature (1)..(220): NCBI GI NO: 15240044 NR Description: ABA-responsive protein - like
MQRDARSWSPAPATDAAGPYAMPSPVQPSTKSTKETVKNALSRWGRKVGEATRKAEDLSRNTWQHLRTAPSIAEAAVGRIAQGTKVLAEGGHDRIFRQAFSAPPDEQLRKSYACYLSTAAGPVMGVLYLSTARVAFCSDSPLSYEASGGDRTEWTHYKVAIPLQRLRAASPSANKTKPAEKFVQLVSVDSQEFWFMGFVNYDGAVAHLQEALSGFRNLQA

SEQ ID NO: 38296 - protein, 199 aa, Zea mays subsp. mays
  peptide (1)..(199): Ceres Seq. ID no. 12357410
  misc_feature (73)..(152): Pfam Name: Pfam Description:  GRAM domain
  misc_feature (1)..(191): NCBI GI NO: 18399985 NR Description: Expressed protein; protein id: At2g22475
  misc_feature (1)..(191): NCBI GI NO: 21592789 NR Description: unknown [Arabidopsis thaliana]
  misc_feature (1)..(191): NCBI GI NO: 26452129 NR Description: unknown protein [Arabidopsis thaliana]
  misc_feature (1)..(199): NCBI GI NO: 34902414 NR Description: Putative FH protein interacting protein FIP1
  misc_feature (1)..(191): NCBI GI NO: 15217869 NR Description: FH protein interacting protein FIP1
  misc_feature (1)..(191): NCBI GI NO: 29788871 NR Description: putative ABA-responsive protein
  misc_feature (13)..(193): NCBI GI NO: 34906818 NR Description: contains EST C91668
  misc_feature (1)..(108): NCBI GI NO: 15236123 NR Description: putative protein; protein id: At4g40100.1
  misc_feature (138)..(191): NCBI GI NO: 15236123 NR Description: putative protein; protein id: At4g40100.1
  misc_feature (1)..(199): NCBI GI NO: 15240044 NR Description: ABA-responsive protein - like
MPSPVQPSTKSTKETVKNALSRWGRKVGEATRKAEDLSRNTWQHLRTAPSIAEAAVGRIAQGTKVLAEGGHDRIFRQAFSAPPDEQLRKSYACYLSTAAGPVMGVLYLSTARVAFCSDSPLSYEASGGDRTEWTHYKVAIPLQRLRAASPSANKTKPAEKFVQLVSVDSQEFWFMGFVNYDGAVAHLQEALSGFRNLQA

SEQ ID NO: 38297 - DNA, 1505 bp, Zea mays subsp. mays
  misc_feature (1)..(1505): Ceres Seq. ID no. 12358876
aaaaaaaacacacggtacgcgcttctcctcctcgcttgccgccgccgccgccgccgcgatggaaaaggagaagctctcgttctccatatcctcctcgaagcagcggccccccaagcctcccgcacgacctgcggccgccgcagacgacgatgacctccgctccgcgcccgctccgggccagcagtacgtcaccgagttcgatccgtcccaaaccctagccgccgcctgcgcggcgcgcgccgtcatcgcgccgctccccaactccggcaacttcctcacccaccgcccacgcaaaccgtcctcgctccccacccctgaggaggaggccgccctcgccgcggaatccggcggctggggccccgccttcgtcctcgacacctcgaccgctcccgaagacccatcatccaaaatcggctacggcctcactcgccgcaacggcgccatcgacgctgctgctgccaaggaaccggagaaggcgccgccaccgtcaccgtcaccgcctcgggccactgatgctgcctccgctgccggcaacctcatgctgcagcggtacaaggaggacatggaaggccttccggagcaccgtggaatggacgagttcaatgagatacccgtggagggatttggcgcggctctccttgctggatacggctggacagaaggtaagggcattggtaggaacaataagatgggggataccaaagttcttgaataccaccgccgtgctggcacacaggggttagggtacaacccctctgaagcagaccctaggaagactcgttctggcgactggattgttggcaagaaggtgtcagagggcgggagtgcgaagagagatcgaggcagtagagataggatggaagagagcgattctagtgcccagaagaagagatataatgaggaaaggtctgagaaggagggccgtgaaaaggtgaggaatggccgtggtagccgagaaggcacaagtaatgcagcggtactcatagcaatgtactgtggttgcagagccatatcagggttcggattgttagtcagaaactaagcaagaggctatacttgatgaagggtaaggttgtcgatgtggtggggcctacaaaatgtgacatcatgatggatgatggatcagagttggtgcagggggtggagcaagatatgcttgaaactgtacttccacggacgaatgggcgggtgcttgtgctttatgggaagcacaagggtttatatgggcacctggtagagaagaattccaaagaagagatcggattggtggaggatgcagatacaaaagatattgtacgtgttagatatgatcagatggcagaatacactggagatccagagttgcttggctactgattaagtttttttgggggaggatatgcttaccgggagccttctgctatgcttggtattatatttttcttctttacaaactgtcaagaattgctgcaatgtaaaaccttgaacaaactggcggttgctatgcatttcttacttgtctttgc

SEQ ID NO: 38298 - protein, 346 aa, Zea mays subsp. mays
  peptide (1)..(346): Ceres Seq. ID no. 12358877
  misc_feature (205)..(250): Pfam Name: Pfam Description:  G-patch domain
  misc_feature (179)..(338): NCBI GI NO: 18416469 NR Description: expressed protein; protein id: At4g25020
  misc_feature (179)..(338): NCBI GI NO: 21553528 NR Description: unknown [Arabidopsis thaliana]
  misc_feature (174)..(254): NCBI GI NO: 15217576 NR Description: unknown protein; protein id: At1g33520
  misc_feature (189)..(254): NCBI GI NO: 15811782 NR Description: T54 protein [Homo sapiens]
  misc_feature (84)..(158): NCBI GI NO: 34894006 NR Description: P0672D08.13
  misc_feature (189)..(254): NCBI GI NO: 30424593 NR Description: DNA segment, Chr X, Immunex 41, expressed
  misc_feature (189)..(254): NCBI GI NO: 38571790 NR Description: DNA segment, Chr X, Immunex 41, expressed
KKTHGTRFSSSLAAAAAAAMEKEKLSFSISSSKQRPPKPPARPAAAADDDDLRSAPAPGQQYVTEFDPSQTLAAACAARAVIAPLPNSGNFLTHRPRKPSSLPTPEEEAALAAESGGWGPAFVLDTSTAPEDPSSKIGYGLTRRNGAIDAAAAKEPEKAPPPSPSPPRATDAASAAGNLMLQRYKEDMEGLPEHRGMDEFNEIPVEGFGAALLAGYGWTEGKGIGRNNKMGDTKVLEYHRRAGTQGLGYNPSEADPRKTRSGDWIVGKKVSEGGSAKRDRGSRDRMEESDSSAQKKRYNEERSEKEGREKVRNGRGSREGTSNAAVLIAMYCGCRAISGFGLLVRN

SEQ ID NO: 38299 - protein, 327 aa, Zea mays subsp. mays
  peptide (1)..(327): Ceres Seq. ID no. 12358878
  misc_feature (186)..(231): Pfam Name: Pfam Description:  G-patch domain
  misc_feature (160)..(319): NCBI GI NO: 18416469 NR Description: expressed protein; protein id: At4g25020
  misc_feature (160)..(319): NCBI GI NO: 21553528 NR Description: unknown [Arabidopsis thaliana]
  misc_feature (155)..(235): NCBI GI NO: 15217576 NR Description: unknown protein; protein id: At1g33520
  misc_feature (170)..(235): NCBI GI NO: 15811782 NR Description: T54 protein [Homo sapiens]
  misc_feature (65)..(139): NCBI GI NO: 34894006 NR Description: P0672D08.13
  misc_feature (170)..(235): NCBI GI NO: 30424593 NR Description: DNA segment, Chr X, Immunex 41, expressed
  misc_feature (170)..(235): NCBI GI NO: 38571790 NR Description: DNA segment, Chr X, Immunex 41, expressed
MEKEKLSFSISSSKQRPPKPPARPAAAADDDDLRSAPAPGQQYVTEFDPSQTLAAACAARAVIAPLPNSGNFLTHRPRKPSSLPTPEEEAALAAESGGWGPAFVLDTSTAPEDPSSKIGYGLTRRNGAIDAAAAKEPEKAPPPSPSPPRATDAASAAGNLMLQRYKEDMEGLPEHRGMDEFNEIPVEGFGAALLAGYGWTEGKGIGRNNKMGDTKVLEYHRRAGTQGLGYNPSEADPRKTRSGDWIVGKKVSEGGSAKRDRGSRDRMEESDSSAQKKRYNEERSEKEGREKVRNGRGSREGTSNAAVLIAMYCGCRAISGFGLLVRN

SEQ ID NO: 38300 - DNA, 946 bp, Zea mays subsp. mays
  misc_feature (1)..(946): Ceres Seq. ID no. 12348256
ctcggtctcggactacggttgagcgaagtcgtcactgtaatctactgatctgcaaatggcggaggtggaggcgacggtggggcgactgatgctgtactcgtactggcgcagctcgtgctcccaccgtgcccgcatcgctctcaatctcaaaggtgtggattacgagtacaaggcggtgaaccttctcaagggcgagcagtctgatccagaattcgtcaagcttaatcctatgaagttcgtccctgcgttggttgatggcagttctgtaataggtgactcttacgcgataacactgtatttggaggacaagtacccagagcctcctcttctacctcaagaccttcaaaagaaagctttgaatcaccagattgcaagcattgtagcttctggtattcaacctctccataacctcacagtgttgaggttcattgaccagaaggttggtgcaggggagagtgtgttgtggactcaacaacaaatcgagagaggtttcacagctattgagaacctgatacaactaaaaggatgcgccgggaagtatgcaacaggagatgaagtccaactggcagatgtattccttgcaccccagatctatgcagccattgaacgcactaaaattgacatgtcaaactacctcactcttgctaggctccactcggagtacatgtcacaccctgcgtttgaagcagcgctccctggcaagcaaccggacgccccttcatcctcctaggaactgcaccctagtgtgttgttcctctgaatatatatatatatatatgtatacttctgtaagaattaataattacagagtttcgtctgctatgtcgaaaaatgtcaaaagtttttgtgatttcagagactagcggcatgaagcgtcgttgtggatctggccgtcgtcctcatgtggcatctgtgatttcagggcatgcacttcgtcttagaaggg

SEQ ID NO: 38301 - protein, 224 aa, Zea mays subsp. mays
  peptide (1)..(224): Ceres Seq. ID no. 12348257
  misc_feature (13)..(84): Pfam Name: Pfam Description:  Glutathione S-transferase, N-terminal domain
  misc_feature (12)..(224): NCBI GI NO: 11385485 NR Description: glutathione S-transferase GST 17 [Zea mays]
  misc_feature (84)..(224): NCBI GI NO: 20975738 NR Description: glutathione s-transferase
  misc_feature (10)..(53): NCBI GI NO: 20975738 NR Description: glutathione s-transferase
  misc_feature (10)..(224): NCBI GI NO: 28932694 NR Description: glutathione S-transferase zeta [Brassica napus]
  misc_feature (10)..(224): NCBI GI NO: 15226952 NR Description: glutathione transferase, putative
  misc_feature (10)..(224): NCBI GI NO: 28932698 NR Description: glutathione S-transferase zeta [Brassica napus]
  misc_feature (10)..(222): NCBI GI NO: 24061762 NR Description: glutathione S-transferase [Capsicum annuum]
  misc_feature (10)..(223): NCBI GI NO: 15226949 NR Description: glutathione transferase, putative
  misc_feature (1)..(222): NCBI GI NO: 11132235 NR Description: Glutathione S-transferase zeta class
  misc_feature (6)..(220): NCBI GI NO: 11385465 NR Description: glutathione S-transferase GST 25 [Glycine max]
MAEVEATVGRLMLYSYWRSSCSHRARIALNLKGVDYEYKAVNLLKGEQSDPEFVKLNPMKFVPALVDGSSVIGDSYAITLYLEDKYPEPPLLPQDLQKKALNHQIASIVASGIQPLHNLTVLRFIDQKVGAGESVLWTQQQIERGFTAIENLIQLKGCAGKYATGDEVQLADVFLAPQIYAAIERTKIDMSNYLTLARLHSEYMSHPAFEAALPGKQPDAPSSS

SEQ ID NO: 38302 - protein, 213 aa, Zea mays subsp. mays
  peptide (1)..(213): Ceres Seq. ID no. 12348258
  misc_feature (2)..(73): Pfam Name: Pfam Description:  Glutathione S-transferase, N-terminal domain
  misc_feature (1)..(213): NCBI GI NO: 11385485 NR Description: glutathione S-transferase GST 17 [Zea mays]
  misc_feature (73)..(213): NCBI GI NO: 20975738 NR Description: glutathione s-transferase
  misc_feature (1)..(42): NCBI GI NO: 20975738 NR Description: glutathione s-transferase
  misc_feature (1)..(213): NCBI GI NO: 28932694 NR Description: glutathione S-transferase zeta [Brassica napus]
  misc_feature (1)..(213): NCBI GI NO: 15226952 NR Description: glutathione transferase, putative
  misc_feature (1)..(213): NCBI GI NO: 28932698 NR Description: glutathione S-transferase zeta [Brassica napus]
  misc_feature (1)..(211): NCBI GI NO: 24061762 NR Description: glutathione S-transferase [Capsicum annuum]
  misc_feature (1)..(212): NCBI GI NO: 15226949 NR Description: glutathione transferase, putative
  misc_feature (1)..(211): NCBI GI NO: 11132235 NR Description: Glutathione S-transferase zeta class
  misc_feature (1)..(209): NCBI GI NO: 11385465 NR Description: glutathione S-transferase GST 25 [Glycine max]
MLYSYWRSSCSHRARIALNLKGVDYEYKAVNLLKGEQSDPEFVKLNPMKFVPALVDGSSVIGDSYAITLYLEDKYPEPPLLPQDLQKKALNHQIASIVASGIQPLHNLTVLRFIDQKVGAGESVLWTQQQIERGFTAIENLIQLKGCAGKYATGDEVQLADVFLAPQIYAAIERTKIDMSNYLTLARLHSEYMSHPAFEAALPGKQPDAPSSS

SEQ ID NO: 38303 - protein, 166 aa, Zea mays subsp. mays
  peptide (1)..(166): Ceres Seq. ID no. 12348259
  misc_feature (1)..(166): NCBI GI NO: 11385485 NR Description: glutathione S-transferase GST 17 [Zea mays]
  misc_feature (26)..(166): NCBI GI NO: 20975738 NR Description: glutathione s-transferase
  misc_feature (1)..(166): NCBI GI NO: 28932694 NR Description: glutathione S-transferase zeta [Brassica napus]
  misc_feature (1)..(166): NCBI GI NO: 15226952 NR Description: glutathione transferase, putative
  misc_feature (1)..(166): NCBI GI NO: 28932698 NR Description: glutathione S-transferase zeta [Brassica napus]
  misc_feature (1)..(164): NCBI GI NO: 24061762 NR Description: glutathione S-transferase [Capsicum annuum]
  misc_feature (1)..(165): NCBI GI NO: 15226949 NR Description: glutathione transferase, putative
  misc_feature (1)..(164): NCBI GI NO: 11132235 NR Description: Glutathione S-transferase zeta class
  misc_feature (1)..(162): NCBI GI NO: 11385465 NR Description: glutathione S-transferase GST 25 [Glycine max]
  misc_feature (1)..(165): NCBI GI NO: 29420155 NR Description: glutathione S-transferase Z1 [Malva pusilla]
MKFVPALVDGSSVIGDSYAITLYLEDKYPEPPLLPQDLQKKALNHQIASIVASGIQPLHNLTVLRFIDQKVGAGESVLWTQQQIERGFTAIENLIQLKGCAGKYATGDEVQLADVFLAPQIYAAIERTKIDMSNYLTLARLHSEYMSHPAFEAALPGKQPDAPSSS

SEQ ID NO: 38304 - DNA, 933 bp, Zea mays subsp. mays
  misc_feature (1)..(933): Ceres Seq. ID no. 12354577
aaaaggacccaacgaagtccagccagctgagctgagcctcgtgaaccagagcatttgctccttcctcgtcctcctcgatcgacctctctccttggtgccgctgccgccatatatgaactgctagcacgcgcagcagccagcagctgccgaccggcctataatcagaaggccagaaaggatcgatggagaccatcaagtgctgcatcgcgtgcatcctgccgtgcggggcgctggacgtggtgcggatcgtgcactccaacggacgcgtggaggagatcagcgggggccccgtgctggccggggagatcatgaaggcgtaccccaagcacgtcctccggaagccgccgtccacgtgcccggccgacggcggcatcgtcgtgcagaagcccgtcatcctgccgcacaatgccgagctgcagaagggcaagatctacttcctcatgccggtcatggccaccccggcgcccgagaagcccgccgcgaagccacagccgccgcccgccgccggccaatccgcggcggccgcttcggtggcgaggagacggcgccggaggaaggaccacgccgccgcacggccggacggaggaggagcggcgcccgcctgcagcagcggggccggggcccggccgccggagggcgagaaggagcggctgctggccaacgagaggtacctgtccgagatcatgaaggagaaggcctccacggccagggaccggcggcgaggccgcgtcgccgtgtggcggccgcacctggagagcatcaccgaggatgacttgtaatcaagcaaggtgtcttcgatttttttttcctcccaccttttgtttctctctccatttctttagttttagcagcgtggtagtttcgtggcgctctcttttgttaattcctcctgctttgcctctccttgccctttggccttttatttttgttgcc

SEQ ID NO: 38305 - protein, 198 aa, Zea mays subsp. mays
  peptide (1)..(198): Ceres Seq. ID no. 12354578
  misc_feature (1)..(198): NCBI GI NO: 34909702 NR Description: B1131G08.9
  misc_feature (2)..(195): NCBI GI NO: 18396990 NR Description: Expressed protein; protein id: At1g29195
  misc_feature (3)..(101): NCBI GI NO: 15227725 NR Description: hypothetical protein; protein id: At2g30230.1
  misc_feature (3)..(105): NCBI GI NO: 18390706 NR Description: expressed protein; protein id: At1g06980
  misc_feature (4)..(156): NCBI GI NO: 34896112 NR Description: P0701D05.10
  misc_feature (3)..(101): NCBI GI NO: 34907910 NR Description: P0439E11.22
METIKCCIACILPCGALDVVRIVHSNGRVEEISGGPVLAGEIMKAYPKHVLRKPPSTCPADGGIVVQKPVILPHNAELQKGKIYFLMPVMATPAPEKPAAKPQPPPAAGQSAAAASVARRRRRRKDHAAARPDGGGAAPACSSGAGARPPEGEKERLLANERYLSEIMKEKASTARDRRRGRVAVWRPHLESITEDDL

SEQ ID NO: 38306 - protein, 156 aa, Zea mays subsp. mays
  peptide (1)..(156): Ceres Seq. ID no. 12354579
  misc_feature (1)..(156): NCBI GI NO: 34909702 NR Description: B1131G08.9
  misc_feature (1)..(153): NCBI GI NO: 18396990 NR Description: Expressed protein; protein id: At1g29195
  misc_feature (1)..(59): NCBI GI NO: 15227725 NR Description: hypothetical protein; protein id: At2g30230.1
  misc_feature (1)..(63): NCBI GI NO: 18390706 NR Description: expressed protein; protein id: At1g06980
  misc_feature (1)..(114): NCBI GI NO: 34896112 NR Description: P0701D05.10
  misc_feature (1)..(59): NCBI GI NO: 34907910 NR Description: P0439E11.22
MKAYPKHVLRKPPSTCPADGGIVVQKPVILPHNAELQKGKIYFLMPVMATPAPEKPAAKPQPPPAAGQSAAAASVARRRRRRKDHAAARPDGGGAAPACSSGAGARPPEGEKERLLANERYLSEIMKEKASTARDRRRGRVAVWRPHLESITEDDL

SEQ ID NO: 38307 - protein, 112 aa, Zea mays subsp. mays
  peptide (1)..(112): Ceres Seq. ID no. 12354580
  misc_feature (1)..(112): NCBI GI NO: 34909702 NR Description: B1131G08.9
  misc_feature (1)..(109): NCBI GI NO: 18396990 NR Description: Expressed protein; protein id: At1g29195
  misc_feature (1)..(15): NCBI GI NO: 15227725 NR Description: hypothetical protein; protein id: At2g30230.1
  misc_feature (1)..(19): NCBI GI NO: 18390706 NR Description: expressed protein; protein id: At1g06980
  misc_feature (1)..(70): NCBI GI NO: 34896112 NR Description: P0701D05.10
  misc_feature (1)..(15): NCBI GI NO: 34907910 NR Description: P0439E11.22
MPVMATPAPEKPAAKPQPPPAAGQSAAAASVARRRRRRKDHAAARPDGGGAAPACSSGAGARPPEGEKERLLANERYLSEIMKEKASTARDRRRGRVAVWRPHLESITEDDL

SEQ ID NO: 38308 - DNA, 504 bp, Zea mays subsp. mays
  misc_feature (1)..(504): Ceres Seq. ID no. 13565466
atttcgccattgctggcgcagsaacgcaaccgcgagatgttccatttgcgttgcacatacaagtgcaggagttcttgtacttcagagatagatccttagaactcatcgatcaaggtctaagtggtccaattgatgcacaaggattccaaaacgctctatatatgatagacatagggcagaacgatgtaaacgctcttctgtcaaactcgccctatgatcaagttattgccaaattcccaccaattcttgctgagattaaggacgctgtccagactctatatagcaacggtagccgaaacttctggatacatgggacgggggctctgggttgcctgccgcagaagcttgccataccaaggaaaaacgacagcgatcttgatcagtatggctgtctcaagacctataacagagctgcagttgcgttcaacgccgcgctgggcagcctctgcgacgagctgagtgcgcagatgaaagacgcgacgcttgtgtacacggacctgttcc

SEQ ID NO: 38309 - protein, 167 aa, Zea mays subsp. mays
  peptide (1)..(167): Ceres Seq. ID no. 13565467
  misc_feature (1)..(166): Pfam Name: Pfam Description:  GDSL-like Lipase/Acylhydrolase
  misc_feature (1)..(166): NCBI GI NO: 34894844 NR Description: putative lipase homolog
  misc_feature (1)..(166): NCBI GI NO: 34894866 NR Description: putative lipase homolog
  misc_feature (1)..(166): NCBI GI NO: 34894838 NR Description: putative lipase homolog
  misc_feature (1)..(166): NCBI GI NO: 15223585 NR Description: GDSL-motif lipase/hydrolase protein
  misc_feature (1)..(166): NCBI GI NO: 25336281 NR Description: lipase-like protein Lip-4
  misc_feature (1)..(166): NCBI GI NO: 15217506 NR Description: GDSL-motif lipase/hydrolase protein
  misc_feature (1)..(90): NCBI GI NO: 15228721 NR Description: GDSL-motif lipase/hydrolase protein
  misc_feature (114)..(166): NCBI GI NO: 15228721 NR Description: GDSL-motif lipase/hydrolase protein
  misc_feature (1)..(166): NCBI GI NO: 18405064 NR Description: GDSL-motif lipase/hydrolase protein
  misc_feature (1)..(166): NCBI GI NO: 21537184 NR Description: early nodule-specific protein, putative
  misc_feature (7)..(7): Xaa is any aa, unknown or other
FAIAGAXTQPRDVPFALHIQVQEFLYFRDRSLELIDQGLSGPIDAQGFQNALYMIDIGQNDVNALLSNSPYDQVIAKFPPILAEIKDAVQTLYSNGSRNFWIHGTGALGCLPQKLAIPRKNDSDLDQYGCLKTYNRAAVAFNAALGSLCDELSAQMKDATLVYTDLF

SEQ ID NO: 38310 - protein, 114 aa, Zea mays subsp. mays
  peptide (1)..(114): Ceres Seq. ID no. 13565468
  misc_feature (1)..(113): Pfam Name: Pfam Description:  GDSL-like Lipase/Acylhydrolase
  misc_feature (1)..(113): NCBI GI NO: 34894844 NR Description: putative lipase homolog
  misc_feature (1)..(113): NCBI GI NO: 34894866 NR Description: putative lipase homolog
  misc_feature (1)..(113): NCBI GI NO: 34894838 NR Description: putative lipase homolog
  misc_feature (1)..(113): NCBI GI NO: 15223585 NR Description: GDSL-motif lipase/hydrolase protein
  misc_feature (1)..(113): NCBI GI NO: 25336281 NR Description: lipase-like protein Lip-4
  misc_feature (1)..(113): NCBI GI NO: 15217506 NR Description: GDSL-motif lipase/hydrolase protein
  misc_feature (1)..(37): NCBI GI NO: 15228721 NR Description: GDSL-motif lipase/hydrolase protein
  misc_feature (61)..(113): NCBI GI NO: 15228721 NR Description: GDSL-motif lipase/hydrolase protein
  misc_feature (1)..(113): NCBI GI NO: 18405064 NR Description: GDSL-motif lipase/hydrolase protein
  misc_feature (1)..(113): NCBI GI NO: 21537184 NR Description: early nodule-specific protein, putative
MIDIGQNDVNALLSNSPYDQVIAKFPPILAEIKDAVQTLYSNGSRNFWIHGTGALGCLPQKLAIPRKNDSDLDQYGCLKTYNRAAVAFNAALGSLCDELSAQMKDATLVYTDLF

SEQ ID NO: 38311 - DNA, 1345 bp, Zea mays subsp. mays
  misc_feature (1)..(1345): Ceres Seq. ID no. 12360849
taattgtcattgctgcaacgaactttcctgagtcgctagataaagccctagtcagacctgggcgttttgaccgtcatattgttgttcccaacccagatgttgaaggtcgacgccaaattctagaatcccatatgtcaaagatcttgaaaggtgatgatgtggacttaatgatcattgctagaggaacaccgggattctctggtgcagaccttgctaacttggtaaatgttgctgctcttaaggctgccatggatggtgcaaaagctgtcacaatggatgatcttgagtatgcaaaggaccgaatcatgatgggtagtgagcggaagtcggcagttatctctgacgaatgcaggaagctgacagcataccatgagggagggcatgcccttgttgcaatccacacagaaggagctcaccctgtccacaaggctaccatcgtacctagggggatggccctaggaatggtggcccaactccccgacaaagaccagacaagtgtgtcaaggaaacagatgctagcaaaactggatgtctgcatgggaggccgtgtggcagaagagcttatctttggggatactgaggtgacatccggtgcgtcgtcagatttccagcaagcgaccgcaatggcgagagcaatggttactaagtatggcatgagcaagcaggtcggccttgtctcttataactacgaggacgatggaaagagcatgagctcagaaacgagacttgcgatcgagcaggaggtgaagaacttcttggagaatgcatacagcaatgcgaagaccattcttacaaaacacaacaaagagctccatgctctagccaacgcacttcttgagcatgagaccctcacaggagcccagataaagaacatattagcccaggttcataacaaacagcaacatgagcatactatcgaagcaccacagaaggcctcagtcgcaccagcttcccccgcatcaccagctgcatcagctgctgcagcagcagcagccgccgccgcggcagcacagcaggcggcagccaaagctaagggggtggctggtatgggatcttagcacattagagcacccccactggtttgcattgtgtatatttcaccaaacaagcaaagctgttccagcaattaacgttcaacgagggtcctcggtagtatgctaaactgctgcagcaacagaacatactgattgtgtggaagctactgttcacgtgcctcgagtgcgaagcagaaacgaaaactttatgcattgtagtaggaggcacatttagctggtgattggatcagttttgtacccaaatcgaaaacaatttctgttgtttacaccccaagaattgttacatttcg

SEQ ID NO: 38312 - protein, 351 aa, Zea mays subsp. mays
  peptide (1)..(351): Ceres Seq. ID no. 12360850
  misc_feature (89)..(291): Pfam Name: Pfam Description:  Peptidase family M41
  misc_feature (1)..(351): NCBI GI NO: 34914298 NR Description: putative FtsH protease
  misc_feature (1)..(351): NCBI GI NO: 34914296 NR Description: putative FtsH protease
  misc_feature (1)..(347): NCBI GI NO: 7488430 NR Description: probable YME1 ATP-dependant proteinase
  misc_feature (1)..(347): NCBI GI NO: 18401040 NR Description: FtsH protease, putative; protein id: At2g26140.1
  misc_feature (1)..(351): NCBI GI NO: 30526336 NR Description: putative FtsH protease [Lycopersicon esculentum]
  misc_feature (1)..(310): NCBI GI NO: 18423480 NR Description: FtsH protease, putative; protein id: At5g53170
  misc_feature (1)..(321): NCBI GI NO: 22963104 NR Description: hypothetical protein [Rhodopseudomonas palustris]
  misc_feature (1)..(326): NCBI GI NO: 16127456 NR Description: cell division protein FtsH
  misc_feature (1)..(340): NCBI GI NO: 23109895 NR Description: hypothetical protein
  misc_feature (1)..(321): NCBI GI NO: 27382257 NR Description: metalloprotease [Bradyrhizobium japonicum]
IVIAATNFPESLDKALVRPGRFDRHIVVPNPDVEGRRQILESHMSKILKGDDVDLMIIARGTPGFSGADLANLVNVAALKAAMDGAKAVTMDDLEYAKDRIMMGSERKSAVISDECRKLTAYHEGGHALVAIHTEGAHPVHKATIVPRGMALGMVAQLPDKDQTSVSRKQMLAKLDVCMGGRVAEELIFGDTEVTSGASSDFQQATAMARAMVTKYGMSKQVGLVSYNYEDDGKSMSSETRLAIEQEVKNFLENAYSNAKTILTKHNKELHALANALLEHETLTGAQIKNILAQVHNKQQHEHTIEAPQKASVAPASPASPAASAAAAAAAAAAAAQQAAAKAKGVAGMGS

SEQ ID NO: 38313 - protein, 308 aa, Zea mays subsp. mays
  peptide (1)..(308): Ceres Seq. ID no. 12360851
  misc_feature (46)..(248): Pfam Name: Pfam Description:  Peptidase family M41
  misc_feature (1)..(308): NCBI GI NO: 34914298 NR Description: putative FtsH protease
  misc_feature (1)..(308): NCBI GI NO: 34914296 NR Description: putative FtsH protease
  misc_feature (1)..(304): NCBI GI NO: 7488430 NR Description: probable YME1 ATP-dependant proteinase
  misc_feature (1)..(304): NCBI GI NO: 18401040 NR Description: FtsH protease, putative; protein id: At2g26140.1
  misc_feature (1)..(308): NCBI GI NO: 30526336 NR Description: putative FtsH protease [Lycopersicon esculentum]
  misc_feature (1)..(267): NCBI GI NO: 18423480 NR Description: FtsH protease, putative; protein id: At5g53170
  misc_feature (1)..(278): NCBI GI NO: 22963104 NR Description: hypothetical protein [Rhodopseudomonas palustris]
  misc_feature (1)..(283): NCBI GI NO: 16127456 NR Description: cell division protein FtsH
  misc_feature (1)..(297): NCBI GI NO: 23109895 NR Description: hypothetical protein
  misc_feature (1)..(278): NCBI GI NO: 27382257 NR Description: metalloprotease [Bradyrhizobium japonicum]
MSKILKGDDVDLMIIARGTPGFSGADLANLVNVAALKAAMDGAKAVTMDDLEYAKDRIMMGSERKSAVISDECRKLTAYHEGGHALVAIHTEGAHPVHKATIVPRGMALGMVAQLPDKDQTSVSRKQMLAKLDVCMGGRVAEELIFGDTEVTSGASSDFQQATAMARAMVTKYGMSKQVGLVSYNYEDDGKSMSSETRLAIEQEVKNFLENAYSNAKTILTKHNKELHALANALLEHETLTGAQIKNILAQVHNKQQHEHTIEAPQKASVAPASPASPAASAAAAAAAAAAAAQQAAAKAKGVAGMGS

SEQ ID NO: 38314 - protein, 296 aa, Zea mays subsp. mays
  peptide (1)..(296): Ceres Seq. ID no. 12360852
  misc_feature (34)..(236): Pfam Name: Pfam Description:  Peptidase family M41
  misc_feature (1)..(296): NCBI GI NO: 34914298 NR Description: putative FtsH protease
  misc_feature (1)..(296): NCBI GI NO: 34914296 NR Description: putative FtsH protease
  misc_feature (1)..(292): NCBI GI NO: 7488430 NR Description: probable YME1 ATP-dependant proteinase
  misc_feature (1)..(292): NCBI GI NO: 18401040 NR Description: FtsH protease, putative; protein id: At2g26140.1
  misc_feature (1)..(296): NCBI GI NO: 30526336 NR Description: putative FtsH protease [Lycopersicon esculentum]
  misc_feature (1)..(255): NCBI GI NO: 18423480 NR Description: FtsH protease, putative; protein id: At5g53170
  misc_feature (1)..(266): NCBI GI NO: 22963104 NR Description: hypothetical protein [Rhodopseudomonas palustris]
  misc_feature (1)..(271): NCBI GI NO: 16127456 NR Description: cell division protein FtsH
  misc_feature (1)..(285): NCBI GI NO: 23109895 NR Description: hypothetical protein
  misc_feature (1)..(266): NCBI GI NO: 27382257 NR Description: metalloprotease [Bradyrhizobium japonicum]
MIIARGTPGFSGADLANLVNVAALKAAMDGAKAVTMDDLEYAKDRIMMGSERKSAVISDECRKLTAYHEGGHALVAIHTEGAHPVHKATIVPRGMALGMVAQLPDKDQTSVSRKQMLAKLDVCMGGRVAEELIFGDTEVTSGASSDFQQATAMARAMVTKYGMSKQVGLVSYNYEDDGKSMSSETRLAIEQEVKNFLENAYSNAKTILTKHNKELHALANALLEHETLTGAQIKNILAQVHNKQQHEHTIEAPQKASVAPASPASPAASAAAAAAAAAAAAQQAAAKAKGVAGMGS

SEQ ID NO: 38315 - DNA, 1184 bp, Zea mays subsp. mays
  misc_feature (1)..(1184): Ceres Seq. ID no. 12352843
attcaacaactctggcgagcagcagtgaacgtacttacgtcttcccccagctagctagctatctaccttggtggtggcgattggtatatagattaaacatggcgcctcaaagcctggatctcgggctgagtctcggcctgggcgtggcggcattccagcccagcttctgccacccggccggcaatgcggcggcggagcgggagaccagcccgaccgcggcggacgagagggagcggaggtgctcgcccgccggcagcccgacgtcgagcggcagcggcagcgggaagcgcgtcgcgacggagagatcggccggcagcggcagcggcgacgaggacgacgacgggggcgctcgcaagaagctgcggttgtccaaggaccaggccgccgtgctcgaggagtgcttcaaaacgcaccacaccctcactccgaagcagaaggcagcgctggccagccgcctgggcctccgggcgcggcaggtggaggtgtggttccagaaccggcgcgcccggaccaagctgaagcagacggaggtcgactgcgagtacctcaggcgctggtgcgagcagctcgccgaggagaaccggcgcctgggcaaggaggtcgccgagctcagggcgctgagcgccgcgcccgcgccagcggcccctctcaccgccctcacaatgtgcctctcctgcaggcgcgtctcctcttcatcctgctcatcctcgccgcctaacacgcacgcgcacgcgcatgccgctgcagctggcactggcactggcgggagcgtggcctctccggcggcggcgacgttgcccgcccaccggcagttcttgtgcgggttcagagacggcggggcggccgccgccgcagtgtacgggacctcatcggctctcgcaaaagccctcagggcggccagataggcgtagtcgtcgtcactagctctctccgctgatctggacttgctctgctcaccggagctccggcgatcgagggatgccacggaagtgcgtggccccaagttgcaactaattgcaactgcagagcaagtgttgtagctgaatcatcttttgttttttttcctccgtatctttagagcggaatgccgcatgcaaatgttctttagaatcgatttcatgtgggtcagtgggtgtatgattgtactcatgctgtggaaattaataacggtttgtagatgaggt

SEQ ID NO: 38316 - protein, 300 aa, Zea mays subsp. mays
  peptide (1)..(300): Ceres Seq. ID no. 12352844
  misc_feature (118)..(172): Pfam Name: Pfam Description:  Homeobox domain
  misc_feature (59)..(291): NCBI GI NO: 28848940 NR Description: homeodomain leucine zipper protein
  misc_feature (59)..(291): NCBI GI NO: 5006849 NR Description: homeodomain leucine zipper protein [Oryza sativa]
  misc_feature (70)..(260): NCBI GI NO: 18034437 NR Description: homeodomain leucine zipper protein CPHB-3
  misc_feature (70)..(270): NCBI GI NO: 7446242 NR Description: homeobox-leucine zipper protein homolog h1 -soybean
  misc_feature (74)..(247): NCBI GI NO: 25457630 NR Description: homeobox protein THOM1 [imported] - tomato
  misc_feature (95)..(240): NCBI GI NO: 15225368 NR Description: homeobox-leucine zipper protein, Athb-4
  misc_feature (58)..(235): NCBI GI NO: 6634483 NR Description: DNA-binding protein
  misc_feature (58)..(235): NCBI GI NO: 7446297 NR Description: DNA-binding homeotic protein - rice (fragment)
  misc_feature (58)..(235): NCBI GI NO: 37536862 NR Description: homeodomain leucine zipper protein hox1
  misc_feature (70)..(245): NCBI GI NO: 8919876 NR Description: hypothetical protein [Capsella rubella]
STTLASSSERTYVFPQLASYLPWWWRLVYRLNMAPQSLDLGLSLGLGVAAFQPSFCHPAGNAAAERETSPTAADERERRCSPAGSPTSSGSGSGKRVATERSAGSGSGDEDDDGGARKKLRLSKDQAAVLEECFKTHHTLTPKQKAALASRLGLRARQVEVWFQNRRARTKLKQTEVDCEYLRRWCEQLAEENRRLGKEVAELRALSAAPAPAAPLTALTMCLSCRRVSSSSCSSSPPNTHAHAHAAAAGTGTGGSVASPAAATLPAHRQFLCGFRDGGAAAAAVYGTSSALAKALRAAR

SEQ ID NO: 38317 - protein, 268 aa, Zea mays subsp. mays
  peptide (1)..(268): Ceres Seq. ID no. 12352845
  misc_feature (86)..(140): Pfam Name: Pfam Description:  Homeobox domain
  misc_feature (27)..(259): NCBI GI NO: 28848940 NR Description: homeodomain leucine zipper protein
  misc_feature (27)..(259): NCBI GI NO: 5006849 NR Description: homeodomain leucine zipper protein [Oryza sativa]
  misc_feature (38)..(228): NCBI GI NO: 18034437 NR Description: homeodomain leucine zipper protein CPHB-3
  misc_feature (38)..(238): NCBI GI NO: 7446242 NR Description: homeobox-leucine zipper protein homolog h1 -soybean
  misc_feature (42)..(215): NCBI GI NO: 25457630 NR Description: homeobox protein THOM1 [imported] - tomato
  misc_feature (63)..(208): NCBI GI NO: 15225368 NR Description: homeobox-leucine zipper protein, Athb-4
  misc_feature (26)..(203): NCBI GI NO: 6634483 NR Description: DNA-binding protein
  misc_feature (26)..(203): NCBI GI NO: 7446297 NR Description: DNA-binding homeotic protein - rice (fragment)
  misc_feature (26)..(203): NCBI GI NO: 37536862 NR Description: homeodomain leucine zipper protein hox1
  misc_feature (38)..(213): NCBI GI NO: 8919876 NR Description: hypothetical protein [Capsella rubella]
MAPQSLDLGLSLGLGVAAFQPSFCHPAGNAAAERETSPTAADERERRCSPAGSPTSSGSGSGKRVATERSAGSGSGDEDDDGGARKKLRLSKDQAAVLEECFKTHHTLTPKQKAALASRLGLRARQVEVWFQNRRARTKLKQTEVDCEYLRRWCEQLAEENRRLGKEVAELRALSAAPAPAAPLTALTMCLSCRRVSSSSCSSSPPNTHAHAHAAAAGTGTGGSVASPAAATLPAHRQFLCGFRDGGAAAAAVYGTSSALAKALRAAR

SEQ ID NO: 38318 - DNA, 1331 bp, Zea mays subsp. mays
  misc_feature (1)..(1331): Ceres Seq. ID no. 12366111
atccaatacgcccaccagccaccacacatcctctctccctcccagtcccaggagcgtggcctcactctcctcgtcgcatcccccctcctcatcttcgcagcgcgggcggcggcaatggcgatggcctccacctacgcgccgggcggaggcgcgcgggcgctcgcgcagggtagatgcagggtccgcggtcccgcggggctgggcttcctcggcccctccaaggccgccggcctcccccgccccctcgccctcgccctcgccaggcggatgagcagccccgtcgcggtgggcgccaggctgcgatgcgcggcgtcgtcgtcccccgcggcggcgcggcccgccacggcgccgcgcttcatccagcacaagaaggaggccttctggttctaccgcttcctctccatcgtgtacgaccacgtcatcaatccgggccactggaccgaggacatgcgcgacgacgcgctggaacctgccgacctcttcagccgccacctcacggtcgtcgacgtcggcggcggcacggggttcaccacgctcggcatcgtcaagcacgtcaacccggagaacgtcacgctgctcgaccagtccccgcaccagctcgacaaggcccggcagaaggaggccctcaagggggtcaccatcatggagggcgacgccgaggacctcccgttccccaccgactccttcgaccgatacatctccgccggcagcatcgagtactggccagacccacagcgggggatcaaggaagcctacagggtcctgagatttggtgggctagcttgtgtgatcggcccggtctacccgaccttctggctgtcccgcttcttcgccgacatgtggatgctcttccccaaggaggaagagtacatcgagtggttcaagaaggctgggtttagggatgtcaagctgaagaggattggaccgaagtggtaccgcggtgtccgaaggcatggcctcatcatgggctgctccgtcacaggcgtcaagagagagcgcggtgactctcccttggagcttggtcccaaggcggaggatgtcagcaagccagtgaatccgatcaccttcctcttccgcttcctcgtaggaacgatatgtgctgcctactatgttctggtgcctatttacatgtggataaaggaccagatcgtgccaaaaggcatgccaatctgagtgaagggaatgagctgcatggaagagaggatagccaacgtctgaattttactcttctctatattagacgcttcctgcctgttttgtattaatacctcttgttttccttctgctatttacttcttgcactgctgttcctgtttgtggtaattaataat

SEQ ID NO: 38319 - protein, 390 aa, Zea mays subsp. mays
  peptide (1)..(390): Ceres Seq. ID no. 12366112
  misc_feature (62)..(390): NCBI GI NO: 34393472 NR Description: putative 37kDa chloroplast inner envelope membranepolypeptide precursor
  misc_feature (99)..(390): NCBI GI NO: 7489166 NR Description: membrane protein
  misc_feature (64)..(390): NCBI GI NO: 15229430 NR Description: putative chloroplast inner envelope protein
  misc_feature (64)..(390): NCBI GI NO: 15005009 NR Description: APG1 [Arabidopsis thaliana]
  misc_feature (64)..(390): NCBI GI NO: 21553996 NR Description: putative chloroplast inner envelope protein
  misc_feature (41)..(390): NCBI GI NO: 124429 NR Description: 37 KD INNER ENVELOPE MEMBRANE PROTEIN
  misc_feature (75)..(386): NCBI GI NO: 37265798 NR Description: MPBQ/MSBQ methyltransferase
  misc_feature (41)..(239): NCBI GI NO: 25458195 NR Description: membrane protein, 37K, chloroplast inner envelope
  misc_feature (120)..(313): NCBI GI NO: 11498123 NR Description: chloroplast inner envelope membrane protein
  misc_feature (120)..(303): NCBI GI NO: 15790980 NR Description: membrane protein; Hmp [Halobacterium sp. NRC-1]
IQYAHQPPHILSPSQSQERGLTLLVASPLLIFAARAAAMAMASTYAPGGGARALAQGRCRVRGPAGLGFLGPSKAAGLPRPLALALARRMSSPVAVGARLRCAASSSPAAARPATAPRFIQHKKEAFWFYRFLSIVYDHVINPGHWTEDMRDDALEPADLFSRHLTVVDVGGGTGFTTLGIVKHVNPENVTLLDQSPHQLDKARQKEALKGVTIMEGDAEDLPFPTDSFDRYISAGSIEYWPDPQRGIKEAYRVLRFGGLACVIGPVYPTFWLSRFFADMWMLFPKEEEYIEWFKKAGFRDVKLKRIGPKWYRGVRRHGLIMGCSVTGVKRERGDSPLELGPKAEDVSKPVNPITFLFRFLVGTICAAYYVLVPIYMWIKDQIVPKGMPI

SEQ ID NO: 38320 - protein, 352 aa, Zea mays subsp. mays
  peptide (1)..(352): Ceres Seq. ID no. 12366113
  misc_feature (24)..(352): NCBI GI NO: 34393472 NR Description: putative 37kDa chloroplast inner envelope membranepolypeptide precursor
  misc_feature (61)..(352): NCBI GI NO: 7489166 NR Description: membrane protein
  misc_feature (26)..(352): NCBI GI NO: 15229430 NR Description: putative chloroplast inner envelope protein
  misc_feature (26)..(352): NCBI GI NO: 15005009 NR Description: APG1 [Arabidopsis thaliana]
  misc_feature (26)..(352): NCBI GI NO: 21553996 NR Description: putative chloroplast inner envelope protein
  misc_feature (3)..(352): NCBI GI NO: 124429 NR Description: 37 KD INNER ENVELOPE MEMBRANE PROTEIN
  misc_feature (37)..(348): NCBI GI NO: 37265798 NR Description: MPBQ/MSBQ methyltransferase
  misc_feature (3)..(201): NCBI GI NO: 25458195 NR Description: membrane protein, 37K, chloroplast inner envelope
  misc_feature (82)..(275): NCBI GI NO: 11498123 NR Description: chloroplast inner envelope membrane protein
  misc_feature (82)..(265): NCBI GI NO: 15790980 NR Description: membrane protein; Hmp [Halobacterium sp. NRC-1]
MAMASTYAPGGGARALAQGRCRVRGPAGLGFLGPSKAAGLPRPLALALARRMSSPVAVGARLRCAASSSPAAARPATAPRFIQHKKEAFWFYRFLSIVYDHVINPGHWTEDMRDDALEPADLFSRHLTVVDVGGGTGFTTLGIVKHVNPENVTLLDQSPHQLDKARQKEALKGVTIMEGDAEDLPFPTDSFDRYISAGSIEYWPDPQRGIKEAYRVLRFGGLACVIGPVYPTFWLSRFFADMWMLFPKEEEYIEWFKKAGFRDVKLKRIGPKWYRGVRRHGLIMGCSVTGVKRERGDSPLELGPKAEDVSKPVNPITFLFRFLVGTICAAYYVLVPIYMWIKDQIVPKGMPI

SEQ ID NO: 38321 - protein, 350 aa, Zea mays subsp. mays
  peptide (1)..(350): Ceres Seq. ID no. 12366114
  misc_feature (22)..(350): NCBI GI NO: 34393472 NR Description: putative 37kDa chloroplast inner envelope membranepolypeptide precursor
  misc_feature (59)..(350): NCBI GI NO: 7489166 NR Description: membrane protein
  misc_feature (24)..(350): NCBI GI NO: 15229430 NR Description: putative chloroplast inner envelope protein
  misc_feature (24)..(350): NCBI GI NO: 15005009 NR Description: APG1 [Arabidopsis thaliana]
  misc_feature (24)..(350): NCBI GI NO: 21553996 NR Description: putative chloroplast inner envelope protein
  misc_feature (1)..(350): NCBI GI NO: 124429 NR Description: 37 KD INNER ENVELOPE MEMBRANE PROTEIN
  misc_feature (35)..(346): NCBI GI NO: 37265798 NR Description: MPBQ/MSBQ methyltransferase
  misc_feature (1)..(199): NCBI GI NO: 25458195 NR Description: membrane protein, 37K, chloroplast inner envelope
  misc_feature (80)..(273): NCBI GI NO: 11498123 NR Description: chloroplast inner envelope membrane protein
  misc_feature (80)..(263): NCBI GI NO: 15790980 NR Description: membrane protein; Hmp [Halobacterium sp. NRC-1]
MASTYAPGGGARALAQGRCRVRGPAGLGFLGPSKAAGLPRPLALALARRMSSPVAVGARLRCAASSSPAAARPATAPRFIQHKKEAFWFYRFLSIVYDHVINPGHWTEDMRDDALEPADLFSRHLTVVDVGGGTGFTTLGIVKHVNPENVTLLDQSPHQLDKARQKEALKGVTIMEGDAEDLPFPTDSFDRYISAGSIEYWPDPQRGIKEAYRVLRFGGLACVIGPVYPTFWLSRFFADMWMLFPKEEEYIEWFKKAGFRDVKLKRIGPKWYRGVRRHGLIMGCSVTGVKRERGDSPLELGPKAEDVSKPVNPITFLFRFLVGTICAAYYVLVPIYMWIKDQIVPKGMPI

SEQ ID NO: 38322 - DNA, 1435 bp, Zea mays subsp. mays
  misc_feature (1)..(1435): Ceres Seq. ID no. 12354581
gataagaaatggtgagcaggcaagcatggagtggagtgcttttaaatttgggtgtcgctgtcgttgaaagcgatgggtggctagttttacagacagacagcagcacctgctcctccgtctggactgactgactagtgactcagctccacccacatcccccttcgtcgtcttctccctccctgctagctgacctccaatccacgataaggcaagataagctagctaggaaggcaagggatccgatggacaagtacgagcccgttcgcgagatcggggcgggcaacttcggggtggccaagctgatgaggaacaaggacacgagggagctggtggccatgaagttcatagagcgaggaaacaggatcgacgagaacgtgttccgcgagatcgtgaaccaccgctccctccgccaccccaacatcatccggttcaaggaggtggtgctgactcccacgcaccttgcgatcgtgatggagtacgctgcgggcggggagctgttcgagcgcatctgcgacgccgggcggttccacgaggacgaggcgcgctacttcttccagcagctggtttgcggcgtcagcttctgccacgccatgaacatctgccaccgggacctcaagctggagaacacgctgctggacggcagcccggcgccgcgcctcaagatctgcgacttcggctactccaagtcctcggtgctgcactcgcgaccgaagtcaacggtgggcacgccggcgtacatcgcgcccgaggtgctgtcgcggcgagagtacgacgggaagcacgccgacgtctggtcgtgcggagtcacgctctacgtcatgctggtgggggcgtacccgttcgaggatccaaaggacccaaagaacttcaggaagacaatacagcgcatcatgtcggttcagtacaagatccccgagtacgtgcacgtctcccacaactgccgccacctcctctcccgcatcttcgtccagaacccgtacaagaggatcaccatgagcgagatcaagacccacccctggtacctcaagaacctgccgagggagctcaaggaggaggcgcaggcagcctactactacagccgccagggagacagcagcagcagcagcagcaataatgcgacagcagcacccgcctactcgtcgcagagcgtggaggagatcttgaggatcgtgcaggaggcgcagacggtgcccaagccaccgtccaggcccgacgaagcagagcaacaggaagaagaagacgaccatgacgatgacgacgactacgacagaacggtgcggcaggtgcacgccagcggagagttcgacatgattatgagcagactccaaatctgactcttagtatcttgcctgccattggtagttttgtgttgtaatgcgtgcctgtaacatgaatttcagtcaaactatacactatcataatggtgatggtattg

SEQ ID NO: 38323 - protein, 363 aa, Zea mays subsp. mays
  peptide (1)..(363): Ceres Seq. ID no. 12354582
  misc_feature (4)..(260): Pfam Name: Pfam Description:  Protein kinase domain
  misc_feature (1)..(356): NCBI GI NO: 1362051 NR Description: protein kinase SPK-3 (EC 2.7.1.-) - soybean
  misc_feature (1)..(353): NCBI GI NO: 19568098 NR Description: osmotic stress-activated protein kinase
  misc_feature (1)..(356): NCBI GI NO: 1161254 NR Description: protein kinase [Glycine max]
  misc_feature (1)..(353): NCBI GI NO: 2129803 NR Description: probable serine/threonine-specific protein kinase
  misc_feature (1)..(353): NCBI GI NO: 1362026 NR Description: probable serine/threonine-specific protein kinase
  misc_feature (1)..(353): NCBI GI NO: 21593536 NR Description: serine/threonine-protein kinase
  misc_feature (1)..(353): NCBI GI NO: 15220251 NR Description: Ser/Thr kinase; protein id: At1g10940
  misc_feature (1)..(353): NCBI GI NO: 15242858 NR Description: serine/threonine-protein kinase
  misc_feature (1)..(355): NCBI GI NO: 15242317 NR Description: serine/threonine-protein kinase
  misc_feature (1)..(342): NCBI GI NO: 29164823 NR Description: abcisic acid-inducible protein kinanase
MDKYEPVREIGAGNFGVAKLMRNKDTRELVAMKFIERGNRIDENVFREIVNHRSLRHPNIIRFKEVVLTPTHLAIVMEYAAGGELFERICDAGRFHEDEARYFFQQLVCGVSFCHAMNICHRDLKLENTLLDGSPAPRLKICDFGYSKSSVLHSRPKSTVGTPAYIAPEVLSRREYDGKHADVWSCGVTLYVMLVGAYPFEDPKDPKNFRKTIQRIMSVQYKIPEYVHVSHNCRHLLSRIFVQNPYKRITMSEIKTHPWYLKNLPRELKEEAQAAYYYSRQGDSSSSSSNNATAAPAYSSQSVEEILRIVQEAQTVPKPPSRPDEAEQQEEEDDHDDDDDYDRTVRQVHASGEFDMIMSRLQI

SEQ ID NO: 38324 - protein, 343 aa, Zea mays subsp. mays
  peptide (1)..(343): Ceres Seq. ID no. 12354583
  misc_feature (1)..(240): Pfam Name: Pfam Description:  Protein kinase domain
  misc_feature (1)..(336): NCBI GI NO: 1362051 NR Description: protein kinase SPK-3 (EC 2.7.1.-) - soybean
  misc_feature (1)..(333): NCBI GI NO: 19568098 NR Description: osmotic stress-activated protein kinase
  misc_feature (1)..(336): NCBI GI NO: 1161254 NR Description: protein kinase [Glycine max]
  misc_feature (1)..(333): NCBI GI NO: 2129803 NR Description: probable serine/threonine-specific protein kinase
  misc_feature (1)..(333): NCBI GI NO: 1362026 NR Description: probable serine/threonine-specific protein kinase
  misc_feature (1)..(333): NCBI GI NO: 21593536 NR Description: serine/threonine-protein kinase
  misc_feature (1)..(333): NCBI GI NO: 15220251 NR Description: Ser/Thr kinase; protein id: At1g10940
  misc_feature (1)..(333): NCBI GI NO: 15242858 NR Description: serine/threonine-protein kinase
  misc_feature (1)..(335): NCBI GI NO: 15242317 NR Description: serine/threonine-protein kinase
  misc_feature (1)..(322): NCBI GI NO: 29164823 NR Description: abcisic acid-inducible protein kinanase
MRNKDTRELVAMKFIERGNRIDENVFREIVNHRSLRHPNIIRFKEVVLTPTHLAIVMEYAAGGELFERICDAGRFHEDEARYFFQQLVCGVSFCHAMNICHRDLKLENTLLDGSPAPRLKICDFGYSKSSVLHSRPKSTVGTPAYIAPEVLSRREYDGKHADVWSCGVTLYVMLVGAYPFEDPKDPKNFRKTIQRIMSVQYKIPEYVHVSHNCRHLLSRIFVQNPYKRITMSEIKTHPWYLKNLPRELKEEAQAAYYYSRQGDSSSSSSNNATAAPAYSSQSVEEILRIVQEAQTVPKPPSRPDEAEQQEEEDDHDDDDDYDRTVRQVHASGEFDMIMSRLQI

SEQ ID NO: 38325 - protein, 332 aa, Zea mays subsp. mays
  peptide (1)..(332): Ceres Seq. ID no. 12354584
  misc_feature (1)..(229): Pfam Name: Pfam Description:  Protein kinase domain
  misc_feature (1)..(325): NCBI GI NO: 1362051 NR Description: protein kinase SPK-3 (EC 2.7.1.-) - soybean
  misc_feature (1)..(322): NCBI GI NO: 19568098 NR Description: osmotic stress-activated protein kinase
  misc_feature (1)..(325): NCBI GI NO: 1161254 NR Description: protein kinase [Glycine max]
  misc_feature (1)..(322): NCBI GI NO: 2129803 NR Description: probable serine/threonine-specific protein kinase
  misc_feature (1)..(322): NCBI GI NO: 1362026 NR Description: probable serine/threonine-specific protein kinase
  misc_feature (1)..(322): NCBI GI NO: 21593536 NR Description: serine/threonine-protein kinase
  misc_feature (1)..(322): NCBI GI NO: 15220251 NR Description: Ser/Thr kinase; protein id: At1g10940
  misc_feature (1)..(322): NCBI GI NO: 15242858 NR Description: serine/threonine-protein kinase
  misc_feature (1)..(324): NCBI GI NO: 15242317 NR Description: serine/threonine-protein kinase
  misc_feature (1)..(311): NCBI GI NO: 29164823 NR Description: abcisic acid-inducible protein kinanase
MKFIERGNRIDENVFREIVNHRSLRHPNIIRFKEVVLTPTHLAIVMEYAAGGELFERICDAGRFHEDEARYFFQQLVCGVSFCHAMNICHRDLKLENTLLDGSPAPRLKICDFGYSKSSVLHSRPKSTVGTPAYIAPEVLSRREYDGKHADVWSCGVTLYVMLVGAYPFEDPKDPKNFRKTIQRIMSVQYKIPEYVHVSHNCRHLLSRIFVQNPYKRITMSEIKTHPWYLKNLPRELKEEAQAAYYYSRQGDSSSSSSNNATAAPAYSSQSVEEILRIVQEAQTVPKPPSRPDEAEQQEEEDDHDDDDDYDRTVRQVHASGEFDMIMSRLQI

SEQ ID NO: 38326 - DNA, 820 bp, Zea mays subsp. mays
  misc_feature (1)..(820): Ceres Seq. ID no. 12357112
ctcggtctctctggagtctggactcgcctccacggctccaccatgtatcccaaggcggcagacgaaggtgcgcagccgctggccacgggcatccccttcagcggcggcggcggctactaccaggcgggcggcgcgatggcggcggcgttcgcggtgcaggcgcaggcgcccgtcgccgcctggtccaccgggctctgcaactgcttcgacgactgccacaactgctgcgtgacgtgcgtgtgcccgtgcatcacgttcgggcagaccgcggagatcatcgaccggggctccacgtcctgcggcaccagcgggggcgctgtacgcgctcgtcatgctgctcaccggctgtcagtgcgtctactcctgcttctaccgcgccaagatgcgcgcgcagtacggcctccaggtgagcccctgctccgactgctgcgtgcactgctgctgccagtggctgcgcgctctgccaggagtaccgcgagctcaagaagcgaggcttcgacatgagcataggatggcatgcgaacatggagaggcaggggcgcgccgccgccgccgtgccgccgcacatgcatcctgggatgacccgctgacgctctgccgctcgcctcacttctgctgaggaaatcaagtgatttggtattggtccgctcccagcaggcagtatcaactactgtaaccaatccatgatctgtatgcggtatcgggctgaactgatactttatggacttgttgcttcaacttagtccgtaaaacgctcaagaccacatgaaaatatggtccataaaacttgttcaaaaatagacattttgcactatatttt

SEQ ID NO: 38327 - protein, 167 aa, Zea mays subsp. mays
  peptide (1)..(167): Ceres Seq. ID no. 12357113
  misc_feature (59)..(104): NCBI GI NO: 34897270 NR Description: hypothetical protein
  misc_feature (61)..(104): NCBI GI NO: 15223920 NR Description: unknown protein; protein id: At1g14870
  misc_feature (57)..(104): NCBI GI NO: 4105794 NR Description: PGPS/D12 [Petunia x hybrida]
  misc_feature (61)..(104): NCBI GI NO: 15223921 NR Description: unknown protein; protein id: At1g14880.1
  misc_feature (59)..(107): NCBI GI NO: 34897274 NR Description: hypothetical protein
  misc_feature (54)..(104): NCBI GI NO: 34897268 NR Description: unknown protein
  misc_feature (59)..(104): NCBI GI NO: 8272626 NR Description: ORFX [Lycopersicon esculentum]
  misc_feature (59)..(104): NCBI GI NO: 27414005 NR Description: fw2.2 [Lycopersicon pimpinellifolium]
  misc_feature (59)..(104): NCBI GI NO: 8272628 NR Description: ORFX [Lycopersicon pennellii]
  misc_feature (53)..(104): NCBI GI NO: 15221456 NR Description: hypothetical protein; protein id: At1g68610.1
LGLSGVWTRLHGSTMYPKAADEGAQPLATGIPFSGGGGYYQAGGAMAAAFAVQAQAPVAAWSTGLCNCFDDCHNCCVTCVCPCITFGQTAEIIDRGSTSCGTSGGAVRARHAAHRLSVRLLLLLPRQDARAVRPPGEPLLRLLRALLLPVAARSARSTASSRSEAST

SEQ ID NO: 38328 - protein, 153 aa, Zea mays subsp. mays
  peptide (1)..(153): Ceres Seq. ID no. 12357114
  misc_feature (45)..(90): NCBI GI NO: 34897270 NR Description: hypothetical protein
  misc_feature (47)..(90): NCBI GI NO: 15223920 NR Description: unknown protein; protein id: At1g14870
  misc_feature (43)..(90): NCBI GI NO: 4105794 NR Description: PGPS/D12 [Petunia x hybrida]
  misc_feature (47)..(90): NCBI GI NO: 15223921 NR Description: unknown protein; protein id: At1g14880.1
  misc_feature (45)..(93): NCBI GI NO: 34897274 NR Description: hypothetical protein
  misc_feature (40)..(90): NCBI GI NO: 34897268 NR Description: unknown protein
  misc_feature (45)..(90): NCBI GI NO: 8272626 NR Description: ORFX [Lycopersicon esculentum]
  misc_feature (45)..(90): NCBI GI NO: 8272628 NR Description: ORFX [Lycopersicon pennellii]
  misc_feature (45)..(90): NCBI GI NO: 27414005 NR Description: fw2.2 [Lycopersicon pimpinellifolium]
  misc_feature (39)..(90): NCBI GI NO: 15221456 NR Description: hypothetical protein; protein id: At1g68610.1
MYPKAADEGAQPLATGIPFSGGGGYYQAGGAMAAAFAVQAQAPVAAWSTGLCNCFDDCHNCCVTCVCPCITFGQTAEIIDRGSTSCGTSGGAVRARHAAHRLSVRLLLLLPRQDARAVRPPGEPLLRLLRALLLPVAARSARSTASSRSEAST

SEQ ID NO: 38329 - protein, 135 aa, Zea mays subsp. mays
  peptide (1)..(135): Ceres Seq. ID no. 12357115
RSLWSLDSPPRLHHVSQGGRRRCAAAGHGHPLQRRRRLLPGGRRDGGGVRGAGAGARRRLVHRALQLLRRLPQLLRDVRVPVHHVRADRGDHRPGLHVLRHQRGRCTRSSCCSPAVSASTPASTAPRCARSTASR

SEQ ID NO: 38330 - DNA, 955 bp, Zea mays subsp. mays
  misc_feature (1)..(955): Ceres Seq. ID no. 12566280
gcagagttgttgattgcagggaaaccgccaattggcaaggatgaagcttgtgaccgccttcgttgtgctgctcttttctctcctccccgactcgtccaccgcggaggacttcgatttcttctaccttgtccaacagtggccgggctcgttctgcgacacgcggcagggttgctgcttcccggacggcgcgggcaagccggaggcggcgttcggcatccacgggctgtggcccaactacgccaagtgccgcggccgccaccaccgcgagggcggcggcctcgcccgcgcggtgctcggcgccgacgacgccttcctcgccgccgtggggcggcggggcaagtgctggccggagtactgcggcggcggcggcgacggcgacggcggccaccagctgagcccctgggacgtccgggacctggtggcgtcgctgggccggagctggccgacgctgtcgtgcaagaaccggcgcagcttcgagttctggagctacgagtggaagaagcacggcacctgctccaacctggacccgcacgactacttcgcgcgcgcgctgcagctcagggagcggcacgacctcgcggcggtcctcgcggacgccgggatcgtgccgtccgacaccgacacgtacccggtggaccgcgtcagggacgccatcgcgcaggggaccggcttcgtggccaacctcgagtgcaaccgcgacgcggacggcgaggcgcagctgttccaggtgtaccagtgcgtggaccgcgaggccaaggacctcatcgactgcccgctccccatgcccaccaagtgcaccgatcgggtcaagttgcccgtcttctgattccgagcttctggctgtcgtttgcaattgtaaaaacgggccgggtgcagatcgatcgatacgacgatacatgcatgtttgcgtatgtgatttcgaaagcggatttgaataaatgtgtgtttacctttc

SEQ ID NO: 38331 - protein, 318 aa, Zea mays subsp. mays
  peptide (1)..(318): Ceres Seq. ID no. 12566281
  misc_feature (61)..(255): Pfam Name: Pfam Description:  HlyD family secretion protein
AELLIAGKPPIGKDEACDRLRCAALFSPPRLVHRGGLRFLLPCPTVAGLVLRHAAGLLLPGRRGQAGGGVRHPRAVAQLRQVPRPPPPRGRRPRPRGARRRRRLPRRRGAAGQVLAGVLRRRRRRRRRPPAEPLGRPGPGGVAGPELADAVVQEPAQLRVLELRVEEARHLLQPGPARLLRARAAAQGAARPRGGPRGRRDRAVRHRHVPGGPRQGRHRAGDRLRGQPRVQPRRGRRGAAVPGVPVRGPRGQGPHRLPAPHAHQVHRSGQVARLLIPSFWLSFAIVKTGRVQIDRYDDTCMFAYVISKADLNKCVFTF

SEQ ID NO: 38332 - protein, 261 aa, Zea mays subsp. mays
  peptide (1)..(261): Ceres Seq. ID no. 12566282
  misc_feature (24)..(248): Pfam Name: Pfam Description:  Ribonuclease T2 family
  misc_feature (88)..(261): NCBI GI NO: 7435264 NR Description: aleurone ribonuclease (EC 3
  misc_feature (1)..(106): NCBI GI NO: 7435264 NR Description: aleurone ribonuclease (EC 3
  misc_feature (1)..(261): NCBI GI NO: 34913240 NR Description: putative aleurone ribonuclease
  misc_feature (102)..(261): NCBI GI NO: 15227068 NR Description: ribonuclease, RNS1; protein id: At2g02990
  misc_feature (1)..(66): NCBI GI NO: 15227068 NR Description: ribonuclease, RNS1; protein id: At2g02990
  misc_feature (102)..(261): NCBI GI NO: 21555182 NR Description: ribonuclease, RNS1 [Arabidopsis thaliana]
  misc_feature (1)..(66): NCBI GI NO: 21555182 NR Description: ribonuclease, RNS1 [Arabidopsis thaliana]
  misc_feature (102)..(261): NCBI GI NO: 2118017 NR Description: ribonuclease non-S (EC 3
  misc_feature (9)..(66): NCBI GI NO: 2118017 NR Description: ribonuclease non-S (EC 3
  misc_feature (102)..(261): NCBI GI NO: 9957752 NR Description: S-like ribonuclease [Prunus dulcis]
MKLVTAFVVLLFSLLPDSSTAEDFDFFYLVQQWPGSFCDTRQGCCFPDGAGKPEAAFGIHGLWPNYAKCRGRHHREGGGLARAVLGADDAFLAAVGRRGKCWPEYCGGGGDGDGGHQLSPWDVRDLVASLGRSWPTLSCKNRRSFEFWSYEWKKHGTCSNLDPHDYFARALQLRERHDLAAVLADAGIVPSDTDTYPVDRVRDAIAQGTGFVANLECNRDADGEAQLFQVYQCVDREAKDLIDCPLPMPTKCTDRVKLPVF

SEQ ID NO: 38333 - DNA, 1047 bp, Zea mays subsp. mays
  misc_feature (1)..(1047): Ceres Seq. ID no. 12402068
ttttagcaccacctctcatgactatcacatttctttcgggaaagtagaaaaaaatctattacccatgaggccatgatactttccacttggacgaagcgaaattgttaattcctcccttccagtatatagctcgctcgctcacactcggagctcgtaacaaagtcatcactcatcacatgagcttgcttgtgactgccagctttgcccagtgttcatcgcccatggaagagcgggcactgttcccggtgtccgattccagcaccacctgcagcagctctggctgtaccggccccaactcccctgtctcgtcgtcgcagtatttggacgacaccagcgacggcgccggcagctcgagcagccggaagcggccgcgccgggagctgaagcatccaacgtaccgcggcgtgcgcatgcgtgcgtggggcaagtgggtgtccgagatccgggagccccgcaagaagtcgcgcatctggctgggcaccttcgacactcccgagatggccgcgcgcgcgcatgacgtcgccgcgctcgccatcaagggccgcgccgcgcacctcaacttcccggagatgtcccacgagctgccccgcgccgcatcggcggcccccgaggacgtgcgtgcggcggcggcgctcgcggccgcgatggagatggagagcgtggcgccgcccacttctagcgagtctcgcgacggcgcccgcaatgacgaaaatgaagggccggccgcatctagctcgtccggcaacgacgccgacaatgcccagaccgaagagcgggctgcgccgtccgagcattcgatgctggctgacgggcacatccttaatctcgcggtcttcgagctgccggacgtcctactcgagttcggcttcgcgccgccgccgccgtcgacgtcttgtggctatgatttgtcctgggacgagccgttgctgctctgggagcactgacgagcaagagggggcaacgtgacatgcatgccaatgtgaagttagataggtgcagctgatgatccgcatacaagcatacttttactaatcagcattgatttgt

SEQ ID NO: 38334 - protein, 255 aa, Zea mays subsp. mays
  peptide (1)..(255): Ceres Seq. ID no. 12402069
  misc_feature (71)..(135): Pfam Name: Pfam Description:  AP2 domain
  misc_feature (25)..(255): NCBI GI NO: 38605845 NR Description: OSJNBb0034G17.3
  misc_feature (27)..(195): NCBI GI NO: 14140163 NR Description: putative AP2 domain containing protein
  misc_feature (55)..(254): NCBI GI NO: 37536842 NR Description: putative DNA binding protein
  misc_feature (55)..(254): NCBI GI NO: 21908034 NR Description: DRE binding factor 2 [Zea mays]
  misc_feature (55)..(254): NCBI GI NO: 25990951 NR Description: DREB-like protein [Zea mays]
  misc_feature (33)..(172): NCBI GI NO: 38605848 NR Description: OSJNBb0034G17.6
  misc_feature (55)..(228): NCBI GI NO: 14140155 NR Description: putative AP2 domain transcription factor
  misc_feature (5)..(246): NCBI GI NO: 15225381 NR Description: putative AP2 domain transcription factor
  misc_feature (5)..(246): NCBI GI NO: 21592664 NR Description: putative AP2 domain transcription factor
  misc_feature (33)..(195): NCBI GI NO: 38605844 NR Description: OSJNBb0034G17.2
MSLLVTASFAQCSSPMEERALFPVSDSSTTCSSSGCTGPNSPVSSSQYLDDTSDGAGSSSSRKRPRRELKHPTYRGVRMRAWGKWVSEIREPRKKSRIWLGTFDTPEMAARAHDVAALAIKGRAAHLNFPEMSHELPRAASAAPEDVRAAAALAAAMEMESVAPPTSSESRDGARNDENEGPAASSSSGNDADNAQTEERAAPSEHSMLADGHILNLAVFELPDVLLEFGFAPPPPSTSCGYDLSWDEPLLLWEH

SEQ ID NO: 38335 - protein, 240 aa, Zea mays subsp. mays
  peptide (1)..(240): Ceres Seq. ID no. 12402070
  misc_feature (56)..(120): Pfam Name: Pfam Description:  AP2 domain
  misc_feature (10)..(240): NCBI GI NO: 38605845 NR Description: OSJNBb0034G17.3
  misc_feature (12)..(180): NCBI GI NO: 14140163 NR Description: putative AP2 domain containing protein
  misc_feature (40)..(239): NCBI GI NO: 37536842 NR Description: putative DNA binding protein
  misc_feature (40)..(239): NCBI GI NO: 21908034 NR Description: DRE binding factor 2 [Zea mays]
  misc_feature (40)..(239): NCBI GI NO: 25990951 NR Description: DREB-like protein [Zea mays]
  misc_feature (18)..(157): NCBI GI NO: 38605848 NR Description: OSJNBb0034G17.6
  misc_feature (40)..(213): NCBI GI NO: 14140155 NR Description: putative AP2 domain transcription factor
  misc_feature (1)..(231): NCBI GI NO: 15225381 NR Description: putative AP2 domain transcription factor
  misc_feature (1)..(231): NCBI GI NO: 21592664 NR Description: putative AP2 domain transcription factor
  misc_feature (18)..(180): NCBI GI NO: 38605844 NR Description: OSJNBb0034G17.2
MEERALFPVSDSSTTCSSSGCTGPNSPVSSSQYLDDTSDGAGSSSSRKRPRRELKHPTYRGVRMRAWGKWVSEIREPRKKSRIWLGTFDTPEMAARAHDVAALAIKGRAAHLNFPEMSHELPRAASAAPEDVRAAAALAAAMEMESVAPPTSSESRDGARNDENEGPAASSSSGNDADNAQTEERAAPSEHSMLADGHILNLAVFELPDVLLEFGFAPPPPSTSCGYDLSWDEPLLLWEH

SEQ ID NO: 38336 - protein, 177 aa, Zea mays subsp. mays
  peptide (1)..(177): Ceres Seq. ID no. 12402071
  misc_feature (1)..(57): Pfam Name: Pfam Description:  AP2 domain
  misc_feature (1)..(177): NCBI GI NO: 38605845 NR Description: OSJNBb0034G17.3
  misc_feature (1)..(117): NCBI GI NO: 14140163 NR Description: putative AP2 domain containing protein
  misc_feature (1)..(176): NCBI GI NO: 37536842 NR Description: putative DNA binding protein
  misc_feature (1)..(176): NCBI GI NO: 21908034 NR Description: DRE binding factor 2 [Zea mays]
  misc_feature (1)..(176): NCBI GI NO: 25990951 NR Description: DREB-like protein [Zea mays]
  misc_feature (1)..(94): NCBI GI NO: 38605848 NR Description: OSJNBb0034G17.6
  misc_feature (1)..(150): NCBI GI NO: 14140155 NR Description: putative AP2 domain transcription factor
  misc_feature (1)..(168): NCBI GI NO: 15225381 NR Description: putative AP2 domain transcription factor
  misc_feature (1)..(168): NCBI GI NO: 21592664 NR Description: putative AP2 domain transcription factor
  misc_feature (1)..(117): NCBI GI NO: 38605844 NR Description: OSJNBb0034G17.2
MRAWGKWVSEIREPRKKSRIWLGTFDTPEMAARAHDVAALAIKGRAAHLNFPEMSHELPRAASAAPEDVRAAAALAAAMEMESVAPPTSSESRDGARNDENEGPAASSSSGNDADNAQTEERAAPSEHSMLADGHILNLAVFELPDVLLEFGFAPPPPSTSCGYDLSWDEPLLLWEH

SEQ ID NO: 38337 - DNA, 744 bp, Zea mays subsp. mays
  misc_feature (1)..(744): Ceres Seq. ID no. 12348192
acaatttgattttgacccgtcgcctgcctggccgcctcctagtcgtaatcccgccccgccgcctccccctctccggccttctccgctccgcgcgggcgccatgtcggtgacgctgcacacgaacctgggcgacatcaagtgcgaggtgttctgcgaccaggtgccgcgcacggcggagaacttcctggcgctctgcggcagcggctactacgacggcaccgtgttccaccgcaacatcaagggcttcatggtccagggcggcgaccccaccggcaccggcaagggcgggtcgtccatctggggcgccaagttcgcggacgagttgagggagtcgctcaagcacaacgcgcgcgggatcatgtcgatggccaacagcgggcccaacaccaacggcagccagttcttcatcacctacgccaagcagccgcacctcaacggtcactacaccgtgttcgccaaggtcatccacggcttcgaggtgctggacctcatggagaaggcgcagacgggacccggggacaggccgctcgccgagatcaggctcaaccgcgtcaccatccacgccaacccgctcgccgtctgaactcctcttcctaccgctctcccctccactcgctcctgtcctcatccaccgggatctgagcgtcatcagccttgctttcaaccgcaaaatcacgctttggtttcggaacatcaatctgtagctctctaattttataccgatgctgtgacatgtaacctttg

SEQ ID NO: 38338 - protein, 193 aa, Zea mays subsp. mays
  peptide (1)..(193): Ceres Seq. ID no. 12348193
  misc_feature (34)..(192): NCBI GI NO: 6006361 NR Description: ESTs AU030008
  misc_feature (34)..(192): NCBI GI NO: 30678211 NR Description: expressed protein [Arabidopsis thaliana]
  misc_feature (34)..(192): NCBI GI NO: 14043400 NR Description: Unknown (protein for MGC:10732) [Homo sapiens]
  misc_feature (34)..(192): NCBI GI NO: 19557636 NR Description: peptidylprolyl isomerase-like protein 3 isoformPPIL3b
  misc_feature (34)..(192): NCBI GI NO: 21746159 NR Description: peptidylprolyl isomerase-like 3
  misc_feature (34)..(192): NCBI GI NO: 28190012 NR Description: CYP10L [Mus musculus]
  misc_feature (34)..(192): NCBI GI NO: 29028318 NR Description: cyclophilin [Homo sapiens]
  misc_feature (36)..(190): NCBI GI NO: 31210953 NR Description: ENSANGP00000016027 [Anopheles gambiae]
  misc_feature (34)..(178): NCBI GI NO: 39590255 NR Description: Hypothetical protein CBG11184
  misc_feature (36)..(192): NCBI GI NO: 19922376 NR Description: CG7747-PA [Drosophila melanogaster]
QFDFDPSPAWPPPSRNPAPPPPPLRPSPLRAGAMSVTLHTNLGDIKCEVFCDQVPRTAENFLALCGSGYYDGTVFHRNIKGFMVQGGDPTGTGKGGSSIWGAKFADELRESLKHNARGIMSMANSGPNTNGSQFFITYAKQPHLNGHYTVFAKVIHGFEVLDLMEKAQTGPGDRPLAEIRLNRVTIHANPLAV

SEQ ID NO: 38339 - protein, 160 aa, Zea mays subsp. mays
  peptide (1)..(160): Ceres Seq. ID no. 12348194
  misc_feature (1)..(159): NCBI GI NO: 6006361 NR Description: ESTs AU030008
  misc_feature (1)..(159): NCBI GI NO: 30678211 NR Description: expressed protein [Arabidopsis thaliana]
  misc_feature (1)..(159): NCBI GI NO: 14043400 NR Description: Unknown (protein for MGC:10732) [Homo sapiens]
  misc_feature (1)..(159): NCBI GI NO: 19557636 NR Description: peptidylprolyl isomerase-like protein 3 isoformPPIL3b
  misc_feature (1)..(159): NCBI GI NO: 21746159 NR Description: peptidylprolyl isomerase-like 3
  misc_feature (1)..(159): NCBI GI NO: 28190012 NR Description: CYP10L [Mus musculus]
  misc_feature (1)..(159): NCBI GI NO: 29028318 NR Description: cyclophilin [Homo sapiens]
  misc_feature (3)..(157): NCBI GI NO: 31210953 NR Description: ENSANGP00000016027 [Anopheles gambiae]
  misc_feature (1)..(145): NCBI GI NO: 39590255 NR Description: Hypothetical protein CBG11184
  misc_feature (3)..(159): NCBI GI NO: 19922376 NR Description: CG7747-PA [Drosophila melanogaster]
MSVTLHTNLGDIKCEVFCDQVPRTAENFLALCGSGYYDGTVFHRNIKGFMVQGGDPTGTGKGGSSIWGAKFADELRESLKHNARGIMSMANSGPNTNGSQFFITYAKQPHLNGHYTVFAKVIHGFEVLDLMEKAQTGPGDRPLAEIRLNRVTIHANPLAV

SEQ ID NO: 38340 - protein, 111 aa, Zea mays subsp. mays
  peptide (1)..(111): Ceres Seq. ID no. 12348195
  misc_feature (1)..(110): NCBI GI NO: 6006361 NR Description: ESTs AU030008
  misc_feature (1)..(110): NCBI GI NO: 30678211 NR Description: expressed protein [Arabidopsis thaliana]
  misc_feature (1)..(110): NCBI GI NO: 14043400 NR Description: Unknown (protein for MGC:10732) [Homo sapiens]
  misc_feature (1)..(110): NCBI GI NO: 19557636 NR Description: peptidylprolyl isomerase-like protein 3 isoformPPIL3b
  misc_feature (1)..(110): NCBI GI NO: 21746159 NR Description: peptidylprolyl isomerase-like 3
  misc_feature (1)..(110): NCBI GI NO: 28190012 NR Description: CYP10L [Mus musculus]
  misc_feature (1)..(110): NCBI GI NO: 29028318 NR Description: cyclophilin [Homo sapiens]
  misc_feature (1)..(108): NCBI GI NO: 31210953 NR Description: ENSANGP00000016027 [Anopheles gambiae]
  misc_feature (1)..(96): NCBI GI NO: 39590255 NR Description: Hypothetical protein CBG11184
  misc_feature (1)..(110): NCBI GI NO: 19922376 NR Description: CG7747-PA [Drosophila melanogaster]
MVQGGDPTGTGKGGSSIWGAKFADELRESLKHNARGIMSMANSGPNTNGSQFFITYAKQPHLNGHYTVFAKVIHGFEVLDLMEKAQTGPGDRPLAEIRLNRVTIHANPLAV

SEQ ID NO: 38341 - DNA, 745 bp, Zea mays subsp. mays
  misc_feature (1)..(745): Ceres Seq. ID no. 12401848
acctgctccattttatgcttctccctcgctcgccctcgccctcgccgcaacgctttgtgatagagtttctgtctgctaccagcaccacagcctagcaccccaccgcgtctagggttttctgctccaatggccgccgcgggggcagacggggagcgcaggatcggggtggccatcgactactcggagagcgccaagaaggcgctggactgggccatcgacaacctgctccaccacggggacaccctcgtcgtcgtccacgtcctgcaccacggcgcggaggagaccaagcacacgctctgggccaagtccggatccccgctgatccctctctccgagttccgggagcccgaggtgatgcagggctacggcgtgcgccccgacgccgaggtgctcgacgcgatcgacacggcagcgcgccagaagcagctgaaggtggtggcgaagctgtactggggcgacgccagggagaagctctgcgacgccgtcgaggacctcaggatcgattccctcgtcatgggtagtcgcggcctcggcccgatccagaggattctcctgggaagcgtgacaaactacgtgctgtcaaacgcatcgtgcccggtgacagtcgtcaaggggaagtagtggcctgggcagcgtgccagtgatatgaatgaagatgctagcgtgcagtttgtgtgggttatagctaaacactatgttccgtcttgttgctgcatttcaataaagcatgtgtcttctagatttc

SEQ ID NO: 38342 - protein, 164 aa, Zea mays subsp. mays
  peptide (1)..(164): Ceres Seq. ID no. 12401849
  misc_feature (8)..(162): Pfam Name: Pfam Description:  Universal stress protein family
  misc_feature (6)..(164): NCBI GI NO: 20160561 NR Description: P0414E03.3
  misc_feature (9)..(162): NCBI GI NO: 30693971 NR Description: expressed protein [Arabidopsis thaliana]
  misc_feature (10)..(162): NCBI GI NO: 30678807 NR Description: expressed protein [Arabidopsis thaliana]
  misc_feature (9)..(162): NCBI GI NO: 11602751 NR Description: ENOD18 protein [Vicia faba]
  misc_feature (9)..(162): NCBI GI NO: 11602747 NR Description: early nodulin ENOD18 [Vicia faba]
  misc_feature (8)..(162): NCBI GI NO: 18401345 NR Description: expressed protein; protein id: At3g17020
  misc_feature (9)..(162): NCBI GI NO: 11602749 NR Description: early nodulin ENOD18 [Vicia faba]
  misc_feature (10)..(140): NCBI GI NO: 18396497 NR Description: expressed protein; protein id: At3g03270
  misc_feature (8)..(162): NCBI GI NO: 15528707 NR Description: P0583G08.8
  misc_feature (14)..(164): NCBI GI NO: 30681321 NR Description: ER6 protein -related [Arabidopsis thaliana]
MAAAGADGERRIGVAIDYSESAKKALDWAIDNLLHHGDTLVVVHVLHHGAEETKHTLWAKSGSPLIPLSEFREPEVMQGYGVRPDAEVLDAIDTAARQKQLKVVAKLYWGDAREKLCDAVEDLRIDSLVMGSRGLGPIQRILLGSVTNYVLSNASCPVTVVKGK

SEQ ID NO: 38343 - protein, 88 aa, Zea mays subsp. mays
  peptide (1)..(88): Ceres Seq. ID no. 12401850
  misc_feature (1)..(86): Pfam Name: Pfam Description:  Universal stress protein family
  misc_feature (1)..(88): NCBI GI NO: 20160561 NR Description: P0414E03.3
  misc_feature (1)..(86): NCBI GI NO: 30693971 NR Description: expressed protein [Arabidopsis thaliana]
  misc_feature (1)..(86): NCBI GI NO: 30678807 NR Description: expressed protein [Arabidopsis thaliana]
  misc_feature (1)..(86): NCBI GI NO: 11602751 NR Description: ENOD18 protein [Vicia faba]
  misc_feature (1)..(86): NCBI GI NO: 11602747 NR Description: early nodulin ENOD18 [Vicia faba]
  misc_feature (1)..(86): NCBI GI NO: 18401345 NR Description: expressed protein; protein id: At3g17020
  misc_feature (1)..(86): NCBI GI NO: 11602749 NR Description: early nodulin ENOD18 [Vicia faba]
  misc_feature (1)..(64): NCBI GI NO: 18396497 NR Description: expressed protein; protein id: At3g03270
  misc_feature (1)..(86): NCBI GI NO: 15528707 NR Description: P0583G08.8
  misc_feature (1)..(88): NCBI GI NO: 30681321 NR Description: ER6 protein -related [Arabidopsis thaliana]
MQGYGVRPDAEVLDAIDTAARQKQLKVVAKLYWGDAREKLCDAVEDLRIDSLVMGSRGLGPIQRILLGSVTNYVLSNASCPVTVVKGK

SEQ ID NO: 38344 - DNA, 1106 bp, Zea mays subsp. mays
  misc_feature (1)..(1106): Ceres Seq. ID no. 12367566
agaacagcagaggtgagaacgggagagcgaccccagcagacaagagacagacgagagagagcgagcaagccgagcatcgtgacctctctgtttctctctcttcccttctcgtcttctgcaagaagccagtgaccgtctctgtttctctcattccctttcatcactctgctggtctccctcttccacctctggccttggccatggcctccagcgcctcccggttcatcaagtgcgtcacagtgggggacggcgccgtgggaaagacctgcatgctcatctgctacaccagcaacaagttccccactgattacatacccactgtcttcgataacttcagtgcaaacgtggtagtcgacggtaccacggtgaatttgggcctttgggatactgcagggcaggaagattacaacagactgaggccactgagctaccgcggagcagatgtgttcgtgctcgccttctcgcttgtcagccgagctagctacgagaatgttatgaagaagtggctaccggagcttcagcattatgcaccgggtgtccccatagtgttggccggaactaaattggatcttcgtgaagacaggcactacttagttgaccatcctggtgcggtacctgttactacagcacagggggaggaactgcgcaagcacattggcgcaacttgctacatcgaatgcagctcaaaaactcagcagaatgtgaaagctgtgtttgatgctgccatcaaggtagtaatcaggcctccgacgaagcagcgagaaaggaagaaaaagaaagaacggcgaggatgctcaatattctgcagccgtatcatgcacgcaagaagactaggatgcttcaagtgatagaaggccttcttcgacgataacgtaggcttctaagatgaatcgagatcgtgtatagtttgtctccatgttccaaagtgctcgttgcgcttgtgcacttgggctggtaatgtgtatatttagtctttgccaattgatatttaggagaaatattaagcacttcgtttatgtaccattggctcataatgagctgggaagtccaatacatactaagaagtaacaatattttcttccgatgattttattatggtttctcgt

SEQ ID NO: 38345 - protein, 281 aa, Zea mays subsp. mays
  peptide (1)..(281): Ceres Seq. ID no. 12367567
  misc_feature (76)..(247): Pfam Name: Pfam Description:  Ras family
  misc_feature (67)..(281): NCBI GI NO: 8979884 NR Description: putative Rop family GTPase, ROP4 [Zea mays]
  misc_feature (67)..(281): NCBI GI NO: 14165241 NR Description: putative Rop family GTPase ROP4 [Oryza sativa]
  misc_feature (67)..(281): NCBI GI NO: 38524285 NR Description: putative ROP4 protein
  misc_feature (67)..(281): NCBI GI NO: 5902930 NR Description: small GTP-binding protein OsRac3 [Oryza sativa]
  misc_feature (67)..(281): NCBI GI NO: 11274344 NR Description: RacA protein - maize
  misc_feature (67)..(281): NCBI GI NO: 38502276 NR Description: RAC-ROP-like G-protein
  misc_feature (67)..(281): NCBI GI NO: 14030769 NR Description: putative Rop family GTPase ROP8 [Zea mays]
  misc_feature (67)..(281): NCBI GI NO: 27527523 NR Description: putative rac protein [Nicotiana tabacum]
  misc_feature (67)..(270): NCBI GI NO: 18408564 NR Description: rac GTP-binding protein
  misc_feature (67)..(264): NCBI GI NO: 7438368 NR Description: GTP-binding protein Arac8 - Arabidopsis thaliana
NSRGENGRATPADKRQTRESEQAEHRDLSVSLSSLLVFCKKPVTVSVSLIPFHHSAGLPLPPLALAMASSASRFIKCVTVGDGAVGKTCMLICYTSNKFPTDYIPTVFDNFSANVVVDGTTVNLGLWDTAGQEDYNRLRPLSYRGADVFVLAFSLVSRASYENVMKKWLPELQHYAPGVPIVLAGTKLDLREDRHYLVDHPGAVPVTTAQGEELRKHIGATCYIECSSKTQQNVKAVFDAAIKVVIRPPTKQRERKKKKERRGCSIFCSRIMHARRLGCFK

SEQ ID NO: 38346 - protein, 215 aa, Zea mays subsp. mays
  peptide (1)..(215): Ceres Seq. ID no. 12367568
  misc_feature (10)..(181): Pfam Name: Pfam Description:  Ras family
  misc_feature (1)..(215): NCBI GI NO: 8979884 NR Description: putative Rop family GTPase, ROP4 [Zea mays]
  misc_feature (1)..(215): NCBI GI NO: 14165241 NR Description: putative Rop family GTPase ROP4 [Oryza sativa]
  misc_feature (1)..(215): NCBI GI NO: 38524285 NR Description: putative ROP4 protein
  misc_feature (1)..(215): NCBI GI NO: 5902930 NR Description: small GTP-binding protein OsRac3 [Oryza sativa]
  misc_feature (1)..(215): NCBI GI NO: 11274344 NR Description: RacA protein - maize
  misc_feature (1)..(215): NCBI GI NO: 38502276 NR Description: RAC-ROP-like G-protein
  misc_feature (1)..(215): NCBI GI NO: 14030769 NR Description: putative Rop family GTPase ROP8 [Zea mays]
  misc_feature (1)..(215): NCBI GI NO: 27527523 NR Description: putative rac protein [Nicotiana tabacum]
  misc_feature (1)..(204): NCBI GI NO: 18408564 NR Description: rac GTP-binding protein
  misc_feature (1)..(198): NCBI GI NO: 7438368 NR Description: GTP-binding protein Arac8 - Arabidopsis thaliana
MASSASRFIKCVTVGDGAVGKTCMLICYTSNKFPTDYIPTVFDNFSANVVVDGTTVNLGLWDTAGQEDYNRLRPLSYRGADVFVLAFSLVSRASYENVMKKWLPELQHYAPGVPIVLAGTKLDLREDRHYLVDHPGAVPVTTAQGEELRKHIGATCYIECSSKTQQNVKAVFDAAIKVVIRPPTKQRERKKKKERRGCSIFCSRIMHARRLGCFK

SEQ ID NO: 38347 - protein, 192 aa, Zea mays subsp. mays
  peptide (1)..(192): Ceres Seq. ID no. 12367569
  misc_feature (1)..(158): Pfam Name: Pfam Description:  Ras family
  misc_feature (1)..(192): NCBI GI NO: 8979884 NR Description: putative Rop family GTPase, ROP4 [Zea mays]
  misc_feature (1)..(192): NCBI GI NO: 14165241 NR Description: putative Rop family GTPase ROP4 [Oryza sativa]
  misc_feature (1)..(192): NCBI GI NO: 38524285 NR Description: putative ROP4 protein
  misc_feature (1)..(192): NCBI GI NO: 5902930 NR Description: small GTP-binding protein OsRac3 [Oryza sativa]
  misc_feature (1)..(192): NCBI GI NO: 11274344 NR Description: RacA protein - maize
  misc_feature (1)..(192): NCBI GI NO: 38502276 NR Description: RAC-ROP-like G-protein
  misc_feature (1)..(192): NCBI GI NO: 14030769 NR Description: putative Rop family GTPase ROP8 [Zea mays]
  misc_feature (1)..(192): NCBI GI NO: 27527523 NR Description: putative rac protein [Nicotiana tabacum]
  misc_feature (1)..(181): NCBI GI NO: 18408564 NR Description: rac GTP-binding protein
  misc_feature (1)..(175): NCBI GI NO: 7438368 NR Description: GTP-binding protein Arac8 - Arabidopsis thaliana
MLICYTSNKFPTDYIPTVFDNFSANVVVDGTTVNLGLWDTAGQEDYNRLRPLSYRGADVFVLAFSLVSRASYENVMKKWLPELQHYAPGVPIVLAGTKLDLREDRHYLVDHPGAVPVTTAQGEELRKHIGATCYIECSSKTQQNVKAVFDAAIKVVIRPPTKQRERKKKKERRGCSIFCSRIMHARRLGCFK

SEQ ID NO: 38348 - DNA, 1186 bp, Zea mays subsp. mays
  misc_feature (1)..(1186): Ceres Seq. ID no. 12383458
ctacgccaagcgcgcaattaaccctcactaaagggaacaaaagctggagctccaccgcggtggcggccgctctagaactagtggatcccccgggctgcaggaattcgcacgagaccattacctagaacatcctaatgaaaaaaaaacaagaagcccagaaaacaaaaggagcagcttcgattcgagatcgcggcgccatcgaccatgcagctcaagaatcgccgcgaagccgtgacggcgacagtgctcgtggccgtatcagtcctggcgaccctggcgcgcaccgacggcgccctctgcgacaagtccgacaaggcagccttgcttgccgtgaagtcggcgctgggcaacccactggcgctctccggctggaactccaccgtggcctgctgctcctgggagggcatctcctgcaacgccaccaccggccgcgtcaccgacctgaccgtcttcgcgctcaacatctcggcgccggtcccggccgccatcgccaacctcaccgcgctgcagagcgtcaacctggcctacaaccagctgtacggcagcatcccggcgttcctgggcccgcgcgcgctgccggacctcaccttcctccgcctcgacggcaaccggctctcgggcgccatcccgcccacggcgaccgtcttcaacctcctcctcgtcggcaaccgcctcacggggccgatcccggccgccttcgccggcgcggcgttcggcgacgtggagctctcggacaaccagctcacgggcgacgcgtcggcgctgttcggcgccgagaagccgctgaacgcgctgtccctgtcgcgcaaccggttcaggttcgacctcggccgcgtggagctgccggaggcgatggacatcctggagatcgaccacaacatggtgtacgggagcatcccggccgccgcggcggagaggaagtggctggcgttcgacgtcagctacaaccagctgtgcgggcccataccgcaggggcggtacacgcaccggttcggggccaagcacttcgctggcaacaagtgcctctgcggccgcccgctcccgccgtgcgcttattagaagaaggccggaacagtacattcatactagtataatagctttattattggaataatgatcctccgtgctgctgtactcgaacgttttgtaatcttgaagcgagccattattaagatatcctgtggcg

SEQ ID NO: 38349 - protein, 319 aa, Zea mays subsp. mays
  peptide (1)..(319): Ceres Seq. ID no. 12383459
  misc_feature (98)..(286): Pfam Name: Pfam Description:  Herpesvirus UL87 family
MKKKQEAQKTKGAASIRDRGAIDHAAQESPRSRDGDSARGRISPGDPGAHRRRPLRQVRQGSLACREVGAGQPTGALRLELHRGLLLLGGHLLQRHHRPRHRPDRLRAQHLGAGPGRHRQPHRAAERQPGLQPAVRQHPGVPGPARAAGPHLPPPRRQPALGRHPAHGDRLQPPPRRQPPHGADPGRLRRRGVRRRGALGQPAHGRRVGAVRRREAAERAVPVAQPVQVRPRPRGAAGGDGHPGDRPQHGVREHPGRRGGEEVAGVRRQLQPAVRAHTAGAVHAPVRGQALRWQQVPLRPPAPAVRLLEEGRNSTFILV

SEQ ID NO: 38350 - protein, 284 aa, Zea mays subsp. mays
  peptide (1)..(284): Ceres Seq. ID no. 12383460
  misc_feature (86)..(282): NCBI GI NO: 5579315 NR Description: polygalacturonase inhibitor protein [Glycine max]
  misc_feature (73)..(282): NCBI GI NO: 7800201 NR Description: polygalacturonase inhibiting protein 2; PGIP2
  misc_feature (73)..(282): NCBI GI NO: 15240183 NR Description: polygalacturonase inhibiting protein
  misc_feature (76)..(282): NCBI GI NO: 4033532 NR Description: polygalacturonase-inhibiting protein [Glycine max]
  misc_feature (86)..(282): NCBI GI NO: 22324851 NR Description: polygalacturonase inhibitory protein
  misc_feature (86)..(282): NCBI GI NO: 40806092 NR Description: polygalacturonase-inhibiting protein
  misc_feature (86)..(282): NCBI GI NO: 21263821 NR Description: Polygalacturonase inhibitor 2 precursor
  misc_feature (86)..(282): NCBI GI NO: 34811072 NR Description: Chain A, The Crystal Structure Of Pgip
  misc_feature (86)..(282): NCBI GI NO: 18148376 NR Description: polygalacturonase-inhibitor protein
  misc_feature (86)..(282): NCBI GI NO: 18148923 NR Description: polygalacturonase-inhibitor protein
MQLKNRREAVTATVLVAVSVLATLARTDGALCDKSDKAALLAVKSALGNPLALSGWNSTVACCSWEGISCNATTGRVTDLTVFALNISAPVPAAIANLTALQSVNLAYNQLYGSIPAFLGPRALPDLTFLRLDGNRLSGAIPPTATVFNLLLVGNRLTGPIPAAFAGAAFGDVELSDNQLTGDASALFGAEKPLNALSLSRNRFRFDLGRVELPEAMDILEIDHNMVYGSIPAAAAERKWLAFDVSYNQLCGPIPQGRYTHRFGAKHFAGNKCLCGRPLPPCAY

SEQ ID NO: 38351 - DNA, 838 bp, Zea mays subsp. mays
  misc_feature (1)..(838): Ceres Seq. ID no. 12402762
  misc_feature (728)..(728): n is a, c, t, g, unknown, or other
  misc_feature (648)..(648): n is a, c, t, g, unknown, or other
  misc_feature (493)..(493): n is a, c, t, g, unknown, or other
tcctcagcatttcagcacccagttcggcgttgcacatgtgacccgggcacccggcccccagcccccagctcccgaccatttctgcacatctacagctcgcgagctcagcaccagaacacgccaggccagcccaacctctccaagaacccaagcagcagcccccgaccgaccggccatgccaagggccatcggcggtggtgcggcctacaagggcggaatcaagggctactggaagcgccgcggctacgaccggatcgacgcggccgcggcgcagcgccgcccgcgcctccctacagcggagcttggcggcggcgaggcgcatcctcagccagcgggtcgtcggcgccgccgcgggtggcgcgttcgccggcgagcgggcgtcctcggccggcgcctcctccgcgcgctctccccgcggcggctgctggcgcggctccgcgacgcctacgtgaacgccatgctccgcctcgcgtcctccgccgccgtggccggntacggcggcgccgggccctactgcaccgccgccgacccgttcgcccggccgcgcccgctcaccagggagtacgacgagaaggcgctcgtcgagatctacaggtccatcctcgcgcgcggcgaggccgggccagtggtcgccgccgcgcggctgcncgcggtgctctgaggagctgatgacgacggggacggacgggcgctggcacgcacgcgcgctgggagcctggccggccctntggcgcgctccgtctactctccttgcctcatgcaaggctcgtgtacgctagaatctcgctttcatgtagcgcacagaatttgcatgtcggatgaaaagtttcaggtggtc

SEQ ID NO: 38352 - protein, 222 aa, Zea mays subsp. mays
  peptide (1)..(222): Ceres Seq. ID no. 12402763
  misc_feature (79)..(195): Pfam Name: Pfam Description:  Cupin
  misc_feature (80)..(222): NCBI GI NO: 23018055 NR Description: hypothetical protein [Thermobifida fusca]
  misc_feature (81)..(210): NCBI GI NO: 29247944 NR Description: GLP_26_54603_52153 [Giardia lamblia ATCC 50803]
  misc_feature (41)..(221): NCBI GI NO: 29247944 NR Description: GLP_26_54603_52153 [Giardia lamblia ATCC 50803]
  misc_feature (7)..(221): NCBI GI NO: 29247944 NR Description: GLP_26_54603_52153 [Giardia lamblia ATCC 50803]
  misc_feature (165)..(165): Xaa is any aa, unknown or other
  misc_feature (216)..(216): Xaa is any aa, unknown or other
SSAFQHPVRRCTCDPGTRPPAPSSRPFLHIYSSRAQHQNTPGQPNLSKNPSSSPRPTGHAKGHRRWCGLQGRNQGLLEAPRLRPDRRGRGAAPPAPPYSGAWRRRGASSASGSSAPPRVARSPASGRPRPAPPPRALPAAAAGAAPRRLRERHAPPRVLRRRGRXRRRRALLHRRRPVRPAAPAHQGVRREGARRDLQVHPRARRGRASGRRRAAXRGALRS

SEQ ID NO: 38353 - protein, 219 aa, Zea mays subsp. mays
  peptide (1)..(219): Ceres Seq. ID no. 12402764
  misc_feature (74)..(210): NCBI GI NO: 15228820 NR Description: putative protein; protein id: At3g62650
  misc_feature (76)..(204): NCBI GI NO: 7487567 NR Description: probable mitochondrial carrier protein
  misc_feature (72)..(214): NCBI GI NO: 34911698 NR Description: P0707D10.13
  misc_feature (164)..(164): Xaa is any aa, unknown or other
  misc_feature (216)..(216): Xaa is any aa, unknown or other
PQHFSTQFGVAHVTRAPGPQPPAPDHFCTSTARELSTRTRQASPTSPRTQAAAPDRPAMPRAIGGGAAYKGGIKGYWKRRGYDRIDAAAAQRRPRLPTAELGGGEAHPQPAGRRRRRGWRVRRRAGVLGRRLLRALSPRRLLARLRDAYVNAMLRLASSAAVAXYGGAGPYCTAADPFARPRPLTREYDEKALVEIYRSILARGEAGPVVAAARLXAVL

SEQ ID NO: 38354 - protein, 161 aa, Zea mays subsp. mays
  peptide (1)..(161): Ceres Seq. ID no. 12402765
  misc_feature (16)..(152): NCBI GI NO: 15228820 NR Description: putative protein; protein id: At3g62650
  misc_feature (18)..(146): NCBI GI NO: 7487567 NR Description: probable mitochondrial carrier protein
  misc_feature (14)..(156): NCBI GI NO: 34911698 NR Description: P0707D10.13
  misc_feature (106)..(106): Xaa is any aa, unknown or other
  misc_feature (158)..(158): Xaa is any aa, unknown or other
MPRAIGGGAAYKGGIKGYWKRRGYDRIDAAAAQRRPRLPTAELGGGEAHPQPAGRRRRRGWRVRRRAGVLGRRLLRALSPRRLLARLRDAYVNAMLRLASSAAVAXYGGAGPYCTAADPFARPRPLTREYDEKALVEIYRSILARGEAGPVVAAARLXAVL

SEQ ID NO: 38355 - DNA, 754 bp, Zea mays subsp. mays
  misc_feature (1)..(754): Ceres Seq. ID no. 13498134
agcgccaacggccaacctcacgcagtcccgccgcatcgaatggcatccctccggcttgtggcaacgctagcgccctccggtcctccgccgccacctcgacgtaagcagcggagaccgtcctccgcagtccgtctgacaggtgggatgggcctggcggcagctgctgccgtggcggcggccgcggccgcctcaccaccggcgctcgccgcgctgtccgagccggcgaacgcgctctcgctgcccacctgggccgtccacgtctccagcgtcgccgagtgggtgacggcgatgtggctggtttgggactacggcgagaagacggggctcaagggttggaaaggcctctcgtgggggatggttccacttctaggtggagcaatgtgtgcttgcacgtggcatttcttctacaattcagagtctcttgaagttcttgtagcccttcaaggtgctctgacagtgattggtaacataacaatgtgcatagctgcataccgcatcttcaaagcatcccaggaaggctcaaaaacttcgtaggctgcaagattggatcttacagccggtttggcaaggtgatgagatatggagcttgcgtttctctgacatggatgagaatggagaactatttgattgttgtttttttttttggcccattagataaaagtttattggaaaggacaacctttcacagcaatatgcatcctctgctgtagtattatttctcaggggccaagataaaagacaatgtctggaactc

SEQ ID NO: 38356 - protein, 177 aa, Zea mays subsp. mays; identical to SEQ ID NO: 36397
  peptide (1)..(177): Ceres Seq. ID no. 13498135
  misc_feature (18)..(172): NCBI GI NO: 30685952 NR Description: expressed protein [Arabidopsis thaliana]
  misc_feature (76)..(171): NCBI GI NO: 17232000 NR Description: hypothetical protein [Nostoc sp. PCC 7120]
  misc_feature (76)..(174): NCBI GI NO: 16331563 NR Description: hypothetical protein [Synechocystis sp. PCC 6803]
  misc_feature (76)..(172): NCBI GI NO: 23041345 NR Description: hypothetical protein
  misc_feature (77)..(173): NCBI GI NO: 37521445 NR Description: hypothetical protein glr1876
  misc_feature (76)..(171): NCBI GI NO: 22298980 NR Description: ORF_ID:tlr1437~hypothetical protein
  misc_feature (78)..(171): NCBI GI NO: 33861461 NR Description: conserved hypothetical protein
  misc_feature (76)..(168): NCBI GI NO: 33865822 NR Description: conserved hypothetical protein
  misc_feature (76)..(174): NCBI GI NO: 33862961 NR Description: conserved hypothetical protein
  misc_feature (76)..(174): NCBI GI NO: 33240381 NR Description: Uncharacterized conserved membrane protein

SEQ ID NO: 38357 - protein, 164 aa, Zea mays subsp. mays; identical to SEQ ID NO: 36398
  peptide (1)..(164): Ceres Seq. ID no. 13498136
  misc_feature (5)..(159): NCBI GI NO: 30685952 NR Description: expressed protein [Arabidopsis thaliana]
  misc_feature (63)..(158): NCBI GI NO: 17232000 NR Description: hypothetical protein [Nostoc sp. PCC 7120]
  misc_feature (63)..(161): NCBI GI NO: 16331563 NR Description: hypothetical protein [Synechocystis sp. PCC 6803]
  misc_feature (63)..(159): NCBI GI NO: 23041345 NR Description: hypothetical protein
  misc_feature (64)..(160): NCBI GI NO: 37521445 NR Description: hypothetical protein glr1876
  misc_feature (63)..(158): NCBI GI NO: 22298980 NR Description: ORF_ID:tlr1437~hypothetical protein
  misc_feature (65)..(158): NCBI GI NO: 33861461 NR Description: conserved hypothetical protein
  misc_feature (63)..(155): NCBI GI NO: 33865822 NR Description: conserved hypothetical protein
  misc_feature (63)..(161): NCBI GI NO: 33862961 NR Description: conserved hypothetical protein
  misc_feature (63)..(161): NCBI GI NO: 33240381 NR Description: Uncharacterized conserved membrane protein

SEQ ID NO: 38358 - protein, 129 aa, Zea mays subsp. mays; identical to SEQ ID NO: 36399
  peptide (1)..(129): Ceres Seq. ID no. 13498137
  misc_feature (1)..(124): NCBI GI NO: 30685952 NR Description: expressed protein [Arabidopsis thaliana]
  misc_feature (28)..(123): NCBI GI NO: 17232000 NR Description: hypothetical protein [Nostoc sp. PCC 7120]
  misc_feature (28)..(126): NCBI GI NO: 16331563 NR Description: hypothetical protein [Synechocystis sp. PCC 6803]
  misc_feature (28)..(124): NCBI GI NO: 23041345 NR Description: hypothetical protein
  misc_feature (29)..(125): NCBI GI NO: 37521445 NR Description: hypothetical protein glr1876
  misc_feature (28)..(123): NCBI GI NO: 22298980 NR Description: ORF_ID:tlr1437~hypothetical protein
  misc_feature (30)..(123): NCBI GI NO: 33861461 NR Description: conserved hypothetical protein
  misc_feature (28)..(120): NCBI GI NO: 33865822 NR Description: conserved hypothetical protein
  misc_feature (28)..(126): NCBI GI NO: 33862961 NR Description: conserved hypothetical protein
  misc_feature (28)..(126): NCBI GI NO: 33240381 NR Description: Uncharacterized conserved membrane protein

SEQ ID NO: 38359 - DNA, 753 bp, Zea mays subsp. mays
  misc_feature (1)..(753): Ceres Seq. ID no. 12402061
acaagcacaaagagaggccccgaccgcgatggatcgtcagcgacagaccgaccgtgacacagccaacaactaacacgcacgcgcgcgagagagaaagagagctgcccgggagagagagagagaggaaatcaaacgaaggcgacgacgtacggagacggcatggccgatcaccaccaccaccaccaccacgggcatccgccggacgggcccggcggcgcgggggaccagctggaggtaatcaaggagcaggaccggctgctgcccatcgccaacgtcggccgcatcatgaagcagatcctgccgcccaacgccaagatctccaaggaggccaaggagacgatgcaggagtgcgtgtccgagttcatcagcttcgtcacgggcgaggcctccgacaagtgccacaaggagaagcgcaagaccgtcaacggcgacgacgtctgctgcgccttcggcgcgctcggcttcgacgactacgtcgaccccatgcgcaggtacctgcacaagtaccgcgagctcgagggcgaccgcgccgcgtcctcccgcggcggaggcggaggcggaccggccggcgccggagaccccgcgtccgcctcggccgccgccggtcccagccccagcgccgcatcagccggtcatttcatgttcggcgccgccatggaccggcccgacaacaactcatccgccggcgccaggcccttttaatccatccttcctcatcttgcttgttattattcatcagattcagatcaacaa

SEQ ID NO: 38360 - protein, 250 aa, Zea mays subsp. mays
  peptide (1)..(250): Ceres Seq. ID no. 12402062
  misc_feature (6)..(231): Pfam Name: Pfam Description:  HlyD family secretion protein
KHKERPRPRWIVSDRPTVTQPTTNTHARERERELPGRERERKSNEGDDVRRRHGRSPPPPPPRASAGRARRRGGPAGGNQGAGPAAAHRQRRPHHEADPAAQRQDLQGGQGDDAGVRVRVHQLRHGRGLRQVPQGEAQDRQRRRRLLRLRRARLRRLRRPHAQVPAQVPRARGRPRRVLPRRRRRRTGRRRRPRVRLGRRRSQPQRRISRSFHVRRRHGPARQQLIRRRQALLIHPSSSCLLLFIRFRST

SEQ ID NO: 38361 - protein, 180 aa, Zea mays subsp. mays
  peptide (1)..(180): Ceres Seq. ID no. 12402063
  misc_feature (32)..(97): Pfam Name: CBF/NF-Y Pfam Description: Histone-like transcription factor
  misc_feature (1)..(173): NCBI GI NO: 34907184 NR Description: putative CCAAT-binding transcription factor subunitA
  misc_feature (2)..(140): NCBI GI NO: 15227134 NR Description: putative CCAAT-box binding trancription factor
  misc_feature (1)..(149): NCBI GI NO: 30409459 NR Description: NF-YB [Oryza sativa (japonica cultivar-group)]
  misc_feature (1)..(172): NCBI GI NO: 34908028 NR Description: putative CAAT-box DNA binding protein
  misc_feature (28)..(149): NCBI GI NO: 15233475 NR Description: CCAAT-binding transcription factor subunit A
  misc_feature (14)..(139): NCBI GI NO: 18404885 NR Description: putative CCAAT-binding transcription factorsubunit
  misc_feature (9)..(155): NCBI GI NO: 22380 NR Description: CAAT-box DNA binding protein subunit B (NF-YB)
  misc_feature (9)..(155): NCBI GI NO: 115840 NR Description: CCAAT-BINDING TRANSCRIPTION FACTOR SUBUNIT A
  misc_feature (17)..(155): NCBI GI NO: 30409461 NR Description: NF-YB [Oryza sativa (japonica cultivar-group)]
  misc_feature (27)..(160): NCBI GI NO: 15231796 NR Description: transcription factor NF-Y
MADHHHHHHHGHPPDGPGGAGDQLEVIKEQDRLLPIANVGRIMKQILPPNAKISKEAKETMQECVSEFISFVTGEASDKCHKEKRKTVNGDDVCCAFGALGFDDYVDPMRRYLHKYRELEGDRAASSRGGGGGGPAGAGDPASASAAAGPSPSAASAGHFMFGAAMDRPDNNSSAGARPF

SEQ ID NO: 38362 - protein, 138 aa, Zea mays subsp. mays
  peptide (1)..(138): Ceres Seq. ID no. 12402064
  misc_feature (1)..(55): Pfam Name: CBF/NF-Y Pfam Description: Histone-like transcription factor
  misc_feature (1)..(131): NCBI GI NO: 34907184 NR Description: putative CCAAT-binding transcription factor subunitA
  misc_feature (1)..(98): NCBI GI NO: 15227134 NR Description: putative CCAAT-box binding trancription factor
  misc_feature (1)..(107): NCBI GI NO: 30409459 NR Description: NF-YB [Oryza sativa (japonica cultivar-group)]
  misc_feature (1)..(130): NCBI GI NO: 34908028 NR Description: putative CAAT-box DNA binding protein
  misc_feature (1)..(107): NCBI GI NO: 15233475 NR Description: CCAAT-binding transcription factor subunit A
  misc_feature (1)..(97): NCBI GI NO: 18404885 NR Description: putative CCAAT-binding transcription factorsubunit
  misc_feature (1)..(113): NCBI GI NO: 22380 NR Description: CAAT-box DNA binding protein subunit B (NF-YB)
  misc_feature (1)..(113): NCBI GI NO: 115840 NR Description: CCAAT-BINDING TRANSCRIPTION FACTOR SUBUNIT A
  misc_feature (1)..(113): NCBI GI NO: 30409461 NR Description: NF-YB [Oryza sativa (japonica cultivar-group)]
  misc_feature (1)..(118): NCBI GI NO: 15231796 NR Description: transcription factor NF-Y
MKQILPPNAKISKEAKETMQECVSEFISFVTGEASDKCHKEKRKTVNGDDVCCAFGALGFDDYVDPMRRYLHKYRELEGDRAASSRGGGGGGPAGAGDPASASAAAGPSPSAASAGHFMFGAAMDRPDNNSSAGARPF

SEQ ID NO: 38363 - DNA, 854 bp, Zea mays subsp. mays; identical to SEQ ID NO: 28065
  misc_feature (1)..(854): Ceres Seq. ID no. 12409092

SEQ ID NO: 38364 - protein, 156 aa, Zea mays subsp. mays; identical to SEQ ID NO: 28066
  peptide (1)..(156): Ceres Seq. ID no. 12409093
  misc_feature (39)..(110): Pfam Name: a.k.a. RRM, RBD, or RNP domain Pfam Description: RNA recognition motif.
  misc_feature (1)..(149): NCBI GI NO: 34906972 NR Description: putative glycine-rich RNA-binding protein 2
  misc_feature (1)..(150): NCBI GI NO: 15236359 NR Description: glycine-rich RNA-binding protein AtGRP2
  misc_feature (1)..(150): NCBI GI NO: 30682622 NR Description: glycine-rich RNA-binding protein (AtGRP2)
  misc_feature (1)..(150): NCBI GI NO: 2826811 NR Description: AtGRP2 [Arabidopsis thaliana]
  misc_feature (27)..(150): NCBI GI NO: 322514 NR Description: glycine-rich RNA-binding protein
  misc_feature (1)..(156): NCBI GI NO: 15239505 NR Description: glycine-rich RNA-binding protein
  misc_feature (1)..(147): NCBI GI NO: 7439994 NR Description: glycine-rich RNA-binding protein - garden pea
  misc_feature (1)..(137): NCBI GI NO: 7439995 NR Description: RNA binding protein 3 - wood tobacco
  misc_feature (1)..(142): NCBI GI NO: 15229525 NR Description: glycine-rich RNA-binding protein
  misc_feature (1)..(142): NCBI GI NO: 21553972 NR Description: glycine-rich RNA binding protein, putative

SEQ ID NO: 38365 - protein, 122 aa, Zea mays subsp. mays; identical to SEQ ID NO: 28067
  peptide (1)..(122): Ceres Seq. ID no. 12409094
  misc_feature (5)..(76): Pfam Name: a.k.a. RRM, RBD, or RNP domain Pfam Description: RNA recognition motif.
  misc_feature (1)..(115): NCBI GI NO: 34906972 NR Description: putative glycine-rich RNA-binding protein 2
  misc_feature (1)..(116): NCBI GI NO: 15236359 NR Description: glycine-rich RNA-binding protein AtGRP2
  misc_feature (1)..(116): NCBI GI NO: 30682622 NR Description: glycine-rich RNA-binding protein (AtGRP2)
  misc_feature (1)..(116): NCBI GI NO: 2826811 NR Description: AtGRP2 [Arabidopsis thaliana]
  misc_feature (1)..(116): NCBI GI NO: 322514 NR Description: glycine-rich RNA-binding protein
  misc_feature (1)..(122): NCBI GI NO: 15239505 NR Description: glycine-rich RNA-binding protein
  misc_feature (1)..(113): NCBI GI NO: 7439994 NR Description: glycine-rich RNA-binding protein - garden pea
  misc_feature (1)..(103): NCBI GI NO: 7439995 NR Description: RNA binding protein 3 - wood tobacco
  misc_feature (1)..(108): NCBI GI NO: 15229525 NR Description: glycine-rich RNA-binding protein
  misc_feature (1)..(108): NCBI GI NO: 21553972 NR Description: glycine-rich RNA binding protein, putative

SEQ ID NO: 38366 - protein, 96 aa, Zea mays subsp. mays; identical to SEQ ID NO: 28068
  peptide (1)..(96): Ceres Seq. ID no. 12409095

SEQ ID NO: 38367 - DNA, 842 bp, Zea mays subsp. mays
  misc_feature (1)..(842): Ceres Seq. ID no. 12402057
acaagccacgctctccgcttgtggctaagctgctgcacgcgcggaccgacaaaaatccagcactagccaaagcacaggcgaagcagcagcagcgagaggccaccacaaacatggcgaccacggcgtttttacccccggccaagctgccgctgcaggggcgtcggttcgctagccccaaaacggcgggacgtatcagtgtcagggtccctccggcgcgagcgcagcaagagcagcaggtgaaggaggaggaggccgaggcggcgagcgtgccgccgccgcaggccgcggagaaggaggcgaggaagggggacgcgcagtccctgccgcggcagcctttggcggagagcaagaacatgagccgcgagtacggcgggcagtggctgagcagcaccacgcggcacgtccgcatctacgctgcgtacatcgacccggtgaccaacgcgttcgaccagacgcagatggacaagctgacgctcatgctcgacccccaggacgagttcgcctggaccgacgaggcctgccagatggtcttcaacgagttccaggacctcgtcgatcactacgagggggctgagctgtcggagtacacacttcggttgatcgggtcagaccttgagcactacatccgcaaactactgtacgacggggtgatcaagtacaacatgaggtccagagtcctcaatttcagcatgggcaaacctcgcatcaagttcaacagcaaccagataccagaaaaaatatagaatgtacttatccaacaccctgaaaagaatggtttctctccattctattaccgagcaagatgtatactctgcagtcccaaatacgatccagagcattcc

SEQ ID NO: 38368 - protein, 246 aa, Zea mays subsp. mays
  peptide (1)..(246): Ceres Seq. ID no. 12402058
  misc_feature (58)..(188): NCBI GI NO: 15235742 NR Description: putative protein; protein id: At4g37920.1
  misc_feature (188)..(242): NCBI GI NO: 15235742 NR Description: putative protein; protein id: At4g37920.1
  misc_feature (127)..(242): NCBI GI NO: 23125502 NR Description: hypothetical protein [Nostoc punctiforme]
  misc_feature (127)..(235): NCBI GI NO: 17229224 NR Description: hypothetical protein [Nostoc sp. PCC 7120]
  misc_feature (127)..(236): NCBI GI NO: 37521091 NR Description: hypothetical protein glr1522
  misc_feature (127)..(236): NCBI GI NO: 16331024 NR Description: unknown protein [Synechocystis sp. PCC 6803]
  misc_feature (127)..(235): NCBI GI NO: 23039375 NR Description: hypothetical protein
  misc_feature (127)..(234): NCBI GI NO: 33239620 NR Description: Uncharacterized protein
  misc_feature (127)..(234): NCBI GI NO: 33866788 NR Description: conserved hypothetical protein
  misc_feature (127)..(235): NCBI GI NO: 22297990 NR Description: ORF_ID:tll0447~hypothetical protein
KPRSPLVAKLLHARTDKNPALAKAQAKQQQREATTNMATTAFLPPAKLPLQGRRFASPKTAGRISVRVPPARAQQEQQVKEEEAEAASVPPPQAAEKEARKGDAQSLPRQPLAESKNMSREYGGQWLSSTTRHVRIYAAYIDPVTNAFDQTQMDKLTLMLDPQDEFAWTDEACQMVFNEFQDLVDHYEGAELSEYTLRLIGSDLEHYIRKLLYDGVIKYNMRSRVLNFSMGKPRIKFNSNQIPEKI

SEQ ID NO: 38369 - protein, 210 aa, Zea mays subsp. mays
  peptide (1)..(210): Ceres Seq. ID no. 12402059
  misc_feature (22)..(152): NCBI GI NO: 15235742 NR Description: putative protein; protein id: At4g37920.1
  misc_feature (152)..(206): NCBI GI NO: 15235742 NR Description: putative protein; protein id: At4g37920.1
  misc_feature (91)..(206): NCBI GI NO: 23125502 NR Description: hypothetical protein [Nostoc punctiforme]
  misc_feature (91)..(199): NCBI GI NO: 17229224 NR Description: hypothetical protein [Nostoc sp. PCC 7120]
  misc_feature (91)..(200): NCBI GI NO: 37521091 NR Description: hypothetical protein glr1522
  misc_feature (91)..(200): NCBI GI NO: 16331024 NR Description: unknown protein [Synechocystis sp. PCC 6803]
  misc_feature (91)..(199): NCBI GI NO: 23039375 NR Description: hypothetical protein
  misc_feature (91)..(198): NCBI GI NO: 33239620 NR Description: Uncharacterized protein
  misc_feature (91)..(198): NCBI GI NO: 33866788 NR Description: conserved hypothetical protein
  misc_feature (91)..(199): NCBI GI NO: 22297990 NR Description: ORF_ID:tll0447~hypothetical protein
MATTAFLPPAKLPLQGRRFASPKTAGRISVRVPPARAQQEQQVKEEEAEAASVPPPQAAEKEARKGDAQSLPRQPLAESKNMSREYGGQWLSSTTRHVRIYAAYIDPVTNAFDQTQMDKLTLMLDPQDEFAWTDEACQMVFNEFQDLVDHYEGAELSEYTLRLIGSDLEHYIRKLLYDGVIKYNMRSRVLNFSMGKPRIKFNSNQIPEKI

SEQ ID NO: 38370 - protein, 129 aa, Zea mays subsp. mays
  peptide (1)..(129): Ceres Seq. ID no. 12402060
  misc_feature (1)..(71): NCBI GI NO: 15235742 NR Description: putative protein; protein id: At4g37920.1
  misc_feature (71)..(125): NCBI GI NO: 15235742 NR Description: putative protein; protein id: At4g37920.1
  misc_feature (10)..(125): NCBI GI NO: 23125502 NR Description: hypothetical protein [Nostoc punctiforme]
  misc_feature (10)..(118): NCBI GI NO: 17229224 NR Description: hypothetical protein [Nostoc sp. PCC 7120]
  misc_feature (10)..(119): NCBI GI NO: 37521091 NR Description: hypothetical protein glr1522
  misc_feature (10)..(119): NCBI GI NO: 16331024 NR Description: unknown protein [Synechocystis sp. PCC 6803]
  misc_feature (10)..(118): NCBI GI NO: 23039375 NR Description: hypothetical protein
  misc_feature (10)..(117): NCBI GI NO: 33239620 NR Description: Uncharacterized protein
  misc_feature (10)..(117): NCBI GI NO: 33866788 NR Description: conserved hypothetical protein
  misc_feature (10)..(118): NCBI GI NO: 22297990 NR Description: ORF_ID:tll0447~hypothetical protein
MSREYGGQWLSSTTRHVRIYAAYIDPVTNAFDQTQMDKLTLMLDPQDEFAWTDEACQMVFNEFQDLVDHYEGAELSEYTLRLIGSDLEHYIRKLLYDGVIKYNMRSRVLNFSMGKPRIKFNSNQIPEKI

SEQ ID NO: 38371 - DNA, 520 bp, Zea mays subsp. mays
  misc_feature (1)..(520): Ceres Seq. ID no. 12588730
accgagagtggcagtggagtagtggtaggaaaagctcgtcgccgagtcgccgtacgggggctcggctcgggtgagcgagcggcggccggcgggtactgaggcctgagggcgaggcgatgggccgcctccgtgacgggcgagccttcctccaccgcgcgcttgtcctctcgtcgctgctccttctcgcctccggcgaaatcttcttcgaggaacggttcgatgatgggtgggatagccgctgggtgaaatctgattggaagaagagccaaggacaagctggaaccttccgacacacagcgggaacctactctggagaccctgacgataaaggtatacaaacaactggggatgccaaacattttgctatatcagcaaaattcccacaatttagtaacaaggaccggacattggttatccagtactctctaaagattgaacaagatattgaatgcggtggtgcttacatcaaacttatgtctggttaatctcaaccagaagaatttggtggcgacactcctta

SEQ ID NO: 38372 - protein, 122 aa, Zea mays subsp. mays
  peptide (1)..(122): Ceres Seq. ID no. 12588731
  misc_feature (28)..(122): Pfam Name: Pfam Description:  Calreticulin family
  misc_feature (1)..(122): NCBI GI NO: 34907604 NR Description: putative calreticulin
  misc_feature (1)..(122): NCBI GI NO: 12643531 NR Description: Calreticulin 3 precursor
  misc_feature (1)..(122): NCBI GI NO: 18390896 NR Description: calreticulin, putative; protein id: At1g08450
  misc_feature (1)..(122): NCBI GI NO: 27311777 NR Description: calreticulin, putative [Arabidopsis thaliana]
  misc_feature (3)..(122): NCBI GI NO: 33517365 NR Description: calreticulin 3 [Brassica rapa subsp. pekinensis]
  misc_feature (1)..(72): NCBI GI NO: 6664320 NR Description: T27G7.13 [Arabidopsis thaliana]
  misc_feature (72)..(122): NCBI GI NO: 6664320 NR Description: T27G7.13 [Arabidopsis thaliana]
  misc_feature (14)..(122): NCBI GI NO: 11131745 NR Description: Calreticulin precursor
  misc_feature (14)..(122): NCBI GI NO: 11131904 NR Description: Calreticulin precursor
  misc_feature (14)..(122): NCBI GI NO: 2052381 NR Description: calreticulin
MGRLRDGRAFLHRALVLSSLLLLASGEIFFEERFDDGWDSRWVKSDWKKSQGQAGTFRHTAGTYSGDPDDKGIQTTGDAKHFAISAKFPQFSNKDRTLVIQYSLKIEQDIECGGAYIKLMSG

SEQ ID NO: 38373 - DNA, 1501 bp, Zea mays subsp. mays
  misc_feature (1)..(1501): Ceres Seq. ID no. 12362343
aaggtcggcttccacatctctctcattctcgtctccccccactgctagctgctgcagctctcaagctagctggcagctagggtttacaccgatccggggtccggtcgccgccggccggcggaagcgggcaatcgagctccgcgacgtcgagatctgcttaattgctaggtggtcgccgcgccggcagccccggcacagagaaagtcaattgctctttgcaggggttgctgctcgttttaaaagagatcctctagccagcagggacaccgcgagatggcgggcgccgtcgggctaacaagacgatgataaggggcggcaaccaccagcaggcggcggacgtcgaggaggagctagcccggaacagcaggcacgccgccgccgtggcgacgtcgcggcaatggtcggcgcagacggagtcgcgcatcgtgcgcgtctcccgcgtcttcggcggcaaggaccgccacagcaaggtgaagaccgtcaagggcctgcgcgaccggcgggtgcgcctctccgtgccgacggcgatccagctctacgacctgcaggaccgcctcggcctcaaccagcctagcaaggtcgtcgactggctgctcaacgccgcgcgccacgagatcgacaagctgccgccgctgcagttcccgccgcaggacctcatggttgggcacctgacgccccacaacatgccgctgatggtgcacgacgagaagttcggacacctcgccgcggccgcggcgctcgcgagcggcggcggcggcggcgccaaggtcagccagcagggcaacgtcgtcgacgtcgacgggaccggagcccaccacttggtggggaggttccccggcggctaccaccggttcatggagctgaacagcgcgttgggcatggtcagtggcgcaatggcgccgccgtataacaacaactacaccggagaggcatggaataacagcggcggcggcgtgcatgacagcggctcgccgcagatcgtcgccgcagccgctcaccactcgccgttcccatcgttgctctccttggctccacgtccgcatcagctggcgttctactcctcggaagctgatcagcagtttcaggtggagaaccttggctcgcaaagcctgtccttgagctcggcgagggcttaccatgatcaggctagctagcggactgcgtactggaacgactcttcgatcgagattaaggtagcaataatgctcactgatcccaaaattcccaagtacaatatactatctagctgtgcaagagtgtgcatgtcagagtttccaagtgccttttaaggatcggatcggaggcagttaagcttgtgatgatttcataattagtagtagacctgaaacagaataaaatgtgcggggcttgatcttgaagcgtacgtgtgtgtgccatacgaatttgttacttctttcaatacacaaaggagtaatattaatctgtatgctggcttgtagaataacaatatatggtttgctaatattacggttttagttat

SEQ ID NO: 38374 - protein, 283 aa, Zea mays subsp. mays
  peptide (1)..(283): Ceres Seq. ID no. 12362344
  misc_feature (34)..(167): Pfam Name: Pfam Description:  TCP family transcription factor
  misc_feature (10)..(234): NCBI GI NO: 34909780 NR Description: P0512C01.32
  misc_feature (114)..(281): NCBI GI NO: 34909780 NR Description: P0512C01.32
  misc_feature (6)..(114): NCBI GI NO: 15239489 NR Description: DNA binding protein - like; protein id: At5g60970
  misc_feature (28)..(120): NCBI GI NO: 18396089 NR Description: expressed protein; protein id: At3g02150
  misc_feature (28)..(120): NCBI GI NO: 30678498 NR Description: TCP family transcription factor TFPD
  misc_feature (20)..(115): NCBI GI NO: 15241512 NR Description: putative helix-loop-helix DNA binding protein
  misc_feature (31)..(111): NCBI GI NO: 18397402 NR Description: expressed protein; protein id: At1g30210
  misc_feature (32)..(117): NCBI GI NO: 7486304 NR Description: hypothetical protein F28J12
  misc_feature (39)..(117): NCBI GI NO: 25369264 NR Description: probable basic helix-loop-helix DNA binding proteinTCP2
  misc_feature (32)..(117): NCBI GI NO: 18415079 NR Description: teosinte branched1 - like protein
MIRGGNHQQAADVEEELARNSRHAAAVATSRQWSAQTESRIVRVSRVFGGKDRHSKVKTVKGLRDRRVRLSVPTAIQLYDLQDRLGLNQPSKVVDWLLNAARHEIDKLPPLQFPPQDLMVGHLTPHNMPLMVHDEKFGHLAAAAALASGGGGGAKVSQQGNVVDVDGTGAHHLVGRFPGGYHRFMELNSALGMVSGAMAPPYNNNYTGEAWNNSGGGVHDSGSPQIVAAAAHHSPFPSLLSLAPRPHQLAFYSSEADQQFQVENLGSQSLSLSSARAYHDQAS

SEQ ID NO: 38375 - protein, 165 aa, Zea mays subsp. mays
  peptide (1)..(165): Ceres Seq. ID no. 12362345
  misc_feature (1)..(116): NCBI GI NO: 34909780 NR Description: P0512C01.32
  misc_feature (1)..(163): NCBI GI NO: 34909780 NR Description: P0512C01.32
  misc_feature (1)..(11): NCBI GI NO: 20975255 NR Description: transcription factor PCF6
MVGHLTPHNMPLMVHDEKFGHLAAAAALASGGGGGAKVSQQGNVVDVDGTGAHHLVGRFPGGYHRFMELNSALGMVSGAMAPPYNNNYTGEAWNNSGGGVHDSGSPQIVAAAAHHSPFPSLLSLAPRPHQLAFYSSEADQQFQVENLGSQSLSLSSARAYHDQAS

SEQ ID NO: 38376 - protein, 156 aa, Zea mays subsp. mays
  peptide (1)..(156): Ceres Seq. ID no. 12362346
  misc_feature (1)..(107): NCBI GI NO: 34909780 NR Description: P0512C01.32
  misc_feature (1)..(154): NCBI GI NO: 34909780 NR Description: P0512C01.32
MPLMVHDEKFGHLAAAAALASGGGGGAKVSQQGNVVDVDGTGAHHLVGRFPGGYHRFMELNSALGMVSGAMAPPYNNNYTGEAWNNSGGGVHDSGSPQIVAAAAHHSPFPSLLSLAPRPHQLAFYSSEADQQFQVENLGSQSLSLSSARAYHDQAS

SEQ ID NO: 38377 - DNA, 1599 bp, Zea mays subsp. mays
  misc_feature (1)..(1599): Ceres Seq. ID no. 12366495
  misc_feature (1223)..(1223): n is a, c, t, g, unknown, or other
gcacgagaccattacctagaacatcctaatcgaaaaagctcagccgtcctgcatctggcgccggtgcaggcaatgaacacatatcacccccggatcacggacagacagctgaggaaagtgatgcgagggaagactacccggcaatggctactaccacgccagcagaggacgggtacagctggaggaagtacggacagaagcaggtgaagcacagcgagtacccgcgtagctacttcaagtgcacgcatcccaactgcctggtgaagaagaaggtcgagcgctcgcacgaggggcacatcacggagatcatctacaagggcgcgcacaaccacccgaagcccacgcagagccgccgtccaggcgtccagcccgtgcacccgtttggcgacagtgcgcaggcggacgcagccgacaacctggggtcacaggcaaacgcagtggacgccaaccagccgaggcgtgcgggtgttcaggatggcatggacgcgacgtcgtcgccctcagttcccattgagcgctgtgactcgccggcctcgatgcaggtcgactcggcagccccggtttggatcccccgagggcgcggatgtgacgtctgtgtccgacgaggtgggcggggacgacagggtgactcgtggcagtatgtctcagggcggtgccgacgcggagggtgacgagctggaatgtaaacgaaggaagctggagtcgtacgccatcgatatgagcaccgcgtcgagagctgttcgcgagcctcgcgtggtgatccagacgacgagcgaggtggacatcctagatgacggctaccgctggcgcaagtacggccagaaggtcgtcaagggcaacccgaatccaaggagctactacaagtgcacgtacccgggctgcgtggtgcggaagcacgtggagcgcgcgtcgcacgacctcaagtccgtgatcaccacgtacgagggcaggcacaaccacgaggtccccgccgccaggaacagcggccacccgggcaccgcggcggcgacaggcgcgggtggcccgcgcaggctggagcacccgtcgctgcgcgacggcctgatggggcacttgggcggctgcggcgtgccgttcggcctgccgccgcctagggatccgctggcgccgatgggcaattacccgacgtatgcctcctccattccccttggcggcgccggccccacgtcactgccgagcctgccggtgccggcggggaccctcancgccgtcgatgggctgaagctcccgatgctggcgccgtcgtccctgcagcagcacccgctgctgaggcaccggcaggcgatgcaggccgctggcctcgtggcgcccaaggacgacgtgaaggtcgagggcaacgttgccggcggcgctgccccgtcggtgtaccagcagatgatgtgcagcgggctgcggttgcgccagcagatgtagatacataaataaatgtggagaggattagtgattctcaagttattagtttcttaccagtcgtattaggatgagttcgtgataattgttataacgtgggaacaaacacccgttgctttctgtttttttttcacccttccacttcatttttagctcagcaactatttattt

SEQ ID NO: 38378 - protein, 318 aa, Zea mays subsp. mays
  peptide (1)..(318): Ceres Seq. ID no. 12366496
  misc_feature (105)..(164): Pfam Name: Pfam Description:  WRKY DNA -binding domain
  misc_feature (32)..(245): NCBI GI NO: 38344754 NR Description: OSJNBa0089K21.12
  misc_feature (32)..(245): NCBI GI NO: 33519174 NR Description: WRKY2 [Oryza sativa (japonica cultivar-group)]
  misc_feature (35)..(318): NCBI GI NO: 14530687 NR Description: WRKY DNA-binding protein [Nicotiana tabacum]
  misc_feature (35)..(308): NCBI GI NO: 6174838 NR Description: transcription factor NtWRKY4 [Nicotiana tabacum]
  misc_feature (29)..(318): NCBI GI NO: 13620227 NR Description: hypothetical protein [Lycopersicon esculentum]
  misc_feature (126)..(245): NCBI GI NO: 33519190 NR Description: WRKY10 [Oryza sativa (japonica cultivar-group)]
  misc_feature (32)..(127): NCBI GI NO: 33519190 NR Description: WRKY10 [Oryza sativa (japonica cultivar-group)]
  misc_feature (29)..(318): NCBI GI NO: 13620220 NR Description: hypothetical protein [Lycopersicon esculentum]
  misc_feature (37)..(308): NCBI GI NO: 15241164 NR Description: WRKY family transcription factor
  misc_feature (162)..(318): NCBI GI NO: 33519190 NR Description: WRKY10 [Oryza sativa (japonica cultivar-group)]
  misc_feature (250)..(250): Xaa is any aa, unknown or other
MAWTRRRRPQFPLSAVTRRPRCRSTRQPRFGSPEGADVTSVSDEVGGDDRVTRGSMSQGGADAEGDELECKRRKLESYAIDMSTASRAVREPRVVIQTTSEVDILDDGYRWRKYGQKVVKGNPNPRSYYKCTYPGCVVRKHVERASHDLKSVITTYEGRHNHEVPAARNSGHPGTAAATGAGGPRRLEHPSLRDGLMGHLGGCGVPFGLPPPRDPLAPMGNYPTYASSIPLGGAGPTSLPSLPVPAGTLXAVDGLKLPMLAPSSLQQHPLLRHRQAMQAAGLVAPKDDVKVEGNVAGGAAPSVYQQMMCSGLRLRQQM

SEQ ID NO: 38379 - protein, 263 aa, Zea mays subsp. mays
  peptide (1)..(263): Ceres Seq. ID no. 12366497
  misc_feature (50)..(109): Pfam Name: Pfam Description:  WRKY DNA -binding domain
  misc_feature (1)..(190): NCBI GI NO: 38344754 NR Description: OSJNBa0089K21.12
  misc_feature (1)..(190): NCBI GI NO: 33519174 NR Description: WRKY2 [Oryza sativa (japonica cultivar-group)]
  misc_feature (1)..(263): NCBI GI NO: 14530687 NR Description: WRKY DNA-binding protein [Nicotiana tabacum]
  misc_feature (1)..(253): NCBI GI NO: 6174838 NR Description: transcription factor NtWRKY4 [Nicotiana tabacum]
  misc_feature (1)..(263): NCBI GI NO: 13620227 NR Description: hypothetical protein [Lycopersicon esculentum]
  misc_feature (71)..(190): NCBI GI NO: 33519190 NR Description: WRKY10 [Oryza sativa (japonica cultivar-group)]
  misc_feature (1)..(72): NCBI GI NO: 33519190 NR Description: WRKY10 [Oryza sativa (japonica cultivar-group)]
  misc_feature (1)..(263): NCBI GI NO: 13620220 NR Description: hypothetical protein [Lycopersicon esculentum]
  misc_feature (1)..(253): NCBI GI NO: 15241164 NR Description: WRKY family transcription factor
  misc_feature (107)..(263): NCBI GI NO: 33519190 NR Description: WRKY10 [Oryza sativa (japonica cultivar-group)]
  misc_feature (195)..(195): Xaa is any aa, unknown or other
MSQGGADAEGDELECKRRKLESYAIDMSTASRAVREPRVVIQTTSEVDILDDGYRWRKYGQKVVKGNPNPRSYYKCTYPGCVVRKHVERASHDLKSVITTYEGRHNHEVPAARNSGHPGTAAATGAGGPRRLEHPSLRDGLMGHLGGCGVPFGLPPPRDPLAPMGNYPTYASSIPLGGAGPTSLPSLPVPAGTLXAVDGLKLPMLAPSSLQQHPLLRHRQAMQAAGLVAPKDDVKVEGNVAGGAAPSVYQQMMCSGLRLRQQM

SEQ ID NO: 38380 - protein, 237 aa, Zea mays subsp. mays
  peptide (1)..(237): Ceres Seq. ID no. 12366498
  misc_feature (24)..(83): Pfam Name: Pfam Description:  WRKY DNA -binding domain
  misc_feature (1)..(164): NCBI GI NO: 38344754 NR Description: OSJNBa0089K21.12
  misc_feature (1)..(164): NCBI GI NO: 33519174 NR Description: WRKY2 [Oryza sativa (japonica cultivar-group)]
  misc_feature (1)..(237): NCBI GI NO: 14530687 NR Description: WRKY DNA-binding protein [Nicotiana tabacum]
  misc_feature (1)..(227): NCBI GI NO: 6174838 NR Description: transcription factor NtWRKY4 [Nicotiana tabacum]
  misc_feature (1)..(237): NCBI GI NO: 13620227 NR Description: hypothetical protein [Lycopersicon esculentum]
  misc_feature (45)..(164): NCBI GI NO: 33519190 NR Description: WRKY10 [Oryza sativa (japonica cultivar-group)]
  misc_feature (1)..(46): NCBI GI NO: 33519190 NR Description: WRKY10 [Oryza sativa (japonica cultivar-group)]
  misc_feature (1)..(237): NCBI GI NO: 13620220 NR Description: hypothetical protein [Lycopersicon esculentum]
  misc_feature (1)..(227): NCBI GI NO: 15241164 NR Description: WRKY family transcription factor
  misc_feature (81)..(237): NCBI GI NO: 33519190 NR Description: WRKY10 [Oryza sativa (japonica cultivar-group)]
  misc_feature (169)..(169): Xaa is any aa, unknown or other
MSTASRAVREPRVVIQTTSEVDILDDGYRWRKYGQKVVKGNPNPRSYYKCTYPGCVVRKHVERASHDLKSVITTYEGRHNHEVPAARNSGHPGTAAATGAGGPRRLEHPSLRDGLMGHLGGCGVPFGLPPPRDPLAPMGNYPTYASSIPLGGAGPTSLPSLPVPAGTLXAVDGLKLPMLAPSSLQQHPLLRHRQAMQAAGLVAPKDDVKVEGNVAGGAAPSVYQQMMCSGLRLRQQM

SEQ ID NO: 38381 - DNA, 1614 bp, Zea mays subsp. mays
  misc_feature (1)..(1614): Ceres Seq. ID no. 12374652
aaaggccacgggtgcgctgtccactttgcaggcaagctcacggcctcacgtgaggccgacgaagtcgtagcagagatccgatacatgggagaggaagagggcgcgcccaccgtggcagcagcggcagagagcgctccgccgcacctgctcctgatatgcttcccggggcagggccacgtgaacccgatgctccgcctggccaagcgcatcgcggccaagggcctcctggtgaccttctcctcgatctccagagtcggggcgatgctcgccgcgtccgtgggcgtgtcggccggcggtgacggcgtgcctgtgggccggggccgcgtccggttcgagttcatggacgatgaagaccccgggcctgacctggacgacctcttgcggcacctcgcgaaggacggcccgccggcgtttgccgagctgctggagcggcaggcggacgccgggcggcctgtggcgtgcgtggtggtaaacccgttcatgccgtgggcggtcgacgtggccgccgacgcggggatcccttcggcggtgctgtgggtgcagtcgtgcgcggtgttctccctctactaccaccacgtgcacggcctcgtggagttccctcccgaggacgacctggacgcgcggttcacgctgcctggcctccccgagatgtccgtcgccgacgttccgtcgttcctgctcccgtccaacccgtacaagctgctggtggacgcgatcatcgcccagttccacaccatcgaccgcgcgtcgtgggtgctcgtcaactccttcacggagctggaacccgacgtggcggcggcgctcccgggcgtgacgccgcggccgccagagctcatccccgtgggcccgctcatcgaggtcgacgagcagcacgacggcgacggcgacggcgcggggtcgggcgcggtgcgtggcgacctgatgaaggccgcggacgactgcgtggagtggctagacgcgcaggcgccgcgctccatggtgtacgcatcggtgggcagcgtggtacggctcaacgcggaggaggtgggcgagatggcgcacgggctcgcgtccacggggcggcccttcctgtgggttgtccgtcccgatacccgggccgctcctcccagagggattcctggactccgtggccgggcgcggcacggtggtgccgtggagcccccaggaccgcgtgctggcgcacccgtccatcgcctgcttcctgacgcactgcggctggaactctaccctggagaccatcgcagcgggcgtaccagtggtggccttcccgcagtggggcgaccagttgcactgacgccaagttcctggtggaggaactcaggattggggtccgcctccgcgggccgctgcggcgggacgccgtgcgggaggcggtagacgccgccgtggcggggcccgaggccgacgcgatgctcgccaacgccaggaggtggagcgcggcggcgcgggaggccgtggcgctcggcgggtcctcggacgcgcatatccaagcgttcgtggacgaggtggcccggcgagcatgtgtcgtgccgccgtcgtcagagattcctagtcctagttgaggtcgaggagcttcagcagtcaccctcaccggacaaagtgagtcgaaagctg

SEQ ID NO: 38382 - protein, 458 aa, Zea mays subsp. mays
  peptide (1)..(458): Ceres Seq. ID no. 12374653
  misc_feature (48)..(362): NCBI GI NO: 13431605 NR Description: Limonoid UDP-glucosyltransferase
  misc_feature (48)..(362): NCBI GI NO: 28628183 NR Description: UDP-glucosyl transferase [Fragaria x ananassa]
  misc_feature (46)..(362): NCBI GI NO: 7433899 NR Description: probable indole-3-acetate beta-glucosyltransferase- Arabidopsis thaliana
  misc_feature (46)..(362): NCBI GI NO: 30683281 NR Description: UDP-glycosyltransferase family
  misc_feature (46)..(362): NCBI GI NO: 25082972 NR Description: indole-3-acetate beta-glucosyltransferase like
  misc_feature (48)..(362): NCBI GI NO: 15234616 NR Description: UDP-glycosyltransferase, putative
  misc_feature (48)..(362): NCBI GI NO: 21593030 NR Description: indole-3-acetate beta-glucosyltransferase like
  misc_feature (43)..(373): NCBI GI NO: 15234619 NR Description: indole-3-acetate beta-glucosyltransferase like
  misc_feature (46)..(361): NCBI GI NO: 15233091 NR Description: UDP-glucosyltransferase, putative
  misc_feature (46)..(361): NCBI GI NO: 20259348 NR Description: putative UDP-glucose:indole-3-acetate beta-D-glucosyltransferase
KGHGCAVHFAGKLTASREADEVVAEIRYMGEEEGAPTVAAAAESAPPHLLLICFPGQGHVNPMLRLAKRIAAKGLLVTFSSISRVGAMLAASVGVSAGGDGVPVGRGRVRFEFMDDEDPGPDLDDLLRHLAKDGPPAFAELLERQADAGRPVACVVVNPFMPWAVDVAADAGIPSAVLWVQSCAVFSLYYHHVHGLVEFPPEDDLDARFTLPGLPEMSVADVPSFLLPSNPYKLLVDAIIAQFHTIDRASWVLVNSFTELEPDVAAALPGVTPRPPELIPVGPLIEVDEQHDGDGDGAGSGAVRGDLMKAADDCVEWLDAQAPRSMVYASVGSVVRLNAEEVGEMAHGLASTGRPFLWVVRPDTRAAPPRGIPGLRGRARHGGAVEPPGPRAGAPVHRLLPDALRLELYPGDHRSGRTSGGLPAVGRPVALTPSSWWRNSGLGSASAGRCGGTPCGRR

SEQ ID NO: 38383 - protein, 430 aa, Zea mays subsp. mays
  peptide (1)..(430): Ceres Seq. ID no. 12374654
  misc_feature (20)..(334): NCBI GI NO: 13431605 NR Description: Limonoid UDP-glucosyltransferase
  misc_feature (20)..(334): NCBI GI NO: 28628183 NR Description: UDP-glucosyl transferase [Fragaria x ananassa]
  misc_feature (18)..(334): NCBI GI NO: 7433899 NR Description: probable indole-3-acetate beta-glucosyltransferase- Arabidopsis thaliana
  misc_feature (18)..(334): NCBI GI NO: 30683281 NR Description: UDP-glycosyltransferase family
  misc_feature (18)..(334): NCBI GI NO: 25082972 NR Description: indole-3-acetate beta-glucosyltransferase like
  misc_feature (20)..(334): NCBI GI NO: 15234616 NR Description: UDP-glycosyltransferase, putative
  misc_feature (20)..(334): NCBI GI NO: 21593030 NR Description: indole-3-acetate beta-glucosyltransferase like
  misc_feature (15)..(345): NCBI GI NO: 15234619 NR Description: indole-3-acetate beta-glucosyltransferase like
  misc_feature (18)..(333): NCBI GI NO: 15233091 NR Description: UDP-glucosyltransferase, putative
  misc_feature (18)..(333): NCBI GI NO: 20259348 NR Description: putative UDP-glucose:indole-3-acetate beta-D-glucosyltransferase
MGEEEGAPTVAAAAESAPPHLLLICFPGQGHVNPMLRLAKRIAAKGLLVTFSSISRVGAMLAASVGVSAGGDGVPVGRGRVRFEFMDDEDPGPDLDDLLRHLAKDGPPAFAELLERQADAGRPVACVVVNPFMPWAVDVAADAGIPSAVLWVQSCAVFSLYYHHVHGLVEFPPEDDLDARFTLPGLPEMSVADVPSFLLPSNPYKLLVDAIIAQFHTIDRASWVLVNSFTELEPDVAAALPGVTPRPPELIPVGPLIEVDEQHDGDGDGAGSGAVRGDLMKAADDCVEWLDAQAPRSMVYASVGSVVRLNAEEVGEMAHGLASTGRPFLWVVRPDTRAAPPRGIPGLRGRARHGGAVEPPGPRAGAPVHRLLPDALRLELYPGDHRSGRTSGGLPAVGRPVALTPSSWWRNSGLGSASAGRCGGTPCGRR

SEQ ID NO: 38384 - protein, 396 aa, Zea mays subsp. mays
  peptide (1)..(396): Ceres Seq. ID no. 12374655
  misc_feature (1)..(300): NCBI GI NO: 13431605 NR Description: Limonoid UDP-glucosyltransferase
  misc_feature (1)..(300): NCBI GI NO: 28628183 NR Description: UDP-glucosyl transferase [Fragaria x ananassa]
  misc_feature (1)..(300): NCBI GI NO: 7433899 NR Description: probable indole-3-acetate beta-glucosyltransferase- Arabidopsis thaliana
  misc_feature (1)..(300): NCBI GI NO: 30683281 NR Description: UDP-glycosyltransferase family
  misc_feature (1)..(300): NCBI GI NO: 25082972 NR Description: indole-3-acetate beta-glucosyltransferase like
  misc_feature (1)..(300): NCBI GI NO: 15234616 NR Description: UDP-glycosyltransferase, putative
  misc_feature (1)..(300): NCBI GI NO: 21593030 NR Description: indole-3-acetate beta-glucosyltransferase like
  misc_feature (1)..(311): NCBI GI NO: 15234619 NR Description: indole-3-acetate beta-glucosyltransferase like
  misc_feature (1)..(299): NCBI GI NO: 15233091 NR Description: UDP-glucosyltransferase, putative
  misc_feature (1)..(299): NCBI GI NO: 20259348 NR Description: putative UDP-glucose:indole-3-acetate beta-D-glucosyltransferase
MLRLAKRIAAKGLLVTFSSISRVGAMLAASVGVSAGGDGVPVGRGRVRFEFMDDEDPGPDLDDLLRHLAKDGPPAFAELLERQADAGRPVACVVVNPFMPWAVDVAADAGIPSAVLWVQSCAVFSLYYHHVHGLVEFPPEDDLDARFTLPGLPEMSVADVPSFLLPSNPYKLLVDAIIAQFHTIDRASWVLVNSFTELEPDVAAALPGVTPRPPELIPVGPLIEVDEQHDGDGDGAGSGAVRGDLMKAADDCVEWLDAQAPRSMVYASVGSVVRLNAEEVGEMAHGLASTGRPFLWVVRPDTRAAPPRGIPGLRGRARHGGAVEPPGPRAGAPVHRLLPDALRLELYPGDHRSGRTSGGLPAVGRPVALTPSSWWRNSGLGSASAGRCGGTPCGRR

SEQ ID NO: 38385 - DNA, 1108 bp, Zea mays subsp. mays
  misc_feature (1)..(1108): Ceres Seq. ID no. 12374780
ccgtctccctcctatcgcactcgcgtctctttcctattcgcgccgccgccgctgctgcaagcgccagctcgccgtcgtccgaatagtacactctaacgccgccatggggcgtatgcacagccgcgggaagggtatctcgtcgtcggcgctgccgtacaagaggacgcctcctacctggctgaagaccgccgcctccgacgtgagagccgtctcctctccttcgactccattccattcggccgtcgtctggttcgttattgttgggaatgcggatttggttcgttgacgtgtgttctcgcctggtaggtggaggagatgatcacaaaggcagcgaagaagggacagatgccgtcgcagatcggcgtcctgctccgtgaccagcacggtatcccccttgtcaagagtgtcaccggcagcaaaatcctccgcatcctcaaggcccatgggctggcacccgaaatcccggaggacctgtacttcctcatcaagaaggcggtggcgataaggaagcaccttgagaggaacaggaaggacaaagactctaaattcaggctcattcttgtcgagagcaggatccaccgccttgcccgctactacaagcgcacaaagaagcttccacccacgtggaagtacgagtcaaccactgcaagcactctggtggcctaagcgaggagctcagcgtacggcgcttgaagccgagggcattgttggaaatcatttttatgtaccgttttaagagtttggagtgaactagagatggtgaatgtccctcctctggaggatgccatggaccctttttgtttacatagaactgccctgctgttaaacctttgctacttggcgaaggcagttgattgcttgcctccattaacacctgctatgcgagaagcttttagccttgggctgtcgggcagagggactcctaaatgtatgatgtcaaaagcgcacccctagatctgtcagttgcttcgtatacatgtacgtggctgtgtagcttgtgcctgcagcagtgttcgtgtgacatcatccagggcaggacctttccgttggacacccctgacatgatcaacagtatttaaaagccatgttgcggcctatgagcctgttt

SEQ ID NO: 38386 - protein, 116 aa, Zea mays subsp. mays; identical to SEQ ID NO: 19906
  peptide (1)..(116): Ceres Seq. ID no. 12374781
  misc_feature (1)..(116): NCBI GI NO: 464705 NR Description: 40S RIBOSOMAL PROTEIN S13
  misc_feature (1)..(116): NCBI GI NO: 18411224 NR Description: putative ribosomal protein S13
  misc_feature (1)..(116): NCBI GI NO: 18411716 NR Description: ribosomal protein S13 -like; protein id:At3g60770
  misc_feature (1)..(116): NCBI GI NO: 14190367 NR Description: AT3g60770/T4C21_180 [Arabidopsis thaliana]
  misc_feature (1)..(116): NCBI GI NO: 8131699 NR Description: cytoplasmic ribosomal protein S13 [Panax ginseng]
  misc_feature (1)..(116): NCBI GI NO: 7440402 NR Description: ribosomal protein S13
  misc_feature (1)..(116): NCBI GI NO: 11276609 NR Description: ribosomal protein S13-like - Arabidopsis thaliana
  misc_feature (1)..(116): NCBI GI NO: 1173198 NR Description: 40S RIBOSOMAL PROTEIN S13
  misc_feature (1)..(116): NCBI GI NO: 34393549 NR Description: putative 40S RIBOSOMAL PROTEIN S13
  misc_feature (1)..(116): NCBI GI NO: 24266981 NR Description: ribosomal protein S13 [Branchiostoma belcheri]

SEQ ID NO: 38387 - protein, 106 aa, Zea mays subsp. mays
  peptide (1)..(106): Ceres Seq. ID no. 12374782
  misc_feature (1)..(106): NCBI GI NO: 464705 NR Description: 40S RIBOSOMAL PROTEIN S13
  misc_feature (1)..(106): NCBI GI NO: 18411224 NR Description: putative ribosomal protein S13
  misc_feature (1)..(106): NCBI GI NO: 18411716 NR Description: ribosomal protein S13 -like; protein id:At3g60770
  misc_feature (1)..(106): NCBI GI NO: 14190367 NR Description: AT3g60770/T4C21_180 [Arabidopsis thaliana]
  misc_feature (1)..(106): NCBI GI NO: 8131699 NR Description: cytoplasmic ribosomal protein S13 [Panax ginseng]
  misc_feature (1)..(106): NCBI GI NO: 7440402 NR Description: ribosomal protein S13
  misc_feature (1)..(106): NCBI GI NO: 11276609 NR Description: ribosomal protein S13-like - Arabidopsis thaliana
  misc_feature (1)..(106): NCBI GI NO: 1173198 NR Description: 40S RIBOSOMAL PROTEIN S13
  misc_feature (1)..(106): NCBI GI NO: 34393549 NR Description: putative 40S RIBOSOMAL PROTEIN S13
  misc_feature (1)..(106): NCBI GI NO: 24266981 NR Description: ribosomal protein S13 [Branchiostoma belcheri]
MPSQIGVLLRDQHGIPLVKSVTGSKILRILKAHGLAPEIPEDLYFLIKKAVAIRKHLERNRKDKDSKFRLILVESRIHRLARYYKRTKKLPPTWKYESTTASTLVA

SEQ ID NO: 38388 - protein, 94 aa, Zea mays subsp. mays
  peptide (1)..(94): Ceres Seq. ID no. 12374783
  misc_feature (35)..(67): NCBI GI NO: 464705 NR Description: 40S RIBOSOMAL PROTEIN S13
  misc_feature (35)..(67): NCBI GI NO: 18411224 NR Description: putative ribosomal protein S13
  misc_feature (35)..(67): NCBI GI NO: 18411716 NR Description: ribosomal protein S13 -like; protein id:At3g60770
  misc_feature (35)..(67): NCBI GI NO: 14190367 NR Description: AT3g60770/T4C21_180 [Arabidopsis thaliana]
  misc_feature (35)..(67): NCBI GI NO: 8131699 NR Description: cytoplasmic ribosomal protein S13 [Panax ginseng]
  misc_feature (35)..(67): NCBI GI NO: 7440402 NR Description: ribosomal protein S13
  misc_feature (35)..(67): NCBI GI NO: 11276609 NR Description: ribosomal protein S13-like - Arabidopsis thaliana
  misc_feature (35)..(67): NCBI GI NO: 1173198 NR Description: 40S RIBOSOMAL PROTEIN S13
  misc_feature (35)..(67): NCBI GI NO: 34393549 NR Description: putative 40S RIBOSOMAL PROTEIN S13
  misc_feature (35)..(68): NCBI GI NO: 24266981 NR Description: ribosomal protein S13 [Branchiostoma belcheri]
RLPPIALASLSYSRRRRCCKRQLAVVRIVHSNAAMGRMHSRGKGISSSALPYKRTPPTWLKTAASDVRAVSSPSTPFHSAVVWFVIVGNADLVR

SEQ ID NO: 38389 - DNA, 1428 bp, Zea mays subsp. mays
  misc_feature (1)..(1428): Ceres Seq. ID no. 12415601
gcacgagaccattacctagaacatcctaatcgaaaaatcgcctcctctcgggctagctccacactcctttgtcctctccaaacgaacgaacaaaaagaggccgcttccccacccagtcacctcgacctcagcccctctcccccctccctatctcgactccgatgccgccgccgctcctcgaggcgcgcgactacatgggcgccggcgccaccccgttgtcctgctcctccagcggcgagggcacggggccgcacctcgcgctgcggctcgggctcccagggtccgactcccccggccgcgacgcggggccggagccggaccacgcccacgtcgacgccgcgctcaccctcggccctgcccccgcccccgcccccgcgcctcccagggtcggcgcaaagcgcgggttcgctgactcccgcgaccggtgcgtgaagcgggacgccactgctgcggatgacgctgctgggggagtgaccggggaggagaagcgggtagctgccggccgctgccggaactccgccggctgccaaggcgcaagttgttggatggccgcctgttaggagctaccggaagaacacactagctatgagtgccacaaagacaaacggggaagatgaaggtaggagtgaggcgggatgctgttatgttaaggtcagcatggatggagccccatacctaaggaaggtggacctcaagaccttttcgagctatgaggcacctttcgcttgctctggagaaaatgttcacctgcttcatcactggccaaagcggttcgtgcaagacttcaagaagggagaggctcactgatggttctagggctgatgcccttcaggaccaagaatatgtccttacttacgaagataaagatgctgactggatgctcgttggtgatctcccctgggacttgttcaccacaatttgtgggaaacttagaatcatgagaggctctgatgctgctggcatggctccaagatcaccggagcagatagttgggaccagaataaggaacgttgcccggcatgcagagtcgtgaactgaaaggaaaggacagagtttacatggcgctgaagggagcggtgtttttacgtgaagtgctccggttaagtctctctctctctctttttaacccccacatgtgcaatgagatgtgtgtggccctactgtaagacaccccattttgcccacgaggttgtcacgcgttattgtagatggtcgcctttgtgttatgaacgatcaaactcggtagtagcttgcttgctgcttcctctacgatactttcctccgtatttggaagctcgtacttcatatggtagaagtaagaaaaaatgcccatgttgcccattaagtttttttctctcgtgatgtgtgtgcgagcgaactaactattcagtggatctagaaagaatctgatcagtgagtctgtgtgcc

SEQ ID NO: 38390 - protein, 143 aa, Zea mays subsp. mays
  peptide (1)..(143): Ceres Seq. ID no. 12415602
  misc_feature (78)..(143): NCBI GI NO: 34911088 NR Description: OJ1117_G01.11
  misc_feature (68)..(143): NCBI GI NO: 34904314 NR Description: unnamed protein product
  misc_feature (127)..(143): NCBI GI NO: 34906394 NR Description: P0710E05.9
ARDHYLEHPNRKIASSRASSTLLCPLQTNEQKEAASPPSHLDLSPSPPSLSRLRCRRRSSRRATTWAPAPPRCPAPPAARARGRTSRCGSGSQGPTPPAATRGRSRTTPTSTPRSPSALPPPPPPRLPGSAQSAGSLTPATGA

SEQ ID NO: 38391 - protein, 132 aa, Zea mays subsp. mays
  peptide (1)..(132): Ceres Seq. ID no. 12415603
  misc_feature (1)..(101): NCBI GI NO: 34911088 NR Description: OJ1117_G01.11
MPPPLLEARDYMGAGATPLSCSSSGEGTGPHLALRLGLPGSDSPGRDAGPEPDHAHVDAALTLGPAPAPAPAPPRVGAKRGFADSRDRCVKRDATAADDAAGGVTGEEKRVAAGRCRNSAGCQGASCWMAAC

SEQ ID NO: 38392 - protein, 121 aa, Zea mays subsp. mays
  peptide (1)..(121): Ceres Seq. ID no. 12415604
  misc_feature (1)..(90): NCBI GI NO: 34911088 NR Description: OJ1117_G01.11
MGAGATPLSCSSSGEGTGPHLALRLGLPGSDSPGRDAGPEPDHAHVDAALTLGPAPAPAPAPPRVGAKRGFADSRDRCVKRDATAADDAAGGVTGEEKRVAAGRCRNSAGCQGASCWMAAC

SEQ ID NO: 38393 - DNA, 1086 bp, Zea mays subsp. mays; identical to SEQ ID NO: 31786
  misc_feature (1)..(1086): Ceres Seq. ID no. 12358654

SEQ ID NO: 38394 - protein, 216 aa, Zea mays subsp. mays; identical to SEQ ID NO: 31787
  peptide (1)..(216): Ceres Seq. ID no. 12358655
  misc_feature (85)..(215): Pfam Name: Pfam Description:  Protein kinase domain
  misc_feature (1)..(215): NCBI GI NO: 38344237 NR Description: OJ991113_30.14
  misc_feature (9)..(215): NCBI GI NO: 15220477 NR Description: putative protein kinase; protein id: At1g67580.1
  misc_feature (9)..(215): NCBI GI NO: 17064846 NR Description: putative protein kinase [Arabidopsis thaliana]
  misc_feature (16)..(215): NCBI GI NO: 15242731 NR Description: protein kinase; protein id: At5g63370
  misc_feature (8)..(215): NCBI GI NO: 3978441 NR Description: PITSLRE protein kinase alpha SV9 isoform
  misc_feature (5)..(215): NCBI GI NO: 34879827 NR Description: similar to cell division cycle 2 homolog (S
  misc_feature (15)..(215): NCBI GI NO: 507158 NR Description: PITSLRE alpha 1
  misc_feature (15)..(215): NCBI GI NO: 507160 NR Description: PITSLRE alpha 2-2
  misc_feature (15)..(215): NCBI GI NO: 507162 NR Description: PITSLRE alpha 2-3
  misc_feature (15)..(215): NCBI GI NO: 507164 NR Description: PITSLRE alpha 2-4

SEQ ID NO: 38395 - protein, 210 aa, Zea mays subsp. mays; identical to SEQ ID NO: 31788
  peptide (1)..(210): Ceres Seq. ID no. 12358656
  misc_feature (79)..(209): Pfam Name: Pfam Description:  Protein kinase domain
  misc_feature (1)..(209): NCBI GI NO: 38344237 NR Description: OJ991113_30.14
  misc_feature (3)..(209): NCBI GI NO: 15220477 NR Description: putative protein kinase; protein id: At1g67580.1
  misc_feature (3)..(209): NCBI GI NO: 17064846 NR Description: putative protein kinase [Arabidopsis thaliana]
  misc_feature (10)..(209): NCBI GI NO: 15242731 NR Description: protein kinase; protein id: At5g63370
  misc_feature (2)..(209): NCBI GI NO: 3978441 NR Description: PITSLRE protein kinase alpha SV9 isoform
  misc_feature (1)..(209): NCBI GI NO: 34879827 NR Description: similar to cell division cycle 2 homolog (S
  misc_feature (9)..(209): NCBI GI NO: 507158 NR Description: PITSLRE alpha 1
  misc_feature (9)..(209): NCBI GI NO: 507160 NR Description: PITSLRE alpha 2-2
  misc_feature (9)..(209): NCBI GI NO: 507168 NR Description: PITSLRE alpha 2-1
  misc_feature (9)..(209): NCBI GI NO: 507164 NR Description: PITSLRE alpha 2-4

SEQ ID NO: 38396 - protein, 201 aa, Zea mays subsp. mays; identical to SEQ ID NO: 31789
  peptide (1)..(201): Ceres Seq. ID no. 12358657
  misc_feature (70)..(200): Pfam Name: Pfam Description:  Protein kinase domain
  misc_feature (1)..(200): NCBI GI NO: 38344237 NR Description: OJ991113_30.14
  misc_feature (1)..(200): NCBI GI NO: 15220477 NR Description: putative protein kinase; protein id: At1g67580.1
  misc_feature (1)..(200): NCBI GI NO: 17064846 NR Description: putative protein kinase [Arabidopsis thaliana]
  misc_feature (1)..(200): NCBI GI NO: 15242731 NR Description: protein kinase; protein id: At5g63370
  misc_feature (1)..(200): NCBI GI NO: 3978441 NR Description: PITSLRE protein kinase alpha SV9 isoform
  misc_feature (1)..(200): NCBI GI NO: 34879827 NR Description: similar to cell division cycle 2 homolog (S
  misc_feature (1)..(200): NCBI GI NO: 507158 NR Description: PITSLRE alpha 1
  misc_feature (1)..(200): NCBI GI NO: 507160 NR Description: PITSLRE alpha 2-2
  misc_feature (1)..(200): NCBI GI NO: 507164 NR Description: PITSLRE alpha 2-4
  misc_feature (1)..(200): NCBI GI NO: 507168 NR Description: PITSLRE alpha 2-1

SEQ ID NO: 38397 - DNA, 1178 bp, Zea mays subsp. mays
  misc_feature (1)..(1178): Ceres Seq. ID no. 13499179
gcacgagaccattacctagaacatcctaatcgaaaaaaagaagcgttggatcgtcttcggctagcttccggcgcgatggcggggcaggggcagcgcctgaacgtggtgccgacggtgacgacgctgggcacggtgaaggcgcggctggcgggcgccgcccgcggccacgcgctgctcaagaagaagtcggacgcgctgacggtgcagttccgcgccatcctcaggcgcatcgtgtccgccaaggacgccgtgggcgacgccatgcgcaccgcctcgctctcgctcgccgaggcgctgtacgtggccggcgcgccgctccggccacgctgcgcagcagtccgtgtccggcccggccaggctccgcgtgcgcgcgcaccaggacaacatcgccggcgtccgcctcccgcgcttcgagagcgacgcagcgtcgcctgcaggctctgcagcatcgccggcgtcgctcgccgggctcgccggcggcgggcagcaggtgtcggcctgccgcgcggcgtacgcgcgcgcgctccaggtgctggtggagctggcgtcgctgcagacgtcgttcctcgcgctggacgcgtccatcaagaccaccaaccggcgcgtcaacgcgctggagagcgtggtgaagccgcgcctggagaacaccatcgcctacatcaggggcgagctggacgagcacgagcgggaggagttcttccgcctcaagaagatccaggggtacaagcagcgcgagctcgagcgccagaaggaggccgccagccgctacgccgaggagaaggccgccggcgaggtcgcgctcaagcgcggcgtttccgtcgccactgcggagagcatgctggagaacggcgacagggacgaggaggatatcatcttttgagcctgtggagtgtggagtcctatgagtagagcgtgcagtggctgtgctacacctgcggcgccaaacagcaaccttctgtacacacagcccaataagctcgtagctgcagccggtgagccggagcccggaggctacgcgtatattccatctctgcgttaatccatgcgtgtgttttctcacttttttttgttgactgtcacagtggcgaagaacatcctcagctgaatttcattgaaagcaaccttgtttttggaaaaaagaggcaaaacctatataaaattgtggttgaccacatatt

SEQ ID NO: 38398 - protein, 302 aa, Zea mays subsp. mays
  peptide (1)..(302): Ceres Seq. ID no. 13499180
  misc_feature (40)..(103): Pfam Name: Pfam Description:  ATP synthase subunit D
  misc_feature (26)..(119): NCBI GI NO: 38344879 NR Description: OSJNBa0033G05.3
  misc_feature (26)..(103): NCBI GI NO: 15231126 NR Description: v-ATPase subunit D (vATPD) [Arabidopsis thaliana]
  misc_feature (26)..(103): NCBI GI NO: 25529226 NR Description: H+-transporting two-sector ATPase (EC 3
  misc_feature (26)..(103): NCBI GI NO: 2493133 NR Description: Vacuolar ATP synthase subunit D
  misc_feature (26)..(103): NCBI GI NO: 28829327 NR Description: similar to Homo sapiens (Human)
  misc_feature (26)..(103): NCBI GI NO: 3929392 NR Description: Vacuolar ATP synthase subunit D
  misc_feature (30)..(103): NCBI GI NO: 6320784 NR Description: vacuolar ATPase V1 domain subunit D; Vma8p
  misc_feature (26)..(106): NCBI GI NO: 40746132 NR Description: conserved hypothetical protein
  misc_feature (26)..(103): NCBI GI NO: 28278870 NR Description: Similar to ATPase
  misc_feature (26)..(103): NCBI GI NO: 12585447 NR Description: Vacuolar ATP synthase subunit D
ARDHYLEHPNRKKEALDRLRLASGAMAGQGQRLNVVPTVTTLGTVKARLAGAARGHALLKKKSDALTVQFRAILRRIVSAKDAVGDAMRTASLSLAEALYVAGAPLRPRCAAVRVRPGQAPRARAPGQHRRRPPPALRERRSVACRLCSIAGVARRARRRRAAGVGLPRGVRARAPGAGGAGVAADVVPRAGRVHQDHQPARQRAGERGEAAPGEHHRLHQGRAGRARAGGVLPPQEDPGVQAARARAPEGGRQPLRRGEGRRRGRAQARRFRRHCGEHAGERRQGRGGYHLLSLWSVESYE

SEQ ID NO: 38399 - protein, 277 aa, Zea mays subsp. mays
  peptide (1)..(277): Ceres Seq. ID no. 13499181
  misc_feature (15)..(78): Pfam Name: Pfam Description:  ATP synthase subunit D
  misc_feature (1)..(94): NCBI GI NO: 38344879 NR Description: OSJNBa0033G05.3
  misc_feature (1)..(78): NCBI GI NO: 15231126 NR Description: v-ATPase subunit D (vATPD) [Arabidopsis thaliana]
  misc_feature (1)..(78): NCBI GI NO: 25529226 NR Description: H+-transporting two-sector ATPase (EC 3
  misc_feature (1)..(78): NCBI GI NO: 2493133 NR Description: Vacuolar ATP synthase subunit D
  misc_feature (1)..(78): NCBI GI NO: 28829327 NR Description: similar to Homo sapiens (Human)
  misc_feature (1)..(78): NCBI GI NO: 3929392 NR Description: Vacuolar ATP synthase subunit D
  misc_feature (5)..(78): NCBI GI NO: 6320784 NR Description: vacuolar ATPase V1 domain subunit D; Vma8p
  misc_feature (1)..(81): NCBI GI NO: 40746132 NR Description: conserved hypothetical protein
  misc_feature (1)..(78): NCBI GI NO: 28278870 NR Description: Similar to ATPase
  misc_feature (1)..(78): NCBI GI NO: 12585447 NR Description: Vacuolar ATP synthase subunit D
MAGQGQRLNVVPTVTTLGTVKARLAGAARGHALLKKKSDALTVQFRAILRRIVSAKDAVGDAMRTASLSLAEALYVAGAPLRPRCAAVRVRPGQAPRARAPGQHRRRPPPALRERRSVACRLCSIAGVARRARRRRAAGVGLPRGVRARAPGAGGAGVAADVVPRAGRVHQDHQPARQRAGERGEAAPGEHHRLHQGRAGRARAGGVLPPQEDPGVQAARARAPEGGRQPLRRGEGRRRGRAQARRFRRHCGEHAGERRQGRGGYHLLSLWSVESYE

SEQ ID NO: 38400 - protein, 215 aa, Zea mays subsp. mays
  peptide (1)..(215): Ceres Seq. ID no. 13499182
  misc_feature (1)..(32): NCBI GI NO: 38344879 NR Description: OSJNBa0033G05.3
  misc_feature (1)..(16): NCBI GI NO: 15231126 NR Description: v-ATPase subunit D (vATPD) [Arabidopsis thaliana]
  misc_feature (1)..(16): NCBI GI NO: 25529226 NR Description: H+-transporting two-sector ATPase (EC 3
  misc_feature (1)..(16): NCBI GI NO: 2493133 NR Description: Vacuolar ATP synthase subunit D
  misc_feature (1)..(16): NCBI GI NO: 28829327 NR Description: similar to Homo sapiens (Human)
  misc_feature (1)..(16): NCBI GI NO: 3929392 NR Description: Vacuolar ATP synthase subunit D
  misc_feature (1)..(16): NCBI GI NO: 6320784 NR Description: vacuolar ATPase V1 domain subunit D; Vma8p
  misc_feature (1)..(19): NCBI GI NO: 40746132 NR Description: conserved hypothetical protein
  misc_feature (1)..(16): NCBI GI NO: 28278870 NR Description: Similar to ATPase
  misc_feature (1)..(16): NCBI GI NO: 12585447 NR Description: Vacuolar ATP synthase subunit D
MRTASLSLAEALYVAGAPLRPRCAAVRVRPGQAPRARAPGQHRRRPPPALRERRSVACRLCSIAGVARRARRRRAAGVGLPRGVRARAPGAGGAGVAADVVPRAGRVHQDHQPARQRAGERGEAAPGEHHRLHQGRAGRARAGGVLPPQEDPGVQAARARAPEGGRQPLRRGEGRRRGRAQARRFRRHCGEHAGERRQGRGGYHLLSLWSVESYE

SEQ ID NO: 38401 - DNA, 1993 bp, Zea mays subsp. mays; identical to SEQ ID NO: 37781
  misc_feature (1)..(1993): Ceres Seq. ID no. 13492718

SEQ ID NO: 38402 - protein, 444 aa, Zea mays subsp. mays; identical to SEQ ID NO: 37782
  peptide (1)..(444): Ceres Seq. ID no. 15222889
  misc_feature (47)..(295): Pfam Name: Pfam Description:  Protein phosphatase 2C
  misc_feature (1)..(444): NCBI GI NO: 38344839 NR Description: OSJNBa0064H22.20
  misc_feature (14)..(440): NCBI GI NO: 18401703 NR Description: protein phosphatase 2C (PP2C) -related
  misc_feature (14)..(440): NCBI GI NO: 15292869 NR Description: unknown protein [Arabidopsis thaliana]
  misc_feature (7)..(431): NCBI GI NO: 14029015 NR Description: Unknown protein [Oryza sativa]
  misc_feature (3)..(432): NCBI GI NO: 15221404 NR Description: protein phosphatase 2C (PP2C) -related
  misc_feature (33)..(438): NCBI GI NO: 34394411 NR Description: protein phosphatase 2C-like
  misc_feature (1)..(435): NCBI GI NO: 15217454 NR Description: protein phosphatase 2C (PP2C) -related
  misc_feature (37)..(432): NCBI GI NO: 34914644 NR Description: OSJNBa0054L14.21
  misc_feature (33)..(366): NCBI GI NO: 34898168 NR Description: protein phosphatase 2C-like
  misc_feature (1)..(365): NCBI GI NO: 16930415 NR Description: At1g09160/T12M4_13 [Arabidopsis thaliana]
  misc_feature (44)..(44): Xaa is any aa, unknown or other
  misc_feature (86)..(86): Xaa is any aa, unknown or other
  misc_feature (87)..(87): Xaa is any aa, unknown or other

SEQ ID NO: 38403 - DNA, 1921 bp, Zea mays subsp. mays; identical to SEQ ID NO: 32940
  misc_feature (1)..(1921): Ceres Seq. ID no. 12414468
  misc_feature (1519)..(1519): n is a, c, t, g, unknown, or other
  misc_feature (1518)..(1518): n is a, c, t, g, unknown, or other

SEQ ID NO: 38404 - protein, 504 aa, Zea mays subsp. mays; identical to SEQ ID NO: 32941
  peptide (1)..(504): Ceres Seq. ID no. 12414469
  misc_feature (209)..(407): Pfam Name: Pfam Description:  Dehydrin
  misc_feature (127)..(479): NCBI GI NO: 24417262 NR Description: unknown [Arabidopsis thaliana]
  misc_feature (127)..(479): NCBI GI NO: 9758332 NR Description: gene_id:MIJ24
  misc_feature (201)..(455): NCBI GI NO: 10954048 NR Description: ovarian fibroin-like substance-1 [Cyprinus carpio]
  misc_feature (162)..(455): NCBI GI NO: 10954048 NR Description: ovarian fibroin-like substance-1 [Cyprinus carpio]
  misc_feature (161)..(483): NCBI GI NO: 161050 NR Description: p48 eggshell protein
  misc_feature (217)..(459): NCBI GI NO: 27881721 NR Description: Unknown (protein for MGC:52724) [Xenopus laevis]
  misc_feature (206)..(458): NCBI GI NO: 37534924 NR Description: putative glycine-rich protein
  misc_feature (192)..(468): NCBI GI NO: 26252108 NR Description: Similar to pigpen [Mus musculus]
  misc_feature (166)..(468): NCBI GI NO: 27820115 NR Description: AT02511p [Drosophila melanogaster]
  misc_feature (166)..(464): NCBI GI NO: 24654243 NR Description: CG15920-PA [Drosophila melanogaster]

SEQ ID NO: 38405 - protein, 470 aa, Zea mays subsp. mays; identical to SEQ ID NO: 32942
  peptide (1)..(470): Ceres Seq. ID no. 12414470
  misc_feature (175)..(373): Pfam Name: Pfam Description:  Dehydrin
  misc_feature (93)..(445): NCBI GI NO: 24417262 NR Description: unknown [Arabidopsis thaliana]
  misc_feature (93)..(445): NCBI GI NO: 9758332 NR Description: gene_id:MIJ24
  misc_feature (167)..(421): NCBI GI NO: 10954048 NR Description: ovarian fibroin-like substance-1 [Cyprinus carpio]
  misc_feature (128)..(421): NCBI GI NO: 10954048 NR Description: ovarian fibroin-like substance-1 [Cyprinus carpio]
  misc_feature (127)..(449): NCBI GI NO: 161050 NR Description: p48 eggshell protein
  misc_feature (183)..(425): NCBI GI NO: 27881721 NR Description: Unknown (protein for MGC:52724) [Xenopus laevis]
  misc_feature (172)..(424): NCBI GI NO: 37534924 NR Description: putative glycine-rich protein
  misc_feature (158)..(434): NCBI GI NO: 26252108 NR Description: Similar to pigpen [Mus musculus]
  misc_feature (132)..(434): NCBI GI NO: 27820115 NR Description: AT02511p [Drosophila melanogaster]
  misc_feature (132)..(430): NCBI GI NO: 24654243 NR Description: CG15920-PA [Drosophila melanogaster]

SEQ ID NO: 38406 - protein, 393 aa, Zea mays subsp. mays; identical to SEQ ID NO: 32943
  peptide (1)..(393): Ceres Seq. ID no. 12414471
  misc_feature (98)..(296): Pfam Name: Pfam Description:  Dehydrin
  misc_feature (16)..(368): NCBI GI NO: 24417262 NR Description: unknown [Arabidopsis thaliana]
  misc_feature (16)..(368): NCBI GI NO: 9758332 NR Description: gene_id:MIJ24
  misc_feature (90)..(344): NCBI GI NO: 10954048 NR Description: ovarian fibroin-like substance-1 [Cyprinus carpio]
  misc_feature (51)..(344): NCBI GI NO: 10954048 NR Description: ovarian fibroin-like substance-1 [Cyprinus carpio]
  misc_feature (50)..(372): NCBI GI NO: 161050 NR Description: p48 eggshell protein
  misc_feature (106)..(348): NCBI GI NO: 27881721 NR Description: Unknown (protein for MGC:52724) [Xenopus laevis]
  misc_feature (95)..(347): NCBI GI NO: 37534924 NR Description: putative glycine-rich protein
  misc_feature (81)..(357): NCBI GI NO: 26252108 NR Description: Similar to pigpen [Mus musculus]
  misc_feature (55)..(357): NCBI GI NO: 27820115 NR Description: AT02511p [Drosophila melanogaster]
  misc_feature (55)..(353): NCBI GI NO: 24654243 NR Description: CG15920-PA [Drosophila melanogaster]

SEQ ID NO: 38407 - DNA, 1324 bp, Zea mays subsp. mays
  misc_feature (1)..(1324): Ceres Seq. ID no. 12369302
attggtatcaagaaaaacttgtcgaaaaatacacagggcacaatgtgcggaggcgccatcctcgcggagctgatcccgccgacgcggcgcgtggcgtcgaagccggtgacagaaggccacctctggtcggcgagctccaagaaagccggcagcggcagggacaagaggcaccagcacgaatacgccgacgatgacttcgaggccgccttcgaggacttcgacgacgactttgacgtgcatgaagacgacgaggacggccacttcgtattctcgtccaaatccgccttgtccccagccctgcacgacgggcgcgcggcgagccagaagaagcagcgcgggcgccagttccgcggcatccggcagcggccctggggcaagtgggcggcggagatccgcgacccgcacaagggcacccgcgtctggctcggcaccttcagcaccgccgaggacgccgcccgggcctacgacgtggaggcgcgccgcctccgcggcagcaaggccaaggtcaacttccccgcagccagcggtcgcgctcgcggtcgcgcgcgcccacgccgcggcgacgacggcaacccacgaaccgcgccggaaacgcagcacccagcacagcccgctctgctgcctcgaggagagagagagacgcagaggaaggaagggatcgccgccgtgaagccagaagctacggagtcgttcgacgtgggcggcggtctcttcttcgacatggccttccccaccttcccagcctcgccgccgccgcaggccgtggatacgtccttcgccggcagcaccgccacgtcggagaccgggagccccgcgaagaggccgagatgcgacgaagactcgtccgagggcggcagcggctccgcgctggagctcgctgacgagctggcgttcgacccgtttgtgctgctgcagatgccctactcgggtgggtacgacgacgactcactggacggccttttcgccgcagatgaggccgtgcagcaggacgtgggcaacggcatggacggcgtccgcctgtggagcttcgacgagttccccgccgtcgacggttctgttttctgacgtttgcttactacgtactactactattttctgcctggtggaatcatatgtgatagtgctgcatgtgtctgcctgatcgtcagattgtactccactctggatatttgtgctacgtactcgtctggtatttcctactgtgggtcaatggttcctatgaatttgttcacgtcggcgaaactctgtattgtacggtcgtgattgatgtgccaaattaaataagcctgtgaacctggttctatgtatatatggtatcttgatt

SEQ ID NO: 38408 - protein, 354 aa, Zea mays subsp. mays
  peptide (1)..(354): Ceres Seq. ID no. 12369303
  misc_feature (113)..(173): Pfam Name: Pfam Description:  AP2 domain
  misc_feature (15)..(354): NCBI GI NO: 15217291 NR Description: Putative AP2 domain containing protein
  misc_feature (15)..(345): NCBI GI NO: 15217288 NR Description: Putative EREBP-like protein [Oryza sativa]
  misc_feature (15)..(231): NCBI GI NO: 6176534 NR Description: EREBP-like protein [Oryza sativa]
  misc_feature (311)..(347): NCBI GI NO: 6176534 NR Description: EREBP-like protein [Oryza sativa]
  misc_feature (15)..(347): NCBI GI NO: 34906702 NR Description: EREBP
  misc_feature (15)..(347): NCBI GI NO: 33146866 NR Description: EREB-like protein
  misc_feature (15)..(346): NCBI GI NO: 15217289 NR Description: Putative AP2 domain containing transcription factor
  misc_feature (15)..(172): NCBI GI NO: 24940524 NR Description: ethylene response element binding protein
  misc_feature (15)..(204): NCBI GI NO: 22074046 NR Description: transcription factor JERF1
  misc_feature (15)..(264): NCBI GI NO: 37538128 NR Description: JERF3 [Lycopersicon esculentum]
IGIKKNLSKNTQGTMCGGAILAELIPPTRRVASKPVTEGHLWSASSKKAGSGRDKRHQHEYADDDFEAAFEDFDDDFDVHEDDEDGHFVFSSKSALSPALHDGRAASQKKQRGRQFRGIRQRPWGKWAAEIRDPHKGTRVWLGTFSTAEDAARAYDVEARRLRGSKAKVNFPAASGRARGRARPRRGDDGNPRTAPETQHPAQPALLPRGERETQRKEGIAAVKPEATESFDVGGGLFFDMAFPTFPASPPPQAVDTSFAGSTATSETGSPAKRPRCDEDSSEGGSGSALELADELAFDPFVLLQMPYSGGYDDDSLDGLFAADEAVQQDVGNGMDGVRLWSFDEFPAVDGSVF

SEQ ID NO: 38409 - protein, 340 aa, Zea mays subsp. mays
  peptide (1)..(340): Ceres Seq. ID no. 12369304
  misc_feature (99)..(159): Pfam Name: Pfam Description:  AP2 domain
  misc_feature (1)..(340): NCBI GI NO: 15217291 NR Description: Putative AP2 domain containing protein
  misc_feature (1)..(331): NCBI GI NO: 15217288 NR Description: Putative EREBP-like protein [Oryza sativa]
  misc_feature (1)..(217): NCBI GI NO: 6176534 NR Description: EREBP-like protein [Oryza sativa]
  misc_feature (297)..(333): NCBI GI NO: 6176534 NR Description: EREBP-like protein [Oryza sativa]
  misc_feature (1)..(333): NCBI GI NO: 34906702 NR Description: EREBP
  misc_feature (1)..(333): NCBI GI NO: 33146866 NR Description: EREB-like protein
  misc_feature (1)..(332): NCBI GI NO: 15217289 NR Description: Putative AP2 domain containing transcription factor
  misc_feature (1)..(158): NCBI GI NO: 24940524 NR Description: ethylene response element binding protein
  misc_feature (1)..(190): NCBI GI NO: 22074046 NR Description: transcription factor JERF1
  misc_feature (1)..(250): NCBI GI NO: 37538128 NR Description: JERF3 [Lycopersicon esculentum]
MCGGAILAELIPPTRRVASKPVTEGHLWSASSKKAGSGRDKRHQHEYADDDFEAAFEDFDDDFDVHEDDEDGHFVFSSKSALSPALHDGRAASQKKQRGRQFRGIRQRPWGKWAAEIRDPHKGTRVWLGTFSTAEDAARAYDVEARRLRGSKAKVNFPAASGRARGRARPRRGDDGNPRTAPETQHPAQPALLPRGERETQRKEGIAAVKPEATESFDVGGGLFFDMAFPTFPASPPPQAVDTSFAGSTATSETGSPAKRPRCDEDSSEGGSGSALELADELAFDPFVLLQMPYSGGYDDDSLDGLFAADEAVQQDVGNGMDGVRLWSFDEFPAVDGSVF

SEQ ID NO: 38410 - DNA, 931 bp, Zea mays subsp. mays
  misc_feature (1)..(931): Ceres Seq. ID no. 12354601
aatagacagaacgcaccctccagtaaagtccccatggctgctttctggttgctgctgctgttcgtcgccagcgcagtccttgttcttcgtacatggagagctcaaagcttcgtcaacaaggcgcggcaggcagggccgaggtacccgccggggctggagccgtacccgctgatcgggcacctgccacagttcttggctaaccggcaccgcgtgctcgactggatgaccgaggcgctcgcgcgccagacgaccacgtgcacgttcgtgctgcgccggccgggaggcgtgcggggtgcgatcaccgcgaacccggcgaacgtggagcacttcctgcgcaccagcttcgaccactaccccaaggggccccggttcgcgtcgctgctgcacgacttcctcggccggggcatcttcaacgccgacggcgaggcctggcgcgcgcagcggaaggtcgccagccacgagttcaacacgcgctcgctccgagctttcgtggcgcgctgcgtgcacgccgagctacacggccgcctgctcccgctgctgcgccgcgccgcggcgtccggctcccccctcgacctccaggacgtgctcgagcggttcgcgttcgacaatatctgccgcgtcgccttcgaccacgaccctcgccagctcccggacgatggtgacgacactgcggacagcagcttcgccgatgcgttccgcgacgctgcgaatctcagcgcgggccggttccggtacgcggtcccggggttctggaagatcaagaaagcgctgaacttgggttctgagaagcggctgcgggagtccatcgccatggtgcacgacttcgccgatcgcataatccagtcgcgccgggaggagatgttgagcgccggttttgagaagcacgatcttctgtcgcggttcatggcgagccaggacgagacctactccg

SEQ ID NO: 38411 - protein, 310 aa, Zea mays subsp. mays
  peptide (1)..(310): Ceres Seq. ID no. 12354602
  misc_feature (12)..(309): NCBI GI NO: 34902476 NR Description: Putative cytochrome P450
  misc_feature (51)..(306): NCBI GI NO: 15228981 NR Description: cytochrome P450, putative; protein id: At3g56630.1
  misc_feature (51)..(306): NCBI GI NO: 15218671 NR Description: cytochrome p450, putative; protein id: At1g34540.1
  misc_feature (11)..(308): NCBI GI NO: 34909022 NR Description: cytochrome P450-like protein
  misc_feature (23)..(308): NCBI GI NO: 34909030 NR Description: cytochrome P450-like protein
  misc_feature (51)..(308): NCBI GI NO: 34909016 NR Description: cytochrome P450-like protein
  misc_feature (51)..(308): NCBI GI NO: 34909018 NR Description: cytochrome P450-like protein
  misc_feature (16)..(309): NCBI GI NO: 18000068 NR Description: cytochrome P450-dependent fatty acid hydroxylase
  misc_feature (26)..(309): NCBI GI NO: 18000070 NR Description: cytochrome P450-dependent fatty acid hydroxylase
  misc_feature (51)..(303): NCBI GI NO: 34909024 NR Description: cytochrome P450-like protein
NRQNAPSSKVPMAAFWLLLLFVASAVLVLRTWRAQSFVNKARQAGPRYPPGLEPYPLIGHLPQFLANRHRVLDWMTEALARQTTTCTFVLRRPGGVRGAITANPANVEHFLRTSFDHYPKGPRFASLLHDFLGRGIFNADGEAWRAQRKVASHEFNTRSLRAFVARCVHAELHGRLLPLLRRAAASGSPLDLQDVLERFAFDNICRVAFDHDPRQLPDDGDDTADSSFADAFRDAANLSAGRFRYAVPGFWKIKKALNLGSEKRLRESIAMVHDFADRIIQSRREEMLSAGFEKHDLLSRFMASQDETYS

SEQ ID NO: 38412 - protein, 299 aa, Zea mays subsp. mays
  peptide (1)..(299): Ceres Seq. ID no. 12354603
  misc_feature (1)..(298): NCBI GI NO: 34902476 NR Description: Putative cytochrome P450
  misc_feature (40)..(295): NCBI GI NO: 15228981 NR Description: cytochrome P450, putative; protein id: At3g56630.1
  misc_feature (40)..(295): NCBI GI NO: 15218671 NR Description: cytochrome p450, putative; protein id: At1g34540.1
  misc_feature (1)..(297): NCBI GI NO: 34909022 NR Description: cytochrome P450-like protein
  misc_feature (12)..(297): NCBI GI NO: 34909030 NR Description: cytochrome P450-like protein
  misc_feature (40)..(297): NCBI GI NO: 34909016 NR Description: cytochrome P450-like protein
  misc_feature (40)..(297): NCBI GI NO: 34909018 NR Description: cytochrome P450-like protein
  misc_feature (5)..(298): NCBI GI NO: 18000068 NR Description: cytochrome P450-dependent fatty acid hydroxylase
  misc_feature (15)..(298): NCBI GI NO: 18000070 NR Description: cytochrome P450-dependent fatty acid hydroxylase
  misc_feature (40)..(292): NCBI GI NO: 34909024 NR Description: cytochrome P450-like protein
MAAFWLLLLFVASAVLVLRTWRAQSFVNKARQAGPRYPPGLEPYPLIGHLPQFLANRHRVLDWMTEALARQTTTCTFVLRRPGGVRGAITANPANVEHFLRTSFDHYPKGPRFASLLHDFLGRGIFNADGEAWRAQRKVASHEFNTRSLRAFVARCVHAELHGRLLPLLRRAAASGSPLDLQDVLERFAFDNICRVAFDHDPRQLPDDGDDTADSSFADAFRDAANLSAGRFRYAVPGFWKIKKALNLGSEKRLRESIAMVHDFADRIIQSRREEMLSAGFEKHDLLSRFMASQDETYS

SEQ ID NO: 38413 - protein, 236 aa, Zea mays subsp. mays
  peptide (1)..(236): Ceres Seq. ID no. 12354604
  misc_feature (1)..(235): NCBI GI NO: 34902476 NR Description: Putative cytochrome P450
  misc_feature (1)..(232): NCBI GI NO: 15228981 NR Description: cytochrome P450, putative; protein id: At3g56630.1
  misc_feature (1)..(232): NCBI GI NO: 15218671 NR Description: cytochrome p450, putative; protein id: At1g34540.1
  misc_feature (1)..(234): NCBI GI NO: 34909022 NR Description: cytochrome P450-like protein
  misc_feature (1)..(234): NCBI GI NO: 34909030 NR Description: cytochrome P450-like protein
  misc_feature (1)..(234): NCBI GI NO: 34909016 NR Description: cytochrome P450-like protein
  misc_feature (1)..(234): NCBI GI NO: 34909018 NR Description: cytochrome P450-like protein
  misc_feature (1)..(235): NCBI GI NO: 18000068 NR Description: cytochrome P450-dependent fatty acid hydroxylase
  misc_feature (1)..(235): NCBI GI NO: 18000070 NR Description: cytochrome P450-dependent fatty acid hydroxylase
  misc_feature (1)..(229): NCBI GI NO: 34909024 NR Description: cytochrome P450-like protein
MTEALARQTTTCTFVLRRPGGVRGAITANPANVEHFLRTSFDHYPKGPRFASLLHDFLGRGIFNADGEAWRAQRKVASHEFNTRSLRAFVARCVHAELHGRLLPLLRRAAASGSPLDLQDVLERFAFDNICRVAFDHDPRQLPDDGDDTADSSFADAFRDAANLSAGRFRYAVPGFWKIKKALNLGSEKRLRESIAMVHDFADRIIQSRREEMLSAGFEKHDLLSRFMASQDETYS

SEQ ID NO: 38414 - DNA, 1753 bp, Zea mays subsp. mays
  misc_feature (1)..(1753): Ceres Seq. ID no. 12368205
gacaacctaaaagcagaaagtataactgtataagtaatgccatcagctccgtacttgacgtagaattccaatggaaatggaactagaccctttcctgggcgtcgtgctcgccaccgccgtcctcctcgtcgccgtcctccgccggaagcgcggctccagccgcaagtacaagatgccatccgggcctaggccgtggccggtgatcggcaacctcaacctgatcggcgcgctcccgcaccgctccatccacgcgctctccgcgcggcacggcgcgttcatgtcgctccgcttcggctccgtccccgtcgtcgtcggctcctccgtggaagcggccaggttcttcctcaggaccagcgacacgtcgttcatcgaccgccccaggatggcggccgggaagtacaccgcctacgactactccgacatcgtctggtcgccctgcggggcgtactggcgccaggcgcgcaagctctggaaggcccatctgttcagcgacaggcagctcaggtcgcaggagcacgtccgcagcgaggagctgcgcgtcctgctgcgcgccctgtcgtcgtcgtcctccgcgggcgcggccgggcgcggccggcgggccgtcgcgctcaaggagcacctgctcatgtacagcctcaacgtgatctcgcgcatggcgctgggcgggaagtacgtcggcgagggcggcaccgcgggctcgccgatctcgccggccgagttcagctggatggtcgacgagctcttcctcctcaacggcgtgttctgcgtcggggacttcatcccgtggctcggctggctggacctccagggctacgtcgggaggatgaagaggctgggcaagatgttcgatcgcttcctggagcacgtggtggacgagcacgaccagcggcggcggcgggagggcggcgggttcgtccccgcggacatggtggacctgctgctggagctcgccgacgaccccaaactcgaggtccccatcgaacgggatggcgtcaagggattcgcgctggacctgatcgctggcggcacggactccacggcggtgaccatcgagtgggccatgtcggagctcctgcggaagcccgaggtcctcgccaaggtcaccgaggagctggacggcgtcatcggccacggccgcctggtcaccgagcaggacatcccggacctgccgtacctggaggccgtcgtgaaggagaccctccgcctgcacccggtgacgccgctgctggcgccgcggctgtgccgcgaggacgcgtccacgggcagctacgacatcccgcggggcacgctcgtgttcgtcaacgtctgggccatcggccgcgaccccgccgtgtggggccacgacgcggaggagttccgcccggagaggttcgtcggcagcgccgtggacgtgaagggccacgacctggagctgctcccgttcgggtccggccgccggatgtgcccgggctacgtcctcgggctcaagatggtgcaggtcaccctggccaacctgctgcacgccttctcgtggaggctgcctgatagcgtggcgccggagaagctgaacatgcaggagaagttcgggctcgccgtgccgcgcttggtcccgctcgaggccgtcgccgtgcccaggctgccaccacacctgtatgccgggccatgatgcatgtctatgtttgtttttgtaggcgcatacaactgtctcgtaataaaagatacatatcttttctctgtacatatacacctaataaagagacaaacaatatcgtcg

SEQ ID NO: 38415 - protein, 524 aa, Zea mays subsp. mays
  peptide (1)..(524): Ceres Seq. ID no. 12368206
  misc_feature (36)..(510): Pfam Name: Pfam Description:  Cytochrome P450
  misc_feature (8)..(523): NCBI GI NO: 18377404 NR Description: cytochrome P450 monooxygenase CYP92A1
  misc_feature (5)..(522): NCBI GI NO: 14423327 NR Description: elicitor-inducible cytochrome P450
  misc_feature (3)..(510): NCBI GI NO: 7430637 NR Description: cytochrome P450 - common tobacco
  misc_feature (5)..(522): NCBI GI NO: 7430636 NR Description: probable cytochrome P450
  misc_feature (12)..(506): NCBI GI NO: 12004682 NR Description: cytochrome P450 [Pisum sativum]
  misc_feature (13)..(521): NCBI GI NO: 37694931 NR Description: flavonoid 3'-hydroxylase [Ipomoea purpurea]
  misc_feature (5)..(522): NCBI GI NO: 18148451 NR Description: flavonoid 3'-hydroxylase [Glycine max]
  misc_feature (11)..(521): NCBI GI NO: 12231882 NR Description: flavonoid 3',5'-hydroxylase
  misc_feature (3)..(521): NCBI GI NO: 12231880 NR Description: putative flavonoid 3'-hydroxylase
  misc_feature (9)..(521): NCBI GI NO: 14278925 NR Description: flavonoid 3'-hydroxylase [Perilla frutescens]
MEMELDPFLGVVLATAVLLVAVLRRKRGSSRKYKMPSGPRPWPVIGNLNLIGALPHRSIHALSARHGAFMSLRFGSVPVVVGSSVEAARFFLRTSDTSFIDRPRMAAGKYTAYDYSDIVWSPCGAYWRQARKLWKAHLFSDRQLRSQEHVRSEELRVLLRALSSSSSAGAAGRGRRAVALKEHLLMYSLNVISRMALGGKYVGEGGTAGSPISPAEFSWMVDELFLLNGVFCVGDFIPWLGWLDLQGYVGRMKRLGKMFDRFLEHVVDEHDQRRRREGGGFVPADMVDLLLELADDPKLEVPIERDGVKGFALDLIAGGTDSTAVTIEWAMSELLRKPEVLAKVTEELDGVIGHGRLVTEQDIPDLPYLEAVVKETLRLHPVTPLLAPRLCREDASTGSYDIPRGTLVFVNVWAIGRDPAVWGHDAEEFRPERFVGSAVDVKGHDLELLPFGSGRRMCPGYVLGLKMVQVTLANLLHAFSWRLPDSVAPEKLNMQEKFGLAVPRLVPLEAVAVPRLPPHLYAGP

SEQ ID NO: 38416 - protein, 522 aa, Zea mays subsp. mays
  peptide (1)..(522): Ceres Seq. ID no. 12368207
  misc_feature (34)..(508): Pfam Name: Pfam Description:  Cytochrome P450
  misc_feature (6)..(521): NCBI GI NO: 18377404 NR Description: cytochrome P450 monooxygenase CYP92A1
  misc_feature (3)..(520): NCBI GI NO: 14423327 NR Description: elicitor-inducible cytochrome P450
  misc_feature (1)..(508): NCBI GI NO: 7430637 NR Description: cytochrome P450 - common tobacco
  misc_feature (3)..(520): NCBI GI NO: 7430636 NR Description: probable cytochrome P450
  misc_feature (10)..(504): NCBI GI NO: 12004682 NR Description: cytochrome P450 [Pisum sativum]
  misc_feature (11)..(519): NCBI GI NO: 37694931 NR Description: flavonoid 3'-hydroxylase [Ipomoea purpurea]
  misc_feature (3)..(520): NCBI GI NO: 18148451 NR Description: flavonoid 3'-hydroxylase [Glycine max]
  misc_feature (9)..(519): NCBI GI NO: 12231882 NR Description: flavonoid 3',5'-hydroxylase
  misc_feature (1)..(519): NCBI GI NO: 12231880 NR Description: putative flavonoid 3'-hydroxylase
  misc_feature (7)..(519): NCBI GI NO: 14278925 NR Description: flavonoid 3'-hydroxylase [Perilla frutescens]
MELDPFLGVVLATAVLLVAVLRRKRGSSRKYKMPSGPRPWPVIGNLNLIGALPHRSIHALSARHGAFMSLRFGSVPVVVGSSVEAARFFLRTSDTSFIDRPRMAAGKYTAYDYSDIVWSPCGAYWRQARKLWKAHLFSDRQLRSQEHVRSEELRVLLRALSSSSSAGAAGRGRRAVALKEHLLMYSLNVISRMALGGKYVGEGGTAGSPISPAEFSWMVDELFLLNGVFCVGDFIPWLGWLDLQGYVGRMKRLGKMFDRFLEHVVDEHDQRRRREGGGFVPADMVDLLLELADDPKLEVPIERDGVKGFALDLIAGGTDSTAVTIEWAMSELLRKPEVLAKVTEELDGVIGHGRLVTEQDIPDLPYLEAVVKETLRLHPVTPLLAPRLCREDASTGSYDIPRGTLVFVNVWAIGRDPAVWGHDAEEFRPERFVGSAVDVKGHDLELLPFGSGRRMCPGYVLGLKMVQVTLANLLHAFSWRLPDSVAPEKLNMQEKFGLAVPRLVPLEAVAVPRLPPHLYAGP

SEQ ID NO: 38417 - protein, 490 aa, Zea mays subsp. mays
  peptide (1)..(490): Ceres Seq. ID no. 12368208
  misc_feature (2)..(476): Pfam Name: Pfam Description:  Cytochrome P450
  misc_feature (1)..(489): NCBI GI NO: 18377404 NR Description: cytochrome P450 monooxygenase CYP92A1
  misc_feature (1)..(488): NCBI GI NO: 14423327 NR Description: elicitor-inducible cytochrome P450
  misc_feature (1)..(476): NCBI GI NO: 7430637 NR Description: cytochrome P450 - common tobacco
  misc_feature (1)..(488): NCBI GI NO: 7430636 NR Description: probable cytochrome P450
  misc_feature (1)..(472): NCBI GI NO: 12004682 NR Description: cytochrome P450 [Pisum sativum]
  misc_feature (1)..(487): NCBI GI NO: 37694931 NR Description: flavonoid 3'-hydroxylase [Ipomoea purpurea]
  misc_feature (1)..(488): NCBI GI NO: 18148451 NR Description: flavonoid 3'-hydroxylase [Glycine max]
  misc_feature (1)..(487): NCBI GI NO: 12231882 NR Description: flavonoid 3',5'-hydroxylase
  misc_feature (1)..(487): NCBI GI NO: 12231880 NR Description: putative flavonoid 3'-hydroxylase
  misc_feature (1)..(487): NCBI GI NO: 14278925 NR Description: flavonoid 3'-hydroxylase [Perilla frutescens]
MPSGPRPWPVIGNLNLIGALPHRSIHALSARHGAFMSLRFGSVPVVVGSSVEAARFFLRTSDTSFIDRPRMAAGKYTAYDYSDIVWSPCGAYWRQARKLWKAHLFSDRQLRSQEHVRSEELRVLLRALSSSSSAGAAGRGRRAVALKEHLLMYSLNVISRMALGGKYVGEGGTAGSPISPAEFSWMVDELFLLNGVFCVGDFIPWLGWLDLQGYVGRMKRLGKMFDRFLEHVVDEHDQRRRREGGGFVPADMVDLLLELADDPKLEVPIERDGVKGFALDLIAGGTDSTAVTIEWAMSELLRKPEVLAKVTEELDGVIGHGRLVTEQDIPDLPYLEAVVKETLRLHPVTPLLAPRLCREDASTGSYDIPRGTLVFVNVWAIGRDPAVWGHDAEEFRPERFVGSAVDVKGHDLELLPFGSGRRMCPGYVLGLKMVQVTLANLLHAFSWRLPDSVAPEKLNMQEKFGLAVPRLVPLEAVAVPRLPPHLYAGP

SEQ ID NO: 38418 - DNA, 1496 bp, Zea mays subsp. mays
  misc_feature (1)..(1496): Ceres Seq. ID no. 12357245
caaagatcttatgatgccctgggagactttgttttgtggtgtatagatagcatcatgtctgaattgtcaggctcatcagctggatctaagggttcaaagaaggttgcccaacagtctccaagggcccaggttgcaatctttgttgttcttgccatgactttaagaagaaagcctgatgtacttgtaaatgttatgccaaagataatgggaaacaataaatatcttggacaggaaaagcttcccatcattgtctggtttattgctcaggcatctcaaggtgacctagtgactggcatgttttgctgggctcattttctatttcccacgttatgtgcgaagccaagtgggaatccccttgcaagagatttggttttgcagttgcttgaaagaattttatctgtcaccaaagctcgttctatcttattgaatggtgctgttagaaagggggaacgcctagttccccctgtttcatttgacttgttcatgagagccacatttccggtttctggtgctcgggtgaaggctacagaaaggtttgaagtagcttatcgaacaatcaaggagttggctcttgccggttctcctggctctaaaactgtgaaacaagcatcacagcaacttttacctttgtgtgcaaaagcaatgcaagaaaacaacacagagctcaccagggaggctgttgatgtgttcatttggtgcttgacacaaaatgcagagtccaacaagcagtgggaaagaatttatcctgaaaatactgaagccagtgttgctgtcctgagcaaaattgtgattgattggaaggacgtgtctcctaagctcaattctgaagctctcaaggcaacagtgaagaacttgaaggctaagaatgaggcagcgctggagtcagcaacagatgctggaaagcaggcatctatcaaagaagcagacaagcactgtaaggtgatccttggaaagctgacgcgcggttccacctgcctgaagagcacccttgtgggcatcgccctcgcagttgcagctagtctcgtgctatcatctcctgacatggaccttgcgctcgagtgggagaagatccaggcgatggtctcatcgcacctgtcgttctgaagatacctgtccggaatctccagacgtgggtggatctaagtcatacaagccatccaaaggggatggctgactcagcagtgaagagagctcaaggggtggtgagaataagagggaggggggggggataggtgctagaaccgaaaggttatagttttcatgagtcgccatttttttcccgcgcttcctccagcagcagcggtgccctgataggagggagatgcagtagtcgactttgcagagagttggtttaatcggggtgggtgcgaactgcgaagaaggtttgagtcaaatggctcgaccagaggattaacaccttttgcttttctctttgtgcatctgagatgatgttggcaaacagttttggttatctagaatcttgaatcgtattccgc

SEQ ID NO: 38419 - protein, 367 aa, Zea mays subsp. mays
  peptide (1)..(367): Ceres Seq. ID no. 12357246
  misc_feature (1)..(367): NCBI GI NO: 34895518 NR Description: unnamed protein product
  misc_feature (2)..(367): NCBI GI NO: 15223242 NR Description: unknown protein; protein id: At1g70770.1
  misc_feature (1)..(338): NCBI GI NO: 15220663 NR Description: unknown protein; protein id: At1g23170.1
  misc_feature (10)..(345): NCBI GI NO: 6671944 NR Description: unknown protein [Arabidopsis thaliana]
  misc_feature (10)..(345): NCBI GI NO: 18399392 NR Description: expressed protein; protein id: At3g11880
  misc_feature (1)..(225): NCBI GI NO: 25518112 NR Description: T26J12.6 protein - Arabidopsis thaliana
  misc_feature (234)..(338): NCBI GI NO: 25518112 NR Description: T26J12.6 protein - Arabidopsis thaliana
QRSYDALGDFVLWCIDSIMSELSGSSAGSKGSKKVAQQSPRAQVAIFVVLAMTLRRKPDVLVNVMPKIMGNNKYLGQEKLPIIVWFIAQASQGDLVTGMFCWAHFLFPTLCAKPSGNPLARDLVLQLLERILSVTKARSILLNGAVRKGERLVPPVSFDLFMRATFPVSGARVKATERFEVAYRTIKELALAGSPGSKTVKQASQQLLPLCAKAMQENNTELTREAVDVFIWCLTQNAESNKQWERIYPENTEASVAVLSKIVIDWKDVSPKLNSEALKATVKNLKAKNEAALESATDAGKQASIKEADKHCKVILGKLTRGSTCLKSTLVGIALAVAASLVLSSPDMDLALEWEKIQAMVSSHLSF

SEQ ID NO: 38420 - protein, 349 aa, Zea mays subsp. mays
  peptide (1)..(349): Ceres Seq. ID no. 12357247
  misc_feature (1)..(349): NCBI GI NO: 34895518 NR Description: unnamed protein product
  misc_feature (1)..(349): NCBI GI NO: 15223242 NR Description: unknown protein; protein id: At1g70770.1
  misc_feature (1)..(320): NCBI GI NO: 15220663 NR Description: unknown protein; protein id: At1g23170.1
  misc_feature (1)..(327): NCBI GI NO: 6671944 NR Description: unknown protein [Arabidopsis thaliana]
  misc_feature (1)..(327): NCBI GI NO: 18399392 NR Description: expressed protein; protein id: At3g11880
  misc_feature (1)..(207): NCBI GI NO: 25518112 NR Description: T26J12.6 protein - Arabidopsis thaliana
  misc_feature (216)..(320): NCBI GI NO: 25518112 NR Description: T26J12.6 protein - Arabidopsis thaliana
MSELSGSSAGSKGSKKVAQQSPRAQVAIFVVLAMTLRRKPDVLVNVMPKIMGNNKYLGQEKLPIIVWFIAQASQGDLVTGMFCWAHFLFPTLCAKPSGNPLARDLVLQLLERILSVTKARSILLNGAVRKGERLVPPVSFDLFMRATFPVSGARVKATERFEVAYRTIKELALAGSPGSKTVKQASQQLLPLCAKAMQENNTELTREAVDVFIWCLTQNAESNKQWERIYPENTEASVAVLSKIVIDWKDVSPKLNSEALKATVKNLKAKNEAALESATDAGKQASIKEADKHCKVILGKLTRGSTCLKSTLVGIALAVAASLVLSSPDMDLALEWEKIQAMVSSHLSF

SEQ ID NO: 38421 - protein, 316 aa, Zea mays subsp. mays
  peptide (1)..(316): Ceres Seq. ID no. 12357248
  misc_feature (1)..(316): NCBI GI NO: 34895518 NR Description: unnamed protein product
  misc_feature (1)..(316): NCBI GI NO: 15223242 NR Description: unknown protein; protein id: At1g70770.1
  misc_feature (1)..(287): NCBI GI NO: 15220663 NR Description: unknown protein; protein id: At1g23170.1
  misc_feature (1)..(294): NCBI GI NO: 6671944 NR Description: unknown protein [Arabidopsis thaliana]
  misc_feature (1)..(294): NCBI GI NO: 18399392 NR Description: expressed protein; protein id: At3g11880
  misc_feature (1)..(174): NCBI GI NO: 25518112 NR Description: T26J12.6 protein - Arabidopsis thaliana
  misc_feature (183)..(287): NCBI GI NO: 25518112 NR Description: T26J12.6 protein - Arabidopsis thaliana
MTLRRKPDVLVNVMPKIMGNNKYLGQEKLPIIVWFIAQASQGDLVTGMFCWAHFLFPTLCAKPSGNPLARDLVLQLLERILSVTKARSILLNGAVRKGERLVPPVSFDLFMRATFPVSGARVKATERFEVAYRTIKELALAGSPGSKTVKQASQQLLPLCAKAMQENNTELTREAVDVFIWCLTQNAESNKQWERIYPENTEASVAVLSKIVIDWKDVSPKLNSEALKATVKNLKAKNEAALESATDAGKQASIKEADKHCKVILGKLTRGSTCLKSTLVGIALAVAASLVLSSPDMDLALEWEKIQAMVSSHLSF

SEQ ID NO: 38422 - DNA, 1183 bp, Zea mays subsp. mays
  misc_feature (1)..(1183): Ceres Seq. ID no. 13504973
aattaatcccccacgttccccttccctttctctcccgccgccgcacgcccctctcaaacctccgcgctcccgcccagctagggtttccccgatctcccctcctcctcaaccgccgccgtctccgagagcgccgccacgatgttggagctgcggcttgtgcaggggagcctcctcaagaaggtcctggaggcgatccgcgagctggtcaacgacgccaacttcgactgctccggcaccgggttctcgctgcaggccatggactcgagccacgtcgccctcgtcgcgctgctcctccgcgccgaggggttcgagcactaccgctgcgaccgcaacctctccatgggcatgaacctcaacaacatggccaagatgctccggtgcgccggtaacgacgacatcatcaccataaaggccgatgacggttctgacaccgtcacctttatgttcgagtcgcccaagcaagataagattgcggatttcgagatgaaactgatggatattgatagcgagcacctcggaatcccggattccgagtaccaggccatcgtccgcatgccttcttctgagtttatgaggatctgcaaggaccttagcagcatcggagacactgtcgttatctcggtaaccaaggagggcgtgaagttctccacatctggagaaattgggagtgcgaacattgtttgcaggcagaaccaaactattgacaagccagaagaggctaccattatagagatgcaagagccggtttccctgacctttgccctaaggtacatgaactcgttcaccaaggcgtcttcactgtccgaacaagtcacgatcagcctgtcgtccgagctaccagtggtggtcgagtacaagatcgctgagatgggttacattagattttacctggcgccaaagatcgaggacgatgaggagatgaagccatgattgccatcagtgctcgtgctgccgactttttctcgtcttccatccatggtttgcttattagctattatttgcacgcaaaggaaaaaaaagatgttatgttttatatcttaggccagactgctttagctacttatttgtgactgctgtgtgtccatggatttatagtgaatctagattagtgggcttgtgctttgtgcatgccgctgctgtctgcccatttttctattcagacatgaaattctttgttgggatc

SEQ ID NO: 38423 - protein, 263 aa, Zea mays subsp. mays
  peptide (1)..(263): Ceres Seq. ID no. 13504974
  misc_feature (1)..(125): Pfam Name: Pfam Description:  Proliferating cell nuclear antigen
  misc_feature (1)..(263): NCBI GI NO: 2499442 NR Description: PROLIFERATING CELL NUCLEAR ANTIGEN (PCNA)
  misc_feature (1)..(263): NCBI GI NO: 4099508 NR Description: proliferating cell nuclear antigen [Zea mays]
  misc_feature (1)..(262): NCBI GI NO: 129697 NR Description: PROLIFERATING CELL NUCLEAR ANTIGEN (PCNA) (CYCLIN)
  misc_feature (1)..(263): NCBI GI NO: 10946427 NR Description: proliferating cell nuclear antigen
  misc_feature (1)..(263): NCBI GI NO: 25005275 NR Description: proliferating cell nuclear antigen
  misc_feature (1)..(263): NCBI GI NO: 3608175 NR Description: proliferating cell nuclear antigen [Pisum sativum]
  misc_feature (1)..(263): NCBI GI NO: 6225836 NR Description: Proliferating cell nuclear antigen (PCNA)
  misc_feature (1)..(263): NCBI GI NO: 129692 NR Description: PROLIFERATING CELL NUCLEAR ANTIGEN (PCNA) (CYCLIN)
  misc_feature (1)..(263): NCBI GI NO: 3947727 NR Description: proliferating cell nuclear antigen
  misc_feature (1)..(263): NCBI GI NO: 100160 NR Description: proliferating cell nuclear antigen (clone 4
MLELRLVQGSLLKKVLEAIRELVNDANFDCSGTGFSLQAMDSSHVALVALLLRAEGFEHYRCDRNLSMGMNLNNMAKMLRCAGNDDIITIKADDGSDTVTFMFESPKQDKIADFEMKLMDIDSEHLGIPDSEYQAIVRMPSSEFMRICKDLSSIGDTVVISVTKEGVKFSTSGEIGSANIVCRQNQTIDKPEEATIIEMQEPVSLTFALRYMNSFTKASSLSEQVTISLSSELPVVVEYKIAEMGYIRFYLAPKIEDDEEMKP

SEQ ID NO: 38424 - protein, 224 aa, Zea mays subsp. mays
  peptide (1)..(224): Ceres Seq. ID no. 13504975
  misc_feature (1)..(86): Pfam Name: Pfam Description:  Proliferating cell nuclear antigen
  misc_feature (1)..(224): NCBI GI NO: 2499442 NR Description: PROLIFERATING CELL NUCLEAR ANTIGEN (PCNA)
  misc_feature (1)..(224): NCBI GI NO: 4099508 NR Description: proliferating cell nuclear antigen [Zea mays]
  misc_feature (1)..(223): NCBI GI NO: 129697 NR Description: PROLIFERATING CELL NUCLEAR ANTIGEN (PCNA) (CYCLIN)
  misc_feature (1)..(224): NCBI GI NO: 10946427 NR Description: proliferating cell nuclear antigen
  misc_feature (1)..(224): NCBI GI NO: 25005275 NR Description: proliferating cell nuclear antigen
  misc_feature (1)..(224): NCBI GI NO: 3608175 NR Description: proliferating cell nuclear antigen [Pisum sativum]
  misc_feature (1)..(224): NCBI GI NO: 6225836 NR Description: Proliferating cell nuclear antigen (PCNA)
  misc_feature (1)..(224): NCBI GI NO: 129692 NR Description: PROLIFERATING CELL NUCLEAR ANTIGEN (PCNA) (CYCLIN)
  misc_feature (1)..(224): NCBI GI NO: 3947727 NR Description: proliferating cell nuclear antigen
  misc_feature (1)..(224): NCBI GI NO: 100160 NR Description: proliferating cell nuclear antigen (clone 4
MDSSHVALVALLLRAEGFEHYRCDRNLSMGMNLNNMAKMLRCAGNDDIITIKADDGSDTVTFMFESPKQDKIADFEMKLMDIDSEHLGIPDSEYQAIVRMPSSEFMRICKDLSSIGDTVVISVTKEGVKFSTSGEIGSANIVCRQNQTIDKPEEATIIEMQEPVSLTFALRYMNSFTKASSLSEQVTISLSSELPVVVEYKIAEMGYIRFYLAPKIEDDEEMKP

SEQ ID NO: 38425 - protein, 196 aa, Zea mays subsp. mays
  peptide (1)..(196): Ceres Seq. ID no. 13504976
  misc_feature (1)..(58): Pfam Name: Pfam Description:  Proliferating cell nuclear antigen
  misc_feature (1)..(196): NCBI GI NO: 2499442 NR Description: PROLIFERATING CELL NUCLEAR ANTIGEN (PCNA)
  misc_feature (1)..(196): NCBI GI NO: 4099508 NR Description: proliferating cell nuclear antigen [Zea mays]
  misc_feature (1)..(195): NCBI GI NO: 129697 NR Description: PROLIFERATING CELL NUCLEAR ANTIGEN (PCNA) (CYCLIN)
  misc_feature (1)..(196): NCBI GI NO: 10946427 NR Description: proliferating cell nuclear antigen
  misc_feature (1)..(196): NCBI GI NO: 25005275 NR Description: proliferating cell nuclear antigen
  misc_feature (1)..(196): NCBI GI NO: 3608175 NR Description: proliferating cell nuclear antigen [Pisum sativum]
  misc_feature (1)..(196): NCBI GI NO: 6225836 NR Description: Proliferating cell nuclear antigen (PCNA)
  misc_feature (1)..(196): NCBI GI NO: 129692 NR Description: PROLIFERATING CELL NUCLEAR ANTIGEN (PCNA) (CYCLIN)
  misc_feature (1)..(196): NCBI GI NO: 3947727 NR Description: proliferating cell nuclear antigen
  misc_feature (1)..(196): NCBI GI NO: 100160 NR Description: proliferating cell nuclear antigen (clone 4
MGMNLNNMAKMLRCAGNDDIITIKADDGSDTVTFMFESPKQDKIADFEMKLMDIDSEHLGIPDSEYQAIVRMPSSEFMRICKDLSSIGDTVVISVTKEGVKFSTSGEIGSANIVCRQNQTIDKPEEATIIEMQEPVSLTFALRYMNSFTKASSLSEQVTISLSSELPVVVEYKIAEMGYIRFYLAPKIEDDEEMKP

SEQ ID NO: 38426 - DNA, 894 bp, Zea mays subsp. mays
  misc_feature (1)..(894): Ceres Seq. ID no. 13499157
  misc_feature (883)..(883): n is a, c, t, g, unknown, or other
  misc_feature (608)..(608): n is a, c, t, g, unknown, or other
gcacgagaccattacctagaacatcctaatcaaaaagcaccgggtccttgctttgcgcgttgctgttcgcataaacaagagatcctagttctactcccaagcaatgtatccgtcagcccctccggacgcgtataacaagttcagcgccggggctccgccaacggcgccgccgccgccggcagcgtaccaccagcagcagcagcagcacggagcgaacatggacacttcacgccccggcggcgggctgaggaaatggtccaccggcctcttccactgcatggacgacccggggaactgtctcatcacatgcctgtgcccctgcgtcacgttcgggcaggtcgctgacatcgtggacaaggggcacctgcccatgtatcgcgagcggactggtgtacgggctcatctgcgcgtcgacggggatggggtgcctgtactcgtgcctctaccggtccaagctgagggccgagtacgacctggacgaaggggagtgcccggacatcctggtgcactgctgctgcgagcacctggctctgtgccaagagtaccgcgagctcaagaaccgcggcttcgacctggggatcggttgggaggctaacatggaccggcanaggcgaggagttgccggcggcggcgcggtgatgggggcgccgccggccataccgctgggcatgattaggtagatgattgattgatgcgaaatggcagaacttgctttcgtggttcttttgtttgactatgtaatgtatcttcgtttccatcgattctatgtaatttaactgtccctttttttttggctctctattgtggaggtcgctgggtgtgaatagcactgttttggatgggtttgtgattggtctagatgacttatataaggtgattgtanagcggagtttt

SEQ ID NO: 38427 - protein, 163 aa, Zea mays subsp. mays
  peptide (1)..(163): Ceres Seq. ID no. 13499158
  misc_feature (42)..(86): NCBI GI NO: 8272626 NR Description: ORFX [Lycopersicon esculentum]
  misc_feature (42)..(86): NCBI GI NO: 8272628 NR Description: ORFX [Lycopersicon pennellii]
  misc_feature (42)..(86): NCBI GI NO: 27414005 NR Description: fw2.2 [Lycopersicon pimpinellifolium]
  misc_feature (42)..(86): NCBI GI NO: 27414017 NR Description: fw2.2 [Lycopersicon pennellii]
  misc_feature (42)..(86): NCBI GI NO: 27414003 NR Description: fw2.2 [Lycopersicon cheesmanii]
  misc_feature (50)..(86): NCBI GI NO: 15223920 NR Description: expressed protein [Arabidopsis thaliana]
  misc_feature (33)..(86): NCBI GI NO: 15217930 NR Description: hypothetical protein [Arabidopsis thaliana]
  misc_feature (47)..(163): NCBI GI NO: 34897272 NR Description: hypothetical protein
  misc_feature (18)..(133): NCBI GI NO: 15229653 NR Description: hypothetical protein [Arabidopsis thaliana]
  misc_feature (51)..(86): NCBI GI NO: 34897268 NR Description: unknown protein
MYPSAPPDAYNKFSAGAPPTAPPPPAAYHQQQQQHGANMDTSRPGGGLRKWSTGLFHCMDDPGNCLITCLCPCVTFGQVADIVDKGHLPMYRERTGVRAHLRVDGDGVPVLVPLPVQAEGRVRPGRRGVPGHPGALLLRAPGSVPRVPRAQEPRLRPGDRLGG

SEQ ID NO: 38428 - protein, 125 aa, Zea mays subsp. mays
  peptide (1)..(125): Ceres Seq. ID no. 13499159
  misc_feature (4)..(48): NCBI GI NO: 8272626 NR Description: ORFX [Lycopersicon esculentum]
  misc_feature (4)..(48): NCBI GI NO: 8272628 NR Description: ORFX [Lycopersicon pennellii]
  misc_feature (4)..(48): NCBI GI NO: 27414017 NR Description: fw2.2 [Lycopersicon pennellii]
  misc_feature (4)..(48): NCBI GI NO: 27414005 NR Description: fw2.2 [Lycopersicon pimpinellifolium]
  misc_feature (4)..(48): NCBI GI NO: 27414003 NR Description: fw2.2 [Lycopersicon cheesmanii]
  misc_feature (12)..(48): NCBI GI NO: 15223920 NR Description: expressed protein [Arabidopsis thaliana]
  misc_feature (1)..(48): NCBI GI NO: 15217930 NR Description: hypothetical protein [Arabidopsis thaliana]
  misc_feature (9)..(125): NCBI GI NO: 34897272 NR Description: hypothetical protein
  misc_feature (1)..(95): NCBI GI NO: 15229653 NR Description: hypothetical protein [Arabidopsis thaliana]
  misc_feature (13)..(48): NCBI GI NO: 34897268 NR Description: unknown protein
MDTSRPGGGLRKWSTGLFHCMDDPGNCLITCLCPCVTFGQVADIVDKGHLPMYRERTGVRAHLRVDGDGVPVLVPLPVQAEGRVRPGRRGVPGHPGALLLRAPGSVPRVPRAQEPRLRPGDRLGG

SEQ ID NO: 38429 - protein, 105 aa, Zea mays subsp. mays
  peptide (1)..(105): Ceres Seq. ID no. 13499160
  misc_feature (1)..(28): NCBI GI NO: 8272626 NR Description: ORFX [Lycopersicon esculentum]
  misc_feature (1)..(28): NCBI GI NO: 27414005 NR Description: fw2.2 [Lycopersicon pimpinellifolium]
  misc_feature (1)..(28): NCBI GI NO: 8272628 NR Description: ORFX [Lycopersicon pennellii]
  misc_feature (1)..(28): NCBI GI NO: 27414017 NR Description: fw2.2 [Lycopersicon pennellii]
  misc_feature (1)..(28): NCBI GI NO: 27414003 NR Description: fw2.2 [Lycopersicon cheesmanii]
  misc_feature (1)..(28): NCBI GI NO: 15223920 NR Description: expressed protein [Arabidopsis thaliana]
  misc_feature (1)..(28): NCBI GI NO: 15217930 NR Description: hypothetical protein [Arabidopsis thaliana]
  misc_feature (1)..(105): NCBI GI NO: 34897272 NR Description: hypothetical protein
  misc_feature (1)..(75): NCBI GI NO: 15229653 NR Description: hypothetical protein [Arabidopsis thaliana]
  misc_feature (1)..(28): NCBI GI NO: 34897268 NR Description: unknown protein
MDDPGNCLITCLCPCVTFGQVADIVDKGHLPMYRERTGVRAHLRVDGDGVPVLVPLPVQAEGRVRPGRRGVPGHPGALLLRAPGSVPRVPRAQEPRLRPGDRLGG

SEQ ID NO: 38430 - DNA, 1745 bp, Zea mays subsp. mays
  misc_feature (1)..(1745): Ceres Seq. ID no. 12362494
gcacgagaccattacctagaacatcctaatcgaaaaagccttctcgtctgtccccttaatttttcaacctgctctggtggctggtttggccaccaatttcctctcaaagatacagcgaaatgcgcattattatatgtactgccgccgtcgtttaatcggtgtgttcatctcagctgtcgtgcagggcagcaggtggcgaggaggtcgtctcgtcgcggacagccgaggccgttgacctctccagctgctggacgcaacacggcaacgcgcaaacgcctctcctctgtgcgtaccggactaccggtaccgcgcgttcagtttccacttccacccgcgtcgtccgtctctctccgctcagcttgaggtgtccggatcacggcggttgcaacctgcagccgcaccagcaagccgctgctccctctcctaaccggccgctgcagctgccataccagccggaggagatgccggcggcgccggccatccgcctggggcctccgcacccgtacctgaagacccacgggggcaaggtcgcgaggctgcaccggctggactgggccgtgctgctgctcatcgccgccgccgacgtcgggctcaacctcgtcgagccgttccaccgcttcgtcggcgaggacatgctcgcggacctccggtacccgctgaagagcaacaccgtgcccgtctgggccgtgccggtgtacgcggtgatcggcccgatcgtcgtgttcgtcgggttatacctgaagcggaggaacgtgtacgacatgcaccacgccattctaggccttctcttctccgtgctcatcaccggcgtcctcaccgacgccatcaaggacggcgttggccggccgcgccccaacttcttctggcgctgcttccctgacggagtgccgaagtacgacaacatcacaagaggagtcctgtgcgacggcgtcgcgagcgtgatcaaagaagggcacaagagcttcccaagcggccattcttcgtggtccttcgctggcctaggcttcctgtcgtggtacctggcgggcaaggtcaaggcgttcgaccggcgcggccacgtggccaagctgtgcgtcgtgctcctgccgctgctgctcgcggccatggtggcggtgtcgcgggtggacgactactggcaccactggcaggacgtgtttgccggtgggattcttgggttggtggttgcgtctttctgctaccttcagtttttcccaccgccatctggtgaacaaggattctggccccatgcgtactccgagcacattctcaacaaccctgagcgcgagggccgagcgcagtccacagcgagctcgaaccaccaccgacgcctgtccagccgaggccacgtggcagtggagatgagcaccgcgaccgcgagcgcgagccaggacgcatcgtcgttaggtcccatggaggagatggagatggaggaaggacgcggcggagcccggtacgaacagcgctagctgcagcttcagtcttcaaagtcgcttcgtttccttccttcattcctttctttttttcttcttcttcttctttttgctcgtttggttgatagatgtgtgtgtctatctagtagtaaggtgctgtttgttgtgtcggtcctgctgtaaattagatgtaggtaggtaggtaggtagccaggtaggtaggtgaaccatgcatgtttcatatgtttgatgcagtacgatgatgattagcacgtactgtacaacggaagcatgcgtgcgtgcgtgccccggttc

SEQ ID NO: 38431 - protein, 334 aa, Zea mays subsp. mays
  peptide (1)..(334): Ceres Seq. ID no. 12362495
  misc_feature (78)..(253): Pfam Name: Pfam Description:  PAP2 superfamily
  misc_feature (1)..(315): NCBI GI NO: 34910912 NR Description: putative phosphatidic acid phosphatase beta
  misc_feature (5)..(300): NCBI GI NO: 38637528 NR Description: unknown protein
  misc_feature (1)..(286): NCBI GI NO: 20161571 NR Description: putative phosphatidic acid phosphatase beta
  misc_feature (5)..(286): NCBI GI NO: 15218051 NR Description: putative phosphatidic acid phosphatase
  misc_feature (1)..(286): NCBI GI NO: 9621903 NR Description: phosphatidic acid phosphatase alpha
  misc_feature (18)..(280): NCBI GI NO: 38637527 NR Description: putative phosphatidic acid phosphatase beta
  misc_feature (5)..(298): NCBI GI NO: 10673973 NR Description: phosphatidic acid phosphatase beta
  misc_feature (16)..(278): NCBI GI NO: 6957723 NR Description: putative phosphatidate phosphohydrolase
  misc_feature (16)..(278): NCBI GI NO: 18396250 NR Description: putative phosphatidate phosphohydrolase
  misc_feature (16)..(316): NCBI GI NO: 21554001 NR Description: putative phosphatidic acid phosphatase
MPAAPAIRLGPPHPYLKTHGGKVARLHRLDWAVLLLIAAADVGLNLVEPFHRFVGEDMLADLRYPLKSNTVPVWAVPVYAVIGPIVVFVGLYLKRRNVYDMHHAILGLLFSVLITGVLTDAIKDGVGRPRPNFFWRCFPDGVPKYDNITRGVLCDGVASVIKEGHKSFPSGHSSWSFAGLGFLSWYLAGKVKAFDRRGHVAKLCVVLLPLLLAAMVAVSRVDDYWHHWQDVFAGGILGLVVASFCYLQFFPPPSGEQGFWPHAYSEHILNNPEREGRAQSTASSNHHRRLSSRGHVAVEMSTATASASQDASSLGPMEEMEMEEGRGGARYEQR

SEQ ID NO: 38432 - protein, 277 aa, Zea mays subsp. mays
  peptide (1)..(277): Ceres Seq. ID no. 12362496
  misc_feature (21)..(196): Pfam Name: Pfam Description:  PAP2 superfamily
  misc_feature (1)..(258): NCBI GI NO: 34910912 NR Description: putative phosphatidic acid phosphatase beta
  misc_feature (1)..(243): NCBI GI NO: 38637528 NR Description: unknown protein
  misc_feature (1)..(229): NCBI GI NO: 20161571 NR Description: putative phosphatidic acid phosphatase beta
  misc_feature (1)..(229): NCBI GI NO: 15218051 NR Description: putative phosphatidic acid phosphatase
  misc_feature (1)..(229): NCBI GI NO: 9621903 NR Description: phosphatidic acid phosphatase alpha
  misc_feature (1)..(223): NCBI GI NO: 38637527 NR Description: putative phosphatidic acid phosphatase beta
  misc_feature (1)..(241): NCBI GI NO: 10673973 NR Description: phosphatidic acid phosphatase beta
  misc_feature (1)..(221): NCBI GI NO: 6957723 NR Description: putative phosphatidate phosphohydrolase
  misc_feature (1)..(221): NCBI GI NO: 18396250 NR Description: putative phosphatidate phosphohydrolase
  misc_feature (1)..(259): NCBI GI NO: 21554001 NR Description: putative phosphatidic acid phosphatase
MLADLRYPLKSNTVPVWAVPVYAVIGPIVVFVGLYLKRRNVYDMHHAILGLLFSVLITGVLTDAIKDGVGRPRPNFFWRCFPDGVPKYDNITRGVLCDGVASVIKEGHKSFPSGHSSWSFAGLGFLSWYLAGKVKAFDRRGHVAKLCVVLLPLLLAAMVAVSRVDDYWHHWQDVFAGGILGLVVASFCYLQFFPPPSGEQGFWPHAYSEHILNNPEREGRAQSTASSNHHRRLSSRGHVAVEMSTATASASQDASSLGPMEEMEMEEGRGGARYEQR

SEQ ID NO: 38433 - protein, 234 aa, Zea mays subsp. mays
  peptide (1)..(234): Ceres Seq. ID no. 12362497
  misc_feature (1)..(153): Pfam Name: Pfam Description:  PAP2 superfamily
  misc_feature (1)..(215): NCBI GI NO: 34910912 NR Description: putative phosphatidic acid phosphatase beta
  misc_feature (1)..(200): NCBI GI NO: 38637528 NR Description: unknown protein
  misc_feature (1)..(186): NCBI GI NO: 20161571 NR Description: putative phosphatidic acid phosphatase beta
  misc_feature (1)..(186): NCBI GI NO: 15218051 NR Description: putative phosphatidic acid phosphatase
  misc_feature (1)..(186): NCBI GI NO: 9621903 NR Description: phosphatidic acid phosphatase alpha
  misc_feature (1)..(180): NCBI GI NO: 38637527 NR Description: putative phosphatidic acid phosphatase beta
  misc_feature (1)..(198): NCBI GI NO: 10673973 NR Description: phosphatidic acid phosphatase beta
  misc_feature (1)..(178): NCBI GI NO: 6957723 NR Description: putative phosphatidate phosphohydrolase
  misc_feature (1)..(178): NCBI GI NO: 18396250 NR Description: putative phosphatidate phosphohydrolase
  misc_feature (1)..(216): NCBI GI NO: 21554001 NR Description: putative phosphatidic acid phosphatase
MHHAILGLLFSVLITGVLTDAIKDGVGRPRPNFFWRCFPDGVPKYDNITRGVLCDGVASVIKEGHKSFPSGHSSWSFAGLGFLSWYLAGKVKAFDRRGHVAKLCVVLLPLLLAAMVAVSRVDDYWHHWQDVFAGGILGLVVASFCYLQFFPPPSGEQGFWPHAYSEHILNNPEREGRAQSTASSNHHRRLSSRGHVAVEMSTATASASQDASSLGPMEEMEMEEGRGGARYEQR

SEQ ID NO: 38434 - DNA, 1826 bp, Zea mays subsp. mays
  misc_feature (1)..(1826): Ceres Seq. ID no. 12415154
gactcagtcaatctcgccttgctctcctcttcgacccatcgtcggttcctgggatcagcatcgacgagcaggatttttccggctgtggaggattactgctgcttgacaaatccgagcgcaaaggttgcttcctgacgcgttcccccatggcacgagcaggagcacgagcacgagcacgagcaggagaaggcggctagaaggttcctgctcccgggcgtgacctctcacacggcatggtcgttgcttcgccggggaggcgcagcggggatggtcgataggagcagggccgtgctcatcggggtcaccgccggcgtcgcggccgcgctggtcgcggcggcgggcgtgcttctggccgtctggctctaccgccggcgggccagcgtcgccgcacggacgcgctccccggagtcgccctcggcgacgctgcgggccggcggcgccggtcgcgccagcctcgactccagcgtctccgtctcggtggtctccgagagcgccgccgactggggccacccgccaccgcacaaacgcgccgcgttctgggcctggagaggcggcgccggccacaacggcagggaggcgccaccgctgtccgtctccgggatcccaaaataccattacaaggatctgcagaaggctaccagcaactttaccacaattcttgggcaaggatcgttcggccctgtgtacaaagctgtaatggccactggtgaagtggtagctgtaaaggtgctcgcgagtgattcaaggcaaggggaaagaaagttccagactgaggtagcattgcttagcaggttgcatcataggaatcttgttaatttggttgggtattgtgtagaaaaaggtcagcgcattctgatttatgagtacatgagcaatgggagtttggcaagacttttatatggcgacaataaacgaagtttgagctggcaagaaaggctgcaaattgctcacgatgtttctcatgggattgagtacctgcatgaaggggctgttccttctgttattcacagggacctaaagtctgataatatacttttggaccattcaatgagagccaaggttgcagactttggtctatcaaaggaggaagtgtatgatggaaggaagtctggccttaagggcacctatggctatatggatcctgattacatgtccacaaataagctaacaaagaagagcgacgtgtatagctttggcataatactttttgaactgataactgccataaatccacaacaaggtctgatggagtacattaatctggcagcgattggaggggaggggagggttgattgggacgagatactggacaaggacctcctagtagggaacatccctgaagaggttcggatgcttgctgatgttgcctaccgatgcgttaacaagaatccgaggaagcgcccctggatatcagaggtcacacaggccatctcaagactcagacagcaccagctgataaagcatgatgcgataactctgccgaggagtgagaccaggaccgtccttaggaggatagactaccagcacgtggagcttagtgacctcactagcatcaaagaacttacgccgataagggcatcatgaactcgtgagcttgttctagtatgtaggttgctttatagagttagatttggacttggttcggcgatgttgtagctgtttgatgaaagcatcaggtagctagatcgttgaaagatgtcttggctgcaatgagagctctccttaattggagttctgtactgacctgaggtttgaaatcgttgtaaaaaaatcaacagtagtagctgtagcatttgataaaaaaagactttataaactgcattttt

SEQ ID NO: 38435 - protein, 438 aa, Zea mays subsp. mays
  peptide (1)..(438): Ceres Seq. ID no. 12415155
  misc_feature (1)..(431): NCBI GI NO: 1076634 NR Description: serine/threonine-specific protein kinase NPK15
  misc_feature (1)..(431): NCBI GI NO: 11358843 NR Description: serine/threonine-specific protein kinase-likeprotein
  misc_feature (1)..(431): NCBI GI NO: 18417765 NR Description: serine/threonine-specific protein kinase-likeprotein
  misc_feature (5)..(399): NCBI GI NO: 38636770 NR Description: putative serine/threonine-specific protein kinase
  misc_feature (1)..(391): NCBI GI NO: 30696480 NR Description: protein kinase family [Arabidopsis thaliana]
  misc_feature (115)..(388): NCBI GI NO: 15230108 NR Description: protein kinase, putative; protein id: At3g24400.1
  misc_feature (90)..(394): NCBI GI NO: 30699436 NR Description: leucine-rich repeat transmembrane protein kinase
  misc_feature (92)..(394): NCBI GI NO: 7715608 NR Description: F20B17.5 [Arabidopsis thaliana]
  misc_feature (120)..(388): NCBI GI NO: 18408845 NR Description: F12A21.14; protein id: At1g67720.1
  misc_feature (115)..(396): NCBI GI NO: 15221470 NR Description: protein kinase, putative; protein id: At1g68690
MVDRSRAVLIGVTAGVAAALVAAAGVLLAVWLYRRRASVAARTRSPESPSATLRAGGAGRASLDSSVSVSVVSESAADWGHPPPHKRAAFWAWRGGAGHNGREAPPLSVSGIPKYHYKDLQKATSNFTTILGQGSFGPVYKAVMATGEVVAVKVLASDSRQGERKFQTEVALLSRLHHRNLVNLVGYCVEKGQRILIYEYMSNGSLARLLYGDNKRSLSWQERLQIAHDVSHGIEYLHEGAVPSVIHRDLKSDNILLDHSMRAKVADFGLSKEEVYDGRKSGLKGTYGYMDPDYMSTNKLTKKSDVYSFGIILFELITAINPQQGLMEYINLAAIGGEGRVDWDEILDKDLLVGNIPEEVRMLADVAYRCVNKNPRKRPWISEVTQAISRLRQHQLIKHDAITLPRSETRTVLRRIDYQHVELSDLTSIKELTPIRAS

SEQ ID NO: 38436 - protein, 295 aa, Zea mays subsp. mays
  peptide (1)..(295): Ceres Seq. ID no. 12415156
  misc_feature (1)..(288): NCBI GI NO: 1076634 NR Description: serine/threonine-specific protein kinase NPK15
  misc_feature (1)..(288): NCBI GI NO: 11358843 NR Description: serine/threonine-specific protein kinase-likeprotein
  misc_feature (1)..(288): NCBI GI NO: 18417765 NR Description: serine/threonine-specific protein kinase-likeprotein
  misc_feature (1)..(256): NCBI GI NO: 38636770 NR Description: putative serine/threonine-specific protein kinase
  misc_feature (1)..(248): NCBI GI NO: 30696480 NR Description: protein kinase family [Arabidopsis thaliana]
  misc_feature (1)..(245): NCBI GI NO: 15230108 NR Description: protein kinase, putative; protein id: At3g24400.1
  misc_feature (1)..(251): NCBI GI NO: 30699436 NR Description: leucine-rich repeat transmembrane protein kinase
  misc_feature (1)..(251): NCBI GI NO: 7715608 NR Description: F20B17.5 [Arabidopsis thaliana]
  misc_feature (1)..(245): NCBI GI NO: 18408845 NR Description: F12A21.14; protein id: At1g67720.1
  misc_feature (1)..(253): NCBI GI NO: 15221470 NR Description: protein kinase, putative; protein id: At1g68690
MATGEVVAVKVLASDSRQGERKFQTEVALLSRLHHRNLVNLVGYCVEKGQRILIYEYMSNGSLARLLYGDNKRSLSWQERLQIAHDVSHGIEYLHEGAVPSVIHRDLKSDNILLDHSMRAKVADFGLSKEEVYDGRKSGLKGTYGYMDPDYMSTNKLTKKSDVYSFGIILFELITAINPQQGLMEYINLAAIGGEGRVDWDEILDKDLLVGNIPEEVRMLADVAYRCVNKNPRKRPWISEVTQAISRLRQHQLIKHDAITLPRSETRTVLRRIDYQHVELSDLTSIKELTPIRAS

SEQ ID NO: 38437 - protein, 238 aa, Zea mays subsp. mays
  peptide (1)..(238): Ceres Seq. ID no. 12415157
  misc_feature (1)..(231): NCBI GI NO: 1076634 NR Description: serine/threonine-specific protein kinase NPK15
  misc_feature (1)..(231): NCBI GI NO: 11358843 NR Description: serine/threonine-specific protein kinase-likeprotein
  misc_feature (1)..(231): NCBI GI NO: 18417765 NR Description: serine/threonine-specific protein kinase-likeprotein
  misc_feature (1)..(199): NCBI GI NO: 38636770 NR Description: putative serine/threonine-specific protein kinase
  misc_feature (1)..(191): NCBI GI NO: 30696480 NR Description: protein kinase family [Arabidopsis thaliana]
  misc_feature (1)..(188): NCBI GI NO: 15230108 NR Description: protein kinase, putative; protein id: At3g24400.1
  misc_feature (1)..(194): NCBI GI NO: 30699436 NR Description: leucine-rich repeat transmembrane protein kinase
  misc_feature (1)..(194): NCBI GI NO: 7715608 NR Description: F20B17.5 [Arabidopsis thaliana]
  misc_feature (1)..(188): NCBI GI NO: 18408845 NR Description: F12A21.14; protein id: At1g67720.1
  misc_feature (1)..(196): NCBI GI NO: 15221470 NR Description: protein kinase, putative; protein id: At1g68690
MSNGSLARLLYGDNKRSLSWQERLQIAHDVSHGIEYLHEGAVPSVIHRDLKSDNILLDHSMRAKVADFGLSKEEVYDGRKSGLKGTYGYMDPDYMSTNKLTKKSDVYSFGIILFELITAINPQQGLMEYINLAAIGGEGRVDWDEILDKDLLVGNIPEEVRMLADVAYRCVNKNPRKRPWISEVTQAISRLRQHQLIKHDAITLPRSETRTVLRRIDYQHVELSDLTSIKELTPIRAS

SEQ ID NO: 38438 - DNA, 1386 bp, Zea mays subsp. mays; identical to SEQ ID NO: 28545
  misc_feature (1)..(1386): Ceres Seq. ID no. 13492826

SEQ ID NO: 38439 - protein, 342 aa, Zea mays subsp. mays; identical to SEQ ID NO: 28546
  peptide (1)..(342): Ceres Seq. ID no. 13492827
  misc_feature (1)..(342): NCBI GI NO: 34909204 NR Description: P0425G02.25
  misc_feature (20)..(320): NCBI GI NO: 15231951 NR Description: glycine-rich protein [Arabidopsis thaliana]
  misc_feature (20)..(321): NCBI GI NO: 15231950 NR Description: expressed protein [Arabidopsis thaliana]
  misc_feature (100)..(307): NCBI GI NO: 6934300 NR Description: unknown [Euphorbia esula]
  misc_feature (88)..(307): NCBI GI NO: 30687286 NR Description: expressed protein [Arabidopsis thaliana]
  misc_feature (90)..(307): NCBI GI NO: 15242979 NR Description: expressed protein [Arabidopsis thaliana]
  misc_feature (100)..(307): NCBI GI NO: 34395170 NR Description: chloroplast lumen common protein family-likeprotein
  misc_feature (100)..(307): NCBI GI NO: 34900644 NR Description: hypothetical protein~similar to Arabidopsisthaliana chromosome5
  misc_feature (96)..(309): NCBI GI NO: 18416870 NR Description: expressed protein [Arabidopsis thaliana]

SEQ ID NO: 38440 - protein, 230 aa, Zea mays subsp. mays; identical to SEQ ID NO: 28547
  peptide (1)..(230): Ceres Seq. ID no. 13492828
  misc_feature (1)..(230): NCBI GI NO: 34909204 NR Description: P0425G02.25
  misc_feature (1)..(208): NCBI GI NO: 15231951 NR Description: glycine-rich protein [Arabidopsis thaliana]
  misc_feature (1)..(209): NCBI GI NO: 15231950 NR Description: expressed protein [Arabidopsis thaliana]
  misc_feature (1)..(195): NCBI GI NO: 6934300 NR Description: unknown [Euphorbia esula]
  misc_feature (1)..(195): NCBI GI NO: 30687286 NR Description: expressed protein [Arabidopsis thaliana]
  misc_feature (1)..(195): NCBI GI NO: 15242979 NR Description: expressed protein [Arabidopsis thaliana]
  misc_feature (1)..(195): NCBI GI NO: 34395170 NR Description: chloroplast lumen common protein family-likeprotein
  misc_feature (1)..(195): NCBI GI NO: 34900644 NR Description: hypothetical protein~similar to Arabidopsisthaliana chromosome5
  misc_feature (1)..(197): NCBI GI NO: 18416870 NR Description: expressed protein [Arabidopsis thaliana]

SEQ ID NO: 38441 - protein, 216 aa, Zea mays subsp. mays; identical to SEQ ID NO: 28548
  peptide (1)..(216): Ceres Seq. ID no. 13492829
  misc_feature (1)..(216): NCBI GI NO: 34909204 NR Description: P0425G02.25
  misc_feature (1)..(194): NCBI GI NO: 15231951 NR Description: glycine-rich protein [Arabidopsis thaliana]
  misc_feature (1)..(195): NCBI GI NO: 15231950 NR Description: expressed protein [Arabidopsis thaliana]
  misc_feature (1)..(181): NCBI GI NO: 6934300 NR Description: unknown [Euphorbia esula]
  misc_feature (1)..(181): NCBI GI NO: 30687286 NR Description: expressed protein [Arabidopsis thaliana]
  misc_feature (1)..(181): NCBI GI NO: 15242979 NR Description: expressed protein [Arabidopsis thaliana]
  misc_feature (1)..(181): NCBI GI NO: 34395170 NR Description: chloroplast lumen common protein family-likeprotein
  misc_feature (1)..(181): NCBI GI NO: 34900644 NR Description: hypothetical protein~similar to Arabidopsisthaliana chromosome5
  misc_feature (1)..(183): NCBI GI NO: 18416870 NR Description: expressed protein [Arabidopsis thaliana]

SEQ ID NO: 38442 - DNA, 1638 bp, Zea mays subsp. mays
  misc_feature (1)..(1638): Ceres Seq. ID no. 12369305
gggcgtccatgtcctgctgctgccgccgcgggacctgagaggagaaggacgaggacgaggtggtggttggcggcgtcgcgccgacggcggacatgggttggaggcggggaggaggcgcggatggcgtggccaggagatgggtgctgctgctatgcgtcgggagcttctgcctcggcctgctcttcaccgacaggatgtggagcttgccagaagcagatgaggtagcagtactcccaaatttaagaagagaggaagaggctgagcgcaagactggagactgtaatgtaggcaaagttcaaggaaaacacgattacaatgacatgttacgtgtctcagatgctcaccataattcacagactttggataaggcaatagcgaacttggagacagagctctctgcggcaagaactctacaagattctttcctcaatggatctccagtgcaagaagattacaaggcttcagagtctaccggtaggcgcaagtaccttatggtaataggtatcaacactgcttttagcagtcgcaagagaagggattctatccgcaacacctggatgcctacaggggaaataaggaaaaagctggaggaagaaagagggatcatagtttttgtaattggtcacagtgctatttcaggtggaattgtcgatagagcaattcaggcagaggataagaaacatggagacttcatgaggctggatcatgttgaaggataccttgagctgtcagggaaaaccaggacatactttgcaacagctgttgctttatgggatgctaacttctatgtgaaggttgacgacgatgtacatgttaatatagcaacacttggaaatatcttatccaaacatatttcaaagcccagggtatacattggatgcatgaagtctggccctgtcctctctgacaaggatgtgaggtactatgaaccagagcactggaaatttggggaagtgggtaataaatattttcggcatgccaccggtcaactgtacgctatttcaaaagatttggcagcctacatatcgctaaacaagcatgttttgcacaaatatatcaacgaggacgtgtctttgggagcttggttgatagggttagatgttgagcatattgatgaccgcagactatgctgcggcactccaccagattgcgaatggaaagctcaggctggtaacacctgcgctgcctcgttcgattggaaatgcagcggtatctgcaactctgtgcagaacatctggggggttcataagaagtgttcagaagatgaaaaggcgctgctgactgtttctttctaatcaaagtgcagtgctgtgtatctgtacattgtgcaaagaatgtgtccggttcataggtggctaaatggcttacaattagacaacaccactggagcaggccgcaattttactcagcgtccgctggtggcactctgaggatttaaggggtgtagagctgaccgattcttttagcaagttggccagttgggtggtcatacatgtattgacctgataaaacaaacactatccgacgagttcagccagggctgtctgagctaagacaggatgaataacggctggttgagctcatgcaagacatttatttggttgattgtacaaattaatgcagaccggtgtagatgct

SEQ ID NO: 38443 - protein, 400 aa, Zea mays subsp. mays
  peptide (1)..(400): Ceres Seq. ID no. 12369306
  misc_feature (146)..(343): Pfam Name: Pfam Description:  Galactosyltransferase
  misc_feature (12)..(400): NCBI GI NO: 15220440 NR Description: putative AVR9 elicitor response protein
  misc_feature (12)..(400): NCBI GI NO: 15225684 NR Description: unknown protein; protein id: At2g32430.1
  misc_feature (12)..(400): NCBI GI NO: 18416895 NR Description: Avr9 elicitor response like protein
  misc_feature (12)..(400): NCBI GI NO: 7485336 NR Description: hypothetical protein F10M23
  misc_feature (76)..(397): NCBI GI NO: 15221085 NR Description: Avr9 elicitor response-like protein
  misc_feature (12)..(110): NCBI GI NO: 15221085 NR Description: Avr9 elicitor response-like protein
  misc_feature (12)..(400): NCBI GI NO: 4138265 NR Description: Avr9 elicitor response protein [Nicotiana tabacum]
  misc_feature (1)..(400): NCBI GI NO: 15223337 NR Description: Avr9 elicitor response protein, putative
  misc_feature (12)..(395): NCBI GI NO: 30699558 NR Description: Avr9 elicitor response protein -related
  misc_feature (12)..(395): NCBI GI NO: 12323294 NR Description: putative
MGWRRGGGADGVARRWVLLLCVGSFCLGLLFTDRMWSLPEADEVAVLPNLRREEEAERKTGDCNVGKVQGKHDYNDMLRVSDAHHNSQTLDKAIANLETELSAARTLQDSFLNGSPVQEDYKASESTGRRKYLMVIGINTAFSSRKRRDSIRNTWMPTGEIRKKLEEERGIIVFVIGHSAISGGIVDRAIQAEDKKHGDFMRLDHVEGYLELSGKTRTYFATAVALWDANFYVKVDDDVHVNIATLGNILSKHISKPRVYIGCMKSGPVLSDKDVRYYEPEHWKFGEVGNKYFRHATGQLYAISKDLAAYISLNKHVLHKYINEDVSLGAWLIGLDVEHIDDRRLCCGTPPDCEWKAQAGNTCAASFDWKCSGICNSVQNIWGVHKKCSEDEKALLTVSF

SEQ ID NO: 38444 - protein, 366 aa, Zea mays subsp. mays
  peptide (1)..(366): Ceres Seq. ID no. 12369307
  misc_feature (112)..(309): Pfam Name: Pfam Description:  Galactosyltransferase
  misc_feature (1)..(366): NCBI GI NO: 15220440 NR Description: putative AVR9 elicitor response protein
  misc_feature (1)..(366): NCBI GI NO: 15225684 NR Description: unknown protein; protein id: At2g32430.1
  misc_feature (1)..(366): NCBI GI NO: 18416895 NR Description: Avr9 elicitor response like protein
  misc_feature (1)..(366): NCBI GI NO: 7485336 NR Description: hypothetical protein F10M23
  misc_feature (42)..(363): NCBI GI NO: 15221085 NR Description: Avr9 elicitor response-like protein
  misc_feature (1)..(76): NCBI GI NO: 15221085 NR Description: Avr9 elicitor response-like protein
  misc_feature (1)..(366): NCBI GI NO: 4138265 NR Description: Avr9 elicitor response protein [Nicotiana tabacum]
  misc_feature (1)..(366): NCBI GI NO: 15223337 NR Description: Avr9 elicitor response protein, putative
  misc_feature (1)..(361): NCBI GI NO: 30699558 NR Description: Avr9 elicitor response protein -related
  misc_feature (1)..(361): NCBI GI NO: 12323294 NR Description: putative
MWSLPEADEVAVLPNLRREEEAERKTGDCNVGKVQGKHDYNDMLRVSDAHHNSQTLDKAIANLETELSAARTLQDSFLNGSPVQEDYKASESTGRRKYLMVIGINTAFSSRKRRDSIRNTWMPTGEIRKKLEEERGIIVFVIGHSAISGGIVDRAIQAEDKKHGDFMRLDHVEGYLELSGKTRTYFATAVALWDANFYVKVDDDVHVNIATLGNILSKHISKPRVYIGCMKSGPVLSDKDVRYYEPEHWKFGEVGNKYFRHATGQLYAISKDLAAYISLNKHVLHKYINEDVSLGAWLIGLDVEHIDDRRLCCGTPPDCEWKAQAGNTCAASFDWKCSGICNSVQNIWGVHKKCSEDEKALLTVSF

SEQ ID NO: 38445 - protein, 324 aa, Zea mays subsp. mays
  peptide (1)..(324): Ceres Seq. ID no. 12369308
  misc_feature (70)..(267): Pfam Name: Pfam Description:  Galactosyltransferase
  misc_feature (1)..(324): NCBI GI NO: 15220440 NR Description: putative AVR9 elicitor response protein
  misc_feature (1)..(324): NCBI GI NO: 15225684 NR Description: unknown protein; protein id: At2g32430.1
  misc_feature (1)..(324): NCBI GI NO: 18416895 NR Description: Avr9 elicitor response like protein
  misc_feature (1)..(324): NCBI GI NO: 7485336 NR Description: hypothetical protein F10M23
  misc_feature (1)..(321): NCBI GI NO: 15221085 NR Description: Avr9 elicitor response-like protein
  misc_feature (1)..(34): NCBI GI NO: 15221085 NR Description: Avr9 elicitor response-like protein
  misc_feature (1)..(324): NCBI GI NO: 4138265 NR Description: Avr9 elicitor response protein [Nicotiana tabacum]
  misc_feature (1)..(324): NCBI GI NO: 15223337 NR Description: Avr9 elicitor response protein, putative
  misc_feature (1)..(319): NCBI GI NO: 30699558 NR Description: Avr9 elicitor response protein -related
  misc_feature (1)..(319): NCBI GI NO: 12323294 NR Description: putative
MLRVSDAHHNSQTLDKAIANLETELSAARTLQDSFLNGSPVQEDYKASESTGRRKYLMVIGINTAFSSRKRRDSIRNTWMPTGEIRKKLEEERGIIVFVIGHSAISGGIVDRAIQAEDKKHGDFMRLDHVEGYLELSGKTRTYFATAVALWDANFYVKVDDDVHVNIATLGNILSKHISKPRVYIGCMKSGPVLSDKDVRYYEPEHWKFGEVGNKYFRHATGQLYAISKDLAAYISLNKHVLHKYINEDVSLGAWLIGLDVEHIDDRRLCCGTPPDCEWKAQAGNTCAASFDWKCSGICNSVQNIWGVHKKCSEDEKALLTVSF

SEQ ID NO: 38446 - DNA, 1480 bp, Zea mays subsp. mays
  misc_feature (1)..(1480): Ceres Seq. ID no. 12368002
tgggccttgcagtttttggttgtgtatcggggaaatggcaatcgacgacgaatcgccgatcagagtcaacagcagaggcggcggcggcatggtaacctggatagcacaccttcttttgtactctcttcttgccttgttttttttcccctttcgatgccctgtttctttgctctctgttgggctttctttgctctctgttgggctggcgctaacatggcggcgccgcgccggatcgaatgcggcagggaggaggggagcgcgacggggcggagaaccagcggtggccgccgtggctcaagccgctgctggggacgagcttcttcggccaatgcaagctgcacgcggacgcgcacaagagcgagtgcaacatgtactgcctcgcctgcatgaacggcgcgctctgctcccagtgcctcgcctaccaccgcgaccaccacgccatccagatacggaggtcctcctaccacgacgtgatccgggtgtcggagatccagaaggtgctggacatctccggcgtgcagacgtacatcatcaacagcgcgcgcgtggtgttcctgaacgagcgcccgcagccgaggcccggcaagggcgtcaccaacacctgcgaggtctgccagcgcagcctcctcgacaccttccgcttctgctccctcgggtgcaagatcgtggggacctccggtgacttgcgcgtccggaagaagcaggccgtcgtcaagaagaacaagaagaagaagcaggcgcagcagcagcagcagcacaggggcgccgcgttggactcggaggacgactcttcgtccaccagcaccagccgcggcagcgacaggagcagcgtggtgcagagcttcaccccgtcgaccccgccggcgacgcccaacagcttccgaaccgggaagcggcgcaagggcgtgccgcaccggtcgccgttcggcagcctcgtgctggagttctagaaagcagcggttctataccatctataggtgttgccggatcggcctcggccggtctacatagttcatagccacccaagaaaaaaaaaacggagctagtagtagcaactatagcaagcaataaccaaggccccactgcacgcccgcgcttctggacgacgaggccggtgcaatgtggcacgtacgtcgtacggtacggttacctctacttccattccatagtactgtactactactgtagtttacatgcagtcgcagagctgtgctggtagtgacaacggtttgggttttggtgcctgtaaaaggaaacgaggtagttgtagcagttacccttgtcgtcaccactcatcagcagccagccactactgaattacatagtatataggtgtttcctagttttaccagcgcttgatatagatgtggatgtacatatatacatatactgtcacagatggggaacggtaggagtgttgttgttggtactggtgtttgcgtttgttgcctgtaataataaagaggataagaatgctgcg

SEQ ID NO: 38447 - protein, 237 aa, Zea mays subsp. mays
  peptide (1)..(237): Ceres Seq. ID no. 12368003
  misc_feature (16)..(147): Pfam Name: Pfam Description:  Protein of unknown function, DUF597
  misc_feature (1)..(237): NCBI GI NO: 38346725 NR Description: OSJNBa0086O06.23
  misc_feature (10)..(147): NCBI GI NO: 18398555 NR Description: expressed protein; protein id: At1g32700
  misc_feature (180)..(237): NCBI GI NO: 18398555 NR Description: expressed protein; protein id: At1g32700
  misc_feature (13)..(147): NCBI GI NO: 6714272 NR Description: F6N18.8 [Arabidopsis thaliana]
  misc_feature (180)..(237): NCBI GI NO: 6714272 NR Description: F6N18.8 [Arabidopsis thaliana]
  misc_feature (10)..(147): NCBI GI NO: 21554139 NR Description: unknown [Arabidopsis thaliana]
  misc_feature (180)..(237): NCBI GI NO: 21554139 NR Description: unknown [Arabidopsis thaliana]
  misc_feature (1)..(231): NCBI GI NO: 15236696 NR Description: putative protein; protein id: At4g17900.1
  misc_feature (1)..(237): NCBI GI NO: 37537092 NR Description: unknown protein
  misc_feature (17)..(230): NCBI GI NO: 18411153 NR Description: expressed protein; protein id: At1g76590
MRQGGGERDGAENQRWPPWLKPLLGTSFFGQCKLHADAHKSECNMYCLACMNGALCSQCLAYHRDHHAIQIRRSSYHDVIRVSEIQKVLDISGVQTYIINSARVVFLNERPQPRPGKGVTNTCEVCQRSLLDTFRFCSLGCKIVGTSGDLRVRKKQAVVKKNKKKKQAQQQQQHRGAALDSEDDSSSTSTSRGSDRSSVVQSFTPSTPPATPNSFRTGKRRKGVPHRSPFGSLVLEF

SEQ ID NO: 38448 - protein, 226 aa, Zea mays subsp. mays
  peptide (1)..(226): Ceres Seq. ID no. 12368004
GPCSFWLCIGEMAIDDESPIRVNSRGGGGMVTWIAHLLLYSLLALFFFPFRCPVSLLSVGLSLLSVGLALTWRRRAGSNAAGRRGARRGGEPAVAAVAQAAAGDELLRPMQAARGRAQERVQHVLPRLHERRALLPVPRLPPRPPRHPDTEVLLPRRDPGVGDPEGAGHLRRADVHHQQRARGVPERAPAAEARQGRHQHLRGLPAQPPRHLPLLLPRVQDRGDLR

SEQ ID NO: 38449 - protein, 215 aa, Zea mays subsp. mays
  peptide (1)..(215): Ceres Seq. ID no. 12368005
MAIDDESPIRVNSRGGGGMVTWIAHLLLYSLLALFFFPFRCPVSLLSVGLSLLSVGLALTWRRRAGSNAAGRRGARRGGEPAVAAVAQAAAGDELLRPMQAARGRAQERVQHVLPRLHERRALLPVPRLPPRPPRHPDTEVLLPRRDPGVGDPEGAGHLRRADVHHQQRARGVPERAPAAEARQGRHQHLRGLPAQPPRHLPLLLPRVQDRGDLR

SEQ ID NO: 38450 - DNA, 1363 bp, Zea mays subsp. mays
  misc_feature (1)..(1363): Ceres Seq. ID no. 12374769
atccattcatcacccatcgtgtgcttcagctactatgatataatagtgcagctaattaattaagcgcggacgacgacgtacgtaacagtatggctgctgctgctgctactgtcgtcacaccatcctcgcctcgctccatggctgttgccgccgccattgccttcttcttcgcggtgaccgcggcggcagcgtcgccggtgcccgcgatctacgtgctcggggactccctggcggacgtcgggaacaacaaccacctggtgacgctgctcaaggccgacttcccgcacaacggcatcgactacccgggccagaaggccaccggccgcttcagcaacggcaagaactccgtcgacttcctcgccgaaaacctggggctggcgacctcgccgccgtacctcgccttgtcgagcagcaaccccaactacgccaacggtgtcaacttcgcttccggtggcgccggagtctccaacctcacaaacaaggaccaatgtatcagcttcgacaagcagatcgactacttcgcgacggtgtacgcgtcgctggtgcagagcctggggcaggcgcaggccacggctcacctggccaagtccctcttcgccatcaccatcggcagcaacgacatcatccactacgccaaatccaactccgccgccaataccaagcaggccagtgccagtggcgccgccgccgacccatcgcagcagttcgtggacgcgctgatccacacgctcaccgggcagctgcagcgcctctacgccctgggcgcgcgcaaggtgctgttcctgggcacggggcccgtgggtgctgcccgtcgctgcgggagctcagccccgccaaggactgcagcgccgaggccaacggcatctccgtgcgctacaacgccggcgcggcgtccctcctcggcaccatggccgcgcgctacgcggacatgcactacgcgctcttcgactcctccgccgcgctgctccagtacatcgaccacccggcggcgcacgggttcaccgaggccaaggccgcctgctgcgggctcggggacatgaacgccaagatcgggtgcaccccgctaagcttctactgcgacaacaggaccagccacgtcttctgggacttctaccatcccacggagaccaccgcccggatgctcaccagcacggcgttcgacggctcggcgccgctcatcttccccatgaacataaggcagctcagcgccatatagctaggccaccagaattagagtgctgtccttctaccttgtatatgttgttgtgtatcacatagtggccttggacgtatgtacgtcgtcctagaagaaatcaaacgatatagcaaacatcatagaagcttgcattatattggcaatgct

SEQ ID NO: 38451 - protein, 316 aa, Zea mays subsp. mays
  peptide (1)..(316): Ceres Seq. ID no. 12374770
  misc_feature (40)..(238): Pfam Name: Pfam Description:  GDSL-like Lipase/Acylhydrolase
  misc_feature (18)..(238): NCBI GI NO: 29837765 NR Description: putative GDSL-like lipase/acylhydrolase
  misc_feature (28)..(238): NCBI GI NO: 15240452 NR Description: GDSL-motif lipase/hydrolase-like protein
  misc_feature (17)..(238): NCBI GI NO: 21537293 NR Description: GDSL-motif lipase/hydrolase-like protein
  misc_feature (21)..(240): NCBI GI NO: 37535146 NR Description: putative early nodulin gene (Enod) related protein
  misc_feature (17)..(238): NCBI GI NO: 30693137 NR Description: lipase family [Arabidopsis thaliana]
  misc_feature (17)..(240): NCBI GI NO: 22758315 NR Description: putative early nodulin gene (Enod) related protein
  misc_feature (23)..(240): NCBI GI NO: 15229265 NR Description: putative GDSL-motif lipase/acylhydrolase
  misc_feature (19)..(240): NCBI GI NO: 28071322 NR Description: P0705A05.30
  misc_feature (37)..(249): NCBI GI NO: 15224005 NR Description: putative GDSL-motif lipase/acylhydrolase
  misc_feature (19)..(238): NCBI GI NO: 34899288 NR Description: similar to GDSL-motif lipase/hydrolase
MAAAAATVVTPSSPRSMAVAAAIAFFFAVTAAAASPVPAIYVLGDSLADVGNNNHLVTLLKADFPHNGIDYPGQKATGRFSNGKNSVDFLAENLGLATSPPYLALSSSNPNYANGVNFASGGAGVSNLTNKDQCISFDKQIDYFATVYASLVQSLGQAQATAHLAKSLFAITIGSNDIIHYAKSNSAANTKQASASGAAADPSQQFVDALIHTLTGQLQRLYALGARKVLFLGTGPVGAARRCGSSAPPRTAAPRPTASPCATTPARRPSSAPWPRATRTCTTRSSTPPPRCSSTSTTRRRTGSPRPRPPAAGSGT

SEQ ID NO: 38452 - protein, 300 aa, Zea mays subsp. mays
  peptide (1)..(300): Ceres Seq. ID no. 12374771
  misc_feature (24)..(222): Pfam Name: Pfam Description:  GDSL-like Lipase/Acylhydrolase
  misc_feature (2)..(222): NCBI GI NO: 29837765 NR Description: putative GDSL-like lipase/acylhydrolase
  misc_feature (12)..(222): NCBI GI NO: 15240452 NR Description: GDSL-motif lipase/hydrolase-like protein
  misc_feature (1)..(222): NCBI GI NO: 21537293 NR Description: GDSL-motif lipase/hydrolase-like protein
  misc_feature (5)..(224): NCBI GI NO: 37535146 NR Description: putative early nodulin gene (Enod) related protein
  misc_feature (1)..(222): NCBI GI NO: 30693137 NR Description: lipase family [Arabidopsis thaliana]
  misc_feature (1)..(224): NCBI GI NO: 22758315 NR Description: putative early nodulin gene (Enod) related protein
  misc_feature (7)..(224): NCBI GI NO: 15229265 NR Description: putative GDSL-motif lipase/acylhydrolase
  misc_feature (3)..(224): NCBI GI NO: 28071322 NR Description: P0705A05.30
  misc_feature (21)..(233): NCBI GI NO: 15224005 NR Description: putative GDSL-motif lipase/acylhydrolase
  misc_feature (3)..(222): NCBI GI NO: 34899288 NR Description: similar to GDSL-motif lipase/hydrolase
MAVAAAIAFFFAVTAAAASPVPAIYVLGDSLADVGNNNHLVTLLKADFPHNGIDYPGQKATGRFSNGKNSVDFLAENLGLATSPPYLALSSSNPNYANGVNFASGGAGVSNLTNKDQCISFDKQIDYFATVYASLVQSLGQAQATAHLAKSLFAITIGSNDIIHYAKSNSAANTKQASASGAAADPSQQFVDALIHTLTGQLQRLYALGARKVLFLGTGPVGAARRCGSSAPPRTAAPRPTASPCATTPARRPSSAPWPRATRTCTTRSSTPPPRCSSTSTTRRRTGSPRPRPPAAGSGT

SEQ ID NO: 38453 - protein, 242 aa, Zea mays subsp. mays
  peptide (1)..(242): Ceres Seq. ID no. 12374772
  misc_feature (105)..(219): Pfam Name: Pfam Description:  GDSL-like Lipase/Acylhydrolase
  misc_feature (100)..(242): NCBI GI NO: 29837765 NR Description: putative GDSL-like lipase/acylhydrolase
  misc_feature (105)..(239): NCBI GI NO: 15240452 NR Description: GDSL-motif lipase/hydrolase-like protein
  misc_feature (100)..(224): NCBI GI NO: 21537293 NR Description: GDSL-motif lipase/hydrolase-like protein
  misc_feature (92)..(236): NCBI GI NO: 37535146 NR Description: putative early nodulin gene (Enod) related protein
  misc_feature (100)..(224): NCBI GI NO: 30693137 NR Description: lipase family [Arabidopsis thaliana]
  misc_feature (92)..(236): NCBI GI NO: 22758315 NR Description: putative early nodulin gene (Enod) related protein
  misc_feature (92)..(236): NCBI GI NO: 15229265 NR Description: putative GDSL-motif lipase/acylhydrolase
  misc_feature (92)..(242): NCBI GI NO: 28071322 NR Description: P0705A05.30
  misc_feature (98)..(242): NCBI GI NO: 15224005 NR Description: putative GDSL-motif lipase/acylhydrolase
  misc_feature (102)..(242): NCBI GI NO: 34899288 NR Description: similar to GDSL-motif lipase/hydrolase
MYQLRQADRLLRDGVRVAGAEPGAGAGHGSPGQVPLRHHHRQQRHHPLRQIQLRRQYQAGQCQWRRRRPIAAVRGRADPHAHRAAAAPLRPGRAQGAVPGHGARGCCPSLRELSPAKDCSAEANGISVRYNAGAASLLGTMAARYADMHYALFDSSAALLQYIDHPAAHGFTEAKAACCGLGDMNAKIGCTPLSFYCDNRTSHVFWDFYHPTETTARMLTSTAFDGSAPLIFPMNIRQLSAI

SEQ ID NO: 38454 - DNA, 1865 bp, Zea mays subsp. mays
  misc_feature (1)..(1865): Ceres Seq. ID no. 12415026
acgaaagctactagcaacatctggttccactctcgccggcatctcccccacccatccccaagtccagcacacacccgaagcgccgccgctagggtttggtccgacagccgcgaaacctagactttactgctccgacaggctgccattcactaatctagctagctccggttgggagctagggtttagctgagcttcgggtcgcggcggtgcggcatggcggggtacggggaagagaaccagaacaccatgagcgggtacgaggaagaggaggaagaagaggttgaagaagtcgaggaggtgtacgaggaggaggaggaggaggaggaggaggaggaggaggaggacggggagggggaagcggacgagggggctgtagcctccgagccagcggcgatggcggccgagacgagaagcgttgttggaggccggggcttagcgaaggccgttgggaatgttgataccggtggcgaggatgggagggatgcagattccagtggcggtgacgcctcggggaagattttcgtagggggtgtagcttgggagacaactgaagaaacattcacaaagcattttcagaagtatggagctataactgattctgtgatcatgaatgacaagcatactaggatgcctcgcggatttggatttgttacattttccgatccatctgtgcttgacagggttctagaggatgaacatgtcatagatggaagaacagttgaagtcaaaaggactgttccaaaagaggaaatgtcatcgaaagacggtcctaagacaaaaaagatctttgtgggtggtattccaccatctcttaccgaagataaattaaaggagcacttctcatcgtatgggaaggtggttgagcatcagattatgcttgaccatagcactggacgctcacgtggctttggatttgtcacatttgaaagcgaggatgctgttgaaagggttatgtcagaggggagaatcatgatcttggagggaaacaggttgaaattaagaaagctgaaccaaaaaaacctggtgtgggtgattcaagctcaaatggaagacacagtcgtggtggtggtcatcgtgattcataccgtggtagtggtggcaatggcttttctgggaacagcagtggtggtggctatggatacagtggtggctaccgatcaactgctgcagcacattatggcagcacagcatatggtgcctatggcagagggtatggatacggtggtactgctggctatggcttaggtatggctctgcatatggtggctccatgtatggaggtccatatggtgcctacgcggcatatggtggtgcctatggaggtgtgcatatggtgctccaggagggtatggcgcgggaggatatggcagctacggtggggctggaggcatgggtggtggtggcagcgctggtggtcggggctccagcagataccacccttatggaaaatgataatccattcactgcctttgccttcctctaggatctgataataaagctatacattcccaccgagaaaatggaacattccattcaccttgttgaatcagcggcatctgaacatttttttcctggaacaaagattctagtctgtagtcgctgaaccctgaactgcctcatcccacccccaccccctgagctttctgtagaaggtgcagctcaaattctcgtaggcatgagccttagaagacccttgaaactacaagctttgtggtaacaatatggtgtcatggaacatatgtattttgatgtaaaacattcgctcactgaccagtgacttcgccatctctgcttatgtatgtagagaagcttagcaaaggattggactgatactattgaattgtgtgggtttctatttgtctcct

SEQ ID NO: 38455 - protein, 343 aa, Zea mays subsp. mays
  peptide (1)..(343): Ceres Seq. ID no. 12415027
  misc_feature (102)..(171): Pfam Name: a.k.a. RRM, RBD, or RNP domain Pfam Description: RNA recognition motif.
  misc_feature (82)..(268): NCBI GI NO: 15242719 NR Description: RRM-containing RNA-binding protein, putative
  misc_feature (96)..(268): NCBI GI NO: 35215091 NR Description: putative heterogeneous nuclear ribonucleoprotein A3homolog 1
  misc_feature (81)..(268): NCBI GI NO: 15220810 NR Description: RRM-containing RNA-binding protein, putative
  misc_feature (101)..(268): NCBI GI NO: 8778468 NR Description: F1L3.34 [Arabidopsis thaliana]
  misc_feature (84)..(268): NCBI GI NO: 30682553 NR Description: RNA recognition motif (RRM)-containing protein
  misc_feature (101)..(264): NCBI GI NO: 33416839 NR Description: Unknown (protein for MGC:66127) [Danio rerio]
  misc_feature (100)..(182): NCBI GI NO: 37535274 NR Description: putative RNA-binding protein
  misc_feature (185)..(264): NCBI GI NO: 37535274 NR Description: putative RNA-binding protein
  misc_feature (100)..(269): NCBI GI NO: 15226106 NR Description: heterogeneous nuclear ribonucleoprotein
  misc_feature (84)..(264): NCBI GI NO: 30682550 NR Description: RNA recognition motif (RRM)-containing protein
MAGYGEENQNTMSGYEEEEEEEVEEVEEVYEEEEEEEEEEEEEDGEGEADEGAVASEPAAMAAETRSVVGGRGLAKAVGNVDTGGEDGRDADSSGGDASGKIFVGGVAWETTEETFTKHFQKYGAITDSVIMNDKHTRMPRGFGFVTFSDPSVLDRVLEDEHVIDGRTVEVKRTVPKEEMSSKDGPKTKKIFVGGIPPSLTEDKLKEHFSSYGKVVEHQIMLDHSTGRSRGFGFVTFESEDAVERVMSEGRIMILEGNRLKLRKLNQKNLVWVIQAQMEDTVVVVVIVIHTVVVVAMAFLGTAVVVAMDTVVATDQLLQHIMAAQHMVPMAEGMDTVVLLAMA

SEQ ID NO: 38456 - protein, 332 aa, Zea mays subsp. mays
  peptide (1)..(332): Ceres Seq. ID no. 12415028
  misc_feature (91)..(160): Pfam Name: a.k.a. RRM, RBD, or RNP domain Pfam Description: RNA recognition motif.
  misc_feature (71)..(257): NCBI GI NO: 15242719 NR Description: RRM-containing RNA-binding protein, putative
  misc_feature (85)..(257): NCBI GI NO: 35215091 NR Description: putative heterogeneous nuclear ribonucleoprotein A3homolog 1
  misc_feature (70)..(257): NCBI GI NO: 15220810 NR Description: RRM-containing RNA-binding protein, putative
  misc_feature (90)..(257): NCBI GI NO: 8778468 NR Description: F1L3.34 [Arabidopsis thaliana]
  misc_feature (73)..(257): NCBI GI NO: 30682553 NR Description: RNA recognition motif (RRM)-containing protein
  misc_feature (90)..(253): NCBI GI NO: 33416839 NR Description: Unknown (protein for MGC:66127) [Danio rerio]
  misc_feature (89)..(171): NCBI GI NO: 37535274 NR Description: putative RNA-binding protein
  misc_feature (174)..(253): NCBI GI NO: 37535274 NR Description: putative RNA-binding protein
  misc_feature (89)..(258): NCBI GI NO: 15226106 NR Description: heterogeneous nuclear ribonucleoprotein
  misc_feature (73)..(253): NCBI GI NO: 30682550 NR Description: RNA recognition motif (RRM)-containing protein
MSGYEEEEEEEVEEVEEVYEEEEEEEEEEEEEDGEGEADEGAVASEPAAMAAETRSVVGGRGLAKAVGNVDTGGEDGRDADSSGGDASGKIFVGGVAWETTEETFTKHFQKYGAITDSVIMNDKHTRMPRGFGFVTFSDPSVLDRVLEDEHVIDGRTVEVKRTVPKEEMSSKDGPKTKKIFVGGIPPSLTEDKLKEHFSSYGKVVEHQIMLDHSTGRSRGFGFVTFESEDAVERVMSEGRIMILEGNRLKLRKLNQKNLVWVIQAQMEDTVVVVVIVIHTVVVVAMAFLGTAVVVAMDTVVATDQLLQHIMAAQHMVPMAEGMDTVVLLAMA

SEQ ID NO: 38457 - protein, 283 aa, Zea mays subsp. mays
  peptide (1)..(283): Ceres Seq. ID no. 12415029
  misc_feature (42)..(111): Pfam Name: a.k.a. RRM, RBD, or RNP domain Pfam Description: RNA recognition motif.
  misc_feature (22)..(208): NCBI GI NO: 15242719 NR Description: RRM-containing RNA-binding protein, putative
  misc_feature (36)..(208): NCBI GI NO: 35215091 NR Description: putative heterogeneous nuclear ribonucleoprotein A3homolog 1
  misc_feature (21)..(208): NCBI GI NO: 15220810 NR Description: RRM-containing RNA-binding protein, putative
  misc_feature (41)..(208): NCBI GI NO: 8778468 NR Description: F1L3.34 [Arabidopsis thaliana]
  misc_feature (24)..(208): NCBI GI NO: 30682553 NR Description: RNA recognition motif (RRM)-containing protein
  misc_feature (41)..(204): NCBI GI NO: 33416839 NR Description: Unknown (protein for MGC:66127) [Danio rerio]
  misc_feature (40)..(122): NCBI GI NO: 37535274 NR Description: putative RNA-binding protein
  misc_feature (125)..(204): NCBI GI NO: 37535274 NR Description: putative RNA-binding protein
  misc_feature (40)..(209): NCBI GI NO: 15226106 NR Description: heterogeneous nuclear ribonucleoprotein
  misc_feature (24)..(204): NCBI GI NO: 30682550 NR Description: RNA recognition motif (RRM)-containing protein
MAAETRSVVGGRGLAKAVGNVDTGGEDGRDADSSGGDASGKIFVGGVAWETTEETFTKHFQKYGAITDSVIMNDKHTRMPRGFGFVTFSDPSVLDRVLEDEHVIDGRTVEVKRTVPKEEMSSKDGPKTKKIFVGGIPPSLTEDKLKEHFSSYGKVVEHQIMLDHSTGRSRGFGFVTFESEDAVERVMSEGRIMILEGNRLKLRKLNQKNLVWVIQAQMEDTVVVVVIVIHTVVVVAMAFLGTAVVVAMDTVVATDQLLQHIMAAQHMVPMAEGMDTVVLLAMA

SEQ ID NO: 38458 - DNA, 1522 bp, Zea mays subsp. mays
  misc_feature (1)..(1522): Ceres Seq. ID no. 12415477
acagtctccagggtagctagccaagctaccaagctcgtcaggagcgagagaaagaggccggcggtgcgcggggatgatgatgatgagcagcggccgggcgggcggcggggccaccgcggggcggtacccgttcacggcgtcgcagtggcaggagctggagcaccaggcgctcatctacaagtgcctggcgtccggcaagcccatcccgtcctacctcatgccgccgctccgccgcatcctcgactccgccctcgccacgtcgccgtccctcgcctacccgccgcaaccctcgctgggctggggctgcttcgggatgggcttcacccggaaggccgacgaggacccggagcccgggcggtgccggcgcacggacggcaagaagtggcgctgctccaaggaggcgtacccggactccaagtactgcgagaagcacatgcaccggggcaagaaccgttcaagaaagcctgtggaaatgtccttggccacgccggccccggcgccggcccccgccgccgccacaaccgccaccgccacctcatccccggcgccgtcctaccaccgcccggcccacgacgccacgccgtctccgtaccacgcgctgtatggaggcggcggcggcggcggtagcccttactcggcgtcggcacgcccaggagcaaccggaggcggcggcgcgtaccaccacgcgcagcatgtgagcccattccacctccacctcgagaccacccacccgcacccgccgccgccctacaactactccgccgaccagagggactacgcgtacgggcacgcggccgccaaggaggtcggcgagcacgccttcttctcggacggcgcgggcgagcgggtcgaccgccaggccgcggcggggcagtggcagttcaggcagctcggggtggagacgaagccgggccccacgccgctgttccccgtcgccgggtacgggcacggcgcggcgtcgccgtacggcgtggagatgggcaagtacgacgacgagcaggaggagaggcgccgccagcactgcttcgttcttggagccggcctgcggctggagcggccgtcgtcgggccatggccatggccatgaccatgacgacgccgccgccgcgcagaagccgctccggcccttcttcgacgagtggccgcaccagaagggggacaaggccggttcgtggatggggctcgacggcgagacgcagctctccatttccatccccatggccgctaccgacctccccgtcacctcccgcttccgtaacgacgagtgatgccacatcaaacctggcgctggaaactcggaacgcatggtgctgatgctgaccatgagatgtaccgtttcgctcaaggccggccgtcatcaccacggccacatcaaaccggtttgaagaacttgggaaggccgaatgaaacctccagaagaatgatctgtcctcttttttctgcatttctttttctcttagtattacgcagtattgcttcgcgtgtaatatgttttcctgtaatatcaagtgagggcgtttctg

SEQ ID NO: 38459 - protein, 397 aa, Zea mays subsp. mays
  peptide (1)..(397): Ceres Seq. ID no. 12415478
  misc_feature (2)..(397): NCBI GI NO: 6573149 NR Description: growth-regulating factor 1 [Oryza sativa]
  misc_feature (3)..(265): NCBI GI NO: 18390099 NR Description: putative growth-regulating factor 1
  misc_feature (2)..(191): NCBI GI NO: 34897962 NR Description: putative growth-regulating factor 1
  misc_feature (228)..(392): NCBI GI NO: 34897962 NR Description: putative growth-regulating factor 1
  misc_feature (2)..(242): NCBI GI NO: 11994367 NR Description: gb|AAF17567
  misc_feature (2)..(242): NCBI GI NO: 30682907 NR Description: transcription activator (GRL5)
  misc_feature (7)..(185): NCBI GI NO: 38345778 NR Description: OSJNBa0083N12.16
  misc_feature (1)..(162): NCBI GI NO: 28273382 NR Description: putative transcription activator
  misc_feature (266)..(393): NCBI GI NO: 38569158 NR Description: OSJNBa0042N22.12
  misc_feature (155)..(348): NCBI GI NO: 34896388 NR Description: hypothetical protein
MMMMSSGRAGGGATAGRYPFTASQWQELEHQALIYKCLASGKPIPSYLMPPLRRILDSALATSPSLAYPPQPSLGWGCFGMGFTRKADEDPEPGRCRRTDGKKWRCSKEAYPDSKYCEKHMHRGKNRSRKPVEMSLATPAPAPAPAAATTATATSSPAPSYHRPAHDATPSPYHALYGGGGGGGSPYSASARPGATGGGGAYHHAQHVSPFHLHLETTHPHPPPPYNYSADQRDYAYGHAAAKEVGEHAFFSDGAGERVDRQAAAGQWQFRQLGVETKPGPTPLFPVAGYGHGAASPYGVEMGKYDDEQEERRRQHCFVLGAGLRLERPSSGHGHGHDHDDAAAAQKPLRPFFDEWPHQKGDKAGSWMGLDGETQLSISIPMAATDLPVTSRFRNDE

SEQ ID NO: 38460 - protein, 396 aa, Zea mays subsp. mays
  peptide (1)..(396): Ceres Seq. ID no. 12415479
  misc_feature (1)..(396): NCBI GI NO: 6573149 NR Description: growth-regulating factor 1 [Oryza sativa]
  misc_feature (2)..(264): NCBI GI NO: 18390099 NR Description: putative growth-regulating factor 1
  misc_feature (1)..(190): NCBI GI NO: 34897962 NR Description: putative growth-regulating factor 1
  misc_feature (227)..(391): NCBI GI NO: 34897962 NR Description: putative growth-regulating factor 1
  misc_feature (1)..(241): NCBI GI NO: 11994367 NR Description: gb|AAF17567
  misc_feature (1)..(241): NCBI GI NO: 30682907 NR Description: transcription activator (GRL5)
  misc_feature (6)..(184): NCBI GI NO: 38345778 NR Description: OSJNBa0083N12.16
  misc_feature (1)..(161): NCBI GI NO: 28273382 NR Description: putative transcription activator
  misc_feature (265)..(392): NCBI GI NO: 38569158 NR Description: OSJNBa0042N22.12
  misc_feature (154)..(347): NCBI GI NO: 34896388 NR Description: hypothetical protein
MMMSSGRAGGGATAGRYPFTASQWQELEHQALIYKCLASGKPIPSYLMPPLRRILDSALATSPSLAYPPQPSLGWGCFGMGFTRKADEDPEPGRCRRTDGKKWRCSKEAYPDSKYCEKHMHRGKNRSRKPVEMSLATPAPAPAPAAATTATATSSPAPSYHRPAHDATPSPYHALYGGGGGGGSPYSASARPGATGGGGAYHHAQHVSPFHLHLETTHPHPPPPYNYSADQRDYAYGHAAAKEVGEHAFFSDGAGERVDRQAAAGQWQFRQLGVETKPGPTPLFPVAGYGHGAASPYGVEMGKYDDEQEERRRQHCFVLGAGLRLERPSSGHGHGHDHDDAAAAQKPLRPFFDEWPHQKGDKAGSWMGLDGETQLSISIPMAATDLPVTSRFRNDE

SEQ ID NO: 38461 - protein, 395 aa, Zea mays subsp. mays
  peptide (1)..(395): Ceres Seq. ID no. 12415480
  misc_feature (1)..(395): NCBI GI NO: 6573149 NR Description: growth-regulating factor 1 [Oryza sativa]
  misc_feature (1)..(263): NCBI GI NO: 18390099 NR Description: putative growth-regulating factor 1
  misc_feature (1)..(189): NCBI GI NO: 34897962 NR Description: putative growth-regulating factor 1
  misc_feature (226)..(390): NCBI GI NO: 34897962 NR Description: putative growth-regulating factor 1
  misc_feature (1)..(240): NCBI GI NO: 11994367 NR Description: gb|AAF17567
  misc_feature (1)..(240): NCBI GI NO: 30682907 NR Description: transcription activator (GRL5)
  misc_feature (5)..(183): NCBI GI NO: 38345778 NR Description: OSJNBa0083N12.16
  misc_feature (1)..(160): NCBI GI NO: 28273382 NR Description: putative transcription activator
  misc_feature (264)..(391): NCBI GI NO: 38569158 NR Description: OSJNBa0042N22.12
  misc_feature (153)..(346): NCBI GI NO: 34896388 NR Description: hypothetical protein
MMSSGRAGGGATAGRYPFTASQWQELEHQALIYKCLASGKPIPSYLMPPLRRILDSALATSPSLAYPPQPSLGWGCFGMGFTRKADEDPEPGRCRRTDGKKWRCSKEAYPDSKYCEKHMHRGKNRSRKPVEMSLATPAPAPAPAAATTATATSSPAPSYHRPAHDATPSPYHALYGGGGGGGSPYSASARPGATGGGGAYHHAQHVSPFHLHLETTHPHPPPPYNYSADQRDYAYGHAAAKEVGEHAFFSDGAGERVDRQAAAGQWQFRQLGVETKPGPTPLFPVAGYGHGAASPYGVEMGKYDDEQEERRRQHCFVLGAGLRLERPSSGHGHGHDHDDAAAAQKPLRPFFDEWPHQKGDKAGSWMGLDGETQLSISIPMAATDLPVTSRFRNDE

SEQ ID NO: 38462 - DNA, 1306 bp, Zea mays subsp. mays
  misc_feature (1)..(1306): Ceres Seq. ID no. 12362545
aaatccagttgggaatcccacgaagattcaccggagctggtgaggttgtaagccgggactgccgccactgccaaattgcgtgggtgccgccgtttggggcctggaaccgtgccagggagcttcgcggtgtagtaaggatgctggacggttgatgcttcgggctcgggaccatgtggaacaacagcaatccctcgccggagcacttttgtcgggccagaaccgccgtgcgccgtggccatggtatttagctgcgcgatttctgcaaggttacgagtcacctgaagagcaagtttgtacctggaatctcaagtcccaggtgacaagaagagctatcggatggagctcaacgagttcgccgacatgaccaacgacgagttcatggccatgtacactggcttgagaccagtcccggcaggggcaaagaagatggccggtttcaagtacgggaacgtgactctttcagacgccgacgacgaccagcagacggttgactggcggcagaaaggcgcggtcaccggtatcaaggaccagcgccagtgtggttgttgctgggccttcgctgcggtggcggccgtggagggcatccaccagatcacgacgggcaacttggtgtccttatcggagcagcaggtgctggactgcgacaccgacgggaacaacggctgcaacggcggctacatcgacaacgccttccaatacatcgtcggcaacggcggcctcgccaccgaggacgcctacccgtacaccgccgcgcaggccatgtgccagtccgtgcagccggtggccgccatcagcggctaccaggacgtgccgagcggcgacgaggcagcgctcgccgcggccgtcgccaaccagccggtgtcggttgccatcgacgcacataacttccagctctacggtggcggggtgatgaccgcagccagctgcagcacgccaccgaacctgaaccacgccgtcacggcggtaggctacggcacggcggaggatgggaccccgtactggctgctcaagaaccagtggggccagaactggggagagggaggatacctcaggcttgagagaggcgcaaacgcctgtggggtcgcccagcaagcctcctacccagtcgcatgatgaatatatagataacgtacgggtcgaaacgaaaacatatatattctacatacacgaaggcatgcataagaatgactactaaggaataaagcatgtacacacattgatagtacatacatacatagcgtaaacttgtaacacaattgtcatgcaacattccaaatataatttatttctacttggccttcttttc

SEQ ID NO: 38463 - protein, 258 aa, Zea mays subsp. mays
  peptide (1)..(258): Ceres Seq. ID no. 12362546
  misc_feature (49)..(257): Pfam Name: Pfam Description:  Papain family cysteine protease
  misc_feature (1)..(257): NCBI GI NO: 7435799 NR Description: cysteine proteinase (EC 3.4.22.-) - barley
  misc_feature (1)..(257): NCBI GI NO: 21070926 NR Description: putative cysteine proteinase
  misc_feature (1)..(258): NCBI GI NO: 38345008 NR Description: OSJNBa0052O21.11
  misc_feature (1)..(258): NCBI GI NO: 38346007 NR Description: OSJNBa0035O13.9
  misc_feature (1)..(258): NCBI GI NO: 37780051 NR Description: cysteine protease 12 [Trifolium repens]
  misc_feature (1)..(257): NCBI GI NO: 34899394 NR Description: putative cysteine proteinase
  misc_feature (1)..(258): NCBI GI NO: 37780047 NR Description: cysteine protease 8 [Trifolium repens]
  misc_feature (1)..(258): NCBI GI NO: 37780045 NR Description: cysteine protease 5 [Trifolium repens]
  misc_feature (1)..(258): NCBI GI NO: 38346003 NR Description: OSJNBa0035O13.5
  misc_feature (1)..(258): NCBI GI NO: 34329348 NR Description: putative cysteine proteinase [Medicago truncatula]
MELNEFADMTNDEFMAMYTGLRPVPAGAKKMAGFKYGNVTLSDADDDQQTVDWRQKGAVTGIKDQRQCGCCWAFAAVAAVEGIHQITTGNLVSLSEQQVLDCDTDGNNGCNGGYIDNAFQYIVGNGGLATEDAYPYTAAQAMCQSVQPVAAISGYQDVPSGDEAALAAAVANQPVSVAIDAHNFQLYGGGVMTAASCSTPPNLNHAVTAVGYGTAEDGTPYWLLKNQWGQNWGEGGYLRLERGANACGVAQQASYPVA

SEQ ID NO: 38464 - protein, 250 aa, Zea mays subsp. mays
  peptide (1)..(250): Ceres Seq. ID no. 12362547
  misc_feature (41)..(249): Pfam Name: Pfam Description:  Papain family cysteine protease
  misc_feature (1)..(249): NCBI GI NO: 7435799 NR Description: cysteine proteinase (EC 3.4.22.-) - barley
  misc_feature (1)..(249): NCBI GI NO: 21070926 NR Description: putative cysteine proteinase
  misc_feature (1)..(250): NCBI GI NO: 38345008 NR Description: OSJNBa0052O21.11
  misc_feature (1)..(250): NCBI GI NO: 38346007 NR Description: OSJNBa0035O13.9
  misc_feature (1)..(250): NCBI GI NO: 37780051 NR Description: cysteine protease 12 [Trifolium repens]
  misc_feature (1)..(249): NCBI GI NO: 34899394 NR Description: putative cysteine proteinase
  misc_feature (1)..(250): NCBI GI NO: 37780047 NR Description: cysteine protease 8 [Trifolium repens]
  misc_feature (1)..(250): NCBI GI NO: 37780045 NR Description: cysteine protease 5 [Trifolium repens]
  misc_feature (1)..(250): NCBI GI NO: 38346003 NR Description: OSJNBa0035O13.5
  misc_feature (1)..(250): NCBI GI NO: 34329348 NR Description: putative cysteine proteinase [Medicago truncatula]
MTNDEFMAMYTGLRPVPAGAKKMAGFKYGNVTLSDADDDQQTVDWRQKGAVTGIKDQRQCGCCWAFAAVAAVEGIHQITTGNLVSLSEQQVLDCDTDGNNGCNGGYIDNAFQYIVGNGGLATEDAYPYTAAQAMCQSVQPVAAISGYQDVPSGDEAALAAAVANQPVSVAIDAHNFQLYGGGVMTAASCSTPPNLNHAVTAVGYGTAEDGTPYWLLKNQWGQNWGEGGYLRLERGANACGVAQQASYPVA

SEQ ID NO: 38465 - protein, 244 aa, Zea mays subsp. mays
  peptide (1)..(244): Ceres Seq. ID no. 12362548
  misc_feature (35)..(243): Pfam Name: Pfam Description:  Papain family cysteine protease
  misc_feature (1)..(243): NCBI GI NO: 7435799 NR Description: cysteine proteinase (EC 3.4.22.-) - barley
  misc_feature (1)..(243): NCBI GI NO: 21070926 NR Description: putative cysteine proteinase
  misc_feature (1)..(244): NCBI GI NO: 38345008 NR Description: OSJNBa0052O21.11
  misc_feature (1)..(244): NCBI GI NO: 38346007 NR Description: OSJNBa0035O13.9
  misc_feature (1)..(244): NCBI GI NO: 37780051 NR Description: cysteine protease 12 [Trifolium repens]
  misc_feature (1)..(243): NCBI GI NO: 34899394 NR Description: putative cysteine proteinase
  misc_feature (1)..(244): NCBI GI NO: 37780047 NR Description: cysteine protease 8 [Trifolium repens]
  misc_feature (1)..(244): NCBI GI NO: 37780045 NR Description: cysteine protease 5 [Trifolium repens]
  misc_feature (1)..(244): NCBI GI NO: 38346003 NR Description: OSJNBa0035O13.5
  misc_feature (1)..(244): NCBI GI NO: 34329348 NR Description: putative cysteine proteinase [Medicago truncatula]
MAMYTGLRPVPAGAKKMAGFKYGNVTLSDADDDQQTVDWRQKGAVTGIKDQRQCGCCWAFAAVAAVEGIHQITTGNLVSLSEQQVLDCDTDGNNGCNGGYIDNAFQYIVGNGGLATEDAYPYTAAQAMCQSVQPVAAISGYQDVPSGDEAALAAAVANQPVSVAIDAHNFQLYGGGVMTAASCSTPPNLNHAVTAVGYGTAEDGTPYWLLKNQWGQNWGEGGYLRLERGANACGVAQQASYPVA

SEQ ID NO: 38466 - DNA, 1374 bp, Zea mays subsp. mays
  misc_feature (1)..(1374): Ceres Seq. ID no. 12415396
acttgccagttcccactcctaactctctcttcgtttactcttcttcccacccccagcgttcgcttccatccaagctcatatcatcatagatcgacggactaggccacgcgccccaatactcagaactagtcttgagtaaagcatggcgtcgtcttctccgtcctgccgtggcagcggcggcaagtcggacgtggaccggatcaagggcccctggagccccgaggaggacgaggccctgcagcgcctggtggcccgccacggcgcccgcaactggtccctcatcagccggtccatcccgggccgctccggcaagtcgtgccgcctccggtggtgcaaccagctgtcgccgcaggtggagcaccggcccttcacggccgaggaggacgacaccatcctccgcgcgcacgccaggttcggcaacaagtgggccaccatcgcgcgcctcctctccggccgcaccgacaacgccatcaagaaccactggaactccacgctaaagcgcaagtactacgccgccagcgacgctgttgttgctgacgctgacgacgagcgcccgctgaagcgcacaagcagcgacggccacccagggctctgcttcagccccggaagcccatccgggtccgacctcagcgactctagcaaccacagccttccctccgtcatgccgtcagccgcttctgctgccgccgtcacctcccaccagcagcagcagcacgtgtaccgccccgtgccgcgcgcgggcggcgtggtcatgctaccggtggcgcctcttgcgccgccgccgccgccacagcctccggcgacctccttatcactgtccctctccctgcccgggctggacggccagaagcccgaagcatcccaagcggttctgacgccggcaccggcaccgcctcaacctcctcttcagatacagcagcagcagcctgctccacctcagatgccgccaccacaagcccaaccgagcttgccgttccagctgcaggcggccgcgacgaacctcacgtcgcagcagccggcagcagcgccgttcagctcggagttcctgttgttgatgcaggagatgatccggatcgaggtacggaactacatgtccgggtcggggctcgatccgcgcaccgacggcgccgccgtgcacgccgtgagcaagcgtatgatgggtatggccaagatcgagtagtttcagcgcgcatgcacacagcggcagcagcaggcgtggaagatacaaaagaaaacgaaccgccgatcgatccgcggcggccagcgcgtgtatgaagtagtaatgaaccagcaagaacggcgtggccttgaaccatacggaggccgtgtggtgcggcaagtgaacagctccaaccatcggctttttagctcatg

SEQ ID NO: 38467 - protein, 345 aa, Zea mays subsp. mays
  peptide (1)..(345): Ceres Seq. ID no. 12415397
  misc_feature (21)..(67): Pfam Name: Pfam Description:  Myb-like DNA-binding domain
  misc_feature (14)..(345): NCBI GI NO: 27529846 NR Description: Myb-like protein [Nicotiana tabacum]
  misc_feature (17)..(319): NCBI GI NO: 9954112 NR Description: tuber-specific and sucrose-responsive elementbinding factor
  misc_feature (19)..(253): NCBI GI NO: 9954114 NR Description: tuber-specific and sucrose-responsive elementbinding factor
  misc_feature (18)..(233): NCBI GI NO: 15240708 NR Description: myb family transcription factor
  misc_feature (18)..(233): NCBI GI NO: 15450393 NR Description: AT5g67300/K8K14_2 [Arabidopsis thaliana]
  misc_feature (18)..(233): NCBI GI NO: 2129648 NR Description: myb-related protein, 33.3K - Arabidopsis thaliana
  misc_feature (18)..(233): NCBI GI NO: 21592897 NR Description: myb-related protein, 33.3K [Arabidopsis thaliana]
  misc_feature (11)..(227): NCBI GI NO: 21593586 NR Description: putative MYB family transcription factor
  misc_feature (11)..(227): NCBI GI NO: 15227806 NR Description: MYB family transcription factor
  misc_feature (14)..(193): NCBI GI NO: 15235484 NR Description: myb DNA-binding protein
MASSSPSCRGSGGKSDVDRIKGPWSPEEDEALQRLVARHGARNWSLISRSIPGRSGKSCRLRWCNQLSPQVEHRPFTAEEDDTILRAHARFGNKWATIARLLSGRTDNAIKNHWNSTLKRKYYAASDAVVADADDERPLKRTSSDGHPGLCFSPGSPSGSDLSDSSNHSLPSVMPSAASAAAVTSHQQQQHVYRPVPRAGGVVMLPVAPLAPPPPPQPPATSLSLSLSLPGLDGQKPEASQAVLTPAPAPPQPPLQIQQQQPAPPQMPPPQAQPSLPFQLQAAATNLTSQQPAAAPFSSEFLLLMQEMIRIEVRNYMSGSGLDPRTDGAAVHAVSKRMMGMAKIE

SEQ ID NO: 38468 - protein, 172 aa, Zea mays subsp. mays
  peptide (1)..(172): Ceres Seq. ID no. 12415398
  misc_feature (1)..(172): NCBI GI NO: 27529846 NR Description: Myb-like protein [Nicotiana tabacum]
  misc_feature (1)..(146): NCBI GI NO: 9954112 NR Description: tuber-specific and sucrose-responsive elementbinding factor
  misc_feature (1)..(80): NCBI GI NO: 9954114 NR Description: tuber-specific and sucrose-responsive elementbinding factor
  misc_feature (1)..(60): NCBI GI NO: 15240708 NR Description: myb family transcription factor
  misc_feature (1)..(60): NCBI GI NO: 15450393 NR Description: AT5g67300/K8K14_2 [Arabidopsis thaliana]
  misc_feature (1)..(60): NCBI GI NO: 2129648 NR Description: myb-related protein, 33.3K - Arabidopsis thaliana
  misc_feature (1)..(60): NCBI GI NO: 21592897 NR Description: myb-related protein, 33.3K [Arabidopsis thaliana]
  misc_feature (1)..(54): NCBI GI NO: 21593586 NR Description: putative MYB family transcription factor
  misc_feature (1)..(54): NCBI GI NO: 15227806 NR Description: MYB family transcription factor
  misc_feature (1)..(20): NCBI GI NO: 15235484 NR Description: myb DNA-binding protein
MPSAASAAAVTSHQQQQHVYRPVPRAGGVVMLPVAPLAPPPPPQPPATSLSLSLSLPGLDGQKPEASQAVLTPAPAPPQPPLQIQQQQPAPPQMPPPQAQPSLPFQLQAAATNLTSQQPAAAPFSSEFLLLMQEMIRIEVRNYMSGSGLDPRTDGAAVHAVSKRMMGMAKIE

SEQ ID NO: 38469 - DNA, 2015 bp, Zea mays subsp. mays; identical to SEQ ID NO: 27762
  misc_feature (1)..(2015): Ceres Seq. ID no. 12594596

SEQ ID NO: 38470 - protein, 583 aa, Zea mays subsp. mays; identical to SEQ ID NO: 27763
  peptide (1)..(583): Ceres Seq. ID no. 12594597
  misc_feature (69)..(576): Pfam Name: Pfam Description:  TCP-1/cpn60 chaperonin family
  misc_feature (39)..(583): NCBI GI NO: 24371053 NR Description: t-complex polypeptide 1 [Bruguiera sexangula]
  misc_feature (39)..(583): NCBI GI NO: 25083339 NR Description: t-complex polypeptide 1 homologue
  misc_feature (39)..(583): NCBI GI NO: 15231024 NR Description: t-complex polypeptide 1 homologue
  misc_feature (39)..(583): NCBI GI NO: 9293959 NR Description: chaperonin, t-complex protein alpha subunit
  misc_feature (40)..(580): NCBI GI NO: 13959582 NR Description: T-complex protein 1, alpha subunit
  misc_feature (48)..(582): NCBI GI NO: 13959583 NR Description: T-complex protein 1, alpha subunit
  misc_feature (48)..(583): NCBI GI NO: 135536 NR Description: T-COMPLEX PROTEIN 1, ALPHA SUBUNIT
  misc_feature (48)..(583): NCBI GI NO: 135538 NR Description: T-complex protein 1, alpha subunit
  misc_feature (48)..(583): NCBI GI NO: 13540473 NR Description: t-complex 1; T-complex locus TCP-1; t-complex 1
  misc_feature (34)..(578): NCBI GI NO: 17532601 NR Description: Chaperonin Containing TCP-1 CCT-1 (58

SEQ ID NO: 38471 - protein, 545 aa, Zea mays subsp. mays; identical to SEQ ID NO: 27764
  peptide (1)..(545): Ceres Seq. ID no. 12594598
  misc_feature (31)..(538): Pfam Name: Pfam Description:  TCP-1/cpn60 chaperonin family
  misc_feature (1)..(545): NCBI GI NO: 24371053 NR Description: t-complex polypeptide 1 [Bruguiera sexangula]
  misc_feature (1)..(545): NCBI GI NO: 25083339 NR Description: t-complex polypeptide 1 homologue
  misc_feature (1)..(545): NCBI GI NO: 15231024 NR Description: t-complex polypeptide 1 homologue
  misc_feature (1)..(545): NCBI GI NO: 9293959 NR Description: chaperonin, t-complex protein alpha subunit
  misc_feature (2)..(542): NCBI GI NO: 13959582 NR Description: T-complex protein 1, alpha subunit
  misc_feature (10)..(544): NCBI GI NO: 13959583 NR Description: T-complex protein 1, alpha subunit
  misc_feature (10)..(545): NCBI GI NO: 135536 NR Description: T-COMPLEX PROTEIN 1, ALPHA SUBUNIT
  misc_feature (10)..(545): NCBI GI NO: 135538 NR Description: T-complex protein 1, alpha subunit
  misc_feature (10)..(545): NCBI GI NO: 13540473 NR Description: t-complex 1; T-complex locus TCP-1; t-complex 1
  misc_feature (1)..(540): NCBI GI NO: 17532601 NR Description: Chaperonin Containing TCP-1 CCT-1 (58

SEQ ID NO: 38472 - protein, 520 aa, Zea mays subsp. mays; identical to SEQ ID NO: 27765
  peptide (1)..(520): Ceres Seq. ID no. 12594599
  misc_feature (6)..(513): Pfam Name: Pfam Description:  TCP-1/cpn60 chaperonin family
  misc_feature (1)..(520): NCBI GI NO: 24371053 NR Description: t-complex polypeptide 1 [Bruguiera sexangula]
  misc_feature (1)..(520): NCBI GI NO: 25083339 NR Description: t-complex polypeptide 1 homologue
  misc_feature (1)..(520): NCBI GI NO: 15231024 NR Description: t-complex polypeptide 1 homologue
  misc_feature (1)..(520): NCBI GI NO: 9293959 NR Description: chaperonin, t-complex protein alpha subunit
  misc_feature (1)..(517): NCBI GI NO: 13959582 NR Description: T-complex protein 1, alpha subunit
  misc_feature (1)..(519): NCBI GI NO: 13959583 NR Description: T-complex protein 1, alpha subunit
  misc_feature (1)..(520): NCBI GI NO: 135536 NR Description: T-COMPLEX PROTEIN 1, ALPHA SUBUNIT
  misc_feature (1)..(520): NCBI GI NO: 135538 NR Description: T-complex protein 1, alpha subunit
  misc_feature (1)..(520): NCBI GI NO: 13540473 NR Description: t-complex 1; T-complex locus TCP-1; t-complex 1
  misc_feature (1)..(515): NCBI GI NO: 17532601 NR Description: Chaperonin Containing TCP-1 CCT-1 (58

SEQ ID NO: 38473 - DNA, 1859 bp, Zea mays subsp. mays
  misc_feature (1)..(1859): Ceres Seq. ID no. 13492557
aaaactttagtctactcgtcctcggtcctcctcttctcgcagcagccagcagaccaatcgggacaagcaaactcccccgattagtttaagcagcccgggcccggcgacgaccagctccgttccgcgcggggatttaaacgcgcgaagcgagaaggcacgcagcaggcggcagcggcaagcaacgaacgcgatcgcgcgccgacgacgacgcgcggtgccggcgcctggtggtgccgtgttgcggactccgctgcatcgtctcggtcggtcgtcgtcgttatcatgggtgtccggctgccggtggcgtggtccgccgtcctcgtcctcctcgtgcgggcggccgtggcgcgggagtacgcggccatcttcaacttcggggactccctggtggacgccggcaacctggtggtggacggcatcccggactacctggccacggcgcgcctgccctacggcatgacccacttcggctaccccaccggccgctgctccgacggccgcctcgtcgttgacttcatcgcgcaggagctgggcgtgccgctgctgccgccgtccaaggcgaagaacgcgacgttccaccgcggcgccaacttcgcgatcacgggcgccacgtcgctggacacgcccttcttcgtggagcgcgggctggggaagacggtctggaactcggggtccctgcacacgcagatccagtggttccaggacatgaagcccaagctgtgcgggcaggagcaggagtgccgggacctgttccggcggtcgctgttcatcgtgggcgagttcggcgggaacgactacaactcgccgctgttcgcgttccggccgctggcggaggcgcacgacatggtgccgcacgtggtggagtccatcgggcggggcgtggagcggctgatcgcggagggcgccgcggagctggtggtgcccggggtgctccccatcggctgcttccccgtctacctctccatcttccgcaggcagccggccggcggctacggcgcccgcagcggctgcgtcaaggagctgaacacgctgtcgtgggtgcacaacgccgcgctgcgccgcaaggtcgaggagctccgcgccaggcaccccggcgtgcgcatcgtgtacgccgactactacacgccggccatccagttcgtcctccacgccgagaaatacgggatgctgaagcagacgccgcgggcgtgctgcggcgcgccgggcgtgggcgagtacaacttcaacctgacgtccaagtgcggcgagccgggggcgtacgcgtgcccggacccctccaaccactggagttgggacggcatccacctcacggaggccgcctacggccacatcgccaggggctggctctacgggcccttcgccgacccgcccatcctcgacgccaagcacctcggctaacgtcgtccatccaccgtcttctccagcgccggccccgcccgcacggccagtacagactactcctccggctctgggcgccgtcgtatgtgcgtccttattaccgacctgcaaaattggattggttgcttgtagtagaagtgtagagagagcgagacagagatagatgacaaacacgaaacgaaccggaaggaggacgataaggcgcgcgtgccggccggtcttttactcctctctgttcatagctgtcccatatcgtagtcaagaaaactgagcagggaaacaaaccgggcgatatttctgttgcatcttgctttgtttgagagtgtgcgtgcgtgtgcggccagctcgatctgaactcgataggcaggtgcgtcgcgtcgtggatgaactggtccgtggacgtgatcttgtttatttttttaaggagcaggtgttgtcaaaagtccatcgctaagatgtgc

SEQ ID NO: 38474 - protein, 371 aa, Zea mays subsp. mays
  peptide (1)..(371): Ceres Seq. ID no. 13492558
  misc_feature (28)..(354): Pfam Name: Pfam Description:  GDSL-like Lipase/Acylhydrolase
  misc_feature (3)..(369): NCBI GI NO: 34903958 NR Description: OSJNBa0038J17.24
  misc_feature (7)..(365): NCBI GI NO: 34903956 NR Description: OSJNBa0038J17.23
  misc_feature (27)..(367): NCBI GI NO: 34903994 NR Description: unnamed protein product
  misc_feature (6)..(367): NCBI GI NO: 34903996 NR Description: unnamed protein product
  misc_feature (24)..(362): NCBI GI NO: 15242538 NR Description: GDSL-motif lipase/hydrolase protein
  misc_feature (24)..(362): NCBI GI NO: 21553708 NR Description: GDSL-motif lipase/hydrolase-like protein
  misc_feature (103)..(352): NCBI GI NO: 15237586 NR Description: GDSL-motif lipase/hydrolase protein
  misc_feature (27)..(351): NCBI GI NO: 18413404 NR Description: GDSL-motif lipase/hydrolase protein
  misc_feature (27)..(351): NCBI GI NO: 7486718 NR Description: hypothetical protein F8M12
  misc_feature (27)..(351): NCBI GI NO: 7486138 NR Description: hypothetical protein F25I24
MGVRLPVAWSAVLVLLVRAAVAREYAAIFNFGDSLVDAGNLVVDGIPDYLATARLPYGMTHFGYPTGRCSDGRLVVDFIAQELGVPLLPPSKAKNATFHRGANFAITGATSLDTPFFVERGLGKTVWNSGSLHTQIQWFQDMKPKLCGQEQECRDLFRRSLFIVGEFGGNDYNSPLFAFRPLAEAHDMVPHVVESIGRGVERLIAEGAAELVVPGVLPIGCFPVYLSIFRRQPAGGYGARSGCVKELNTLSWVHNAALRRKVEELRARHPGVRIVYADYYTPAIQFVLHAEKYGMLKQTPRACCGAPGVGEYNFNLTSKCGEPGAYACPDPSNHWSWDGIHLTEAAYGHIARGWLYGPFADPPILDAKHLG

SEQ ID NO: 38475 - protein, 313 aa, Zea mays subsp. mays
  peptide (1)..(313): Ceres Seq. ID no. 13492559
  misc_feature (1)..(296): Pfam Name: Pfam Description:  GDSL-like Lipase/Acylhydrolase
  misc_feature (1)..(311): NCBI GI NO: 34903958 NR Description: OSJNBa0038J17.24
  misc_feature (1)..(307): NCBI GI NO: 34903956 NR Description: OSJNBa0038J17.23
  misc_feature (1)..(309): NCBI GI NO: 34903994 NR Description: unnamed protein product
  misc_feature (1)..(309): NCBI GI NO: 34903996 NR Description: unnamed protein product
  misc_feature (1)..(304): NCBI GI NO: 15242538 NR Description: GDSL-motif lipase/hydrolase protein
  misc_feature (1)..(304): NCBI GI NO: 21553708 NR Description: GDSL-motif lipase/hydrolase-like protein
  misc_feature (45)..(294): NCBI GI NO: 15237586 NR Description: GDSL-motif lipase/hydrolase protein
  misc_feature (1)..(293): NCBI GI NO: 18413404 NR Description: GDSL-motif lipase/hydrolase protein
  misc_feature (1)..(293): NCBI GI NO: 7486718 NR Description: hypothetical protein F8M12
  misc_feature (1)..(293): NCBI GI NO: 7486138 NR Description: hypothetical protein F25I24
MTHFGYPTGRCSDGRLVVDFIAQELGVPLLPPSKAKNATFHRGANFAITGATSLDTPFFVERGLGKTVWNSGSLHTQIQWFQDMKPKLCGQEQECRDLFRRSLFIVGEFGGNDYNSPLFAFRPLAEAHDMVPHVVESIGRGVERLIAEGAAELVVPGVLPIGCFPVYLSIFRRQPAGGYGARSGCVKELNTLSWVHNAALRRKVEELRARHPGVRIVYADYYTPAIQFVLHAEKYGMLKQTPRACCGAPGVGEYNFNLTSKCGEPGAYACPDPSNHWSWDGIHLTEAAYGHIARGWLYGPFADPPILDAKHLG

SEQ ID NO: 38476 - protein, 230 aa, Zea mays subsp. mays
  peptide (1)..(230): Ceres Seq. ID no. 13492560
  misc_feature (1)..(213): Pfam Name: Pfam Description:  GDSL-like Lipase/Acylhydrolase
  misc_feature (1)..(228): NCBI GI NO: 34903958 NR Description: OSJNBa0038J17.24
  misc_feature (1)..(224): NCBI GI NO: 34903956 NR Description: OSJNBa0038J17.23
  misc_feature (1)..(226): NCBI GI NO: 34903994 NR Description: unnamed protein product
  misc_feature (1)..(226): NCBI GI NO: 34903996 NR Description: unnamed protein product
  misc_feature (1)..(221): NCBI GI NO: 15242538 NR Description: GDSL-motif lipase/hydrolase protein
  misc_feature (1)..(221): NCBI GI NO: 21553708 NR Description: GDSL-motif lipase/hydrolase-like protein
  misc_feature (1)..(211): NCBI GI NO: 15237586 NR Description: GDSL-motif lipase/hydrolase protein
  misc_feature (1)..(210): NCBI GI NO: 18413404 NR Description: GDSL-motif lipase/hydrolase protein
  misc_feature (1)..(210): NCBI GI NO: 7486718 NR Description: hypothetical protein F8M12
  misc_feature (1)..(210): NCBI GI NO: 7486138 NR Description: hypothetical protein F25I24
MKPKLCGQEQECRDLFRRSLFIVGEFGGNDYNSPLFAFRPLAEAHDMVPHVVESIGRGVERLIAEGAAELVVPGVLPIGCFPVYLSIFRRQPAGGYGARSGCVKELNTLSWVHNAALRRKVEELRARHPGVRIVYADYYTPAIQFVLHAEKYGMLKQTPRACCGAPGVGEYNFNLTSKCGEPGAYACPDPSNHWSWDGIHLTEAAYGHIARGWLYGPFADPPILDAKHLG

SEQ ID NO: 38477 - DNA, 2177 bp, Zea mays subsp. mays
  misc_feature (1)..(2177): Ceres Seq. ID no. 13492553
cttcccactccactccgcgttttcaaaaatcaaaaccccagccggaacagcgaaaccccttccaccatagcccgtaggaaacggagcagcggttgcggtttctctctccgtcgctctcaccgctcgccgccgtctccgtatccggtccgcaaggcgggcctggcgtcaaggtcctccgctccgtccccttcactcgcgaccggagtcccctcttcgttggttcgccaatctacttcgtcggcccaccccttttcccccgatcgatctctccttctcgctaagcgaactatcttgacctccctccctcgtgcgagattagccagtagaaagttccccgcttttcacccaggcacacttccaccacctcgctttgctgcttcactgcttgcttctgttgggcggagtgctaagaggacggcacgggagtcaagattcctcctccttaacctgccctttcgtgttgccgttgttggtggtttggtttgtgattgcggtggcgctggagttgcggtgtgtgtgaagcgagggatccgagattcttgtggattctgttctacttttcgattgctgctgatcctctctcccgtgcgacggcacaagcggcggtgtggggagagcatccgccgttgcccggccttggagggccccggtccgtctatggaacttgccgccccggtgccacgccccggcccggaactgaagtgctcagcaaggcgcttcttgcctgccactctcacgctgctggtgcctactgtggcagtcccctgtttggttcctgctcctcactgaccggctacggggctgcgataatggtgcctcagatggtgctgctcctttgctgctgccttctggcgttcccgccacatggtccgttagtcgttgaggcttttgtaggcggttatggagtaaactatgggagaatagcaaacaacatcccttcccctgacaaagtggtggagctcctgaggagagcaaagataaggaatgttaagatatacgactctgaccacagcgttctcgatgcgttcaaagggtctgggatcaatctggtcatcgcaatccccaatgagctcgtcaaggatatggctgcaaacacgagccgttcaatggactggctaaatcaaaatgtgcagccttatctccctcagacgcgcatcgttgggatcactgtgggaaatgaggtgctcggaggccaagatcaaagcttgtatcagccacttgttgatgctgtgaagaatgtgtatgatgggctcaagaggctccacttggagagaaaaattgagcttttcacacctcattcggaagctgtttttgctacttcttatccaccctccgcatgtgtgttcaaggaggaactcatgccatacatgaaacctcttctcgacttctttgcaatgattggctcacctttctatgtcaacgcatacccctttttggcttacataagtgatcctgaacatatcgatatcaattatgctctctttaaacccaacaaaggaataattgatccaaataatagcctgcactatgacaatatgtttgatgctcaggtagatgcagcttatgctgctctacatgctgctggttatgataacatggaggttcgtgtggcagagactggttgggcttctagtggggatcaaaatgaagcaggagcttcatctgagaatgcaaggacgtacaatttcaatcttcgtaaacggctatttctgaggaccggaactcctctgaagccaaagagaccagtcaaagcgtatatatttgcattgtttaatgagaatcagaagcctggagctggctctgagaggcattatgggctgttccttcctgatgggaggatttcatatgacatcggtgtctcaggtctactaccttcatctgcatcctcatccgtgctgtccattaagaatgttcaagctgggggttggattttacagcattgggctacagttcttttatgttgttttcattttttgggggccatagtgacttgaggacggcataacacatccgtagtaaagggtgcaattgagcaagttagaatgttgctattgggaaattcacaatgaaaatccaaataatagtaccgctgcaataatctcttctcctgaggctgtcctgctttgctgcttaaaaccgtactcagttattgttctaaaaaatgattcatacctgct

SEQ ID NO: 38478 - protein, 394 aa, Zea mays subsp. mays
  peptide (1)..(394): Ceres Seq. ID no. 13492554
  misc_feature (31)..(349): Pfam Name: Pfam Description:  Glycosyl hydrolases family 17
  misc_feature (26)..(369): NCBI GI NO: 18401187 NR Description: glycosyl hydrolase family 17
  misc_feature (26)..(369): NCBI GI NO: 21618052 NR Description: putative beta-1,3-glucanase [Arabidopsis thaliana]
  misc_feature (26)..(366): NCBI GI NO: 7447981 NR Description: probable beta-1,3-glucanase At2g26600
  misc_feature (13)..(389): NCBI GI NO: 15232696 NR Description: glycosyl hydrolase family 17
  misc_feature (26)..(389): NCBI GI NO: 11994352 NR Description: beta-1,3-glucanase-like protein
  misc_feature (29)..(362): NCBI GI NO: 15209173 NR Description: putative elicitor inducible chitinase
  misc_feature (92)..(369): NCBI GI NO: 26452328 NR Description: putative beta-1,3-glucanase [Arabidopsis thaliana]
  misc_feature (30)..(366): NCBI GI NO: 18401444 NR Description: glycosyl hydrolase family 17
  misc_feature (30)..(366): NCBI GI NO: 25316425 NR Description: probable beta-1,3-glucanase
  misc_feature (92)..(369): NCBI GI NO: 30683187 NR Description: glycosyl hydrolase family 17
MVPQMVLLLCCCLLAFPPHGPLVVEAFVGGYGVNYGRIANNIPSPDKVVELLRRAKIRNVKIYDSDHSVLDAFKGSGINLVIAIPNELVKDMAANTSRSMDWLNQNVQPYLPQTRIVGITVGNEVLGGQDQSLYQPLVDAVKNVYDGLKRLHLERKIELFTPHSEAVFATSYPPSACVFKEELMPYMKPLLDFFAMIGSPFYVNAYPFLAYISDPEHIDINYALFKPNKGIIDPNNSLHYDNMFDAQVDAAYAALHAAGYDNMEVRVAETGWASSGDQNEAGASSENARTYNFNLRKRLFLRTGTPLKPKRPVKAYIFALFNENQKPGAGSERHYGLFLPDGRISYDIGVSGLLPSSASSSVLSIKNVQAGGWILQHWATVLLCCFHFLGAIVT

SEQ ID NO: 38479 - protein, 390 aa, Zea mays subsp. mays
  peptide (1)..(390): Ceres Seq. ID no. 13492555
  misc_feature (27)..(345): Pfam Name: Pfam Description:  Glycosyl hydrolases family 17
  misc_feature (22)..(365): NCBI GI NO: 18401187 NR Description: glycosyl hydrolase family 17
  misc_feature (22)..(365): NCBI GI NO: 21618052 NR Description: putative beta-1,3-glucanase [Arabidopsis thaliana]
  misc_feature (22)..(362): NCBI GI NO: 7447981 NR Description: probable beta-1,3-glucanase At2g26600
  misc_feature (9)..(385): NCBI GI NO: 15232696 NR Description: glycosyl hydrolase family 17
  misc_feature (22)..(385): NCBI GI NO: 11994352 NR Description: beta-1,3-glucanase-like protein
  misc_feature (25)..(358): NCBI GI NO: 15209173 NR Description: putative elicitor inducible chitinase
  misc_feature (88)..(365): NCBI GI NO: 26452328 NR Description: putative beta-1,3-glucanase [Arabidopsis thaliana]
  misc_feature (26)..(362): NCBI GI NO: 18401444 NR Description: glycosyl hydrolase family 17
  misc_feature (26)..(362): NCBI GI NO: 25316425 NR Description: probable beta-1,3-glucanase
  misc_feature (88)..(365): NCBI GI NO: 30683187 NR Description: glycosyl hydrolase family 17
MVLLLCCCLLAFPPHGPLVVEAFVGGYGVNYGRIANNIPSPDKVVELLRRAKIRNVKIYDSDHSVLDAFKGSGINLVIAIPNELVKDMAANTSRSMDWLNQNVQPYLPQTRIVGITVGNEVLGGQDQSLYQPLVDAVKNVYDGLKRLHLERKIELFTPHSEAVFATSYPPSACVFKEELMPYMKPLLDFFAMIGSPFYVNAYPFLAYISDPEHIDINYALFKPNKGIIDPNNSLHYDNMFDAQVDAAYAALHAAGYDNMEVRVAETGWASSGDQNEAGASSENARTYNFNLRKRLFLRTGTPLKPKRPVKAYIFALFNENQKPGAGSERHYGLFLPDGRISYDIGVSGLLPSSASSSVLSIKNVQAGGWILQHWATVLLCCFHFLGAIVT

SEQ ID NO: 38480 - protein, 303 aa, Zea mays subsp. mays
  peptide (1)..(303): Ceres Seq. ID no. 13492556
  misc_feature (1)..(258): Pfam Name: Pfam Description:  Glycosyl hydrolases family 17
  misc_feature (1)..(278): NCBI GI NO: 18401187 NR Description: glycosyl hydrolase family 17
  misc_feature (1)..(278): NCBI GI NO: 21618052 NR Description: putative beta-1,3-glucanase [Arabidopsis thaliana]
  misc_feature (1)..(275): NCBI GI NO: 7447981 NR Description: probable beta-1,3-glucanase At2g26600
  misc_feature (1)..(298): NCBI GI NO: 15232696 NR Description: glycosyl hydrolase family 17
  misc_feature (1)..(298): NCBI GI NO: 11994352 NR Description: beta-1,3-glucanase-like protein
  misc_feature (1)..(271): NCBI GI NO: 15209173 NR Description: putative elicitor inducible chitinase
  misc_feature (1)..(278): NCBI GI NO: 26452328 NR Description: putative beta-1,3-glucanase [Arabidopsis thaliana]
  misc_feature (1)..(275): NCBI GI NO: 18401444 NR Description: glycosyl hydrolase family 17
  misc_feature (1)..(275): NCBI GI NO: 25316425 NR Description: probable beta-1,3-glucanase
  misc_feature (1)..(278): NCBI GI NO: 30683187 NR Description: glycosyl hydrolase family 17
MAANTSRSMDWLNQNVQPYLPQTRIVGITVGNEVLGGQDQSLYQPLVDAVKNVYDGLKRLHLERKIELFTPHSEAVFATSYPPSACVFKEELMPYMKPLLDFFAMIGSPFYVNAYPFLAYISDPEHIDINYALFKPNKGIIDPNNSLHYDNMFDAQVDAAYAALHAAGYDNMEVRVAETGWASSGDQNEAGASSENARTYNFNLRKRLFLRTGTPLKPKRPVKAYIFALFNENQKPGAGSERHYGLFLPDGRISYDIGVSGLLPSSASSSVLSIKNVQAGGWILQHWATVLLCCFHFLGAIVT

SEQ ID NO: 38481 - DNA, 1994 bp, Zea mays subsp. mays
  misc_feature (1)..(1994): Ceres Seq. ID no. 12368255
aacccacccaccgcgaaaccttcctccctctccttctctgtccccttctctcccctcctctcctccgccgctcgacagcctactctccaagccaggagaacccaacccggccagccccacacgcacacgcccacgcccacgcccacgcagccgcggcggaggccatccggcgggcgtccatgggctgctgcggctcctcgctacgggcggggacgcagccggagaagaagccggcggcgggggcgctgcccccgcgccgcccctcctactcgctgagccagaaccagaaccaggcgccgccggcagcccgcgcgggcgcccaccaggtgccgccgctcagggagttctcgctggcggagctgcgcgccgccacggccggcttcgcgccggacaacatcgtgtccgagagcggcgacaaggcgccgaatttcgtgtacaggggccgcctcgagcccagccgccgcgcgatcgccgtcaagaagttcgccaagatggcgtggcccgaccccaagcagttcgcggaggaggccaagggggtcgggaagctgcgccaccgccgcctggccaacctgatcggctactgctgcgacggcgaggagcgcctgctcgtcgccgagttcatgcccaacgacacgctcgccaagcacctcttccactgggaaaaccagacaattgaatgggctatgcgcctgagagttgcatactacatcgctgaagcactggaatattgtagcaccgaaggaaggcctttgtatcatgacctaaatgcatatagggtcctctttgatgagaatggtgatcctcgtctttcatgctttggcctgatgaaaaacagcagggatgggaaaagctatagcacaaaccttgcatatacacctccagaatatttgagaaatggaagagtaacatcagaaagtgtcatattcagctttggcactatactgctggacctcctaagtggaaaacgtatacctccatcccgtgctcttgatatgataaaaggcaacaatatccaagtactgatggattcacatctggagggaaactactcaacagaagaggcaaccacattggttgaccttgcctctcagtgcctacagtacgaacctagggatcgtcccaacactaaaaagctggtttccgtacttgagcccttgcaaataaaatcagaggtaccatcctacgagatgcttggcattccgaagcatgaagaagaagcacctccccctccacaaccgcaacaccctctttctcccatgggcgaggcctgttccaggatggatctgactgccatccatcagattctagtgaacacgcattacagggatgatgaagggagcaacgagctatcgttccaggaatggacgcagcagatgagggacatgctggaagctaggaaacgtgggtactttgctttccgtgacaaagatttcaaggcagccatagactgctacacgcagttcgtcgacgtggggacgatggtgtcgccaacagtgtacgcgaggcggagcttgtgccacctcatgtgcgaccagcctgacgccgccctccgtgacgccatgcaagcgcagtgcgcgtacccagattggccaaccgcgttctacatgcaggccgtcgcgctctcgaagctgaacatgcagagcgacgctacggacatgctgaacgaggcgtcgcagctcgaagagaagcggcagaagaacacgaaaccttgatgaaagaccagacccctctctctcgtcccggggttacggtccttctgcggctcaaataggtttgtgttgagacatgctgctcggtccttccgaaacattgtggttagttcctggtgcaagggttgggttgggacttgggaatgttaactggggggaatgtgctgtagagtaactacctggtttggcatttctgtgatgcatttttttggggcccgtgtacatgttacactgacaaaagtagtcgaaacagccagaatgcaagggaatttaattctggttatc

SEQ ID NO: 38482 - protein, 569 aa, Zea mays subsp. mays
  peptide (1)..(569): Ceres Seq. ID no. 12368256
  misc_feature (60)..(568): NCBI GI NO: 37536550 NR Description: protein kinase-like protein
  misc_feature (60)..(565): NCBI GI NO: 18418600 NR Description: putative protein; protein id: At4g35230
  misc_feature (60)..(565): NCBI GI NO: 7486022 NR Description: hypothetical protein F23E12
  misc_feature (60)..(566): NCBI GI NO: 37537032 NR Description: putative protein kinase
  misc_feature (87)..(566): NCBI GI NO: 22327962 NR Description: protein kinase - like; protein id: At5g59010
  misc_feature (87)..(563): NCBI GI NO: 15232406 NR Description: protein kinase -like protein; protein id:At3g54030
  misc_feature (87)..(563): NCBI GI NO: 21553556 NR Description: protein kinase-like protein [Arabidopsis thaliana]
  misc_feature (103)..(563): NCBI GI NO: 15237604 NR Description: protein kinase-like; protein id: At5g41260.1
  misc_feature (108)..(566): NCBI GI NO: 15237465 NR Description: protein kinase-like protein; protein id:At5g46570
  misc_feature (108)..(566): NCBI GI NO: 28393210 NR Description: putative protein kinase [Arabidopsis thaliana]
PTHRETFLPLLLCPLLSPPLLRRSTAYSPSQENPTRPAPHAHAHAHAHAAAAEAIRRASMGCCGSSLRAGTQPEKKPAAGALPPRRPSYSLSQNQNQAPPAARAGAHQVPPLREFSLAELRAATAGFAPDNIVSESGDKAPNFVYRGRLEPSRRAIAVKKFAKMAWPDPKQFAEEAKGVGKLRHRRLANLIGYCCDGEERLLVAEFMPNDTLAKHLFHWENQTIEWAMRLRVAYYIAEALEYCSTEGRPLYHDLNAYRVLFDENGDPRLSCFGLMKNSRDGKSYSTNLAYTPPEYLRNGRVTSESVIFSFGTILLDLLSGKRIPPSRALDMIKGNNIQVLMDSHLEGNYSTEEATTLVDLASQCLQYEPRDRPNTKKLVSVLEPLQIKSEVPSYEMLGIPKHEEEAPPPPQPQHPLSPMGEACSRMDLTAIHQILVNTHYRDDEGSNELSFQEWTQQMRDMLEARKRGYFAFRDKDFKAAIDCYTQFVDVGTMVSPTVYARRSLCHLMCDQPDAALRDAMQAQCAYPDWPTAFYMQAVALSKLNMQSDATDMLNEASQLEEKRQKNTKP

SEQ ID NO: 38483 - protein, 510 aa, Zea mays subsp. mays
  peptide (1)..(510): Ceres Seq. ID no. 12368257
  misc_feature (1)..(509): NCBI GI NO: 37536550 NR Description: protein kinase-like protein
  misc_feature (1)..(506): NCBI GI NO: 18418600 NR Description: putative protein; protein id: At4g35230
  misc_feature (1)..(506): NCBI GI NO: 7486022 NR Description: hypothetical protein F23E12
  misc_feature (1)..(507): NCBI GI NO: 37537032 NR Description: putative protein kinase
  misc_feature (28)..(507): NCBI GI NO: 22327962 NR Description: protein kinase - like; protein id: At5g59010
  misc_feature (28)..(504): NCBI GI NO: 15232406 NR Description: protein kinase -like protein; protein id:At3g54030
  misc_feature (28)..(504): NCBI GI NO: 21553556 NR Description: protein kinase-like protein [Arabidopsis thaliana]
  misc_feature (44)..(504): NCBI GI NO: 15237604 NR Description: protein kinase-like; protein id: At5g41260.1
  misc_feature (49)..(507): NCBI GI NO: 15237465 NR Description: protein kinase-like protein; protein id:At5g46570
  misc_feature (49)..(507): NCBI GI NO: 28393210 NR Description: putative protein kinase [Arabidopsis thaliana]
MGCCGSSLRAGTQPEKKPAAGALPPRRPSYSLSQNQNQAPPAARAGAHQVPPLREFSLAELRAATAGFAPDNIVSESGDKAPNFVYRGRLEPSRRAIAVKKFAKMAWPDPKQFAEEAKGVGKLRHRRLANLIGYCCDGEERLLVAEFMPNDTLAKHLFHWENQTIEWAMRLRVAYYIAEALEYCSTEGRPLYHDLNAYRVLFDENGDPRLSCFGLMKNSRDGKSYSTNLAYTPPEYLRNGRVTSESVIFSFGTILLDLLSGKRIPPSRALDMIKGNNIQVLMDSHLEGNYSTEEATTLVDLASQCLQYEPRDRPNTKKLVSVLEPLQIKSEVPSYEMLGIPKHEEEAPPPPQPQHPLSPMGEACSRMDLTAIHQILVNTHYRDDEGSNELSFQEWTQQMRDMLEARKRGYFAFRDKDFKAAIDCYTQFVDVGTMVSPTVYARRSLCHLMCDQPDAALRDAMQAQCAYPDWPTAFYMQAVALSKLNMQSDATDMLNEASQLEEKRQKNTKP

SEQ ID NO: 38484 - protein, 406 aa, Zea mays subsp. mays
  peptide (1)..(406): Ceres Seq. ID no. 12368258
  misc_feature (1)..(405): NCBI GI NO: 37536550 NR Description: protein kinase-like protein
  misc_feature (1)..(402): NCBI GI NO: 18418600 NR Description: putative protein; protein id: At4g35230
  misc_feature (1)..(402): NCBI GI NO: 7486022 NR Description: hypothetical protein F23E12
  misc_feature (1)..(403): NCBI GI NO: 37537032 NR Description: putative protein kinase
  misc_feature (1)..(403): NCBI GI NO: 22327962 NR Description: protein kinase - like; protein id: At5g59010
  misc_feature (1)..(400): NCBI GI NO: 15232406 NR Description: protein kinase -like protein; protein id:At3g54030
  misc_feature (1)..(400): NCBI GI NO: 21553556 NR Description: protein kinase-like protein [Arabidopsis thaliana]
  misc_feature (1)..(400): NCBI GI NO: 15237604 NR Description: protein kinase-like; protein id: At5g41260.1
  misc_feature (1)..(403): NCBI GI NO: 15237465 NR Description: protein kinase-like protein; protein id:At5g46570
  misc_feature (1)..(403): NCBI GI NO: 28393210 NR Description: putative protein kinase [Arabidopsis thaliana]
MAWPDPKQFAEEAKGVGKLRHRRLANLIGYCCDGEERLLVAEFMPNDTLAKHLFHWENQTIEWAMRLRVAYYIAEALEYCSTEGRPLYHDLNAYRVLFDENGDPRLSCFGLMKNSRDGKSYSTNLAYTPPEYLRNGRVTSESVIFSFGTILLDLLSGKRIPPSRALDMIKGNNIQVLMDSHLEGNYSTEEATTLVDLASQCLQYEPRDRPNTKKLVSVLEPLQIKSEVPSYEMLGIPKHEEEAPPPPQPQHPLSPMGEACSRMDLTAIHQILVNTHYRDDEGSNELSFQEWTQQMRDMLEARKRGYFAFRDKDFKAAIDCYTQFVDVGTMVSPTVYARRSLCHLMCDQPDAALRDAMQAQCAYPDWPTAFYMQAVALSKLNMQSDATDMLNEASQLEEKRQKNTKP

SEQ ID NO: 38485 - DNA, 1252 bp, Zea mays subsp. mays
  misc_feature (1)..(1252): Ceres Seq. ID no. 12368639
acgacggcacccgttcccatctcaattgataacgcatctccaatctccaagcgcagacgccggaggaagaaagcttgaagcagccacggcaatggcgtcccggcagttcttcacctacgacccctacgagttcgcgtacgaccagtactacaacctttacgaaccttactacctgcggcagtccgcgcccacccatcgagctagggacatctttgcgggtgccgagccggcggccgcgaaagcgagatccgcgcccagggcaaaggagtcggagacgcagacgtcgttctcaatcccagtcaacgggcctgactcgccggagagggctccctctccggtggcggaagctcgcgcgggaccgatggcgccggcgatgtcggcagaggacgccgcggcgcggatgcaggcagtggtgcgagggttcctcgcgaggaagtcggtgcgggcggtacgccaggtggatcaggaggcggagcaagtcgcgggaaagatggcgtgcgaggcggaggccctgctagcggaccccagggcacgcgtcgccgtctgggaggcgctcatgaggatgctgctgcgtctcgacgcggtgcgcggagcgcgggactaccggaggagggtcaccaagcgggtcgtcgcgctgcaggacgccgtcgacgcgctcgtcgctaagccggcaccggcaaccgtcgagattgctgaggagatcgccatagcgccggagctgccggacgctgaagatgaaaaggaagacgaagaggcagagacacacgaggcggcggccgtcgagatagcagaggagagcaataccaatgttggtgtcgacgagccctgagggttcggagatattggctgaagaaaacgaacacacctcaccggccctgactgcagttgctggcgccgcctccgacgttgtggacgcgaggaagttgatgcagatggtggcgacgctgtgcgagcagagcgcgcagcagtgcgcgttgatcgaagtgctggccgagcgtgtggacatgctggagcgtaccgtgcggcggatgcaagacgccgacagcgccggcggcggccagccaagaagctgagcacggagggcaactgaaggagcaacagcaagctttacagcggttgacgacgaaatctattaatagagatttaaatagttatgtatttttccattgcttttaatctcgagatttattattatagacactagattatttatattcattattttataataaagttcctcgtatttattgtt

SEQ ID NO: 38486 - protein, 275 aa, Zea mays subsp. mays
  peptide (1)..(275): Ceres Seq. ID no. 12368640
  misc_feature (31)..(266): NCBI GI NO: 22208514 NR Description: hypothetical protein [Sorghum bicolor]
  misc_feature (36)..(266): NCBI GI NO: 22208518 NR Description: hypothetical protein [Sorghum bicolor]
  misc_feature (188)..(273): NCBI GI NO: 4185307 NR Description: unknown [Zea mays]
RRHPFPSQLITHLQSPSADAGGRKLEAATAMASRQFFTYDPYEFAYDQYYNLYEPYYLRQSAPTHRARDIFAGAEPAAAKARSAPRAKESETQTSFSIPVNGPDSPERAPSPVAEARAGPMAPAMSAEDAAARMQAVVRGFLARKSVRAVRQVDQEAEQVAGKMACEAEALLADPRARVAVWEALMRMLLRLDAVRGARDYRRRVTKRVVALQDAVDALVAKPAPATVEIAEEIAIAPELPDAEDEKEDEEAETHEAAAVEIAEESNTNVGVDEP

SEQ ID NO: 38487 - protein, 245 aa, Zea mays subsp. mays
  peptide (1)..(245): Ceres Seq. ID no. 12368641
  misc_feature (1)..(236): NCBI GI NO: 22208514 NR Description: hypothetical protein [Sorghum bicolor]
  misc_feature (6)..(236): NCBI GI NO: 22208518 NR Description: hypothetical protein [Sorghum bicolor]
  misc_feature (158)..(243): NCBI GI NO: 4185307 NR Description: unknown [Zea mays]
MASRQFFTYDPYEFAYDQYYNLYEPYYLRQSAPTHRARDIFAGAEPAAAKARSAPRAKESETQTSFSIPVNGPDSPERAPSPVAEARAGPMAPAMSAEDAAARMQAVVRGFLARKSVRAVRQVDQEAEQVAGKMACEAEALLADPRARVAVWEALMRMLLRLDAVRGARDYRRRVTKRVVALQDAVDALVAKPAPATVEIAEEIAIAPELPDAEDEKEDEEAETHEAAAVEIAEESNTNVGVDEP

SEQ ID NO: 38488 - protein, 155 aa, Zea mays subsp. mays
  peptide (1)..(155): Ceres Seq. ID no. 12368642
  misc_feature (1)..(146): NCBI GI NO: 22208514 NR Description: hypothetical protein [Sorghum bicolor]
  misc_feature (1)..(146): NCBI GI NO: 22208518 NR Description: hypothetical protein [Sorghum bicolor]
  misc_feature (68)..(153): NCBI GI NO: 4185307 NR Description: unknown [Zea mays]
MAPAMSAEDAAARMQAVVRGFLARKSVRAVRQVDQEAEQVAGKMACEAEALLADPRARVAVWEALMRMLLRLDAVRGARDYRRRVTKRVVALQDAVDALVAKPAPATVEIAEEIAIAPELPDAEDEKEDEEAETHEAAAVEIAEESNTNVGVDEP

SEQ ID NO: 38489 - DNA, 1479 bp, Zea mays subsp. mays
  misc_feature (1)..(1479): Ceres Seq. ID no. 12415392
cccaagtcccggcccaacccatctgtagcactaggcaacagcgaagctgagcagagagctgtcactgcatctgcctcatctaccagtacgatggtgatgatgtcgggacttgctgcctactgttcactaagtatgacaacgaccgggactgcgccgttatcatggaatacacgggcaccgccggcgcgactcgctttccagaggcggcggcgcatgagtacgatcacggccacggtcacgtgcaggcgcgaatcggcgatgacggccccggagaaggccgacgtgctgcggtcgctagacgggtgggcggagtcgaacctgctgccgctgctgaagccggtggagcgggcatggcagccgcacgacctgctgccggactcggcgtcgccggggttccgcgaggcggtggacgagctgcgggcgcgggcgcgagagatccccgacgactactacgtgtgcctggtgggcaacatggtgacggaggaggccctcccccacgtaccacgccgccctcaacagcttcgtgggctacgacagcccctccagcgccgatgcctgggcgcgctggtcccgcggctggaccgccgaggagaaccgccacggcgacctgctgaaccgctatctctacctgtgcggccgcgtcgacgtccggcgcgtggagcagaccatccaccacctcatcaacgccgggatgcgcctcgcctccgacaagtgcccctacaggggcttcatctacacggcgttccaggagcgcgccaccgccgtctcgcacggcaacacggcgcggcgcgccatggcgctgggcgacgccagcctggccaggatctgcggcgccatcgcgagcgacgagaagcggcacgaggcggcctacacccgggtggtggaccagctgttcgcgctcacgcccgacgccgccgtgcgcgcgctcgagtacatgatgagggagaggatcctcatgccggcctactacatgttcgacggccgggacccggacctgttccgccactacgccgccgtcgcgcagaggctcggcgtctacaccaccgccgactacgccgacctcgtccagttcttcgtcgacaggtggggcgtggcggacctaggccccggcctcaccggcgaggggaggcaggcgcaggactacgtctgccggttgcctgagagggtgcgcaggatggaccagctggacgcgcgacgaaggctgcagccccagactcgtcaggtccccttctcttggctgttcgacaggcacgtggagctgctgacctgacttgattgatcggcagtctgcagcccagctagcggtccttttgccccctttggcagagcccagagctatcaattctgttactgcgtctccttctcctctacttctacttcttcctcgttggccactccgtagttccgtatgtgtctaccgtcaagtgactgactggaaccatgtactgtgtgtcagtcatcattcaatccatttggtgc

SEQ ID NO: 38490 - protein, 386 aa, Zea mays subsp. mays
  peptide (1)..(386): Ceres Seq. ID no. 12415393
  misc_feature (192)..(386): Pfam Name: Pfam Description:  HlyD family secretion protein
  misc_feature (23)..(165): NCBI GI NO: 38636957 NR Description: putative AE9 stearoyl-ACP desaturase
  misc_feature (90)..(178): NCBI GI NO: 7433271 NR Description: acyl-
  misc_feature (42)..(178): NCBI GI NO: 5726639 NR Description: steroyl-ACP desaturase [Arachis hypogaea]
  misc_feature (90)..(178): NCBI GI NO: 134944 NR Description: Acyl-
  misc_feature (90)..(178): NCBI GI NO: 134945 NR Description: Acyl-
  misc_feature (90)..(178): NCBI GI NO: 951427 NR Description: stearoyl-acyl-carrier protein desaturase
  misc_feature (90)..(178): NCBI GI NO: 2194093 NR Description: Chain A
  misc_feature (90)..(178): NCBI GI NO: 7433272 NR Description: acyl-
  misc_feature (90)..(178): NCBI GI NO: 417820 NR Description: Acyl-
  misc_feature (76)..(178): NCBI GI NO: 34907410 NR Description: putative stearoyl-acyl carrier protein desaturase
PKSRPNPSVALGNSEAEQRAVTASASSTSTMVMMSGLAAYCSLSMTTTGTAPLSWNTRAPPARLAFQRRRRMSTITATVTCRRESAMTAPEKADVLRSLDGWAESNLLPLLKPVERAWQPHDLLPDSASPGFREAVDELRARAREIPDDYYVCLVGNMVTEEALPHVPRRPQQLRGLRQPLQRRCLGALVPRLDRRGEPPRRPAEPLSLPVRPRRRPARGADHPPPHQRRDAPRLRQVPLQGLHLHGVPGARHRRLARQHGAARHGAGRRQPGQDLRRHRERREAARGGLHPGGGPAVRAHARRRRARARVHDEGEDPHAGLLHVRRPGPGPVPPLRRRRAEARRLHHRRLRRPRPVLRRQVGRGGPRPRPHRRGEAGAGLRLPVA

SEQ ID NO: 38491 - protein, 356 aa, Zea mays subsp. mays
  peptide (1)..(356): Ceres Seq. ID no. 12415394
  misc_feature (162)..(356): Pfam Name: Pfam Description:  HlyD family secretion protein
  misc_feature (1)..(135): NCBI GI NO: 38636957 NR Description: putative AE9 stearoyl-ACP desaturase
  misc_feature (60)..(148): NCBI GI NO: 7433271 NR Description: acyl-
  misc_feature (12)..(148): NCBI GI NO: 5726639 NR Description: steroyl-ACP desaturase [Arachis hypogaea]
  misc_feature (60)..(148): NCBI GI NO: 134944 NR Description: Acyl-
  misc_feature (60)..(148): NCBI GI NO: 134945 NR Description: Acyl-
  misc_feature (60)..(148): NCBI GI NO: 951427 NR Description: stearoyl-acyl-carrier protein desaturase
  misc_feature (60)..(148): NCBI GI NO: 2194093 NR Description: Chain A
  misc_feature (60)..(148): NCBI GI NO: 7433272 NR Description: acyl-
  misc_feature (60)..(148): NCBI GI NO: 417820 NR Description: Acyl-
  misc_feature (46)..(148): NCBI GI NO: 34907410 NR Description: putative stearoyl-acyl carrier protein desaturase
MVMMSGLAAYCSLSMTTTGTAPLSWNTRAPPARLAFQRRRRMSTITATVTCRRESAMTAPEKADVLRSLDGWAESNLLPLLKPVERAWQPHDLLPDSASPGFREAVDELRARAREIPDDYYVCLVGNMVTEEALPHVPRRPQQLRGLRQPLQRRCLGALVPRLDRRGEPPRRPAEPLSLPVRPRRRPARGADHPPPHQRRDAPRLRQVPLQGLHLHGVPGARHRRLARQHGAARHGAGRRQPGQDLRRHRERREAARGGLHPGGGPAVRAHARRRRARARVHDEGEDPHAGLLHVRRPGPGPVPPLRRRRAEARRLHHRRLRRPRPVLRRQVGRGGPRPRPHRRGEAGAGLRLPVA

SEQ ID NO: 38492 - protein, 354 aa, Zea mays subsp. mays
  peptide (1)..(354): Ceres Seq. ID no. 12415395
  misc_feature (160)..(354): Pfam Name: Pfam Description:  HlyD family secretion protein
  misc_feature (1)..(133): NCBI GI NO: 38636957 NR Description: putative AE9 stearoyl-ACP desaturase
  misc_feature (58)..(146): NCBI GI NO: 7433271 NR Description: acyl-
  misc_feature (10)..(146): NCBI GI NO: 5726639 NR Description: steroyl-ACP desaturase [Arachis hypogaea]
  misc_feature (58)..(146): NCBI GI NO: 134944 NR Description: Acyl-
  misc_feature (58)..(146): NCBI GI NO: 134945 NR Description: Acyl-
  misc_feature (58)..(146): NCBI GI NO: 2194093 NR Description: Chain A
  misc_feature (58)..(146): NCBI GI NO: 951427 NR Description: stearoyl-acyl-carrier protein desaturase
  misc_feature (58)..(146): NCBI GI NO: 7433272 NR Description: acyl-
  misc_feature (58)..(146): NCBI GI NO: 417820 NR Description: Acyl-
  misc_feature (44)..(146): NCBI GI NO: 34907410 NR Description: putative stearoyl-acyl carrier protein desaturase
MMSGLAAYCSLSMTTTGTAPLSWNTRAPPARLAFQRRRRMSTITATVTCRRESAMTAPEKADVLRSLDGWAESNLLPLLKPVERAWQPHDLLPDSASPGFREAVDELRARAREIPDDYYVCLVGNMVTEEALPHVPRRPQQLRGLRQPLQRRCLGALVPRLDRRGEPPRRPAEPLSLPVRPRRRPARGADHPPPHQRRDAPRLRQVPLQGLHLHGVPGARHRRLARQHGAARHGAGRRQPGQDLRRHRERREAARGGLHPGGGPAVRAHARRRRARARVHDEGEDPHAGLLHVRRPGPGPVPPLRRRRAEARRLHHRRLRRPRPVLRRQVGRGGPRPRPHRRGEAGAGLRLPVA

SEQ ID NO: 38493 - DNA, 1686 bp, Zea mays subsp. mays
  misc_feature (1)..(1686): Ceres Seq. ID no. 12387379
aaaaggtggagggggtgtgaggtgtgtggttggagttggcctaacaattgagcctgccgcgcacaatcaatggccgcgctcgagtccaacaagaagctgcgcctccttctcgtgcccttcttcgccactagtcacataggcccgttcaccgacctcgccgtccgtctagccacagccaacccggacgccgtcgagctcactctcgccgtcaccccagcgaacgtccacgtggttcgctcggccctcgggcggtacggcgccgaggcgggcggcgtgatcaagattgccacctacccgttccccgcgtggacggcctcgctccgggcgtggagaacctctcggccgccggggacgacgggtggcgcattgatgccgtcgccgtcgacgaggcctcgacgcgaccggcgcaggaggcgctcatcagggaacagtcccctgacgccgtcatcaccgacgtccacttcatctggaacaacgccgtggccggcgagctcggcgtgccgtgcgttacgttcagcgtcgttggcatcttctcgacgctcgtcatgtaccacctcggccgtgacgtcgtcatcagagatggccaggaggtgaccgtccctgggttgccggggccggagatacggatccccgtatccgagttgccggagttcctgagacgccggcaggagcacgacggggtcaggcggtgccatgtggagatgggcaggtgcttcggcgtcaccctcaactcgttcgtggatctggagcagccataccgggacatgtgcgtgcgcagcggatacctgaagcgcgcctacttcgtcgggcccctctcgctgccgttaccaccggccggagcaagcaccagagattcgccgtgcctcgcgtggctcggcaccaagccgaggttttcagtggtgtacgtatgcttcggcaccttcgctgccatctcggaggaccagctccgggaactggcgcttgggctagaagcttcagagaagccattcctgtgggtagtgagggcggacggatggacgccgccggagggctgggaggagcgcgtcggagagagggggatgctagtgagagggtgggcgccgcagacggcgatactgtcccatccagcagttggcgcgttcctgacgcactgcgggtcgagctcgctgctggaggcggcggcggccggcgtgccgatgctgacgtggccgctggtgttcgaccagttcatcgaggagaggctggtgaccgaggtcctcaagatcggggagagggtgtggagcgggacacggagcacgagatacgaggagcaaaaggtcgtggcagcagaggtggtggcgcgagcggtggcaaggttcctggagccgggtggcaccggcgaggcggcgaggagcaaggcgggggtgctcgctgcgaaggcgcgctcggctgtggcggagggtggctcgtcattctgtgatctgcgccgtctcgtcaatgacctgatcgaagcaagaacggctgccggaaccaacgcctgagttacaaaaatcacgagtacgtgttgaattgctctatgtgttttcctttttttccagctgtttgtcgtttctttgggcagcagtttgtgtataggagggtaccaaatatttttaagagaaagaggtatttgtatttccttgtgaatagtagagaaacagacatttttggctagcagccaaatctgcg

SEQ ID NO: 38494 - protein, 317 aa, Zea mays subsp. mays
  peptide (1)..(317): Ceres Seq. ID no. 12387380
  misc_feature (1)..(310): Pfam Name: Pfam Description:  UDP-glucoronosyl and UDP-glucosyl transferase
  misc_feature (1)..(313): NCBI GI NO: 30017585 NR Description: putative immediate-early salicylate-inducedglucosyltransferase
  misc_feature (12)..(313): NCBI GI NO: 30103010 NR Description: putative immediate-early salicylate-inducedglucosyltransferase
  misc_feature (1)..(176): NCBI GI NO: 30103010 NR Description: putative immediate-early salicylate-inducedglucosyltransferase
  misc_feature (1)..(310): NCBI GI NO: 34911572 NR Description: putative salicylate-induced glucosyltransferase
  misc_feature (1)..(306): NCBI GI NO: 7635494 NR Description: putative UDP-glycose [Cicer arietinum]
  misc_feature (1)..(307): NCBI GI NO: 32816178 NR Description: flavonoid glucosyl-transferase [Allium cepa]
  misc_feature (1)..(310): NCBI GI NO: 7433911 NR Description: probable glucosyltransferase twi1 (EC 2
  misc_feature (1)..(305): NCBI GI NO: 18418380 NR Description: glucosyltransferase -like protein
  misc_feature (1)..(306): NCBI GI NO: 4115534 NR Description: UDP-glycose:flavonoid glycosyltransferase
  misc_feature (1)..(306): NCBI GI NO: 13492674 NR Description: phenylpropanoid:glucosyltransferase 1
MYHLGRDVVIRDGQEVTVPGLPGPEIRIPVSELPEFLRRRQEHDGVRRCHVEMGRCFGVTLNSFVDLEQPYRDMCVRSGYLKRAYFVGPLSLPLPPAGASTRDSPCLAWLGTKPRFSVVYVCFGTFAAISEDQLRELALGLEASEKPFLWVVRADGWTPPEGWEERVGERGMLVRGWAPQTAILSHPAVGAFLTHCGSSSLLEAAAAGVPMLTWPLVFDQFIEERLVTEVLKIGERVWSGTRSTRYEEQKVVAAEVVARAVARFLEPGGTGEAARSKAGVLAAKARSAVAEGGSSFCDLRRLVNDLIEARTAAGTNA

SEQ ID NO: 38495 - protein, 265 aa, Zea mays subsp. mays
  peptide (1)..(265): Ceres Seq. ID no. 12387381
  misc_feature (1)..(258): Pfam Name: Pfam Description:  UDP-glucoronosyl and UDP-glucosyl transferase
  misc_feature (1)..(261): NCBI GI NO: 30017585 NR Description: putative immediate-early salicylate-inducedglucosyltransferase
  misc_feature (1)..(261): NCBI GI NO: 30103010 NR Description: putative immediate-early salicylate-inducedglucosyltransferase
  misc_feature (1)..(124): NCBI GI NO: 30103010 NR Description: putative immediate-early salicylate-inducedglucosyltransferase
  misc_feature (1)..(258): NCBI GI NO: 34911572 NR Description: putative salicylate-induced glucosyltransferase
  misc_feature (1)..(254): NCBI GI NO: 7635494 NR Description: putative UDP-glycose [Cicer arietinum]
  misc_feature (1)..(255): NCBI GI NO: 32816178 NR Description: flavonoid glucosyl-transferase [Allium cepa]
  misc_feature (1)..(258): NCBI GI NO: 7433911 NR Description: probable glucosyltransferase twi1 (EC 2
  misc_feature (1)..(253): NCBI GI NO: 18418380 NR Description: glucosyltransferase -like protein
  misc_feature (1)..(254): NCBI GI NO: 4115534 NR Description: UDP-glycose:flavonoid glycosyltransferase
  misc_feature (1)..(254): NCBI GI NO: 13492674 NR Description: phenylpropanoid:glucosyltransferase 1
MGRCFGVTLNSFVDLEQPYRDMCVRSGYLKRAYFVGPLSLPLPPAGASTRDSPCLAWLGTKPRFSVVYVCFGTFAAISEDQLRELALGLEASEKPFLWVVRADGWTPPEGWEERVGERGMLVRGWAPQTAILSHPAVGAFLTHCGSSSLLEAAAAGVPMLTWPLVFDQFIEERLVTEVLKIGERVWSGTRSTRYEEQKVVAAEVVARAVARFLEPGGTGEAARSKAGVLAAKARSAVAEGGSSFCDLRRLVNDLIEARTAAGTNA

SEQ ID NO: 38496 - protein, 244 aa, Zea mays subsp. mays
  peptide (1)..(244): Ceres Seq. ID no. 12387382
  misc_feature (1)..(237): Pfam Name: Pfam Description:  UDP-glucoronosyl and UDP-glucosyl transferase
  misc_feature (1)..(240): NCBI GI NO: 30017585 NR Description: putative immediate-early salicylate-inducedglucosyltransferase
  misc_feature (1)..(240): NCBI GI NO: 30103010 NR Description: putative immediate-early salicylate-inducedglucosyltransferase
  misc_feature (1)..(103): NCBI GI NO: 30103010 NR Description: putative immediate-early salicylate-inducedglucosyltransferase
  misc_feature (1)..(237): NCBI GI NO: 34911572 NR Description: putative salicylate-induced glucosyltransferase
  misc_feature (1)..(233): NCBI GI NO: 7635494 NR Description: putative UDP-glycose [Cicer arietinum]
  misc_feature (1)..(234): NCBI GI NO: 32816178 NR Description: flavonoid glucosyl-transferase [Allium cepa]
  misc_feature (1)..(237): NCBI GI NO: 7433911 NR Description: probable glucosyltransferase twi1 (EC 2
  misc_feature (1)..(232): NCBI GI NO: 18418380 NR Description: glucosyltransferase -like protein
  misc_feature (1)..(233): NCBI GI NO: 4115534 NR Description: UDP-glycose:flavonoid glycosyltransferase
  misc_feature (1)..(233): NCBI GI NO: 13492674 NR Description: phenylpropanoid:glucosyltransferase 1
MCVRSGYLKRAYFVGPLSLPLPPAGASTRDSPCLAWLGTKPRFSVVYVCFGTFAAISEDQLRELALGLEASEKPFLWVVRADGWTPPEGWEERVGERGMLVRGWAPQTAILSHPAVGAFLTHCGSSSLLEAAAAGVPMLTWPLVFDQFIEERLVTEVLKIGERVWSGTRSTRYEEQKVVAAEVVARAVARFLEPGGTGEAARSKAGVLAAKARSAVAEGGSSFCDLRRLVNDLIEARTAAGTNA

SEQ ID NO: 38497 - DNA, 1728 bp, Zea mays subsp. mays
  misc_feature (1)..(1728): Ceres Seq. ID no. 12367809
gcacgagaccattacctagaacatcctaatcaaaaaaaggagtgaggaaccagatccttgcttgcattggcggagcagcatcatgccttccacgacagcgcagcagaagccccacgtcgtgctggtgccgttcccggcgcacggccacatcgcgccgcacgtgcagctggcgcgcgccctccgcgcccgcggcgtccacgccacgctcgtccacaccgagctgtaccaccgccgcctgctgcgcaccaagcagcagcaggccacgggcggcgacgacgccctggacccggacgagggcttctccgtcgaggtcatcccggacgggctatcgctggaggacccaccgcgcacgctgcgtgcgtaccacgaggcgatggagcgcaactgcctcgagccgttcaaggcgctgctgcgggacctgctgttgccgcccaccggcgtgccgccggtcagctgcgtcgtggccgacaccccgatgccgttcgcggccgtggcggcgcgcgaggttggcgtcccggacgtgcagttcttcacggcgtccgcgtgcggcctcatgggctacctccagttccaggagctcttggcgagggaggtcatccctcttagacccacctacgagaccgacggctccctcgacgccccgctggactgggtgcccgggatgaaggccgtgcgcctaagggacctgccgacgttctgccacaccacggacgccgacgactggcttgtgcacttccacgtccaccagatgaagacggccgccgcctccaaggccgtcgtcctcaacactctctacgacatggagaaggacgtcgtcgacgcgctcgcgccgcacttgccgcccatctacaccgtcggcccgctcgcaagcgtcgtcaaagcgtccttgcccgctccgcgcggcgccggcgacgacaccagcgtccccgccgccggctcggtgaggagcagcgccatgcttggcgtgttacaggaagacagggagtgcatggcgtggctcgacgacggcaaggcggcgcgctccgtcgtgtacttgagcttcggcagccacgccagcatgagcgacgcgcggctcaaggagatcgcgtccgggctagcacgctgtggctctccctacctctgggtcctcaggccagaaatggccgccgcggtcgaggtcggcgagaacggcctcgtcgtgccgtggtgcgcgcaggaggcggtgctgagccacccggccgtggggctgttcgtcacccactgtgggtggaactccattctggagagcgtcgtcgccggcgtgccggtgcttggatgccccgtgctgtctgagcagaccacgaactgccgccaggtgtgcaccgcgtggggcatcggcgccgagctgccgcaggaagctggcagcgacgaggttgcggcgctcgtgagggagatgatgaccgggaggaaggggaaggacgcaagggagaagacgctgcagtggaagaggctggctcaagtcagtgcacaaccaggggggctatcttacaataatattggtcggatggtggagaatatcctactcaaacacatctgacttcaaatcatggtcatgtttttgtcatagcgactgaggggagaaagatcgtcaataaccaacagctcaaccgtatctccctgatcctatagcactattaaattaaattctgtacctagcattaaaatatctcataccatatagtccaatataaataaatcagttcatattcc

SEQ ID NO: 38498 - protein, 490 aa, Zea mays subsp. mays
  peptide (1)..(490): Ceres Seq. ID no. 12367810
  misc_feature (11)..(487): Pfam Name: Pfam Description:  UDP-glucoronosyl and UDP-glucosyl transferase
  misc_feature (10)..(487): NCBI GI NO: 6561805 NR Description: UDP-glucose glucosyltransferase [Sorghum bicolor]
  misc_feature (1)..(487): NCBI GI NO: 38344776 NR Description: OSJNBb0026L04.7
  misc_feature (1)..(487): NCBI GI NO: 38569139 NR Description: OSJNBb0033P05.7
  misc_feature (6)..(487): NCBI GI NO: 38569140 NR Description: OSJNBb0033P05.8
  misc_feature (1)..(487): NCBI GI NO: 38569188 NR Description: OSJNBa0086B14.13
  misc_feature (3)..(487): NCBI GI NO: 25286821 NR Description: T16E15.2 protein - Arabidopsis thaliana
  misc_feature (8)..(490): NCBI GI NO: 15219867 NR Description: UDP-glucose glucosyltransferase, putative
  misc_feature (8)..(487): NCBI GI NO: 17065006 NR Description: UDP-glucose glucosyltransferase
  misc_feature (8)..(487): NCBI GI NO: 15219870 NR Description: UDP-glucose glucosyltransferase
  misc_feature (8)..(487): NCBI GI NO: 15219876 NR Description: UDP-glucose glucosyltransferase, putative
MPSTTAQQKPHVVLVPFPAHGHIAPHVQLARALRARGVHATLVHTELYHRRLLRTKQQQATGGDDALDPDEGFSVEVIPDGLSLEDPPRTLRAYHEAMERNCLEPFKALLRDLLLPPTGVPPVSCVVADTPMPFAAVAAREVGVPDVQFFTASACGLMGYLQFQELLAREVIPLRPTYETDGSLDAPLDWVPGMKAVRLRDLPTFCHTTDADDWLVHFHVHQMKTAAASKAVVLNTLYDMEKDVVDALAPHLPPIYTVGPLASVVKASLPAPRGAGDDTSVPAAGSVRSSAMLGVLQEDRECMAWLDDGKAARSVVYLSFGSHASMSDARLKEIASGLARCGSPYLWVLRPEMAAAVEVGENGLVVPWCAQEAVLSHPAVGLFVTHCGWNSILESVVAGVPVLGCPVLSEQTTNCRQVCTAWGIGAELPQEAGSDEVAALVREMMTGRKGKDAREKTLQWKRLAQVSAQPGGLSYNNIGRMVENILLKHI

SEQ ID NO: 38499 - protein, 393 aa, Zea mays subsp. mays
  peptide (1)..(393): Ceres Seq. ID no. 12367811
  misc_feature (1)..(390): Pfam Name: Pfam Description:  UDP-glucoronosyl and UDP-glucosyl transferase
  misc_feature (1)..(390): NCBI GI NO: 6561805 NR Description: UDP-glucose glucosyltransferase [Sorghum bicolor]
  misc_feature (1)..(390): NCBI GI NO: 38344776 NR Description: OSJNBb0026L04.7
  misc_feature (1)..(390): NCBI GI NO: 38569139 NR Description: OSJNBb0033P05.7
  misc_feature (1)..(390): NCBI GI NO: 38569140 NR Description: OSJNBb0033P05.8
  misc_feature (1)..(390): NCBI GI NO: 38569188 NR Description: OSJNBa0086B14.13
  misc_feature (1)..(390): NCBI GI NO: 25286821 NR Description: T16E15.2 protein - Arabidopsis thaliana
  misc_feature (1)..(393): NCBI GI NO: 15219867 NR Description: UDP-glucose glucosyltransferase, putative
  misc_feature (1)..(390): NCBI GI NO: 17065006 NR Description: UDP-glucose glucosyltransferase
  misc_feature (1)..(390): NCBI GI NO: 15219870 NR Description: UDP-glucose glucosyltransferase
  misc_feature (1)..(390): NCBI GI NO: 15219876 NR Description: UDP-glucose glucosyltransferase, putative
MERNCLEPFKALLRDLLLPPTGVPPVSCVVADTPMPFAAVAAREVGVPDVQFFTASACGLMGYLQFQELLAREVIPLRPTYETDGSLDAPLDWVPGMKAVRLRDLPTFCHTTDADDWLVHFHVHQMKTAAASKAVVLNTLYDMEKDVVDALAPHLPPIYTVGPLASVVKASLPAPRGAGDDTSVPAAGSVRSSAMLGVLQEDRECMAWLDDGKAARSVVYLSFGSHASMSDARLKEIASGLARCGSPYLWVLRPEMAAAVEVGENGLVVPWCAQEAVLSHPAVGLFVTHCGWNSILESVVAGVPVLGCPVLSEQTTNCRQVCTAWGIGAELPQEAGSDEVAALVREMMTGRKGKDAREKTLQWKRLAQVSAQPGGLSYNNIGRMVENILLKHI

SEQ ID NO: 38500 - protein, 359 aa, Zea mays subsp. mays
  peptide (1)..(359): Ceres Seq. ID no. 12367812
  misc_feature (1)..(356): Pfam Name: Pfam Description:  UDP-glucoronosyl and UDP-glucosyl transferase
  misc_feature (1)..(356): NCBI GI NO: 6561805 NR Description: UDP-glucose glucosyltransferase [Sorghum bicolor]
  misc_feature (1)..(356): NCBI GI NO: 38344776 NR Description: OSJNBb0026L04.7
  misc_feature (1)..(356): NCBI GI NO: 38569139 NR Description: OSJNBb0033P05.7
  misc_feature (1)..(356): NCBI GI NO: 38569140 NR Description: OSJNBb0033P05.8
  misc_feature (1)..(356): NCBI GI NO: 38569188 NR Description: OSJNBa0086B14.13
  misc_feature (1)..(356): NCBI GI NO: 25286821 NR Description: T16E15.2 protein - Arabidopsis thaliana
  misc_feature (1)..(359): NCBI GI NO: 15219867 NR Description: UDP-glucose glucosyltransferase, putative
  misc_feature (1)..(356): NCBI GI NO: 17065006 NR Description: UDP-glucose glucosyltransferase
  misc_feature (1)..(356): NCBI GI NO: 15219870 NR Description: UDP-glucose glucosyltransferase
  misc_feature (1)..(356): NCBI GI NO: 15219876 NR Description: UDP-glucose glucosyltransferase, putative
MPFAAVAAREVGVPDVQFFTASACGLMGYLQFQELLAREVIPLRPTYETDGSLDAPLDWVPGMKAVRLRDLPTFCHTTDADDWLVHFHVHQMKTAAASKAVVLNTLYDMEKDVVDALAPHLPPIYTVGPLASVVKASLPAPRGAGDDTSVPAAGSVRSSAMLGVLQEDRECMAWLDDGKAARSVVYLSFGSHASMSDARLKEIASGLARCGSPYLWVLRPEMAAAVEVGENGLVVPWCAQEAVLSHPAVGLFVTHCGWNSILESVVAGVPVLGCPVLSEQTTNCRQVCTAWGIGAELPQEAGSDEVAALVREMMTGRKGKDAREKTLQWKRLAQVSAQPGGLSYNNIGRMVENILLKHI

SEQ ID NO: 38501 - DNA, 1533 bp, Zea mays subsp. mays
  misc_feature (1)..(1533): Ceres Seq. ID no. 12350231
aaaaaccaccaccgcccccagcttccctaccgccctcgttccggagcctagggtttgggaagtcgaaggcctcggcgcttcgtttgccagcgcaatgccggatacgggagcgagaggccgcggcgatgagccggagcctgtgacgccgcagcagcaggcggaggagacccaggcggtggacgatcggcggttgctgcgctcgcagtacctcgccgtgaagggccttatcagcgacgagaaggatgaaatggcgagcgcggactctgataagttctgctccattatcaacagagtggagagcctgcaccagcttgttcagaggcccagggagcaaatagctgacgcagaaaccctgctggaccttactgctagtttggtagcatcagtaaggtcccaatcagttctgggaatcacaccttctgattttattgctggactgctgaagaaattttaaagaaaggaggttccaatgataatgtttcattggactgggctcgtcttgggcttgctacctcacgtgttttcttgtctgcatctggatgtgccaccatgattggtcccatgacgacagaagtgaagccacgaagagtttgtattaggaagaagaggactgcgaggccacatggaaacgcttgccctgaacagcttgctgatccatctgagaaaacaaagtctgatactgacaagaacatgtctgctatatttgatctcctgaggaggaggaaaagtgcaaggctggaacacattattttgaacaggacatcatttgctcaaacagtggagaacatatttgccttgtcattccttgtgaaagatggaagagttgaaatcaaagtgaatgaccagggacatcattttgtctatccaaggaatgcaccagtggcaagtgctgttgcctcaggagatgtggtctataaccactttgtcttccgatttgattttaaagactggaagctcatgaaaggggttgttccagagggagaagagcttatgccgcacaggtcctctcagaccatagccaacacaggaggaaacaatcctacccagtctgaggcacctttggccacaccaagcacaacgatcaggaagctttgcaggaaccgtggcctcatcttgcaagatgagttgatcgcgacaggtgcatatggagtcatggaacaggagatgttagccatgggcacgaacgacgccatggaagatgagatggtagctgccatgggtgtgacggaagctatgggagagaagaggaagtacaagcgcaagcgtctgttccaggacgtctgatgcgttgatccagctgaccgttgctgatggtgtacatgtctaggtagtaggtagagatgccaacccggctcacttcagcttagcttaccttagatgcatttgggtcaaagcaccccatttggtatgggttatggtggctcttggaatggctgagcgtcacgttattttggatgtgttcttaatgttagtttctggcgtacttaagactgaagtaaccatagtgaaggtgttggatgcttgggttgaatt

SEQ ID NO: 38502 - protein, 244 aa, Zea mays subsp. mays
  peptide (1)..(244): Ceres Seq. ID no. 12350232
  misc_feature (1)..(194): NCBI GI NO: 15223745 NR Description: hypothetical protein; protein id: At1g51130.1
  misc_feature (1)..(154): NCBI GI NO: 9294403 NR Description: gene_id:MOE17.7~unknown protein
  misc_feature (1)..(154): NCBI GI NO: 15232359 NR Description: hypothetical protein; protein id: At3g20760.1
  misc_feature (1)..(153): NCBI GI NO: 28411875 NR Description: OSJNBa0016N23.27
  misc_feature (102)..(194): NCBI GI NO: 5441894 NR Description: EST AU030111
  misc_feature (45)..(175): NCBI GI NO: 38344630 NR Description: OSJNBb0003A12.16
  misc_feature (1)..(100): NCBI GI NO: 23894296 NR Description: hypothetical protein; similar to S
MIGPMTTEVKPRRVCIRKKRTARPHGNACPEQLADPSEKTKSDTDKNMSAIFDLLRRRKSARLEHIILNRTSFAQTVENIFALSFLVKDGRVEIKVNDQGHHFVYPRNAPVASAVASGDVVYNHFVFRFDFKDWKLMKGVVPEGEELMPHRSSQTIANTGGNNPTQSEAPLATPSTTIRKLCRNRGLILQDELIATGAYGVMEQEMLAMGTNDAMEDEMVAAMGVTEAMGEKRKYKRKRLFQDV

SEQ ID NO: 38503 - protein, 240 aa, Zea mays subsp. mays
  peptide (1)..(240): Ceres Seq. ID no. 12350233
  misc_feature (1)..(190): NCBI GI NO: 15223745 NR Description: hypothetical protein; protein id: At1g51130.1
  misc_feature (1)..(150): NCBI GI NO: 9294403 NR Description: gene_id:MOE17.7~unknown protein
  misc_feature (1)..(150): NCBI GI NO: 15232359 NR Description: hypothetical protein; protein id: At3g20760.1
  misc_feature (1)..(149): NCBI GI NO: 28411875 NR Description: OSJNBa0016N23.27
  misc_feature (98)..(190): NCBI GI NO: 5441894 NR Description: EST AU030111
  misc_feature (41)..(171): NCBI GI NO: 38344630 NR Description: OSJNBb0003A12.16
  misc_feature (1)..(96): NCBI GI NO: 23894296 NR Description: hypothetical protein; similar to S
MTTEVKPRRVCIRKKRTARPHGNACPEQLADPSEKTKSDTDKNMSAIFDLLRRRKSARLEHIILNRTSFAQTVENIFALSFLVKDGRVEIKVNDQGHHFVYPRNAPVASAVASGDVVYNHFVFRFDFKDWKLMKGVVPEGEELMPHRSSQTIANTGGNNPTQSEAPLATPSTTIRKLCRNRGLILQDELIATGAYGVMEQEMLAMGTNDAMEDEMVAAMGVTEAMGEKRKYKRKRLFQDV

SEQ ID NO: 38504 - protein, 197 aa, Zea mays subsp. mays
  peptide (1)..(197): Ceres Seq. ID no. 12350234
  misc_feature (1)..(147): NCBI GI NO: 15223745 NR Description: hypothetical protein; protein id: At1g51130.1
  misc_feature (1)..(107): NCBI GI NO: 9294403 NR Description: gene_id:MOE17.7~unknown protein
  misc_feature (1)..(107): NCBI GI NO: 15232359 NR Description: hypothetical protein; protein id: At3g20760.1
  misc_feature (1)..(106): NCBI GI NO: 28411875 NR Description: OSJNBa0016N23.27
  misc_feature (55)..(147): NCBI GI NO: 5441894 NR Description: EST AU030111
  misc_feature (1)..(128): NCBI GI NO: 38344630 NR Description: OSJNBb0003A12.16
  misc_feature (1)..(53): NCBI GI NO: 23894296 NR Description: hypothetical protein; similar to S
MSAIFDLLRRRKSARLEHIILNRTSFAQTVENIFALSFLVKDGRVEIKVNDQGHHFVYPRNAPVASAVASGDVVYNHFVFRFDFKDWKLMKGVVPEGEELMPHRSSQTIANTGGNNPTQSEAPLATPSTTIRKLCRNRGLILQDELIATGAYGVMEQEMLAMGTNDAMEDEMVAAMGVTEAMGEKRKYKRKRLFQDV

SEQ ID NO: 38505 - DNA, 1657 bp, Zea mays subsp. mays
  misc_feature (1)..(1657): Ceres Seq. ID no. 12415416
aaaaccaagcaatccgcctcatcccagctcgtcacgatgctcgcgaccgcctcgccgcaccttcaggcggccgcgcgccgcctcttcctggctgtacccgtgaatcagggctgcagtagcatccgcctcccgcgcagatgcttcggccggtacgcgtcggtgcgcgcggcgtcggtgaccgccccgcccgcgaaggagggggcggacgacctggggttcctggagatgtcgtccgggacgcggcgacggtactacatgcttgggggcaagggtggggtcgggaagacgagctgcgcggcgtcgttggccgtgcggttcgccaacaacggccacccgaccctcgtcgtctccaccgaccctgcgcactcgctcagcgattccttcgcacaggatttgagtggcgggacgctcgtgcaggtcgagggccctgattcacctctgtttgcgcttgagataaatcctgaaaaggcccgggaggagtttcggacagtaagtcaaaaaaatggaggaacaggagtaaaagatttcatggatagcatgggccttggggtgcttgttgagcagcttggagagttaaaattgggggaattgttggacacaccaccacctggcttggatgaagcaattgcaatttctaaggttatgcaattccttgaagcacaagaatacagcatgtttagtcgcattgtatttgacactgcccctacgggccatacactccggttattatccttgccagatttcttggatgcgtccattgggaaaatcttgaagctgaggagtaagattgcttctgcaacatcagctattaaatcagtatttggacaagaggtccaacagcaggatgcagcgaacaaattagagcaactcagagaaaggatggtcaaagtaagaaagcttttccgcgacacggaatcaacagagtttataatcgtgacaatcccaacggtgatggcaatcagtgagtcatcaagactgcattcttcgttgcaaaaggaaagtgttcctgtaaggagactcattgtgaaccaagttctgccaccttcaacatcggactgtaaattctgttctataaaaagaaaggatcaaacgcgtgcattggatatgatacggactgacccagagttaaaaggtttgaacattatccaagcacctcttgtggacatggagattagaggtgttccggctctcaattttttgggtgatatactgtggaagtaacttcagttatgggaaacatgatcgcttataagggtgcttaattggccaatatcactgttagcctgctgcacaattgcactgctctgcaactagcaatctgtgggctcttctggttgtttccagctaacaattgcacaataagcttaagttgtttccagctacaatacagcacaacacattctccatggtgcgttaaatctgagtagaaagcaccaaattggagggttttgctgcactcctgcactagcatttgatgacctgttactcttggcagtgatgcagattggatttagccccaaattaggctaattgaagtgaaatgctgtaatatttatccttttatcaattatccccaagattaatagcaacacttgtggccttttggttcggcgactttgtaaaactcttcgtttcttatgtgccatctcaattttgt

SEQ ID NO: 38506 - protein, 406 aa, Zea mays subsp. mays
  peptide (1)..(406): Ceres Seq. ID no. 12415417
  misc_feature (82)..(379): Pfam Name: Pfam Description:  Anion-transporting ATPase
  misc_feature (50)..(406): NCBI GI NO: 30681260 NR Description: ATPase -related [Arabidopsis thaliana]
  misc_feature (68)..(379): NCBI GI NO: 5824321 NR Description: ATPase [Solanum tuberosum]
  misc_feature (46)..(406): NCBI GI NO: 30697424 NR Description: ATPase - like protein [Arabidopsis thaliana]
  misc_feature (66)..(406): NCBI GI NO: 9759337 NR Description: arsenite translocating ATPase-like protein
  misc_feature (204)..(406): NCBI GI NO: 6056208 NR Description: putative ATPase [Arabidopsis thaliana]
  misc_feature (50)..(220): NCBI GI NO: 6056208 NR Description: putative ATPase [Arabidopsis thaliana]
  misc_feature (84)..(405): NCBI GI NO: 15679508 NR Description: arsenical pump-driving ATPase
  misc_feature (74)..(405): NCBI GI NO: 15669329 NR Description: arsenical pump-driving ATPase (arsA)
  misc_feature (74)..(405): NCBI GI NO: 20095116 NR Description: Arsenite transporting ATPase
  misc_feature (172)..(404): NCBI GI NO: 4757796 NR Description: arsA arsenite transporter, ATP-binding, homolog 1
KTKQSASSQLVTMLATASPHLQAAARRLFLAVPVNQGCSSIRLPRRCFGRYASVRAASVTAPPAKEGADDLGFLEMSSGTRRRYYMLGGKGGVGKTSCAASLAVRFANNGHPTLVVSTDPAHSLSDSFAQDLSGGTLVQVEGPDSPLFALEINPEKAREEFRTVSQKNGGTGVKDFMDSMGLGVLVEQLGELKLGELLDTPPPGLDEAIAISKVMQFLEAQEYSMFSRIVFDTAPTGHTLRLLSLPDFLDASIGKILKLRSKIASATSAIKSVFGQEVQQQDAANKLEQLRERMVKVRKLFRDTESTEFIIVTIPTVMAISESSRLHSSLQKESVPVRRLIVNQVLPPSTSDCKFCSIKRKDQTRALDMIRTDPELKGLNIIQAPLVDMEIRGVPALNFLGDILWK

SEQ ID NO: 38507 - protein, 394 aa, Zea mays subsp. mays
  peptide (1)..(394): Ceres Seq. ID no. 12415418
  misc_feature (70)..(367): Pfam Name: Pfam Description:  Anion-transporting ATPase
  misc_feature (38)..(394): NCBI GI NO: 30681260 NR Description: ATPase -related [Arabidopsis thaliana]
  misc_feature (56)..(367): NCBI GI NO: 5824321 NR Description: ATPase [Solanum tuberosum]
  misc_feature (34)..(394): NCBI GI NO: 30697424 NR Description: ATPase - like protein [Arabidopsis thaliana]
  misc_feature (54)..(394): NCBI GI NO: 9759337 NR Description: arsenite translocating ATPase-like protein
  misc_feature (192)..(394): NCBI GI NO: 6056208 NR Description: putative ATPase [Arabidopsis thaliana]
  misc_feature (38)..(208): NCBI GI NO: 6056208 NR Description: putative ATPase [Arabidopsis thaliana]
  misc_feature (72)..(393): NCBI GI NO: 15679508 NR Description: arsenical pump-driving ATPase
  misc_feature (62)..(393): NCBI GI NO: 15669329 NR Description: arsenical pump-driving ATPase (arsA)
  misc_feature (62)..(393): NCBI GI NO: 20095116 NR Description: Arsenite transporting ATPase
  misc_feature (160)..(392): NCBI GI NO: 4757796 NR Description: arsA arsenite transporter, ATP-binding, homolog 1
MLATASPHLQAAARRLFLAVPVNQGCSSIRLPRRCFGRYASVRAASVTAPPAKEGADDLGFLEMSSGTRRRYYMLGGKGGVGKTSCAASLAVRFANNGHPTLVVSTDPAHSLSDSFAQDLSGGTLVQVEGPDSPLFALEINPEKAREEFRTVSQKNGGTGVKDFMDSMGLGVLVEQLGELKLGELLDTPPPGLDEAIAISKVMQFLEAQEYSMFSRIVFDTAPTGHTLRLLSLPDFLDASIGKILKLRSKIASATSAIKSVFGQEVQQQDAANKLEQLRERMVKVRKLFRDTESTEFIIVTIPTVMAISESSRLHSSLQKESVPVRRLIVNQVLPPSTSDCKFCSIKRKDQTRALDMIRTDPELKGLNIIQAPLVDMEIRGVPALNFLGDILWK

SEQ ID NO: 38508 - protein, 331 aa, Zea mays subsp. mays
  peptide (1)..(331): Ceres Seq. ID no. 12415419
  misc_feature (7)..(304): Pfam Name: Pfam Description:  Anion-transporting ATPase
  misc_feature (1)..(331): NCBI GI NO: 30681260 NR Description: ATPase -related [Arabidopsis thaliana]
  misc_feature (1)..(304): NCBI GI NO: 5824321 NR Description: ATPase [Solanum tuberosum]
  misc_feature (1)..(331): NCBI GI NO: 30697424 NR Description: ATPase - like protein [Arabidopsis thaliana]
  misc_feature (1)..(331): NCBI GI NO: 9759337 NR Description: arsenite translocating ATPase-like protein
  misc_feature (129)..(331): NCBI GI NO: 6056208 NR Description: putative ATPase [Arabidopsis thaliana]
  misc_feature (1)..(145): NCBI GI NO: 6056208 NR Description: putative ATPase [Arabidopsis thaliana]
  misc_feature (9)..(330): NCBI GI NO: 15679508 NR Description: arsenical pump-driving ATPase
  misc_feature (1)..(330): NCBI GI NO: 15669329 NR Description: arsenical pump-driving ATPase (arsA)
  misc_feature (1)..(330): NCBI GI NO: 20095116 NR Description: Arsenite transporting ATPase
  misc_feature (97)..(329): NCBI GI NO: 4757796 NR Description: arsA arsenite transporter, ATP-binding, homolog 1
MSSGTRRRYYMLGGKGGVGKTSCAASLAVRFANNGHPTLVVSTDPAHSLSDSFAQDLSGGTLVQVEGPDSPLFALEINPEKAREEFRTVSQKNGGTGVKDFMDSMGLGVLVEQLGELKLGELLDTPPPGLDEAIAISKVMQFLEAQEYSMFSRIVFDTAPTGHTLRLLSLPDFLDASIGKILKLRSKIASATSAIKSVFGQEVQQQDAANKLEQLRERMVKVRKLFRDTESTEFIIVTIPTVMAISESSRLHSSLQKESVPVRRLIVNQVLPPSTSDCKFCSIKRKDQTRALDMIRTDPELKGLNIIQAPLVDMEIRGVPALNFLGDILWK

SEQ ID NO: 38509 - DNA, 1761 bp, Zea mays subsp. mays; identical to SEQ ID NO: 28368
  misc_feature (1)..(1761): Ceres Seq. ID no. 12382163

SEQ ID NO: 38510 - protein, 443 aa, Zea mays subsp. mays; identical to SEQ ID NO: 28369
  peptide (1)..(443): Ceres Seq. ID no. 12382164
  misc_feature (17)..(272): Pfam Name: Pfam Description:  Protein kinase domain
  misc_feature (11)..(436): NCBI GI NO: 21954717 NR Description: SOS2-like protein kinase [Glycine max]
  misc_feature (7)..(436): NCBI GI NO: 15235768 NR Description:
  misc_feature (3)..(440): NCBI GI NO: 17224924 NR Description: CBL-interacting protein kinase [Brassica napus]
  misc_feature (13)..(433): NCBI GI NO: 4884974 NR Description: putative serine/threonine protein kinase
  misc_feature (5)..(440): NCBI GI NO: 33146431 NR Description: putative Serine/threonine Kinase
  misc_feature (12)..(433): NCBI GI NO: 15242509 NR Description: serine threonine protein kinase
  misc_feature (11)..(443): NCBI GI NO: 34903780 NR Description: unnamed protein product
  misc_feature (8)..(438): NCBI GI NO: 34907870 NR Description: putative serine/threonine protein kinase
  misc_feature (12)..(307): NCBI GI NO: 34909714 NR Description: OsPK4-like protein
  misc_feature (301)..(440): NCBI GI NO: 34909714 NR Description: OsPK4-like protein

SEQ ID NO: 38511 - protein, 439 aa, Zea mays subsp. mays; identical to SEQ ID NO: 28370
  peptide (1)..(439): Ceres Seq. ID no. 12382165
  misc_feature (13)..(268): Pfam Name: Pfam Description:  Protein kinase domain
  misc_feature (7)..(432): NCBI GI NO: 21954717 NR Description: SOS2-like protein kinase [Glycine max]
  misc_feature (3)..(432): NCBI GI NO: 15235768 NR Description:
  misc_feature (1)..(436): NCBI GI NO: 17224924 NR Description: CBL-interacting protein kinase [Brassica napus]
  misc_feature (9)..(429): NCBI GI NO: 4884974 NR Description: putative serine/threonine protein kinase
  misc_feature (1)..(436): NCBI GI NO: 33146431 NR Description: putative Serine/threonine Kinase
  misc_feature (8)..(429): NCBI GI NO: 15242509 NR Description: serine threonine protein kinase
  misc_feature (7)..(439): NCBI GI NO: 34903780 NR Description: unnamed protein product
  misc_feature (4)..(434): NCBI GI NO: 34907870 NR Description: putative serine/threonine protein kinase
  misc_feature (8)..(303): NCBI GI NO: 34909714 NR Description: OsPK4-like protein
  misc_feature (297)..(436): NCBI GI NO: 34909714 NR Description: OsPK4-like protein

SEQ ID NO: 38512 - protein, 386 aa, Zea mays subsp. mays; identical to SEQ ID NO: 28371
  peptide (1)..(386): Ceres Seq. ID no. 12382166
  misc_feature (1)..(215): Pfam Name: Pfam Description:  Protein kinase domain
  misc_feature (1)..(379): NCBI GI NO: 21954717 NR Description: SOS2-like protein kinase [Glycine max]
  misc_feature (1)..(379): NCBI GI NO: 15235768 NR Description:
  misc_feature (1)..(383): NCBI GI NO: 17224924 NR Description: CBL-interacting protein kinase [Brassica napus]
  misc_feature (1)..(376): NCBI GI NO: 4884974 NR Description: putative serine/threonine protein kinase
  misc_feature (1)..(383): NCBI GI NO: 33146431 NR Description: putative Serine/threonine Kinase
  misc_feature (1)..(376): NCBI GI NO: 15242509 NR Description: serine threonine protein kinase
  misc_feature (1)..(386): NCBI GI NO: 34903780 NR Description: unnamed protein product
  misc_feature (1)..(381): NCBI GI NO: 34907870 NR Description: putative serine/threonine protein kinase
  misc_feature (1)..(250): NCBI GI NO: 34909714 NR Description: OsPK4-like protein
  misc_feature (244)..(383): NCBI GI NO: 34909714 NR Description: OsPK4-like protein

SEQ ID NO: 38513 - DNA, 1405 bp, Zea mays subsp. mays
  misc_feature (1)..(1405): Ceres Seq. ID no. 12367813
aaaacgaagcaaaagcaaccgtcgagcttgcaacgccttacgcctccacactcaacagtcatggtcgtcatgggcaaggagcagcaacaacacgaggaggaggaggtgcaagggaaggtcgtccaagaagaagtgcaagtcgttcaagagacggtggtgccggtgccgtcggaggaggacaaggaggccgaggcggcgctggtgcacaagatctccagcctggccgccgccatcgcgaagctgccatccctgagcccgtcgccggaggtgaacgcgctcttcaccgagctcgtgacggcgtgcatcccgcgcagcagcgtggacgtggagcggctgggcccggagctgcaggagatgcgcggcgggctgatccgcctctgcgccgacgcggaggcgctgctggaggcgcactactccgacctgctggcctccttcggacaacccgctggagcacctgtcgctcttcccgtacatcaacaactacatcctgctgagccagctggagcacggcctgctggcgcggcacgtgccgggcccagcgccggcgcgcgtggccttcgtcggctccggcccgctcccgctgagctccctggtgctcgcggcgcgccaccttccgggcgcctccttcgacaactacgacatctgcggggaggccaacgaccgggcgcggcgcctggtgcgcggcgacggcgcgctccaggcgcgcatggcgttccgcacctcggacgtggcggacgtgacccgggagctggcgtcgtacgacgccgtgttcctggcggcgctggtgggcatggcggccgaggagaaggcccgcgtggtggcgcacctcgggaggcacatggcccccggcgccgcgctggtggtgcggagcgcgcacggcgcgcgcgggttcctgtaccccgtggtggaccccgaggagatccggcgcggcggattcgacgtgctcgccgtgcaccacccggagggggaggtgatcaactccgtgatcatcgcgcgcaagcccgttgccgtcgacgcgcacgccaccggcggggtggggcacgcgcacgcgcacgcgcacggcgccgtgctcagccggccctgcctctgctgcgagatggaggcccgggcgcaccagaagatggaggaggtggccgtcgagcagctgccgtcctaggcaggcgcacaccggcgtcctcgctttcttgtccgtccggccgcccatttgattttcggagttgcatctatctcatctaatatccatccatccatccatccatctatagcagtattatgtatgcatccacatggtaataatctggctgaccgcatccgcatatggtcgtctcatcgtccatctataccttgaaagctactaattaattactgagttattattactactgtttttactactactacgtac

SEQ ID NO: 38514 - protein, 411 aa, Zea mays subsp. mays
  peptide (1)..(411): Ceres Seq. ID no. 12367814
  misc_feature (60)..(148): Pfam Name: Pfam Description:  Nicotianamine synthase protein
  misc_feature (21)..(148): NCBI GI NO: 20387260 NR Description: nicotianamine synthase 1 [Zea mays]
  misc_feature (64)..(148): NCBI GI NO: 27151636 NR Description: Nicotianamine synthase 9
  misc_feature (65)..(148): NCBI GI NO: 19911064 NR Description: ZmNAS2 [Zea mays]
  misc_feature (40)..(148): NCBI GI NO: 20387262 NR Description: ZmNAS3 [Zea mays]
  misc_feature (65)..(148): NCBI GI NO: 20387262 NR Description: ZmNAS3 [Zea mays]
  misc_feature (59)..(148): NCBI GI NO: 27151642 NR Description: Nicotianamine synthase 1
  misc_feature (58)..(148): NCBI GI NO: 27151634 NR Description: Probable nicotianamine synthase 1
  misc_feature (58)..(148): NCBI GI NO: 27151630 NR Description: Probable nicotianamine synthase 2
  misc_feature (57)..(148): NCBI GI NO: 27151640 NR Description: Probable nicotianamine synthase 2
  misc_feature (59)..(148): NCBI GI NO: 27151639 NR Description: Probable nicotianamine synthase 4
KTKQKQPSSLQRLTPPHSTVMVVMGKEQQQHEEEEVQGKVVQEEVQVVQETVVPVPSEEDKEAEAALVHKISSLAAAIAKLPSLSPSPEVNALFTELVTACIPRSSVDVERLGPELQEMRGGLIRLCADAEALLEAHYSDLLASFGQPAGAPVALPVHQQLHPAEPAGARPAGAARAGPSAGARGLRRLRPAPAELPGARGAPPSGRLLRQLRHLRGGQRPGAAPGARRRRAPGAHGVPHLGRGGRDPGAGVVRRRVPGGAGGHGGRGEGPRGGAPREAHGPRRRAGGAERARRARVPVPRGGPRGDPARRIRRARRAPPGGGGDQLRDHRAQARCRRRARHRRGGARARARARRRAQPALPLLRDGGPGAPEDGGGGRRAAAVLGRRTPASSLSCPSGRPFDFRSCIYLI

SEQ ID NO: 38515 - protein, 391 aa, Zea mays subsp. mays
  peptide (1)..(391): Ceres Seq. ID no. 12367815
  misc_feature (40)..(128): Pfam Name: Pfam Description:  Nicotianamine synthase protein
  misc_feature (1)..(128): NCBI GI NO: 20387260 NR Description: nicotianamine synthase 1 [Zea mays]
  misc_feature (44)..(128): NCBI GI NO: 27151636 NR Description: Nicotianamine synthase 9
  misc_feature (45)..(128): NCBI GI NO: 19911064 NR Description: ZmNAS2 [Zea mays]
  misc_feature (20)..(128): NCBI GI NO: 20387262 NR Description: ZmNAS3 [Zea mays]
  misc_feature (45)..(128): NCBI GI NO: 20387262 NR Description: ZmNAS3 [Zea mays]
  misc_feature (39)..(128): NCBI GI NO: 27151642 NR Description: Nicotianamine synthase 1
  misc_feature (38)..(128): NCBI GI NO: 27151634 NR Description: Probable nicotianamine synthase 1
  misc_feature (38)..(128): NCBI GI NO: 27151630 NR Description: Probable nicotianamine synthase 2
  misc_feature (37)..(128): NCBI GI NO: 27151640 NR Description: Probable nicotianamine synthase 2
  misc_feature (39)..(128): NCBI GI NO: 27151639 NR Description: Probable nicotianamine synthase 4
MVVMGKEQQQHEEEEVQGKVVQEEVQVVQETVVPVPSEEDKEAEAALVHKISSLAAAIAKLPSLSPSPEVNALFTELVTACIPRSSVDVERLGPELQEMRGGLIRLCADAEALLEAHYSDLLASFGQPAGAPVALPVHQQLHPAEPAGARPAGAARAGPSAGARGLRRLRPAPAELPGARGAPPSGRLLRQLRHLRGGQRPGAAPGARRRRAPGAHGVPHLGRGGRDPGAGVVRRRVPGGAGGHGGRGEGPRGGAPREAHGPRRRAGGAERARRARVPVPRGGPRGDPARRIRRARRAPPGGGGDQLRDHRAQARCRRRARHRRGGARARARARRRAQPALPLLRDGGPGAPEDGGGGRRAAAVLGRRTPASSLSCPSGRPFDFRSCIYLI

SEQ ID NO: 38516 - protein, 388 aa, Zea mays subsp. mays
  peptide (1)..(388): Ceres Seq. ID no. 12367816
  misc_feature (37)..(125): Pfam Name: Pfam Description:  Nicotianamine synthase protein
  misc_feature (1)..(125): NCBI GI NO: 20387260 NR Description: nicotianamine synthase 1 [Zea mays]
  misc_feature (41)..(125): NCBI GI NO: 27151636 NR Description: Nicotianamine synthase 9
  misc_feature (42)..(125): NCBI GI NO: 19911064 NR Description: ZmNAS2 [Zea mays]
  misc_feature (17)..(125): NCBI GI NO: 20387262 NR Description: ZmNAS3 [Zea mays]
  misc_feature (42)..(125): NCBI GI NO: 20387262 NR Description: ZmNAS3 [Zea mays]
  misc_feature (36)..(125): NCBI GI NO: 27151642 NR Description: Nicotianamine synthase 1
  misc_feature (35)..(125): NCBI GI NO: 27151634 NR Description: Probable nicotianamine synthase 1
  misc_feature (35)..(125): NCBI GI NO: 27151630 NR Description: Probable nicotianamine synthase 2
  misc_feature (34)..(125): NCBI GI NO: 27151640 NR Description: Probable nicotianamine synthase 2
  misc_feature (36)..(125): NCBI GI NO: 27151639 NR Description: Probable nicotianamine synthase 4
MGKEQQQHEEEEVQGKVVQEEVQVVQETVVPVPSEEDKEAEAALVHKISSLAAAIAKLPSLSPSPEVNALFTELVTACIPRSSVDVERLGPELQEMRGGLIRLCADAEALLEAHYSDLLASFGQPAGAPVALPVHQQLHPAEPAGARPAGAARAGPSAGARGLRRLRPAPAELPGARGAPPSGRLLRQLRHLRGGQRPGAAPGARRRRAPGAHGVPHLGRGGRDPGAGVVRRRVPGGAGGHGGRGEGPRGGAPREAHGPRRRAGGAERARRARVPVPRGGPRGDPARRIRRARRAPPGGGGDQLRDHRAQARCRRRARHRRGGARARARARRRAQPALPLLRDGGPGAPEDGGGGRRAAAVLGRRTPASSLSCPSGRPFDFRSCIYLI

SEQ ID NO: 38517 - DNA, 1258 bp, Zea mays subsp. mays
  misc_feature (1)..(1258): Ceres Seq. ID no. 12355337
ctgtcagtgctcgccgcgcggatctagggggaggggggccgtgcccggcgcggacgccgggatgccgatctgcgcgccgtcgtccgactcctcggcctcggcctcgtcgggcttgggcgcccgcgtctgggtgctccacgggctagcgctcggcgcggcggccgcggccgctgccgttgcgtacctgtaccggcggccgaccgggttccgcagccgcgcggtggggatcatacccgcgcgcttcgcctccacgcgcttcgagggcaagccgctcgttcccatcctcggcaagcccatgatccagagaacatgggaaagagttatgctagcttcttcgttggaccatgttgttgtggcaacggatgatgagagaattgcagaatgctgtcgaggatttggagctgatgttataatgacatcagcatcttgcaaaaacggatctgaacgctgctgtgaggcactaaagaagcttgataagcactatgatattgttgtcaatattcaaggagatgagcctctcattgaaccagagataatagatggtgtagttatgtcactgcagcgagctcctgatgcagtcttcagcacagctgttacttcactgaaaccagaagatgcattcgatacaaacagggtgaagtgttttgtggataatctgggctacgcaatatacttttcaagagggctgattccattcaataaatcagggaacgccaatccaaaatatccatatcttcttcatcttggaatcgcgggctttgattcaaaatttttgaagatatatccagaacttccaccaacaccattacaaatggaagaggacctagagcaactaaaagttcttgaaaatggctataggatgaaggtgatcaaagtggaccatgatgcccatggtgtggatgcacccgaggacgttgagaaaatcgaagcactgatgcgaacgagaaacattcagtagaaaacgaagagaaagcaagtgctttgcattgctatcggcgttggcttggtgggatacttttggttgtgctttcccgtcttctgaatagcatgataccaagtgaagttggtgcatcacttcttgaagttttgtgcttgctaaaacgttcagtgattggatatgtcacttgcattagtcctcaatcagcagttcagcgcgcaggtggattgtatctgtacttcagtagttagtagcattactttcagtcttctttacattgaaaaacaaatcgtttctggagatgaagcaattggacagtgc

SEQ ID NO: 38518 - protein, 318 aa, Zea mays subsp. mays
  peptide (1)..(318): Ceres Seq. ID no. 12355338
  misc_feature (74)..(289): Pfam Name: Pfam Description:  Cytidylyltransferase
  misc_feature (21)..(318): NCBI GI NO: 7688435 NR Description: CMP-KDO synthetase [Zea mays]
  misc_feature (77)..(312): NCBI GI NO: 7688437 NR Description: CMP-KDO synthetase [Zea mays]
  misc_feature (31)..(317): NCBI GI NO: 30695393 NR Description: CMP-KDO synthetase -related [Arabidopsis thaliana]
  misc_feature (71)..(309): NCBI GI NO: 14194887 NR Description: 3-DEOXY-MANNO-OCTULOSONATE CYTIDYLYLTRANSFERASE
  misc_feature (71)..(309): NCBI GI NO: 15835072 NR Description: 3-deoxy-manno-octulosonate cytidylyltransferase
  misc_feature (71)..(309): NCBI GI NO: 1361311 NR Description: CMP-2-keto-3-deoxyoctulosonic acid synthetase homolog
  misc_feature (71)..(309): NCBI GI NO: 15604902 NR Description: CMP-2-keto-3-deoxyoctulosonic acid synthetase
  misc_feature (69)..(309): NCBI GI NO: 29840354 NR Description: 3-deoxy-D-manno-octulosonate cytidylyltransferase
  misc_feature (68)..(308): NCBI GI NO: 39996994 NR Description: 3-deoxy-D-manno-octulosonate cytidylyltransferase
  misc_feature (74)..(318): NCBI GI NO: 19704142 NR Description: 3-deoxy-manno-octulosonate cytidylyltransferase
CQCSPRGSRGRGAVPGADAGMPICAPSSDSSASASSGLGARVWVLHGLALGAAAAAAAVAYLYRRPTGFRSRAVGIIPARFASTRFEGKPLVPILGKPMIQRTWERVMLASSLDHVVVATDDERIAECCRGFGADVIMTSASCKNGSERCCEALKKLDKHYDIVVNIQGDEPLIEPEIIDGVVMSLQRAPDAVFSTAVTSLKPEDAFDTNRVKCFVDNLGYAIYFSRGLIPFNKSGNANPKYPYLLHLGIAGFDSKFLKIYPELPPTPLQMEEDLEQLKVLENGYRMKVIKVDHDAHGVDAPEDVEKIEALMRTRNIQ

SEQ ID NO: 38519 - protein, 298 aa, Zea mays subsp. mays
  peptide (1)..(298): Ceres Seq. ID no. 12355339
  misc_feature (54)..(269): Pfam Name: Pfam Description:  Cytidylyltransferase
  misc_feature (1)..(298): NCBI GI NO: 7688435 NR Description: CMP-KDO synthetase [Zea mays]
  misc_feature (57)..(292): NCBI GI NO: 7688437 NR Description: CMP-KDO synthetase [Zea mays]
  misc_feature (11)..(297): NCBI GI NO: 30695393 NR Description: CMP-KDO synthetase -related [Arabidopsis thaliana]
  misc_feature (51)..(289): NCBI GI NO: 14194887 NR Description: 3-DEOXY-MANNO-OCTULOSONATE CYTIDYLYLTRANSFERASE
  misc_feature (51)..(289): NCBI GI NO: 15835072 NR Description: 3-deoxy-manno-octulosonate cytidylyltransferase
  misc_feature (51)..(289): NCBI GI NO: 1361311 NR Description: CMP-2-keto-3-deoxyoctulosonic acid synthetase homolog
  misc_feature (51)..(289): NCBI GI NO: 15604902 NR Description: CMP-2-keto-3-deoxyoctulosonic acid synthetase
  misc_feature (49)..(289): NCBI GI NO: 29840354 NR Description: 3-deoxy-D-manno-octulosonate cytidylyltransferase
  misc_feature (48)..(288): NCBI GI NO: 39996994 NR Description: 3-deoxy-D-manno-octulosonate cytidylyltransferase
  misc_feature (54)..(298): NCBI GI NO: 19704142 NR Description: 3-deoxy-manno-octulosonate cytidylyltransferase
MPICAPSSDSSASASSGLGARVWVLHGLALGAAAAAAAVAYLYRRPTGFRSRAVGIIPARFASTRFEGKPLVPILGKPMIQRTWERVMLASSLDHVVVATDDERIAECCRGFGADVIMTSASCKNGSERCCEALKKLDKHYDIVVNIQGDEPLIEPEIIDGVVMSLQRAPDAVFSTAVTSLKPEDAFDTNRVKCFVDNLGYAIYFSRGLIPFNKSGNANPKYPYLLHLGIAGFDSKFLKIYPELPPTPLQMEEDLEQLKVLENGYRMKVIKVDHDAHGVDAPEDVEKIEALMRTRNIQ

SEQ ID NO: 38520 - protein, 220 aa, Zea mays subsp. mays
  peptide (1)..(220): Ceres Seq. ID no. 12355340
  misc_feature (1)..(191): Pfam Name: Pfam Description:  Cytidylyltransferase
  misc_feature (1)..(220): NCBI GI NO: 7688435 NR Description: CMP-KDO synthetase [Zea mays]
  misc_feature (1)..(214): NCBI GI NO: 7688437 NR Description: CMP-KDO synthetase [Zea mays]
  misc_feature (1)..(219): NCBI GI NO: 30695393 NR Description: CMP-KDO synthetase -related [Arabidopsis thaliana]
  misc_feature (1)..(211): NCBI GI NO: 14194887 NR Description: 3-DEOXY-MANNO-OCTULOSONATE CYTIDYLYLTRANSFERASE
  misc_feature (1)..(211): NCBI GI NO: 15835072 NR Description: 3-deoxy-manno-octulosonate cytidylyltransferase
  misc_feature (1)..(211): NCBI GI NO: 1361311 NR Description: CMP-2-keto-3-deoxyoctulosonic acid synthetase homolog
  misc_feature (1)..(211): NCBI GI NO: 15604902 NR Description: CMP-2-keto-3-deoxyoctulosonic acid synthetase
  misc_feature (1)..(211): NCBI GI NO: 29840354 NR Description: 3-deoxy-D-manno-octulosonate cytidylyltransferase
  misc_feature (1)..(210): NCBI GI NO: 39996994 NR Description: 3-deoxy-D-manno-octulosonate cytidylyltransferase
  misc_feature (1)..(220): NCBI GI NO: 19704142 NR Description: 3-deoxy-manno-octulosonate cytidylyltransferase
MIQRTWERVMLASSLDHVVVATDDERIAECCRGFGADVIMTSASCKNGSERCCEALKKLDKHYDIVVNIQGDEPLIEPEIIDGVVMSLQRAPDAVFSTAVTSLKPEDAFDTNRVKCFVDNLGYAIYFSRGLIPFNKSGNANPKYPYLLHLGIAGFDSKFLKIYPELPPTPLQMEEDLEQLKVLENGYRMKVIKVDHDAHGVDAPEDVEKIEALMRTRNIQ

SEQ ID NO: 38521 - DNA, 1517 bp, Zea mays subsp. mays
  misc_feature (1)..(1517): Ceres Seq. ID no. 12357252
aaactctgtgcgccttggtgtgaccggtggtctctgtgctcccaagctgagcagcagcaatcgccgttccggaggccggagcacagagacgagacccgccgagcagtttgggtttttttttttttttgatgatttggtgcacctacctaaagaagcctttggcatcgagtacgcctagtaccaccaccaccaccaaagaagccttgagcatgcagggttgctgccagtaaaacgaagatctacatggtgcttgagtttgtcaacggcggcgagctcttcgacaagatcgctatcaaggggaaactgtccgaacacgagggcaggaggctcttccagcagctaatcgacggcgtcagctattgccatgacagaggtgtctaccaccgagacctcaagccagagaatgtccttgttgatcggaagggcaccatcaagatctctgacttcggcctcagcgctctacctcaacatctcgggagtgacggacttctgcacacaacatgtggcagccccaactacatagctcctgaggttctgcaaaacagaggctatgacggctccttgtcagatctctggtcgtgtggggtgatcctctacgtgatgcttgttggctgccttcccttcgacgacaggaacctcgtcgttctttatcagaagattttcaagggagactgtcagatccccaagtggctttcgcctgccgcgcaggaccttctcaagaggatcctccaaccgaatccgatgaagaggatcaacgtcgcggggatcagggagcacgagtggttcaagaaggactacgtgcctgctgttccgcacgatgatgacgaagacgtccttcctagtccagctccctcgataaagccaatcgatgagccgggcgcaagagaagtgttctcctatcaacgcttttcagttgatcgggatggcctcttcccttgacctttctggtttcttcgaggaagaggatgcagcgcaaagaaagattcggttcacttcgacgcacccacccaaggatctatttgacaagatcgagagcgttgtcatggagatgggattcaaagtccataggggggcaggcaagctcaaggtcttgaagaatagcaagtgttccaggaacccgtcatcattgttggtgtgcaccgaggtgtttgagctcggtccatcattatatgtcgtagagcttaggaaatcccacggagactctacgttgtatagacagctgtgcgaaaggctctccgatgagctaggtgcctgcaagacagaccagatcgcgaggactgaatcatcgagtgacgacctctcgagcgtcgatggcgaagcgttccctctatctgggttctgatcatattgctttccctgtgttgttttgggaacaggggatgaggaacatgctcgttcctgatgcaattctagattaggatcatgaatatagtgtacaaagccagcggcggcggcggtgcaaattagccaccgggttgaatataaataatatatatatatgatatgttgcatcttcg

SEQ ID NO: 38522 - protein, 231 aa, Zea mays subsp. mays
  peptide (1)..(231): Ceres Seq. ID no. 12357253
  misc_feature (1)..(181): Pfam Name: Pfam Description:  Protein kinase domain
  misc_feature (1)..(210): NCBI GI NO: 34894358 NR Description: unnamed protein product
  misc_feature (1)..(196): NCBI GI NO: 23237825 NR Description: putative serine/threonine kinase
  misc_feature (1)..(215): NCBI GI NO: 18401539 NR Description: expressed protein; protein id: At3g17510
  misc_feature (1)..(215): NCBI GI NO: 11066952 NR Description: CBL-interacting protein kinase 1
  misc_feature (1)..(215): NCBI GI NO: 20260556 NR Description: unknown protein [Arabidopsis thaliana]
  misc_feature (1)..(215): NCBI GI NO: 9294138 NR Description: serine/threonine kinase [Arabidopsis thaliana]
  misc_feature (1)..(197): NCBI GI NO: 15221136 NR Description: serine threonine kinase, putative
  misc_feature (14)..(197): NCBI GI NO: 8778506 NR Description: F21D18.2 [Arabidopsis thaliana]
  misc_feature (1)..(15): NCBI GI NO: 8778506 NR Description: F21D18.2 [Arabidopsis thaliana]
  misc_feature (1)..(197): NCBI GI NO: 25387053 NR Description: hypothetical protein F11A17.18
MVLEFVNGGELFDKIAIKGKLSEHEGRRLFQQLIDGVSYCHDRGVYHRDLKPENVLVDRKGTIKISDFGLSALPQHLGSDGLLHTTCGSPNYIAPEVLQNRGYDGSLSDLWSCGVILYVMLVGCLPFDDRNLVVLYQKIFKGDCQIPKWLSPAAQDLLKRILQPNPMKRINVAGIREHEWFKKDYVPAVPHDDDEDVLPSPAPSIKPIDEPGAREVFSYQRFSVDRDGLFP

SEQ ID NO: 38523 - protein, 157 aa, Zea mays subsp. mays
  peptide (1)..(157): Ceres Seq. ID no. 12357254
  misc_feature (1)..(157): NCBI GI NO: 34894358 NR Description: unnamed protein product
  misc_feature (9)..(144): NCBI GI NO: 23237825 NR Description: putative serine/threonine kinase
  misc_feature (11)..(133): NCBI GI NO: 18401539 NR Description: expressed protein; protein id: At3g17510
  misc_feature (11)..(133): NCBI GI NO: 11066952 NR Description: CBL-interacting protein kinase 1
  misc_feature (11)..(133): NCBI GI NO: 20260556 NR Description: unknown protein [Arabidopsis thaliana]
  misc_feature (11)..(119): NCBI GI NO: 9294138 NR Description: serine/threonine kinase [Arabidopsis thaliana]
  misc_feature (1)..(128): NCBI GI NO: 15221136 NR Description: serine threonine kinase, putative
  misc_feature (1)..(128): NCBI GI NO: 8778506 NR Description: F21D18.2 [Arabidopsis thaliana]
  misc_feature (1)..(118): NCBI GI NO: 25387053 NR Description: hypothetical protein F11A17.18
  misc_feature (1)..(126): NCBI GI NO: 34393400 NR Description: putative CBL-interacting protein kinase 23
MSRAQEKCSPINAFQLIGMASSLDLSGFFEEEDAAQRKIRFTSTHPPKDLFDKIESVVMEMGFKVHRGAGKLKVLKNSKCSRNPSSLLVCTEVFELGPSLYVVELRKSHGDSTLYRQLCERLSDELGACKTDQIARTESSSDDLSSVDGEAFPLSGF

SEQ ID NO: 38524 - protein, 139 aa, Zea mays subsp. mays
  peptide (1)..(139): Ceres Seq. ID no. 12357255
  misc_feature (1)..(139): NCBI GI NO: 34894358 NR Description: unnamed protein product
  misc_feature (1)..(126): NCBI GI NO: 23237825 NR Description: putative serine/threonine kinase
  misc_feature (1)..(115): NCBI GI NO: 18401539 NR Description: expressed protein; protein id: At3g17510
  misc_feature (1)..(115): NCBI GI NO: 11066952 NR Description: CBL-interacting protein kinase 1
  misc_feature (1)..(115): NCBI GI NO: 20260556 NR Description: unknown protein [Arabidopsis thaliana]
  misc_feature (1)..(101): NCBI GI NO: 9294138 NR Description: serine/threonine kinase [Arabidopsis thaliana]
  misc_feature (1)..(110): NCBI GI NO: 15221136 NR Description: serine threonine kinase, putative
  misc_feature (1)..(110): NCBI GI NO: 8778506 NR Description: F21D18.2 [Arabidopsis thaliana]
  misc_feature (1)..(100): NCBI GI NO: 25387053 NR Description: hypothetical protein F11A17.18
  misc_feature (1)..(108): NCBI GI NO: 34393400 NR Description: putative CBL-interacting protein kinase 23
MASSLDLSGFFEEEDAAQRKIRFTSTHPPKDLFDKIESVVMEMGFKVHRGAGKLKVLKNSKCSRNPSSLLVCTEVFELGPSLYVVELRKSHGDSTLYRQLCERLSDELGACKTDQIARTESSSDDLSSVDGEAFPLSGF

SEQ ID NO: 38525 - DNA, 1393 bp, Zea mays subsp. mays
  misc_feature (1)..(1393): Ceres Seq. ID no. 12357291
ctgccacctgaaatcccccgaacctatacttttccttcccccgatccaggcggttctcttcccagaagccagcccagaatggcggcatccgacgcgctgcagtccatcgtttacagccgtgggtcgctccgcctcctcgatcagaggaagctgccgctcgagatggagtacatcgacgtcaagagttccgccgatggctggaatgcaataagagacatggttgtccgtggtgctccagcaatagccatagcagcggcactagcattagccgttgaagtttctgatttagattttattggtacgcctgaagaagcagcttcttttgtttcaaagaaattggaataccttgtatccagccgaccaactgcagtgaacctatctgatgctgcaacaaagctccaaactttggtatcaaaggcagctgaaactgcaaaagattccaagtctatctttcaggtctacattgaggccgcagagacgatgcttgttgatgatgtggcagataataaagctattggctcacatggagctgtatttcttcaaaggcagcttgcaaattcaaaaaagatatctgttctaacccattgtaatactggcagtcttgcaactgctggttatggaactgcccttggggttatacgcgctcttcattcggggggagttttagagaaggccttttgcaccgaaactcgtccatttaaccagggatccagacttacagctttcgagttagttcatgaaaaaatacctgcaacactgatagcagattctgctgctgctgcgttgatgaaacaagggcatgttcaggctgtcattgttggtgctgatcgaatagcagcaaatggtgacacagccaacaagattggcacatacaacctcgccatctccgcgaagcatcatagtgtccagttctatgtgtcagcgccggtaacttccattgatctctccctcccatctggggatgagatagtcatagaagaaagatcaccaaaggagttgctgaactctgaaggtggtctgggaaagcaagttgctgcatccggtatatcagtctggaacccagctttcgatgttactccagcaaatctgatcactgcaatcataacagaaaagggtgtgatcacaaaaactgatgctgatggatctttcgacatcaaaggattccttctgcccgcaaaataatactctagcgtggcttccattctgaatgacaaatgtctggatcgacactgttgtattctgttttctctattatacacaataataaagtcatgtcctcataggattttggtgtaagttttatggataggagatcgacgctagggtgtgtacccatagcggcgcgtatgagccgtgttttcacacgagtgggcaagtgaaaaagagatgtggc

SEQ ID NO: 38526 - protein, 393 aa, Zea mays subsp. mays
  peptide (1)..(393): Ceres Seq. ID no. 12357292
  misc_feature (60)..(378): Pfam Name: Pfam Description:  Initiation factor 2 subunit family
  misc_feature (27)..(393): NCBI GI NO: 12407304 NR Description: IDI2 [Hordeum vulgare subsp. vulgare]
  misc_feature (33)..(389): NCBI GI NO: 15216226 NR Description: CIG2 [Nicotiana tabacum]
  misc_feature (33)..(388): NCBI GI NO: 18396170 NR Description: putative translation initiation factor eIF-2B alpha subunit
  misc_feature (33)..(388): NCBI GI NO: 21593194 NR Description: putative translation initiation factor eIF-2B alpha subunit
  misc_feature (33)..(371): NCBI GI NO: 25315908 NR Description: hypothetical protein At2g05830
  misc_feature (73)..(388): NCBI GI NO: 20466258 NR Description: putative translation initiation factor eIF-2B alpha subunit
  misc_feature (33)..(386): NCBI GI NO: 40740852 NR Description: hypothetical protein AN4290.2
  misc_feature (32)..(373): NCBI GI NO: 21357667 NR Description: CG11334-PB [Drosophila melanogaster]
  misc_feature (33)..(374): NCBI GI NO: 31242175 NR Description: ENSANGP00000023010 [Anopheles gambiae]
  misc_feature (33)..(374): NCBI GI NO: 19577378 NR Description: putative translation initiation factor
LPPEIPRTYTFPSPDPGGSLPRSQPRMAASDALQSIVYSRGSLRLLDQRKLPLEMEYIDVKSSADGWNAIRDMVVRGAPAIAIAAALALAVEVSDLDFIGTPEEAASFVSKKLEYLVSSRPTAVNLSDAATKLQTLVSKAAETAKDSKSIFQVYIEAAETMLVDDVADNKAIGSHGAVFLQRQLANSKKISVLTHCNTGSLATAGYGTALGVIRALHSGGVLEKAFCTETRPFNQGSRLTAFELVHEKIPATLIADSAAAALMKQGHVQAVIVGADRIAANGDTANKIGTYNLAISAKHHSVQFYVSAPVTSIDLSLPSGDEIVIEERSPKELLNSEGGLGKQVAASGISVWNPAFDVTPANLITAIITEKGVITKTDADGSFDIKGFLLPAK

SEQ ID NO: 38527 - protein, 367 aa, Zea mays subsp. mays
  peptide (1)..(367): Ceres Seq. ID no. 12357293
  misc_feature (34)..(352): Pfam Name: Pfam Description:  Initiation factor 2 subunit family
  misc_feature (1)..(367): NCBI GI NO: 12407304 NR Description: IDI2 [Hordeum vulgare subsp. vulgare]
  misc_feature (7)..(363): NCBI GI NO: 15216226 NR Description: CIG2 [Nicotiana tabacum]
  misc_feature (7)..(362): NCBI GI NO: 18396170 NR Description: putative translation initiation factor eIF-2B alpha subunit
  misc_feature (7)..(362): NCBI GI NO: 21593194 NR Description: putative translation initiation factor eIF-2B alpha subunit
  misc_feature (7)..(345): NCBI GI NO: 25315908 NR Description: hypothetical protein At2g05830
  misc_feature (47)..(362): NCBI GI NO: 20466258 NR Description: putative translation initiation factor eIF-2B alpha subunit
  misc_feature (7)..(360): NCBI GI NO: 40740852 NR Description: hypothetical protein AN4290.2
  misc_feature (6)..(347): NCBI GI NO: 21357667 NR Description: CG11334-PB [Drosophila melanogaster]
  misc_feature (7)..(348): NCBI GI NO: 31242175 NR Description: ENSANGP00000023010 [Anopheles gambiae]
  misc_feature (7)..(348): NCBI GI NO: 19577378 NR Description: putative translation initiation factor
MAASDALQSIVYSRGSLRLLDQRKLPLEMEYIDVKSSADGWNAIRDMVVRGAPAIAIAAALALAVEVSDLDFIGTPEEAASFVSKKLEYLVSSRPTAVNLSDAATKLQTLVSKAAETAKDSKSIFQVYIEAAETMLVDDVADNKAIGSHGAVFLQRQLANSKKISVLTHCNTGSLATAGYGTALGVIRALHSGGVLEKAFCTETRPFNQGSRLTAFELVHEKIPATLIADSAAAALMKQGHVQAVIVGADRIAANGDTANKIGTYNLAISAKHHSVQFYVSAPVTSIDLSLPSGDEIVIEERSPKELLNSEGGLGKQVAASGISVWNPAFDVTPANLITAIITEKGVITKTDADGSFDIKGFLLPAK

SEQ ID NO: 38528 - protein, 339 aa, Zea mays subsp. mays
  peptide (1)..(339): Ceres Seq. ID no. 12357294
  misc_feature (6)..(324): Pfam Name: Pfam Description:  Initiation factor 2 subunit family
  misc_feature (1)..(339): NCBI GI NO: 12407304 NR Description: IDI2 [Hordeum vulgare subsp. vulgare]
  misc_feature (1)..(335): NCBI GI NO: 15216226 NR Description: CIG2 [Nicotiana tabacum]
  misc_feature (1)..(334): NCBI GI NO: 18396170 NR Description: putative translation initiation factor eIF-2B alpha subunit
  misc_feature (1)..(334): NCBI GI NO: 21593194 NR Description: putative translation initiation factor eIF-2B alpha subunit
  misc_feature (1)..(317): NCBI GI NO: 25315908 NR Description: hypothetical protein At2g05830
  misc_feature (19)..(334): NCBI GI NO: 20466258 NR Description: putative translation initiation factor eIF-2B alpha subunit
  misc_feature (1)..(332): NCBI GI NO: 40740852 NR Description: hypothetical protein AN4290.2
  misc_feature (1)..(319): NCBI GI NO: 21357667 NR Description: CG11334-PB [Drosophila melanogaster]
  misc_feature (1)..(320): NCBI GI NO: 31242175 NR Description: ENSANGP00000023010 [Anopheles gambiae]
  misc_feature (1)..(320): NCBI GI NO: 19577378 NR Description: putative translation initiation factor
MEYIDVKSSADGWNAIRDMVVRGAPAIAIAAALALAVEVSDLDFIGTPEEAASFVSKKLEYLVSSRPTAVNLSDAATKLQTLVSKAAETAKDSKSIFQVYIEAAETMLVDDVADNKAIGSHGAVFLQRQLANSKKISVLTHCNTGSLATAGYGTALGVIRALHSGGVLEKAFCTETRPFNQGSRLTAFELVHEKIPATLIADSAAAALMKQGHVQAVIVGADRIAANGDTANKIGTYNLAISAKHHSVQFYVSAPVTSIDLSLPSGDEIVIEERSPKELLNSEGGLGKQVAASGISVWNPAFDVTPANLITAIITEKGVITKTDADGSFDIKGFLLPAK

SEQ ID NO: 38529 - DNA, 1352 bp, Zea mays subsp. mays
  misc_feature (1)..(1352): Ceres Seq. ID no. 12415473
aggcaggcaggcagccaagaggcaagaggcaagaggtccctcagtcgctaggcgctagctcccggcttaactagtaggcagccatgaatttcggtgggaatggcaacgcgacgatccggtgcaagtactgcagggccagcctgagcgtgatccccggcgagcgcgccatccagtgcgcgcaatgcaactgcgtgacgcgcatccggcgggccgaccgcatcccgctggcgcggccggcgcacgtgccgccggcgttccagcgcgcccggggcaagaagcgcgccgtcctggtcggcatcacgtacgccggcatgcgccaaggctgtggcgacctgaggggccccgtcaacgacgtcaagtgcatgaggaacctcctctgccagcgcttcggcttccccggcgaatgcatcatcatgctcactgacgaccagagggacccgttcaggctgcccacgaaggagaacatccggatggcgatgcactggctggtgcagggctgcagctacggcgactccctggtgttccacttctcgggcatcggcgcgcaggtggcggacgacgacggcgacgaggcggacgggtacgacgaggccatctgcccgctggacgcgttccagagcgggcccatcctggacgacgagatcaacgaggtcatcgtgcgcccgctggtgcacggcgccaggctgcacgccgtggtggacgcctgctacagcgccacggtcctggacctcccctacctgtgccgcatgtccaggaacgggttctggcagtgggaggacgagtgcccgccgtcgggcgcctggaagggcaccagcggaggccacgccgtgctcatcagcggatacagcgagggcaaaggcaacttcgccatgatgcccgacgcccacgcgtcggtcgtcggggccatgacgcacagcttcgtccggacgctggagtgccagccgcgcggggtcacctacggccacctgctcagctccatgagggccatcatgaagaaccgcggcgggggctgcgatctgcagggggccatcggcgcacccatccgcaccgtcgccaacttcagcggcgtgcaggagcctaacctgtcctcttcggagacgtttgacatttaccgcaagcagttcgtcctgtagacaccacgccacaccagtgtttgccccgccggccgcttgtaatgaattgccgtcgtagtatcagaataatcaattatctatcggccatgatatgatatgatatatcaagaaagaaggaactaatacctagagtacttcgttcatctgtattagcagtgaacctctcaatgaaataactaagcatgttcaatgtcctctttttattagagagagacaggg

SEQ ID NO: 38530 - protein, 349 aa, Zea mays subsp. mays
  peptide (1)..(349): Ceres Seq. ID no. 12415474
  misc_feature (65)..(253): Pfam Name: Pfam Description:  Caspase domain
  misc_feature (11)..(253): NCBI GI NO: 3258570 NR Description: Unknown protein [Arabidopsis thaliana]
  misc_feature (226)..(349): NCBI GI NO: 3258570 NR Description: Unknown protein [Arabidopsis thaliana]
  misc_feature (11)..(349): NCBI GI NO: 30678252 NR Description: expressed protein [Arabidopsis thaliana]
  misc_feature (51)..(349): NCBI GI NO: 37536924 NR Description: hypothetical protein
  misc_feature (47)..(339): NCBI GI NO: 32482814 NR Description: metacaspase 2 [Arabidopsis thaliana]
  misc_feature (63)..(349): NCBI GI NO: 15237654 NR Description: expressed protein; protein id: At5g64240
  misc_feature (63)..(349): NCBI GI NO: 37788549 NR Description: metacaspase 3 [Arabidopsis thaliana]
  misc_feature (47)..(349): NCBI GI NO: 30686772 NR Description: expressed protein [Arabidopsis thaliana]
  misc_feature (63)..(299): NCBI GI NO: 11358463 NR Description: hypothetical protein
  misc_feature (47)..(283): NCBI GI NO: 7485453 NR Description: hypothetical protein F13M23
MNFGGNGNATIRCKYCRASLSVIPGERAIQCAQCNCVTRIRRADRIPLARPAHVPPAFQRARGKKRAVLVGITYAGMRQGCGDLRGPVNDVKCMRNLLCQRFGFPGECIIMLTDDQRDPFRLPTKENIRMAMHWLVQGCSYGDSLVFHFSGIGAQVADDDGDEADGYDEAICPLDAFQSGPILDDEINEVIVRPLVHGARLHAVVDACYSATVLDLPYLCRMSRNGFWQWEDECPPSGAWKGTSGGHAVLISGYSEGKGNFAMMPDAHASVVGAMTHSFVRTLECQPRGVTYGHLLSSMRAIMKNRGGGCDLQGAIGAPIRTVANFSGVQEPNLSSSETFDIYRKQFVL

SEQ ID NO: 38531 - protein, 273 aa, Zea mays subsp. mays
  peptide (1)..(273): Ceres Seq. ID no. 12415475
  misc_feature (1)..(177): Pfam Name: Pfam Description:  Caspase domain
  misc_feature (1)..(177): NCBI GI NO: 3258570 NR Description: Unknown protein [Arabidopsis thaliana]
  misc_feature (150)..(273): NCBI GI NO: 3258570 NR Description: Unknown protein [Arabidopsis thaliana]
  misc_feature (1)..(273): NCBI GI NO: 30678252 NR Description: expressed protein [Arabidopsis thaliana]
  misc_feature (1)..(273): NCBI GI NO: 37536924 NR Description: hypothetical protein
  misc_feature (1)..(263): NCBI GI NO: 32482814 NR Description: metacaspase 2 [Arabidopsis thaliana]
  misc_feature (1)..(273): NCBI GI NO: 15237654 NR Description: expressed protein; protein id: At5g64240
  misc_feature (1)..(273): NCBI GI NO: 37788549 NR Description: metacaspase 3 [Arabidopsis thaliana]
  misc_feature (1)..(273): NCBI GI NO: 30686772 NR Description: expressed protein [Arabidopsis thaliana]
  misc_feature (1)..(223): NCBI GI NO: 11358463 NR Description: hypothetical protein
  misc_feature (1)..(207): NCBI GI NO: 7485453 NR Description: hypothetical protein F13M23
MRQGCGDLRGPVNDVKCMRNLLCQRFGFPGECIIMLTDDQRDPFRLPTKENIRMAMHWLVQGCSYGDSLVFHFSGIGAQVADDDGDEADGYDEAICPLDAFQSGPILDDEINEVIVRPLVHGARLHAVVDACYSATVLDLPYLCRMSRNGFWQWEDECPPSGAWKGTSGGHAVLISGYSEGKGNFAMMPDAHASVVGAMTHSFVRTLECQPRGVTYGHLLSSMRAIMKNRGGGCDLQGAIGAPIRTVANFSGVQEPNLSSSETFDIYRKQFVL

SEQ ID NO: 38532 - protein, 256 aa, Zea mays subsp. mays
  peptide (1)..(256): Ceres Seq. ID no. 12415476
  misc_feature (1)..(160): Pfam Name: Pfam Description:  Caspase domain
  misc_feature (1)..(160): NCBI GI NO: 3258570 NR Description: Unknown protein [Arabidopsis thaliana]
  misc_feature (133)..(256): NCBI GI NO: 3258570 NR Description: Unknown protein [Arabidopsis thaliana]
  misc_feature (1)..(256): NCBI GI NO: 30678252 NR Description: expressed protein [Arabidopsis thaliana]
  misc_feature (1)..(256): NCBI GI NO: 37536924 NR Description: hypothetical protein
  misc_feature (1)..(246): NCBI GI NO: 32482814 NR Description: metacaspase 2 [Arabidopsis thaliana]
  misc_feature (1)..(256): NCBI GI NO: 15237654 NR Description: expressed protein; protein id: At5g64240
  misc_feature (1)..(256): NCBI GI NO: 37788549 NR Description: metacaspase 3 [Arabidopsis thaliana]
  misc_feature (1)..(256): NCBI GI NO: 30686772 NR Description: expressed protein [Arabidopsis thaliana]
  misc_feature (1)..(206): NCBI GI NO: 11358463 NR Description: hypothetical protein
  misc_feature (1)..(190): NCBI GI NO: 7485453 NR Description: hypothetical protein F13M23
MRNLLCQRFGFPGECIIMLTDDQRDPFRLPTKENIRMAMHWLVQGCSYGDSLVFHFSGIGAQVADDDGDEADGYDEAICPLDAFQSGPILDDEINEVIVRPLVHGARLHAVVDACYSATVLDLPYLCRMSRNGFWQWEDECPPSGAWKGTSGGHAVLISGYSEGKGNFAMMPDAHASVVGAMTHSFVRTLECQPRGVTYGHLLSSMRAIMKNRGGGCDLQGAIGAPIRTVANFSGVQEPNLSSSETFDIYRKQFVL

SEQ ID NO: 38533 - DNA, 931 bp, Zea mays subsp. mays
  misc_feature (1)..(931): Ceres Seq. ID no. 12415503
gttctggtgttccgctctgccgagtcgatgagaaatagccgccgggttcacagttcacttgcagtcgcagtcgcagtcgcagttgctggttgctttgctccccacatttgtcgacggtcgccgtcgccggttcctcgtgcaacgcaccgcgctaacgatggccgagacggtgggcttcgcgagcggcgacgcggcggcgtggcgcgcagcgctggccgcgtacgaccgccgtctcgcggccctagacaaacccgacctcgtggccgtggactccttttaccgccacgacctgcccgcgctcctgcgctgccgtgacccggatcctttcctcgccaagcccgagctggtgcgcctcctccagtggaagctctctcgcggcaagtggagaccgaggctgatggatttcgtcaagggcttggacgacgccgtggtggagtcggcgtcgcgcaaggcgttcgcggctttgcccgacctcagaagggccatcaccgagcttaccgtgctcaagggagtcggacccgccactgcgtccgccgtgctcgctgcgtatgcacctgatgtcgcaccgttcatgtctgacgagccttgggcaattcaaaggagtacactctgaagcagtaccttgcatttgctgataaattgcaggcaaaagcgaaggaactgagcataggagaagaaagtttcacaccctcagatgtcgagagagcactgtggagctcggcaattgcgtccaagtcaccaccaagcggtaacccaaagagggaatcaaagatgcatggcaagaggaaaagatgatttacaccgcgcttctttattgaggctaaaagggttttagtagctgcgggtcttagattcttagttgaacacttgtttttgtaacctgcggaatggaatcctttggtggagtataatttgaaatccttagttgacc

SEQ ID NO: 38534 - protein, 151 aa, Zea mays subsp. mays
  peptide (1)..(151): Ceres Seq. ID no. 12415504
  misc_feature (7)..(142): NCBI GI NO: 15795142 NR Description: gb|AAF48080
  misc_feature (7)..(142): NCBI GI NO: 18399536 NR Description: expressed protein; protein id: At3g12210
  misc_feature (7)..(151): NCBI GI NO: 30682101 NR Description: expressed protein [Arabidopsis thaliana]
  misc_feature (31)..(142): NCBI GI NO: 20129011 NR Description: CG2446-PC [Drosophila melanogaster]
  misc_feature (58)..(142): NCBI GI NO: 40746364 NR Description: hypothetical protein AN1337.2
MAETVGFASGDAAAWRAALAAYDRRLAALDKPDLVAVDSFYRHDLPALLRCRDPDPFLAKPELVRLLQWKLSRGKWRPRLMDFVKGLDDAVVESASRKAFAALPDLRRAITELTVLKGVGPATASAVLAAYAPDVAPFMSDEPWAIQRSTL

SEQ ID NO: 38535 - protein, 104 aa, Zea mays subsp. mays
  peptide (1)..(104): Ceres Seq. ID no. 12415505
VLVFRSAESMRNSRRVHSSLAVAVAVAVAGCFAPHICRRSPSPVPRATHRANDGRDGGLRERRRGGVARSAGRVRPPSRGPRQTRPRGRGLLLPPRPARAPALP

SEQ ID NO: 38536 - protein, 95 aa, Zea mays subsp. mays
  peptide (1)..(95): Ceres Seq. ID no. 12415506
MRNSRRVHSSLAVAVAVAVAGCFAPHICRRSPSPVPRATHRANDGRDGGLRERRRGGVARSAGRVRPPSRGPRQTRPRGRGLLLPPRPARAPALP

SEQ ID NO: 38537 - DNA, 1522 bp, Zea mays subsp. mays; identical to SEQ ID NO: 26287
  misc_feature (1)..(1522): Ceres Seq. ID no. 12341968

SEQ ID NO: 38538 - protein, 466 aa, Zea mays subsp. mays; identical to SEQ ID NO: 26288
  peptide (1)..(466): Ceres Seq. ID no. 12341969
  misc_feature (48)..(466): Pfam Name: Pfam Description:  Caspase domain
  misc_feature (46)..(466): NCBI GI NO: 29367583 NR Description: latex-abundant protein-like protein
  misc_feature (45)..(466): NCBI GI NO: 34908928 NR Description: putative latex-abundant protein
  misc_feature (47)..(466): NCBI GI NO: 4235430 NR Description: latex-abundant protein [Hevea brasiliensis]
  misc_feature (53)..(466): NCBI GI NO: 23343885 NR Description: metacaspase 1 [Lycopersicon esculentum]
  misc_feature (48)..(466): NCBI GI NO: 40644374 NR Description: metacaspase type II [Picea abies]
  misc_feature (47)..(466): NCBI GI NO: 15219342 NR Description: hypothetical protein common family
  misc_feature (48)..(466): NCBI GI NO: 15219345 NR Description: hypothetical protein common family
  misc_feature (48)..(466): NCBI GI NO: 33304380 NR Description: metacaspase 7 [Arabidopsis thaliana]
  misc_feature (260)..(466): NCBI GI NO: 15219340 NR Description: hypothetical protein common family
  misc_feature (47)..(217): NCBI GI NO: 15219340 NR Description: hypothetical protein common family

SEQ ID NO: 38539 - protein, 422 aa, Zea mays subsp. mays; identical to SEQ ID NO: 26289
  peptide (1)..(422): Ceres Seq. ID no. 12341970
  misc_feature (4)..(422): Pfam Name: Pfam Description:  Caspase domain
  misc_feature (2)..(422): NCBI GI NO: 29367583 NR Description: latex-abundant protein-like protein
  misc_feature (1)..(422): NCBI GI NO: 34908928 NR Description: putative latex-abundant protein
  misc_feature (3)..(422): NCBI GI NO: 4235430 NR Description: latex-abundant protein [Hevea brasiliensis]
  misc_feature (9)..(422): NCBI GI NO: 23343885 NR Description: metacaspase 1 [Lycopersicon esculentum]
  misc_feature (4)..(422): NCBI GI NO: 40644374 NR Description: metacaspase type II [Picea abies]
  misc_feature (3)..(422): NCBI GI NO: 15219342 NR Description: hypothetical protein common family
  misc_feature (4)..(422): NCBI GI NO: 15219345 NR Description: hypothetical protein common family
  misc_feature (4)..(422): NCBI GI NO: 33304380 NR Description: metacaspase 7 [Arabidopsis thaliana]
  misc_feature (216)..(422): NCBI GI NO: 15219340 NR Description: hypothetical protein common family
  misc_feature (3)..(173): NCBI GI NO: 15219340 NR Description: hypothetical protein common family

SEQ ID NO: 38540 - protein, 393 aa, Zea mays subsp. mays; identical to SEQ ID NO: 26290
  peptide (1)..(393): Ceres Seq. ID no. 12341971
  misc_feature (1)..(393): Pfam Name: Pfam Description:  Caspase domain
  misc_feature (1)..(393): NCBI GI NO: 29367583 NR Description: latex-abundant protein-like protein
  misc_feature (1)..(393): NCBI GI NO: 34908928 NR Description: putative latex-abundant protein
  misc_feature (1)..(393): NCBI GI NO: 4235430 NR Description: latex-abundant protein [Hevea brasiliensis]
  misc_feature (1)..(393): NCBI GI NO: 23343885 NR Description: metacaspase 1 [Lycopersicon esculentum]
  misc_feature (1)..(393): NCBI GI NO: 40644374 NR Description: metacaspase type II [Picea abies]
  misc_feature (1)..(393): NCBI GI NO: 15219342 NR Description: hypothetical protein common family
  misc_feature (1)..(393): NCBI GI NO: 15219345 NR Description: hypothetical protein common family
  misc_feature (1)..(393): NCBI GI NO: 33304380 NR Description: metacaspase 7 [Arabidopsis thaliana]
  misc_feature (187)..(393): NCBI GI NO: 15219340 NR Description: hypothetical protein common family
  misc_feature (1)..(144): NCBI GI NO: 15219340 NR Description: hypothetical protein common family

SEQ ID NO: 38541 - DNA, 1795 bp, Zea mays subsp. mays
  misc_feature (1)..(1795): Ceres Seq. ID no. 12358446
atctggtcggcgtggatcggatcttcggtggtgtttctcgtcttcacggcgattagtggcggcgagccgaccacgtccccgcagcagcagtcagcggcggcttgacgcggtcggacgggtacctctagttggcatcagcgagtgggcgcggggcgccgcaagtctcaccgtccgctggtgtagaggccccgagtctcggcgctatggagtgtaggccgcgtgtctccgcttagggagggccaggggtcaacaaagggacttgtcaagtgacaacatcgcggccttcgggtgttggagcctgcttggaggtgtccggcctattggtgccgtaccacaggattggttcattatttgtgggagatctatatttgtcttaccattttgttcccgcttctagtccccaaatcttcacgggctttgccagatcgctggccatctccttggcagccgcttccgctgtcgccagccatcaccaacctgcgcctcatagtggagcccaggaaaggcggtgggactgagcgagggaagaggagatgactagcttgtcgatcacggtgatgacgctaacctgcatgaaggcgaacagccgagcgagagccccaacagctgggagaagcgccgggacatctgcgtcagcgtcatcaccagctactctcccaccatcctttgcacccagcaaggcttaagatggcaactggactacctacaacagtgcttgccgggttatgaacagtttggaatctcaagaaaaggctcacaggacaacactgatgaatactgcacaatattctatgaaaaggagaaggtggagcttactgaaggtggcactttttggttgtcggaatcaccatcggttccaggaagcatttcatggggagcaaaggcaccctgcattgcaacatgggcaacgtttcaactcaaaagactagaaccacctggattcagtttccagatcgtaaatacaaatcttgatgaagttagccctcgtgctcgacgaagaagtgctttacttacatggcaacatatagcatcgctgccacccaatttgcctgttatctattgtggaggcttcaatacacagaaggaatctatgactgggcggtttttgcttggcagatccagagaacatggtgttgttggtgatatgagagatgcttggccaaatgctcgagtgcgaaaaaatgtttcactaatacacacatatcatggatttaaaggggagaaacaaggtgccctggaatttcttaaattgatatttagagctctttgcctctgctgggatcgacagacacaggacttgcatatcgactggatcttgtttagaggacgcccattggttcctgcactttgtgaggtcattaatgacaatatagatggtgtttatccgtcgtcgcacttccctatctttgccgagtttttgcttccacgctcagtccgcctagctgagacaccttcatagctattgtgtcaattttttgttctatttttcccaatcttattttgattacggctgattgtttctttcgaccacttcaccatgatcttgcggtaacccccctttacaaccattgttgggtttctttctgttatcccattccgcaaaacaagacaatgcacatgtgcatccttgtatgtttcctgtcactagtccctattatgtgttcgccttagctttgttatcttcttaaagttcactttttccttatgtcattgatttttagactgtcatatataccgtgtatatatatggtatgaatatgttgtcatgtatagtcggccgatccttgtatatgtt

SEQ ID NO: 38542 - protein, 122 aa, Zea mays subsp. mays
  peptide (1)..(122): Ceres Seq. ID no. 12358447
  misc_feature (1)..(59): Pfam Name: Pfam Description:  Endonuclease/Exonuclease/phosphatase family
  misc_feature (1)..(121): NCBI GI NO: 22329036 NR Description: hypothetical protein; protein id: At4g30900
  misc_feature (11)..(121): NCBI GI NO: 25372651 NR Description: hypothetical protein AT4g30900
  misc_feature (1)..(59): NCBI GI NO: 21232876 NR Description: conserved hypothetical protein
  misc_feature (72)..(113): NCBI GI NO: 21232876 NR Description: conserved hypothetical protein
  misc_feature (72)..(113): NCBI GI NO: 21241443 NR Description: conserved hypothetical protein
  misc_feature (1)..(50): NCBI GI NO: 23097914 NR Description: hypothetical protein
  misc_feature (1)..(49): NCBI GI NO: 29348040 NR Description: conserved hypothetical protein withendonuclease/exonuclease/phosphatase family domain
  misc_feature (1)..(42): NCBI GI NO: 29828020 NR Description: hypothetical protein
  misc_feature (1)..(24): NCBI GI NO: 16802368 NR Description: similar to unknown proteins
MTGRFLLGRSREHGVVGDMRDAWPNARVRKNVSLIHTYHGFKGEKQGALEFLKLIFRALCLCWDRQTQDLHIDWILFRGRPLVPALCEVINDNIDGVYPSSHFPIFAEFLLPRSVRLAETPS

SEQ ID NO: 38543 - protein, 104 aa, Zea mays subsp. mays
  peptide (1)..(104): Ceres Seq. ID no. 12358448
  misc_feature (1)..(103): NCBI GI NO: 22329036 NR Description: hypothetical protein; protein id: At4g30900
  misc_feature (1)..(103): NCBI GI NO: 25372651 NR Description: hypothetical protein AT4g30900
  misc_feature (1)..(41): NCBI GI NO: 21232876 NR Description: conserved hypothetical protein
  misc_feature (54)..(95): NCBI GI NO: 21232876 NR Description: conserved hypothetical protein
  misc_feature (54)..(95): NCBI GI NO: 21241443 NR Description: conserved hypothetical protein
  misc_feature (1)..(32): NCBI GI NO: 23097914 NR Description: hypothetical protein
  misc_feature (1)..(31): NCBI GI NO: 29348040 NR Description: conserved hypothetical protein withendonuclease/exonuclease/phosphatase family domain
  misc_feature (1)..(24): NCBI GI NO: 29828020 NR Description: hypothetical protein
MRDAWPNARVRKNVSLIHTYHGFKGEKQGALEFLKLIFRALCLCWDRQTQDLHIDWILFRGRPLVPALCEVINDNIDGVYPSSHFPIFAEFLLPRSVRLAETPS

SEQ ID NO: 38544 - protein, 70 aa, Zea mays subsp. mays
  peptide (1)..(70): Ceres Seq. ID no. 12358449
SGRRGSDLRWCFSSSRRLVAASRPRPRSSSQRRLDAVGRVPLVGISEWARGAASLTVRWCRGPESRRYGV

SEQ ID NO: 38545 - DNA, 1173 bp, Zea mays subsp. mays
  misc_feature (1)..(1173): Ceres Seq. ID no. 12566291
gtgaccacgtcccacgccgagttccgctggccgctgtcgccgaaacacggcagcaggagcagtagcgtccgtcctgtccgcgcgcgttcccctccccgaccggcaggttccccggccattcatccgtttcccactgctcctccgtggctcagctctgctccctgtatcggtctgcccctctgccctcccggtctctcctcttcccgtcccgcccagcgcgtcccccaaggaagccccgacgccgcggcatggggatcgtggaggaggcgcacaacctgcgcgtggtgggcgaggggaagcgcggggtcatcgtgctggcgcacggcttcggcaccgaccagtccgtctggaagcatctggtgccgcacctcgtcgccgactaccgcgtcgtgctcttcgacaccatgggcgccggccccaccaacccggactacttcgacttctcccgctacgccacgctcgagggctacgcgctcgacctcctcgccatcctccaggagctcggcgtccagtcctgcatctacgtcggccactccgtctccgcgatcatcggcgcgctcgcgtccatctccaggcccgacctcttcaccaagctcgtgctcctctccgcgtccccaaggtacctcaacgatgtggactactatggcgggttcgagcaagatgagctggatgagctgtttgaggcgatgcaatcaaactacaaggcctggtgcttaggttttgcacccctgtgtgtcggaggagatatggaatcagtggcagttcaggagtttagcaggacactcttcaatatacgtccggacattgcacttaatgttgcccagacgatcttccagagcgatgtgcgcagcctcctcccgcacgttagtgtcccatgccacattgttcagagcaccaaggatctcgcggtgccagttgtggtgtctgagtacctgcacaggcaccttggtggcgactccatcgtggaggtgatgccctctgaaggccatcttccccagcttagctctccagacattgtaacccctgtcttactccggcacatccagcatgacatcgcaatctaggttggccagtcgttccaacaagacaatgagcactcgaagctgtctactgcctgtttgtatgatatcccgcttaattgttcaacgtaggattgcatctatttgatgctct

SEQ ID NO: 38546 - protein, 271 aa, Zea mays subsp. mays
  peptide (1)..(271): Ceres Seq. ID no. 12566292
  misc_feature (45)..(263): Pfam Name: Pfam Description:  alpha/beta hydrolase fold
  misc_feature (125)..(271): NCBI GI NO: 40736991 NR Description: putative hydrolases
  misc_feature (1)..(126): NCBI GI NO: 40736991 NR Description: putative hydrolases
  misc_feature (1)..(271): NCBI GI NO: 15235567 NR Description: putative protein; protein id: At4g37470
  misc_feature (6)..(263): NCBI GI NO: 18396732 NR Description: expressed protein; protein id: At3g03990
  misc_feature (6)..(263): NCBI GI NO: 21593927 NR Description: unknown [Arabidopsis thaliana]
  misc_feature (8)..(257): NCBI GI NO: 24216360 NR Description: Predicted hydrolases or acyltransferases
  misc_feature (7)..(253): NCBI GI NO: 15230110 NR Description: unknown protein; protein id: At3g24420.1
  misc_feature (4)..(254): NCBI GI NO: 22987307 NR Description: hypothetical protein [Burkholderia fungorum]
  misc_feature (21)..(265): NCBI GI NO: 22298700 NR Description: ORF_ID:tlr1157~hypothetical protein
  misc_feature (9)..(261): NCBI GI NO: 34912326 NR Description: P0451D05.26
MGIVEEAHNLRVVGEGKRGVIVLAHGFGTDQSVWKHLVPHLVADYRVVLFDTMGAGPTNPDYFDFSRYATLEGYALDLLAILQELGVQSCIYVGHSVSAIIGALASISRPDLFTKLVLLSASPRYLNDVDYYGGFEQDELDELFEAMQSNYKAWCLGFAPLCVGGDMESVAVQEFSRTLFNIRPDIALNVAQTIFQSDVRSLLPHVSVPCHIVQSTKDLAVPVVVSEYLHRHLGGDSIVEVMPSEGHLPQLSSPDIVTPVLLRHIQHDIAI

SEQ ID NO: 38547 - protein, 238 aa, Zea mays subsp. mays
  peptide (1)..(238): Ceres Seq. ID no. 12566293
  misc_feature (96)..(219): Pfam Name: Pfam Description:  Equine herpesvirus glycoprotein gp2
  misc_feature (18)..(238): NCBI GI NO: 11359723 NR Description: proteophosphoglycan, membrane-associated
  misc_feature (18)..(238): NCBI GI NO: 5420387 NR Description: proteophosphoglycan [Leishmania major]
  misc_feature (18)..(238): NCBI GI NO: 13592175 NR Description: ppg3 [Leishmania major]
  misc_feature (18)..(238): NCBI GI NO: 13592175 NR Description: ppg3 [Leishmania major]
  misc_feature (11)..(238): NCBI GI NO: 13592175 NR Description: ppg3 [Leishmania major]
  misc_feature (22)..(238): NCBI GI NO: 11359723 NR Description: proteophosphoglycan, membrane-associated
  misc_feature (18)..(215): NCBI GI NO: 11359723 NR Description: proteophosphoglycan, membrane-associated
  misc_feature (12)..(222): NCBI GI NO: 23017082 NR Description: hypothetical protein [Thermobifida fusca]
  misc_feature (15)..(222): NCBI GI NO: 5420387 NR Description: proteophosphoglycan [Leishmania major]
  misc_feature (18)..(222): NCBI GI NO: 13592175 NR Description: ppg3 [Leishmania major]
VTTSHAEFRWPLSPKHGSRSSSVRPVRARSPPRPAGSPAIHPFPTAPPWLSSAPCIGLPLCPPGLSSSRPAQRVPQGSPDAAAWGSWRRRTTCAWWARGSAGSSCWRTASAPTSPSGSIWCRTSSPTTASCSSTPWAPAPPTRTTSTSPATPRSRATRSTSSPSSRSSASSPASTSATPSPRSSARSRPSPGPTSSPSSCSSPRPQGTSTMWTTMAGSSKMSWMSCLRRCNQTTRPGA

SEQ ID NO: 38548 - protein, 219 aa, Zea mays subsp. mays
  peptide (1)..(219): Ceres Seq. ID no. 12566294
  misc_feature (1)..(211): Pfam Name: Pfam Description:  alpha/beta hydrolase fold
  misc_feature (73)..(219): NCBI GI NO: 40736991 NR Description: putative hydrolases
  misc_feature (1)..(74): NCBI GI NO: 40736991 NR Description: putative hydrolases
  misc_feature (1)..(219): NCBI GI NO: 15235567 NR Description: putative protein; protein id: At4g37470
  misc_feature (1)..(211): NCBI GI NO: 18396732 NR Description: expressed protein; protein id: At3g03990
  misc_feature (1)..(211): NCBI GI NO: 21593927 NR Description: unknown [Arabidopsis thaliana]
  misc_feature (1)..(205): NCBI GI NO: 24216360 NR Description: Predicted hydrolases or acyltransferases
  misc_feature (1)..(201): NCBI GI NO: 15230110 NR Description: unknown protein; protein id: At3g24420.1
  misc_feature (1)..(202): NCBI GI NO: 22987307 NR Description: hypothetical protein [Burkholderia fungorum]
  misc_feature (1)..(213): NCBI GI NO: 22298700 NR Description: ORF_ID:tlr1157~hypothetical protein
  misc_feature (1)..(209): NCBI GI NO: 34912326 NR Description: P0451D05.26
MGAGPTNPDYFDFSRYATLEGYALDLLAILQELGVQSCIYVGHSVSAIIGALASISRPDLFTKLVLLSASPRYLNDVDYYGGFEQDELDELFEAMQSNYKAWCLGFAPLCVGGDMESVAVQEFSRTLFNIRPDIALNVAQTIFQSDVRSLLPHVSVPCHIVQSTKDLAVPVVVSEYLHRHLGGDSIVEVMPSEGHLPQLSSPDIVTPVLLRHIQHDIAI

SEQ ID NO: 38549 - DNA, 1470 bp, Zea mays subsp. mays
  misc_feature (1)..(1470): Ceres Seq. ID no. 12354613
agaaaatgttcctcgcaaagtttggctgacggcacccaccgcccacagaagcgcacctctgttctttggtgtgtggccgtgtggattcaaaaccgctgaccggccgcttatttaagcccttgccccgccggttttctcttctcccgtcggcgctggtccacgcggctccaacacctgcctgcctgcctgattcttacaccaaccaaccacgcgcgccaagccgaattcgtcttccaccgatccgccccgcccgtttcccattgcttagcttgctatggcgcagcagcagccggtgcggcggattctgaaggtggcaccgccggggaagggggacggggaatccttccccacggtgcaggcggcggtcgacgcggtgccgctgggcaaccgggcgcgcgtcgtcatccgcctcgcgccgggggtctacagggagcctgtctacgtcgccaagaccaagaacttcatcaccgtcgcgggggcctcgcccgaggccaccgtcgtgtcatgggacaacaccgccacgcgcatcaggcactcgcagtcatccagggttataggaactggaacattcggctgtggtacgttcatcattgagggggaagatttcattgcagagaatatcacgtttgagaactcagctccccagggctctgggcaggccgttgcagtccgggtaaccgcagataggtgtgctttctacaactgccggttcctcggttggcaagacacattatacttacactacgggaaacagtacttaagagactgttatattgaaggccattgtgacttcatctttggtaactctgtcgcccttatggagcattgccatatccattgcaaagcagcgggatacatcactgctcatagccggaagtccacatcagaatctactggctatgtgttcttgaggtgtactattactggacatggagaagctggatacatgttcctaggtcggccatgggggccctttggaagggttgtctttgcgtacactttcatggatcgatgcatcaagccttctgggtggcacaactgggacaaatccgagaacgagcgaactgcttgcttttatgagtacaggtgctcagggccaggcgccctcccatcgaaccgggtcacatggtgtagacagttgctggatgttgaagcagagcagttccttgcgcacacttttatcgacccagacgtcgataggccatggctcctccagatgatggcgataagaataccagcctcagcatagtttgatcccggcagccgcaggtcctgcatggttcatgcctcctttctagcctatttaaataaactaagttggaggatgcattatatttgcataagtttgtaacgtttggtgaattagtatccactttcatctcactgtgggcggtggggatagggaatgagagagcttctcttgtaacgaaccccagcactaggctgaaatatatgcagattttattttgc

SEQ ID NO: 38550 - protein, 324 aa, Zea mays subsp. mays
  peptide (1)..(324): Ceres Seq. ID no. 12354614
  misc_feature (24)..(306): Pfam Name: Pfam Description:  Pectinesterase
  misc_feature (1)..(324): NCBI GI NO: 37534214 NR Description: putative pectin methylesterase
  misc_feature (9)..(324): NCBI GI NO: 18406048 NR Description: pectinesterase family; protein id: At3g29090
  misc_feature (1)..(304): NCBI GI NO: 34909402 NR Description: putative pectin methylesterase
  misc_feature (18)..(304): NCBI GI NO: 15241163 NR Description: pectinesterase family; protein id: At5g19730
  misc_feature (10)..(312): NCBI GI NO: 34913006 NR Description: pectin methylesterase-like protein
  misc_feature (1)..(312): NCBI GI NO: 15240544 NR Description: pectinesterase family; protein id: At5g55590.1
  misc_feature (24)..(312): NCBI GI NO: 15238111 NR Description: pectinesterase family; protein id: At5g47500
  misc_feature (13)..(299): NCBI GI NO: 29349518 NR Description: putative pectinesterase precursor
  misc_feature (152)..(271): NCBI GI NO: 10047449 NR Description: pectin methylesterase [Prunus armeniaca]
  misc_feature (18)..(294): NCBI GI NO: 21229599 NR Description: pectin methylesterase-like protein
MAQQQPVRRILKVAPPGKGDGESFPTVQAAVDAVPLGNRARVVIRLAPGVYREPVYVAKTKNFITVAGASPEATVVSWDNTATRIRHSQSSRVIGTGTFGCGTFIIEGEDFIAENITFENSAPQGSGQAVAVRVTADRCAFYNCRFLGWQDTLYLHYGKQYLRDCYIEGHCDFIFGNSVALMEHCHIHCKAAGYITAHSRKSTSESTGYVFLRCTITGHGEAGYMFLGRPWGPFGRVVFAYTFMDRCIKPSGWHNWDKSENERTACFYEYRCSGPGALPSNRVTWCRQLLDVEAEQFLAHTFIDPDVDRPWLLQMMAIRIPASA

SEQ ID NO: 38551 - DNA, 1673 bp, Zea mays subsp. mays
  misc_feature (1)..(1673): Ceres Seq. ID no. 12349655
atatatgcacatacatgcatggttaattaagttgcaacgacgacgacgaccatggagactgtgttcaagtggagagcaagaacaggaggcggagtctcgctgatccatctccttgtccggtgttttgcagtggcagctgccatcttgctgctggcagatgggaggcatgctcatgcagtagatcatcccgcacccgtggaggtacagacaggcagctgcagcgaggtggccgacgagcagcagtggcggatggtgaagaccaggggaaaccagttcgtcgtcggcgacgaccacgacgacaggccgttctacgtgaacggcttcaacacgtactggctgatgatcctcgccgtcgacccgtccaccaggggcaaggtcacggaggtgttccagcaggcggtggcggccggcctcacggtgtgccgcacctgggccttcaacgacggcggctggagggcgcttcagaagtcgccgtctgtctacgacgaggatgtcttcaaggcgctggatttcgtggtgagcgaggcgaggaagtacaggatcaggcttatactgtcactgatcaacaactgggacagctacggcggcaaggcgcagtacgtcaaatgggccggggacgacgccgccgccgacggcggccgcctcaacatcaccgcctccgttgacgatgacttcttttccgaccaaaccgtgaaggtctacttcaagaaccacgtcaagaacatgctgacgagggtgaacacgtacaccagtgtgatgtacaaggacgacccgaccatcttcgcgtgggagctcatgaatgagccgcgctgcacgtcggatccagccgggaacaagctgcaggagtggatccaagagatggcgttccatgtgaagtccatcgacccggaccacctgctggaagttggcggcttggcgcagagggcttctacgggccctcgtcgccgtcacggcttccggccaacccgaacgcctatgctggccaggtcggcaccgacttcatccgcaaccaccgcgtcctgggcgtcgacttcgcctccgtccacatctacccagacacctggatgccgggcgcgactctggaggcacggctctggttcgtggactcgtggatggaggcgcacatcgccgacgccgacggcacgctgggcatgccggtggtgttcacggagttcggggcgtccaccaccaaggcccggagcggctgcttcaacgcgaccacgagagaccagttcatccaggcggtgtacgcgcggctcctcaactccacgcggcgtggcggcgccggagcgggggctttgctctggcagatgctcccgctggggaccgactacatggacgatggctacggcgtcgtgcttcccagggcggcggccactgcccggatcatctcggcgcactccagggacctggccattttcaactcgaggtgcgcctggagctgccgctgggggtgcaggaggcgggggcacaagtcggaggatcctgatgttgatgatgacctgccgctcgtcgaggataaacaacgagaagcatagaattaatactactaatgagagataaatggccgtgcattgctacggagcaaaaatatttaaaaatgttgatagaaaaggcatatagataactctatttcatcatacaattgatacaaaagtagcagttaaattgcc

SEQ ID NO: 38552 - protein, 503 aa, Zea mays subsp. mays
  peptide (1)..(503): Ceres Seq. ID no. 12349656
  misc_feature (72)..(304): Pfam Name: glycosyl hydrolase family 5 Pfam Description: Cellulase
  misc_feature (23)..(304): NCBI GI NO: 15241093 NR Description: glycosyl hydrolase family 5/cellulase
  misc_feature (20)..(286): NCBI GI NO: 10178872 NR Description: (1-4)-beta-mannan endohydrolase [Coffea arabica]
  misc_feature (55)..(286): NCBI GI NO: 15239973 NR Description: glycosyl hydrolase family 5/cellulase
  misc_feature (68)..(305): NCBI GI NO: 34912090 NR Description: putative mannan endo-1,4-beta-mannosidase
  misc_feature (68)..(286): NCBI GI NO: 29786430 NR Description: endo-beta-1,4-mannanase [Lactuca sativa]
  misc_feature (66)..(286): NCBI GI NO: 10129675 NR Description: (1-4)-beta-mannan endohydrolase [Coffea arabica]
  misc_feature (12)..(286): NCBI GI NO: 34909462 NR Description: putative (1-4)-beta-mannan endohydrolase
  misc_feature (68)..(286): NCBI GI NO: 15235255 NR Description: glycosyl hydrolase family 5/cellulase
  misc_feature (85)..(299): NCBI GI NO: 37544517 NR Description: mannan endo-1,4-beta-mannosidase precursor
  misc_feature (68)..(304): NCBI GI NO: 23477717 NR Description: endo-beta-mannanase [Daucus carota]
METVFKWRARTGGGVSLIHLLVRCFAVAAAILLLADGRHAHAVDHPAPVEVQTGSCSEVADEQQWRMVKTRGNQFVVGDDHDDRPFYVNGFNTYWLMILAVDPSTRGKVTEVFQQAVAAGLTVCRTWAFNDGGWRALQKSPSVYDEDVFKALDFVVSEARKYRIRLILSLINNWDSYGGKAQYVKWAGDDAAADGGRLNITASVDDDFFSDQTVKVYFKNHVKNMLTRVNTYTSVMYKDDPTIFAWELMNEPRCTSDPAGNKLQEWIQEMAFHVKSIDPDHLLEVGGLAQRASTGPRRRHGFRPTRTPMLARSAPTSSATTASWASTSPPSTSTQTPGCRARLWRHGSGSWTRGWRRTSPTPTARWACRWCSRSSGRPPPRPGAAASTRPRETSSSRRCTRGSSTPRGVAAPERGLCSGRCSRWGPTTWTMATASCFPGRRPLPGSSRRTPGTWPFSTRGAPGAAAGGAGGGGTSRRILMLMMTCRSSRINNEKHRINTTNER

SEQ ID NO: 38553 - protein, 437 aa, Zea mays subsp. mays
  peptide (1)..(437): Ceres Seq. ID no. 12349657
  misc_feature (6)..(238): Pfam Name: glycosyl hydrolase family 5 Pfam Description: Cellulase
  misc_feature (1)..(238): NCBI GI NO: 15241093 NR Description: glycosyl hydrolase family 5/cellulase
  misc_feature (1)..(220): NCBI GI NO: 10178872 NR Description: (1-4)-beta-mannan endohydrolase [Coffea arabica]
  misc_feature (1)..(220): NCBI GI NO: 15239973 NR Description: glycosyl hydrolase family 5/cellulase
  misc_feature (2)..(239): NCBI GI NO: 34912090 NR Description: putative mannan endo-1,4-beta-mannosidase
  misc_feature (2)..(220): NCBI GI NO: 29786430 NR Description: endo-beta-1,4-mannanase [Lactuca sativa]
  misc_feature (1)..(220): NCBI GI NO: 10129675 NR Description: (1-4)-beta-mannan endohydrolase [Coffea arabica]
  misc_feature (1)..(220): NCBI GI NO: 34909462 NR Description: putative (1-4)-beta-mannan endohydrolase
  misc_feature (2)..(220): NCBI GI NO: 15235255 NR Description: glycosyl hydrolase family 5/cellulase
  misc_feature (19)..(233): NCBI GI NO: 37544517 NR Description: mannan endo-1,4-beta-mannosidase precursor
  misc_feature (2)..(238): NCBI GI NO: 23477717 NR Description: endo-beta-mannanase [Daucus carota]
MVKTRGNQFVVGDDHDDRPFYVNGFNTYWLMILAVDPSTRGKVTEVFQQAVAAGLTVCRTWAFNDGGWRALQKSPSVYDEDVFKALDFVVSEARKYRIRLILSLINNWDSYGGKAQYVKWAGDDAAADGGRLNITASVDDDFFSDQTVKVYFKNHVKNMLTRVNTYTSVMYKDDPTIFAWELMNEPRCTSDPAGNKLQEWIQEMAFHVKSIDPDHLLEVGGLAQRASTGPRRRHGFRPTRTPMLARSAPTSSATTASWASTSPPSTSTQTPGCRARLWRHGSGSWTRGWRRTSPTPTARWACRWCSRSSGRPPPRPGAAASTRPRETSSSRRCTRGSSTPRGVAAPERGLCSGRCSRWGPTTWTMATASCFPGRRPLPGSSRRTPGTWPFSTRGAPGAAAGGAGGGGTSRRILMLMMTCRSSRINNEKHRINTTNER

SEQ ID NO: 38554 - protein, 407 aa, Zea mays subsp. mays
  peptide (1)..(407): Ceres Seq. ID no. 12349658
  misc_feature (1)..(208): Pfam Name: glycosyl hydrolase family 5 Pfam Description: Cellulase
  misc_feature (1)..(208): NCBI GI NO: 15241093 NR Description: glycosyl hydrolase family 5/cellulase
  misc_feature (1)..(190): NCBI GI NO: 10178872 NR Description: (1-4)-beta-mannan endohydrolase [Coffea arabica]
  misc_feature (1)..(190): NCBI GI NO: 15239973 NR Description: glycosyl hydrolase family 5/cellulase
  misc_feature (1)..(209): NCBI GI NO: 34912090 NR Description: putative mannan endo-1,4-beta-mannosidase
  misc_feature (1)..(190): NCBI GI NO: 29786430 NR Description: endo-beta-1,4-mannanase [Lactuca sativa]
  misc_feature (1)..(190): NCBI GI NO: 10129675 NR Description: (1-4)-beta-mannan endohydrolase [Coffea arabica]
  misc_feature (1)..(190): NCBI GI NO: 34909462 NR Description: putative (1-4)-beta-mannan endohydrolase
  misc_feature (1)..(190): NCBI GI NO: 15235255 NR Description: glycosyl hydrolase family 5/cellulase
  misc_feature (1)..(203): NCBI GI NO: 37544517 NR Description: mannan endo-1,4-beta-mannosidase precursor
  misc_feature (1)..(208): NCBI GI NO: 23477717 NR Description: endo-beta-mannanase [Daucus carota]
MILAVDPSTRGKVTEVFQQAVAAGLTVCRTWAFNDGGWRALQKSPSVYDEDVFKALDFVVSEARKYRIRLILSLINNWDSYGGKAQYVKWAGDDAAADGGRLNITASVDDDFFSDQTVKVYFKNHVKNMLTRVNTYTSVMYKDDPTIFAWELMNEPRCTSDPAGNKLQEWIQEMAFHVKSIDPDHLLEVGGLAQRASTGPRRRHGFRPTRTPMLARSAPTSSATTASWASTSPPSTSTQTPGCRARLWRHGSGSWTRGWRRTSPTPTARWACRWCSRSSGRPPPRPGAAASTRPRETSSSRRCTRGSSTPRGVAAPERGLCSGRCSRWGPTTWTMATASCFPGRRPLPGSSRRTPGTWPFSTRGAPGAAAGGAGGGGTSRRILMLMMTCRSSRINNEKHRINTTNER

SEQ ID NO: 38555 - DNA, 1026 bp, Zea mays subsp. mays
  misc_feature (1)..(1026): Ceres Seq. ID no. 12367960
ttatcttcctcacggcgcttgagacaaccaaagcagcctctctcaagcttgttgagcccttcaagctgtcagagccggtgcaggccgcctttgccaatggccttgccggtctgtcggcatccacatgttcgcaggctatttttgtcccaattgatgtgatcagccagaaattgatggttcaagggtattctggtaatgtcagatacaaaggtggagtagatgttgctcgcaaggtcataaaggctgatggcattaaggggctctacagaggatttggactgtctgttatgacctatgcaccatcgagtgctgtgtggtgggcgagttatggttctagccagcgcataatttggagtgcccttggccatttgcataacaaagaagaggctcctagccaattgaaaatagttggtgttcaagcatcaggggggatttttgctggtgctgtgacctcttttgttacgactcccatagatacaatcaagaccaggctgcaggttatggataatgaaaataagccaaaagctggggaagttgttaaaagattgatcgctgaagatggatggaaaggtttgtacagagggttgggtccaagatttttcagctcatcagcttggggtacctcaatgatagtatgctacgagtacctgaagcgcttgtgtgctaaagttgaagaggtctgacttctgttcttactattctggaagttttgtattagaagaagtgaaataatgctgtatgtctacaacattgacaccaccggaagcttcagttcttgctgacgtaggtgaaagcattcaacatggatgtttgatggtgtacttcatttggtgctagacaatagtctttacaaactttgcttctctgggctatatctcaaaaaatgtaggggcctatatttttttgctcatatgatgaatatgggtttggcggattattttaggtgagtataaacgatatcagatgtacacacttctcattcttttatacatgaaggctattttagcgaggctgtatgactgaagg

SEQ ID NO: 38556 - protein, 226 aa, Zea mays subsp. mays
  peptide (1)..(226): Ceres Seq. ID no. 12367961
  misc_feature (1)..(226): NCBI GI NO: 21326111 NR Description: putative mitochondrial carrier protein
  misc_feature (1)..(226): NCBI GI NO: 12061241 NR Description: 36I5.1 [Oryza sativa (japonica cultivar-group)]
  misc_feature (1)..(225): NCBI GI NO: 18496651 NR Description: putative mitochondrial carrier protein
  misc_feature (1)..(225): NCBI GI NO: 12278522 NR Description: putative mitochondrial carrier protein
  misc_feature (1)..(225): NCBI GI NO: 18417739 NR Description: mitochondrial carrier protein family
  misc_feature (1)..(225): NCBI GI NO: 21553961 NR Description: putative mitochondrial carrier protein
  misc_feature (1)..(117): NCBI GI NO: 11358653 NR Description: probable mitochondrial carrier protein -Arabidopsis thaliana
  misc_feature (129)..(225): NCBI GI NO: 11358653 NR Description: probable mitochondrial carrier protein -Arabidopsis thaliana
  misc_feature (3)..(224): NCBI GI NO: 34894824 NR Description: P0554D10.15
  misc_feature (1)..(222): NCBI GI NO: 37534064 NR Description: putative Tricarboxylate transport protein
IFLTALETTKAASLKLVEPFKLSEPVQAAFANGLAGLSASTCSQAIFVPIDVISQKLMVQGYSGNVRYKGGVDVARKVIKADGIKGLYRGFGLSVMTYAPSSAVWWASYGSSQRIIWSALGHLHNKEEAPSQLKIVGVQASGGIFAGAVTSFVTTPIDTIKTRLQVMDNENKPKAGEVVKRLIAEDGWKGLYRGLGPRFFSSSAWGTSMIVCYEYLKRLCAKVEEV

SEQ ID NO: 38557 - protein, 169 aa, Zea mays subsp. mays
  peptide (1)..(169): Ceres Seq. ID no. 12367962
  misc_feature (1)..(169): NCBI GI NO: 21326111 NR Description: putative mitochondrial carrier protein
  misc_feature (1)..(169): NCBI GI NO: 12061241 NR Description: 36I5.1 [Oryza sativa (japonica cultivar-group)]
  misc_feature (1)..(168): NCBI GI NO: 18496651 NR Description: putative mitochondrial carrier protein
  misc_feature (1)..(168): NCBI GI NO: 12278522 NR Description: putative mitochondrial carrier protein
  misc_feature (1)..(168): NCBI GI NO: 18417739 NR Description: mitochondrial carrier protein family
  misc_feature (1)..(168): NCBI GI NO: 21553961 NR Description: putative mitochondrial carrier protein
  misc_feature (1)..(60): NCBI GI NO: 11358653 NR Description: probable mitochondrial carrier protein -Arabidopsis thaliana
  misc_feature (72)..(168): NCBI GI NO: 11358653 NR Description: probable mitochondrial carrier protein -Arabidopsis thaliana
  misc_feature (1)..(167): NCBI GI NO: 34894824 NR Description: P0554D10.15
  misc_feature (1)..(165): NCBI GI NO: 37534064 NR Description: putative Tricarboxylate transport protein
MVQGYSGNVRYKGGVDVARKVIKADGIKGLYRGFGLSVMTYAPSSAVWWASYGSSQRIIWSALGHLHNKEEAPSQLKIVGVQASGGIFAGAVTSFVTTPIDTIKTRLQVMDNENKPKAGEVVKRLIAEDGWKGLYRGLGPRFFSSSAWGTSMIVCYEYLKRLCAKVEEV

SEQ ID NO: 38558 - protein, 131 aa, Zea mays subsp. mays
  peptide (1)..(131): Ceres Seq. ID no. 12367963
  misc_feature (1)..(131): NCBI GI NO: 21326111 NR Description: putative mitochondrial carrier protein
  misc_feature (1)..(131): NCBI GI NO: 12061241 NR Description: 36I5.1 [Oryza sativa (japonica cultivar-group)]
  misc_feature (1)..(130): NCBI GI NO: 18496651 NR Description: putative mitochondrial carrier protein
  misc_feature (1)..(130): NCBI GI NO: 12278522 NR Description: putative mitochondrial carrier protein
  misc_feature (1)..(130): NCBI GI NO: 18417739 NR Description: mitochondrial carrier protein family
  misc_feature (1)..(130): NCBI GI NO: 21553961 NR Description: putative mitochondrial carrier protein
  misc_feature (1)..(22): NCBI GI NO: 11358653 NR Description: probable mitochondrial carrier protein -Arabidopsis thaliana
  misc_feature (34)..(130): NCBI GI NO: 11358653 NR Description: probable mitochondrial carrier protein -Arabidopsis thaliana
  misc_feature (1)..(129): NCBI GI NO: 34894824 NR Description: P0554D10.15
  misc_feature (1)..(127): NCBI GI NO: 37534064 NR Description: putative Tricarboxylate transport protein
MTYAPSSAVWWASYGSSQRIIWSALGHLHNKEEAPSQLKIVGVQASGGIFAGAVTSFVTTPIDTIKTRLQVMDNENKPKAGEVVKRLIAEDGWKGLYRGLGPRFFSSSAWGTSMIVCYEYLKRLCAKVEEV

SEQ ID NO: 38559 - DNA, 1046 bp, Zea mays subsp. mays
  misc_feature (1)..(1046): Ceres Seq. ID no. 12349639
cattcaccgcaacaacacacaacggcagagaccaagaagccgtgaccgtgggagagctccgagcgccagccgcgtgcggcgtgtccatactccatacacggaggaagaggaacagaggaagagcaggaggagatgtacttccgtccgccgcccaagggcccggagtggtacgccagcgatgcggagacggggcaggcggcgcggccgctgtacccaatgatgctggaggacccgcgtctgcggtgggcctttatccggaaggtctacagcatcctctccatccagatgctgctcaccgtcgccgtagctgccgtcgtcgtgttcgttcgccccgtcgctctcttcttcgtctccacgcccggcggcttcgggctctacatcttcctcctcatcctcccgttcatagtgctttgccctctgtactactactaccagcaccacccggtgaacctgctgctgctcggcctcttcaccgtggccatcagcttcgccgtcggcctcacctgcgccttcaccaaaggggaggtgatcctcgagtcggcggtcctcacggcggcggtggtgctgagcctcacggcgtacacgttctgggcggcgaagcgcggccacgacttcagcttcctgggcccgttcctgttcgccgccgtcatgatcctcatgctgttcgcgctcatccagctcttcttcccgctcggccgcatctcgctcatgatatacgggggactggcggcgctcgtcttctgcggctacatcatctacgacaccgacaacctcatcaagcgctactcctacgacgagtacgtctgggccgccgtcgcgctctacctcgacgtcatcaacctcttcctctccctcctcacgctcttccgggcggcggattcgtgagcacggctacctgccagctcgcgtaggcgcggcgacaggatcttggaatgtgccttgccttgccccgcctccggtgctgtctgccgaaattcctctgtaaaaagactaaagagaaataattgttttggttttgtgctttgcttcgcttgcgaagattgttc

SEQ ID NO: 38560 - protein, 302 aa, Zea mays subsp. mays
  peptide (1)..(302): Ceres Seq. ID no. 12349640
FTATTHNGRDQEAVTVGELRAPAACGVSILHTRRKRNRGRAGGDVLPSAAQGPGVVRQRCGDGAGGAAAVPNDAGGPASAVGLYPEGLQHPLHPDAAHRRRSCRRRVRSPRRSLLRLHARRLRALHLPPHPPVHSALPSVLLLPAPPGEPAAARPLHRGHQLRRRPHLRLHQRGGDPRVGGPHGGGGAEPHGVHVLGGEARPRLQLPGPVPVRRRHDPHAVRAHPALLPARPHLAHDIRGTGGARLLRLHHLRHRQPHQALLLRRVRLGRRRALPRRHQPLPLPPHALPGGGFVSTATCQLA

SEQ ID NO: 38561 - protein, 250 aa, Zea mays subsp. mays
  peptide (1)..(250): Ceres Seq. ID no. 12349641
  misc_feature (34)..(249): Pfam Name: Pfam Description:  Uncharacterised protein family UPF0005
  misc_feature (23)..(250): NCBI GI NO: 14626300 NR Description: putative receptor-associated protein
  misc_feature (16)..(249): NCBI GI NO: 34393841 NR Description: putative z-protein
  misc_feature (16)..(249): NCBI GI NO: 15218701 NR Description: putative glutamate/aspartate-binding peptide
  misc_feature (16)..(250): NCBI GI NO: 15229411 NR Description: putative protein; protein id: At3g63310.1
  misc_feature (16)..(247): NCBI GI NO: 15235466 NR Description: putative glutamate-/aspartate-binding peptide
  misc_feature (16)..(250): NCBI GI NO: 18414455 NR Description: Expressed protein; protein id: At4g15470
  misc_feature (30)..(250): NCBI GI NO: 34393840 NR Description: putative z-protein
  misc_feature (16)..(210): NCBI GI NO: 15810201 NR Description: AT4g15470/dl3775w [Arabidopsis thaliana]
  misc_feature (36)..(249): NCBI GI NO: 40018604 NR Description: Unknown (protein for MGC:73002)
  misc_feature (36)..(249): NCBI GI NO: 21311865 NR Description: RIKEN cDNA 0610007H07 [Mus musculus]
MYFRPPPKGPEWYASDAETGQAARPLYPMMLEDPRLRWAFIRKVYSILSIQMLLTVAVAAVVVFVRPVALFFVSTPGGFGLYIFLLILPFIVLCPLYYYYQHHPVNLLLLGLFTVAISFAVGLTCAFTKGEVILESAVLTAAVVLSLTAYTFWAAKRGHDFSFLGPFLFAAVMILMLFALIQLFFPLGRISLMIYGGLAALVFCGYIIYDTDNLIKRYSYDEYVWAAVALYLDVINLFLSLLTLFRAADS

SEQ ID NO: 38562 - protein, 222 aa, Zea mays subsp. mays
  peptide (1)..(222): Ceres Seq. ID no. 12349642
  misc_feature (6)..(221): Pfam Name: Pfam Description:  Uncharacterised protein family UPF0005
  misc_feature (1)..(222): NCBI GI NO: 14626300 NR Description: putative receptor-associated protein
  misc_feature (1)..(221): NCBI GI NO: 34393841 NR Description: putative z-protein
  misc_feature (1)..(221): NCBI GI NO: 15218701 NR Description: putative glutamate/aspartate-binding peptide
  misc_feature (1)..(222): NCBI GI NO: 15229411 NR Description: putative protein; protein id: At3g63310.1
  misc_feature (1)..(219): NCBI GI NO: 15235466 NR Description: putative glutamate-/aspartate-binding peptide
  misc_feature (1)..(222): NCBI GI NO: 18414455 NR Description: Expressed protein; protein id: At4g15470
  misc_feature (2)..(222): NCBI GI NO: 34393840 NR Description: putative z-protein
  misc_feature (1)..(182): NCBI GI NO: 15810201 NR Description: AT4g15470/dl3775w [Arabidopsis thaliana]
  misc_feature (8)..(221): NCBI GI NO: 40018604 NR Description: Unknown (protein for MGC:73002)
  misc_feature (8)..(221): NCBI GI NO: 21311865 NR Description: RIKEN cDNA 0610007H07 [Mus musculus]
MMLEDPRLRWAFIRKVYSILSIQMLLTVAVAAVVVFVRPVALFFVSTPGGFGLYIFLLILPFIVLCPLYYYYQHHPVNLLLLGLFTVAISFAVGLTCAFTKGEVILESAVLTAAVVLSLTAYTFWAAKRGHDFSFLGPFLFAAVMILMLFALIQLFFPLGRISLMIYGGLAALVFCGYIIYDTDNLIKRYSYDEYVWAAVALYLDVINLFLSLLTLFRAADS

SEQ ID NO: 38563 - DNA, 2058 bp, Zea mays subsp. mays
  misc_feature (1)..(2058): Ceres Seq. ID no. 12359829
ttcctcctttcctactcccacactcccccaccctccactagtactagtactagtaccacaaccaccccaccgggaaaaaacccaacaaggggtagggccgccgccgccgccagcgccgccgtgcagatcgcggccggatctacggcgctggggcacgggggtccccggatcgacgacgcctcccccgcgggttcggatggctatgcgaaaagaaaaccctgtgcttaatgcttgtcaagcatccaatggccggatcacgcgagctcaagctgctgcaaatcgccgaagctttggagctttcccttctgttccattgcctgcaaaaaccgaacgaaaacagactgcacaagggaaggcaaaacgaggttcttcatatgacaacaccagtgcaagtgttgcactttcaggcccccagcctaaaaggcgcacagtactcagggatgtgaccaatttgagcaatgctaactctaacaaaagttttgctgctgcaccgaagcttcagacaaagccctctctaaggactggaagaaccgtgagcaaaagcaagccgtgcgcaaaaaagattcctaaaaaaccaccaccagctggtaatggaagtgcattgactaatgttttgaacattgctgaagaaacacaagcggagaagattttggcagagagagtggaacccgttctgttgcttgagaacagggggccactgtcattgcagaatgttgaaaggaacagggacagtgcttgtcatgaggtattctttgaggaaagaaacctcagggataaatgtgaaccttctgtgtcaaagaatggggactcttatgtgttagacattgtagatatcgacaaagataatggcaatcctcaaatgtgtgcttcctacgttgtggagatatactcaaacctaatggcttcagagcttatgagaagaccaagtccaaattacatggagggtttgcaacgggacatcacaaagggcatgagagaaatactcattgattggcttgtggaggtttctgaagaatacaagcttgttccagacacgctgtacctaactgtataccttattgaccggtttctttctcggaactacattgaaagacagagactacaacttgtgggaataacaagcatgcttgttgcctcgaaatatgaagagatatgtgctcctcgagtagaagagttctgtttcataaccgacaatacatacacaaaagcagaggtgctgaaaatggagagccagctgcttaatgacctgggatttaacctttctgttccaacaacaaaaacatttctcaggagattccttagagcggcacaagcatctcgtaaaactccttctatgactttaggatttctggccaattatctcgcggagttgactttgaccgaatatgagttcttgaaatttcttccgtcgttggtggcagcatcggccgtgtttcttgctagatggacgcttgaccaatccgatctcccatggaaccagactctagagcactacacgtcttacaaatgctctgacattcaattgtgtgtctgtgctctacgggaactccagcataacaccagtaactgccctcttaacgccatccgcgagaagtacaggcatcaaaagtttgaatgcgtagcgaacctaacttcaccggagttccctcggtcgttcttcagctgacacgccaatggcaccgattgatgagcaacgttagcagcagccgtagcgcaggttgcgttaacattattgtagcatccccttttaccccccaatgtctgatttggatgtgtttgttatcgagctgctgtgtcccggcctggcctttttcgagtcgcaagtgagatgaagaaggacagagagatggctccttggcttttcttttgtttgtttgacgtaaaaggttcacccggttgtaaacaacactgtgtgtagggctctttgcttgggctgttgttaattaactgtaaggggagatggtccggctggcttgtatgacgacaaacgacgggatgatgtttttgttgacacaattcgttcattggtagcttcggaatggaaattagtttattgcc

SEQ ID NO: 38564 - protein, 554 aa, Zea mays subsp. mays
  peptide (1)..(554): Ceres Seq. ID no. 12359830
  misc_feature (294)..(421): Pfam Name: Pfam Description:  Cyclin, N-terminal domain
  misc_feature (84)..(553): NCBI GI NO: 5420276 NR Description: cyclin A2 [Lycopersicon esculentum]
  misc_feature (82)..(553): NCBI GI NO: 7438492 NR Description: cyclin, A-type - common tobacco
  misc_feature (140)..(553): NCBI GI NO: 7438491 NR Description: cyclin a2-type, mitosis-specific - soybean
  misc_feature (68)..(553): NCBI GI NO: 5305100 NR Description: cyclin A2 [Medicago sativa]
  misc_feature (141)..(553): NCBI GI NO: 15218225 NR Description: Cyclin A2;3; protein id: At1g15570
  misc_feature (150)..(554): NCBI GI NO: 22326727 NR Description: Cyclin A2;2; protein id: At5g11300.1
  misc_feature (106)..(553): NCBI GI NO: 1245816 NR Description: cyclin A homolog
  misc_feature (150)..(554): NCBI GI NO: 784946 NR Description: cyclin 3b [Arabidopsis thaliana]
  misc_feature (68)..(553): NCBI GI NO: 15419009 NR Description: cyclin A2 [Medicago sativa]
  misc_feature (102)..(553): NCBI GI NO: 15220120 NR Description: Cyclin A2;4; protein id: At1g80370.1
SSFPTPTLPHPPLVLVLVPQPPHREKTQQGVGPPPPPAPPCRSRPDLRRWGTGVPGSTTPPPRVRMAMRKENPVLNACQASNGRITRAQAAANRRSFGAFPSVPLPAKTERKQTAQGKAKRGSSYDNTSASVALSGPQPKRRTVLRDVTNLSNANSNKSFAAAPKLQTKPSLRTGRTVSKSKPCAKKIPKKPPPAGNGSALTNVLNIAEETQAEKILAERVEPVLLLENRGPLSLQNVERNRDSACHEVFFEERNLRDKCEPSVSKNGDSYVLDIVDIDKDNGNPQMCASYVVEIYSNLMASELMRRPSPNYMEGLQRDITKGMREILIDWLVEVSEEYKLVPDTLYLTVYLIDRFLSRNYIERQRLQLVGITSMLVASKYEEICAPRVEEFCFITDNTYTKAEVLKMESQLLNDLGFNLSVPTTKTFLRRFLRAAQASRKTPSMTLGFLANYLAELTLTEYEFLKFLPSLVAASAVFLARWTLDQSDLPWNQTLEHYTSYKCSDIQLCVCALRELQHNTSNCPLNAIREKYRHQKFECVANLTSPEFPRSFFS

SEQ ID NO: 38565 - protein, 489 aa, Zea mays subsp. mays
  peptide (1)..(489): Ceres Seq. ID no. 12359831
  misc_feature (229)..(356): Pfam Name: Pfam Description:  Cyclin, N-terminal domain
  misc_feature (19)..(488): NCBI GI NO: 5420276 NR Description: cyclin A2 [Lycopersicon esculentum]
  misc_feature (17)..(488): NCBI GI NO: 7438492 NR Description: cyclin, A-type - common tobacco
  misc_feature (75)..(488): NCBI GI NO: 7438491 NR Description: cyclin a2-type, mitosis-specific - soybean
  misc_feature (3)..(488): NCBI GI NO: 5305100 NR Description: cyclin A2 [Medicago sativa]
  misc_feature (76)..(488): NCBI GI NO: 15218225 NR Description: Cyclin A2;3; protein id: At1g15570
  misc_feature (85)..(489): NCBI GI NO: 22326727 NR Description: Cyclin A2;2; protein id: At5g11300.1
  misc_feature (41)..(488): NCBI GI NO: 1245816 NR Description: cyclin A homolog
  misc_feature (85)..(489): NCBI GI NO: 784946 NR Description: cyclin 3b [Arabidopsis thaliana]
  misc_feature (3)..(488): NCBI GI NO: 15419009 NR Description: cyclin A2 [Medicago sativa]
  misc_feature (37)..(488): NCBI GI NO: 15220120 NR Description: Cyclin A2;4; protein id: At1g80370.1
MAMRKENPVLNACQASNGRITRAQAAANRRSFGAFPSVPLPAKTERKQTAQGKAKRGSSYDNTSASVALSGPQPKRRTVLRDVTNLSNANSNKSFAAAPKLQTKPSLRTGRTVSKSKPCAKKIPKKPPPAGNGSALTNVLNIAEETQAEKILAERVEPVLLLENRGPLSLQNVERNRDSACHEVFFEERNLRDKCEPSVSKNGDSYVLDIVDIDKDNGNPQMCASYVVEIYSNLMASELMRRPSPNYMEGLQRDITKGMREILIDWLVEVSEEYKLVPDTLYLTVYLIDRFLSRNYIERQRLQLVGITSMLVASKYEEICAPRVEEFCFITDNTYTKAEVLKMESQLLNDLGFNLSVPTTKTFLRRFLRAAQASRKTPSMTLGFLANYLAELTLTEYEFLKFLPSLVAASAVFLARWTLDQSDLPWNQTLEHYTSYKCSDIQLCVCALRELQHNTSNCPLNAIREKYRHQKFECVANLTSPEFPRSFFS

SEQ ID NO: 38566 - protein, 487 aa, Zea mays subsp. mays
  peptide (1)..(487): Ceres Seq. ID no. 12359832
  misc_feature (227)..(354): Pfam Name: Pfam Description:  Cyclin, N-terminal domain
  misc_feature (17)..(486): NCBI GI NO: 5420276 NR Description: cyclin A2 [Lycopersicon esculentum]
  misc_feature (15)..(486): NCBI GI NO: 7438492 NR Description: cyclin, A-type - common tobacco
  misc_feature (73)..(486): NCBI GI NO: 7438491 NR Description: cyclin a2-type, mitosis-specific - soybean
  misc_feature (1)..(486): NCBI GI NO: 5305100 NR Description: cyclin A2 [Medicago sativa]
  misc_feature (74)..(486): NCBI GI NO: 15218225 NR Description: Cyclin A2;3; protein id: At1g15570
  misc_feature (83)..(487): NCBI GI NO: 22326727 NR Description: Cyclin A2;2; protein id: At5g11300.1
  misc_feature (39)..(486): NCBI GI NO: 1245816 NR Description: cyclin A homolog
  misc_feature (83)..(487): NCBI GI NO: 784946 NR Description: cyclin 3b [Arabidopsis thaliana]
  misc_feature (1)..(486): NCBI GI NO: 15419009 NR Description: cyclin A2 [Medicago sativa]
  misc_feature (35)..(486): NCBI GI NO: 15220120 NR Description: Cyclin A2;4; protein id: At1g80370.1
MRKENPVLNACQASNGRITRAQAAANRRSFGAFPSVPLPAKTERKQTAQGKAKRGSSYDNTSASVALSGPQPKRRTVLRDVTNLSNANSNKSFAAAPKLQTKPSLRTGRTVSKSKPCAKKIPKKPPPAGNGSALTNVLNIAEETQAEKILAERVEPVLLLENRGPLSLQNVERNRDSACHEVFFEERNLRDKCEPSVSKNGDSYVLDIVDIDKDNGNPQMCASYVVEIYSNLMASELMRRPSPNYMEGLQRDITKGMREILIDWLVEVSEEYKLVPDTLYLTVYLIDRFLSRNYIERQRLQLVGITSMLVASKYEEICAPRVEEFCFITDNTYTKAEVLKMESQLLNDLGFNLSVPTTKTFLRRFLRAAQASRKTPSMTLGFLANYLAELTLTEYEFLKFLPSLVAASAVFLARWTLDQSDLPWNQTLEHYTSYKCSDIQLCVCALRELQHNTSNCPLNAIREKYRHQKFECVANLTSPEFPRSFFS

SEQ ID NO: 38567 - DNA, 1133 bp, Zea mays subsp. mays
  misc_feature (1)..(1133): Ceres Seq. ID no. 12415469
atctcgcgggctttcccgcagcaagatcaacgtcgtcgttcaagccagcggtagtagagactacgaccgaggctagctaagctaagagatggcggatcaccagtactcggcgtggacgacttccgctgctcgtcatcgggtcttctcctgtgcgctcatggctcttgttagttttgtggctgcaggacgacccatggtgctcgccgacgccatcgtctttcacgtggcgaacaggtgcccgttcccggtgtggccggcgtccgcccctaacaccggccacccagtgctcgccggcggcggcttctacgtcccgcagggcaagtcgaggcgcgtcgtcgcgccggccaactggaacgggcgcttctgggcccgcaccggttgcaacttcaccgcgaacggcatgggcgtagcgggctgcctcaccggcgactgcgagggccggctcgcctgtaacgggtccgtgggcgccccgcccgccacgctagtcgaggtgagcctgcacgaggacgccccgaaagggagctcctacgacgtgagcctggtggacgggtacaacctccccgtcgccgtctccgccaagcccgccacgggcggcgcggacccgaacaagtgcgccattgccggctgcgccaagaacgtgaacgcggtgtgcccgccggagctgcaggtgaccgctaccggcagcggcggcggcaagacggtggtggcgtgcaagagcgcgtgcctagcgttcgggctcgacgccttctgctgccgcggcgcgtacgcgacgccggccacgtgccgagggaccgtgtactcgcgcctcttcaaggacgcctgcccggcatactacagctatgcctacgacatcgccgccacgacggccagcgggtgctacgcgcaggagtacatcatcacgttctgcccgtccagatggggcgacgagcccggggatcgtgctgctcagatttgaatttggtgtcgtcatcgtcagtcaggcaattaccaatcaccattgcgtcgagcttttcgcacgtctttatgtatgtgtgtacgcttgtgtctgcttctagtgggctttcacataaatttctacatacatatacacatacaacaataaaaaataaggtagtgctatttatcggccgcgt

SEQ ID NO: 38568 - protein, 288 aa, Zea mays subsp. mays
  peptide (1)..(288): Ceres Seq. ID no. 12415470
  misc_feature (48)..(274): Pfam Name: Pfam Description:  Thaumatin family
  misc_feature (23)..(287): NCBI GI NO: 37534308 NR Description: hypothetical protein
  misc_feature (23)..(278): NCBI GI NO: 15242552 NR Description: thaumatin-like protein; protein id: At5g40020.1
  misc_feature (17)..(273): NCBI GI NO: 34905146 NR Description: putative pathogenesis-related protein
  misc_feature (18)..(276): NCBI GI NO: 15222090 NR Description: thaumatin-like protein; protein id: At1g75050.1
  misc_feature (44)..(277): NCBI GI NO: 15238593 NR Description: thaumatin-like protein; protein id: At5g24620.1
  misc_feature (39)..(274): NCBI GI NO: 2129751 NR Description: thaumatin-like protein - Arabidopsis thaliana
  misc_feature (39)..(274): NCBI GI NO: 15221033 NR Description: pathogenesis-related group 5 protein, putative
  misc_feature (17)..(276): NCBI GI NO: 15222088 NR Description: thaumatin-like protein
  misc_feature (29)..(276): NCBI GI NO: 2435406 NR Description: thaumatin-like protein [Arabidopsis thaliana]
  misc_feature (39)..(274): NCBI GI NO: 7442175 NR Description: thaumatin-like protein - turnip
MADHQYSAWTTSAARHRVFSCALMALVSFVAAGRPMVLADAIVFHVANRCPFPVWPASAPNTGHPVLAGGGFYVPQGKSRRVVAPANWNGRFWARTGCNFTANGMGVAGCLTGDCEGRLACNGSVGAPPATLVEVSLHEDAPKGSSYDVSLVDGYNLPVAVSAKPATGGADPNKCAIAGCAKNVNAVCPPELQVTATGSGGGKTVVACKSACLAFGLDAFCCRGAYATPATCRGTVYSRLFKDACPAYYSYAYDIAATTASGCYAQEYIITFCPSRWGDEPGDRAAQI

SEQ ID NO: 38569 - protein, 265 aa, Zea mays subsp. mays
  peptide (1)..(265): Ceres Seq. ID no. 12415471
  misc_feature (25)..(251): Pfam Name: Pfam Description:  Thaumatin family
  misc_feature (1)..(264): NCBI GI NO: 37534308 NR Description: hypothetical protein
  misc_feature (1)..(255): NCBI GI NO: 15242552 NR Description: thaumatin-like protein; protein id: At5g40020.1
  misc_feature (1)..(250): NCBI GI NO: 34905146 NR Description: putative pathogenesis-related protein
  misc_feature (1)..(253): NCBI GI NO: 15222090 NR Description: thaumatin-like protein; protein id: At1g75050.1
  misc_feature (21)..(254): NCBI GI NO: 15238593 NR Description: thaumatin-like protein; protein id: At5g24620.1
  misc_feature (16)..(251): NCBI GI NO: 2129751 NR Description: thaumatin-like protein - Arabidopsis thaliana
  misc_feature (16)..(251): NCBI GI NO: 15221033 NR Description: pathogenesis-related group 5 protein, putative
  misc_feature (1)..(253): NCBI GI NO: 15222088 NR Description: thaumatin-like protein
  misc_feature (6)..(253): NCBI GI NO: 2435406 NR Description: thaumatin-like protein [Arabidopsis thaliana]
  misc_feature (16)..(251): NCBI GI NO: 7442175 NR Description: thaumatin-like protein - turnip
MALVSFVAAGRPMVLADAIVFHVANRCPFPVWPASAPNTGHPVLAGGGFYVPQGKSRRVVAPANWNGRFWARTGCNFTANGMGVAGCLTGDCEGRLACNGSVGAPPATLVEVSLHEDAPKGSSYDVSLVDGYNLPVAVSAKPATGGADPNKCAIAGCAKNVNAVCPPELQVTATGSGGGKTVVACKSACLAFGLDAFCCRGAYATPATCRGTVYSRLFKDACPAYYSYAYDIAATTASGCYAQEYIITFCPSRWGDEPGDRAAQI

SEQ ID NO: 38570 - protein, 253 aa, Zea mays subsp. mays
  peptide (1)..(253): Ceres Seq. ID no. 12415472
  misc_feature (13)..(239): Pfam Name: Pfam Description:  Thaumatin family
  misc_feature (1)..(252): NCBI GI NO: 37534308 NR Description: hypothetical protein
  misc_feature (1)..(243): NCBI GI NO: 15242552 NR Description: thaumatin-like protein; protein id: At5g40020.1
  misc_feature (1)..(238): NCBI GI NO: 34905146 NR Description: putative pathogenesis-related protein
  misc_feature (1)..(241): NCBI GI NO: 15222090 NR Description: thaumatin-like protein; protein id: At1g75050.1
  misc_feature (9)..(242): NCBI GI NO: 15238593 NR Description: thaumatin-like protein; protein id: At5g24620.1
  misc_feature (4)..(239): NCBI GI NO: 2129751 NR Description: thaumatin-like protein - Arabidopsis thaliana
  misc_feature (4)..(239): NCBI GI NO: 15221033 NR Description: pathogenesis-related group 5 protein, putative
  misc_feature (1)..(241): NCBI GI NO: 15222088 NR Description: thaumatin-like protein
  misc_feature (1)..(241): NCBI GI NO: 2435406 NR Description: thaumatin-like protein [Arabidopsis thaliana]
  misc_feature (4)..(239): NCBI GI NO: 7442175 NR Description: thaumatin-like protein - turnip
MVLADAIVFHVANRCPFPVWPASAPNTGHPVLAGGGFYVPQGKSRRVVAPANWNGRFWARTGCNFTANGMGVAGCLTGDCEGRLACNGSVGAPPATLVEVSLHEDAPKGSSYDVSLVDGYNLPVAVSAKPATGGADPNKCAIAGCAKNVNAVCPPELQVTATGSGGGKTVVACKSACLAFGLDAFCCRGAYATPATCRGTVYSRLFKDACPAYYSYAYDIAATTASGCYAQEYIITFCPSRWGDEPGDRAAQI

SEQ ID NO: 38571 - DNA, 1005 bp, Zea mays subsp. mays
  misc_feature (1)..(1005): Ceres Seq. ID no. 12357150
agcatccatcaactgctaccgagttaagtatattctgagctcgtctgcagccaaaagcttccatttgcattgcgatgggggctctgcctcgtggcctgctagctggcatctgcgccgtcttgttagcagcagtggttgcccttgcccatggtgcggaacaggaaacagcgtcaatggtggtcggcttggccaagtgcgccgactgcaccaggaagaacatgaaagctgatgcggcattcaacggccttcaagtggctgtcaagtgcaagaacgccaacggcgtcttcgagaccaaggccctcggtgaggttgacaagtccggcagcttcagcgttcccctcccggctgacctcctccgcgaggatggcgagctgaagcaagactgcttctcgcagctccacagcgcggccaacaagccatgccccggacaggagccgtcttggatcgtccggccaaccaccgacaacgacgacgacgacaagatgaagaataccttcgtcgcagtcgccggcaaggtgcactacccatcaaaggagtgcgcctctgctttcctcttctaccatttgttcaagaagcacctgttgcacaagaagcccatggtgatcatccctcacatccacaagaagcccatggtgccgatgtaccgccactcgcccgtgccggagtacaagccacctcacccgacgcccaccccgatctaccatgctgcagctgagcacaagacacagaaccccgagacggaccctgaaaagttcaagaagctgctccccttcataaaaaagaaccccttctttcccaagttccccaagtttcctcccgtcaaggaggagaacaaggcgtaaaaatatgagggcgagataccaagtgtacccctttcctctgcatccactcttacgtagtgtctgttgcatcttgcatggaccgtcattacctcctgtttcttgacagtgtttgtaacctctcaccggccagggctcccactaatagaaataaaacttttgttct

SEQ ID NO: 38572 - protein, 255 aa, Zea mays subsp. mays
  peptide (1)..(255): Ceres Seq. ID no. 12357151
  misc_feature (1)..(254): NCBI GI NO: 37531058 NR Description: putative proline-rich protein
  misc_feature (1)..(254): NCBI GI NO: 6689616 NR Description: proline-rich protein [Zea mays]
  misc_feature (1)..(207): NCBI GI NO: 37531074 NR Description: putative proline-rich protein
  misc_feature (1)..(220): NCBI GI NO: 37531092 NR Description: putative proline-rich protein
  misc_feature (14)..(207): NCBI GI NO: 37531070 NR Description: putative proline-rich protein
  misc_feature (1)..(210): NCBI GI NO: 37531088 NR Description: putative proline-rich protein
  misc_feature (1)..(220): NCBI GI NO: 37531094 NR Description: putative proline-rich protein
  misc_feature (1)..(210): NCBI GI NO: 18676394 NR Description: proline-rich protein [Oryza sativa]
  misc_feature (6)..(207): NCBI GI NO: 37531076 NR Description: putative proline-rich protein
  misc_feature (1)..(210): NCBI GI NO: 37531090 NR Description: putative proline-rich protein
MGALPRGLLAGICAVLLAAVVALAHGAEQETASMVVGLAKCADCTRKNMKADAAFNGLQVAVKCKNANGVFETKALGEVDKSGSFSVPLPADLLREDGELKQDCFSQLHSAANKPCPGQEPSWIVRPTTDNDDDDKMKNTFVAVAGKVHYPSKECASAFLFYHLFKKHLLHKKPMVIIPHIHKKPMVPMYRHSPVPEYKPPHPTPTPIYHAAAEHKTQNPETDPEKFKKLLPFIKKNPFFPKFPKFPPVKEENKA

SEQ ID NO: 38573 - protein, 222 aa, Zea mays subsp. mays
  peptide (1)..(222): Ceres Seq. ID no. 12357152
  misc_feature (1)..(221): NCBI GI NO: 37531058 NR Description: putative proline-rich protein
  misc_feature (1)..(221): NCBI GI NO: 6689616 NR Description: proline-rich protein [Zea mays]
  misc_feature (1)..(174): NCBI GI NO: 37531074 NR Description: putative proline-rich protein
  misc_feature (1)..(187): NCBI GI NO: 37531092 NR Description: putative proline-rich protein
  misc_feature (1)..(174): NCBI GI NO: 37531070 NR Description: putative proline-rich protein
  misc_feature (1)..(177): NCBI GI NO: 37531088 NR Description: putative proline-rich protein
  misc_feature (1)..(187): NCBI GI NO: 37531094 NR Description: putative proline-rich protein
  misc_feature (1)..(177): NCBI GI NO: 18676394 NR Description: proline-rich protein [Oryza sativa]
  misc_feature (1)..(174): NCBI GI NO: 37531076 NR Description: putative proline-rich protein
  misc_feature (1)..(177): NCBI GI NO: 37531090 NR Description: putative proline-rich protein
MVVGLAKCADCTRKNMKADAAFNGLQVAVKCKNANGVFETKALGEVDKSGSFSVPLPADLLREDGELKQDCFSQLHSAANKPCPGQEPSWIVRPTTDNDDDDKMKNTFVAVAGKVHYPSKECASAFLFYHLFKKHLLHKKPMVIIPHIHKKPMVPMYRHSPVPEYKPPHPTPTPIYHAAAEHKTQNPETDPEKFKKLLPFIKKNPFFPKFPKFPPVKEENKA

SEQ ID NO: 38574 - protein, 207 aa, Zea mays subsp. mays
  peptide (1)..(207): Ceres Seq. ID no. 12357153
  misc_feature (1)..(206): NCBI GI NO: 37531058 NR Description: putative proline-rich protein
  misc_feature (1)..(206): NCBI GI NO: 6689616 NR Description: proline-rich protein [Zea mays]
  misc_feature (1)..(159): NCBI GI NO: 37531074 NR Description: putative proline-rich protein
  misc_feature (1)..(172): NCBI GI NO: 37531092 NR Description: putative proline-rich protein
  misc_feature (1)..(159): NCBI GI NO: 37531070 NR Description: putative proline-rich protein
  misc_feature (1)..(162): NCBI GI NO: 37531088 NR Description: putative proline-rich protein
  misc_feature (1)..(172): NCBI GI NO: 37531094 NR Description: putative proline-rich protein
  misc_feature (1)..(162): NCBI GI NO: 18676394 NR Description: proline-rich protein [Oryza sativa]
  misc_feature (1)..(159): NCBI GI NO: 37531076 NR Description: putative proline-rich protein
  misc_feature (1)..(162): NCBI GI NO: 37531090 NR Description: putative proline-rich protein
MKADAAFNGLQVAVKCKNANGVFETKALGEVDKSGSFSVPLPADLLREDGELKQDCFSQLHSAANKPCPGQEPSWIVRPTTDNDDDDKMKNTFVAVAGKVHYPSKECASAFLFYHLFKKHLLHKKPMVIIPHIHKKPMVPMYRHSPVPEYKPPHPTPTPIYHAAAEHKTQNPETDPEKFKKLLPFIKKNPFFPKFPKFPPVKEENKA

SEQ ID NO: 38575 - DNA, 1092 bp, Zea mays subsp. mays
  misc_feature (1)..(1092): Ceres Seq. ID no. 12355020
acggccagggaccaagctactcgtaaacaccatcagagtgtacacaagaacacgtacgcggcgcacggcgtcgttagtcaccaagcgggccatcggcaatggcgagcacgcaagctccagcggcggccgacaacgtggaccccgtctacgagtggctcgacgatggcgccagctaccttctccgcctcgacctcccagggttcaagaaggaggactttcgggtgcacgtggacggcgagggccggctcaccgtcatcggcaatcgcaaacccacgcccggcggcggcggcaaggcgctgcggctccacaagacgttccagctgcccaatacggccaaccttgataccatcacgggccgcttcgacggcaacgtgctcacgctcaccgtgcccaaactgctcgccggtgctgatgcccccacaacgccaccaccgcagtccaaggaggaggcgcgagtcgccggcgataagccagatcaggcggacaagctgcccgccagggttggccgtggccgtgaggagacgacggaggagcggaggaccaccgagaccgagaggactagcttggcggcgagaagcaaagaggaagacgaggagaaggccaagcccatggtggcgctgccgccgcagtcgagcgagaaggcgagcggagaccatcaacgagatgaccagcaggatggcaaggcgcaggccgaccacagggagatggtcgctcgcgaggccgcgcgcaggatcgaggcggcgcgggcgagggtggcggaggccaaggccaaggcagagcgggagaggaagtgtgagcactggaaggagcgcgccgtggaggagggcctcaagttggcggaggcggtcaataacaagaaggaggtgatcgccacggccgtcgccgccttcacacttggcgtcttcgtctcgagtaggctcttctccaggacttaatcaacccatgcgtaatcatggaccagacatattcacgtatatgagcatgagaacatgagcagcatcgccaggttatattgattcgtagacttgtacatgcatgatgcagcactaatattcacattatgtattaattattgctccctattgagcactc

SEQ ID NO: 38576 - protein, 288 aa, Zea mays subsp. mays
  peptide (1)..(288): Ceres Seq. ID no. 12355021
  misc_feature (32)..(288): NCBI GI NO: 6649242 NR Description: splicing coactivator subunit SRm300 [Homo sapiens]
  misc_feature (37)..(288): NCBI GI NO: 5821151 NR Description: RNA binding protein [Homo sapiens]
  misc_feature (37)..(288): NCBI GI NO: 6634015 NR Description: KIAA0324 protein [Homo sapiens]
  misc_feature (37)..(288): NCBI GI NO: 7512967 NR Description: hypothetical protein KIAA0324 - human (fragment)
  misc_feature (37)..(288): NCBI GI NO: 6649242 NR Description: splicing coactivator subunit SRm300 [Homo sapiens]
  misc_feature (37)..(288): NCBI GI NO: 19923466 NR Description: splicing coactivator subunit SRm300
  misc_feature (26)..(288): NCBI GI NO: 5821151 NR Description: RNA binding protein [Homo sapiens]
  misc_feature (26)..(288): NCBI GI NO: 6634015 NR Description: KIAA0324 protein [Homo sapiens]
  misc_feature (26)..(288): NCBI GI NO: 7512967 NR Description: hypothetical protein KIAA0324 - human (fragment)
  misc_feature (26)..(288): NCBI GI NO: 19923466 NR Description: splicing coactivator subunit SRm300
TARDQATRKHHQSVHKNTYAAHGVVSHQAGHRQWRARKLQRRPTTWTPSTSGSTMAPATFSASTSQGSRRRTFGCTWTARAGSPSSAIANPRPAAAARRCGSTRRSSCPIRPTLIPSRAASTATCSRSPCPNCSPVLMPPQRHHRSPRRRRESPAISQIRRTSCPPGLAVAVRRRRRSGGPPRPRGLAWRREAKRKTRRRPSPWWRCRRSRARRRAETINEMTSRMARRRPTTGRWSLARPRAGSRRRGRGWRRPRPRQSGRGSVSTGRSAPWRRASSWRRRSITRRR

SEQ ID NO: 38577 - protein, 278 aa, Zea mays subsp. mays
  peptide (1)..(278): Ceres Seq. ID no. 12355022
  misc_feature (113)..(248): Pfam Name: Pfam Description:  Caldesmon
  misc_feature (1)..(277): NCBI GI NO: 34912188 NR Description: P0700A11.20
  misc_feature (1)..(157): NCBI GI NO: 34912180 NR Description: P0700A11.16
  misc_feature (11)..(163): NCBI GI NO: 18401331 NR Description: expressed protein; protein id: At2g27140
  misc_feature (11)..(163): NCBI GI NO: 21592618 NR Description: unknown [Arabidopsis thaliana]
  misc_feature (14)..(232): NCBI GI NO: 15242107 NR Description: small heat shock protein -like
  misc_feature (19)..(109): NCBI GI NO: 34912184 NR Description: P0700A11.18
  misc_feature (15)..(259): NCBI GI NO: 18414724 NR Description: expressed protein; protein id: At5g04890
MASTQAPAAADNVDPVYEWLDDGASYLLRLDLPGFKKEDFRVHVDGEGRLTVIGNRKPTPGGGGKALRLHKTFQLPNTANLDTITGRFDGNVLTLTVPKLLAGADAPTTPPPQSKEEARVAGDKPDQADKLPARVGRGREETTEERRTTETERTSLAARSKEEDEEKAKPMVALPPQSSEKASGDHQRDDQQDGKAQADHREMVAREAARRIEAARARVAEAKAKAERERKCEHWKERAVEEGLKLAEAVNNKKEVIATAVAAFTLGVFVSSRLFSRT

SEQ ID NO: 38578 - protein, 234 aa, Zea mays subsp. mays
  peptide (1)..(234): Ceres Seq. ID no. 12355023
  misc_feature (1)..(234): NCBI GI NO: 6649242 NR Description: splicing coactivator subunit SRm300 [Homo sapiens]
  misc_feature (1)..(234): NCBI GI NO: 5821151 NR Description: RNA binding protein [Homo sapiens]
  misc_feature (1)..(234): NCBI GI NO: 6634015 NR Description: KIAA0324 protein [Homo sapiens]
  misc_feature (1)..(234): NCBI GI NO: 7512967 NR Description: hypothetical protein KIAA0324 - human (fragment)
  misc_feature (1)..(234): NCBI GI NO: 6649242 NR Description: splicing coactivator subunit SRm300 [Homo sapiens]
  misc_feature (1)..(234): NCBI GI NO: 19923466 NR Description: splicing coactivator subunit SRm300
  misc_feature (1)..(234): NCBI GI NO: 5821151 NR Description: RNA binding protein [Homo sapiens]
  misc_feature (1)..(234): NCBI GI NO: 6634015 NR Description: KIAA0324 protein [Homo sapiens]
  misc_feature (1)..(234): NCBI GI NO: 7512967 NR Description: hypothetical protein KIAA0324 - human (fragment)
  misc_feature (1)..(234): NCBI GI NO: 19923466 NR Description: splicing coactivator subunit SRm300
MAPATFSASTSQGSRRRTFGCTWTARAGSPSSAIANPRPAAAARRCGSTRRSSCPIRPTLIPSRAASTATCSRSPCPNCSPVLMPPQRHHRSPRRRRESPAISQIRRTSCPPGLAVAVRRRRRSGGPPRPRGLAWRREAKRKTRRRPSPWWRCRRSRARRRAETINEMTSRMARRRPTTGRWSLARPRAGSRRRGRGWRRPRPRQSGRGSVSTGRSAPWRRASSWRRRSITRRR

SEQ ID NO: 38579 - DNA, 1087 bp, Zea mays subsp. mays
  misc_feature (1)..(1087): Ceres Seq. ID no. 12400968
  misc_feature (605)..(605): n is a, c, t, g, unknown, or other
  misc_feature (777)..(777): n is a, c, t, g, unknown, or other
  misc_feature (475)..(475): n is a, c, t, g, unknown, or other
  misc_feature (505)..(505): n is a, c, t, g, unknown, or other
  misc_feature (474)..(474): n is a, c, t, g, unknown, or other
  misc_feature (805)..(805): n is a, c, t, g, unknown, or other
  misc_feature (572)..(572): n is a, c, t, g, unknown, or other
  misc_feature (775)..(775): n is a, c, t, g, unknown, or other
  misc_feature (776)..(776): n is a, c, t, g, unknown, or other
  misc_feature (846)..(846): n is a, c, t, g, unknown, or other
  misc_feature (573)..(573): n is a, c, t, g, unknown, or other
gcgtcgattgcttgcccagctcgcttcgtcttcgtcttccttctcccccttctcctcgcctccggttaaccgccacagcctggattcgccatctcccgcggcggcgcggcggccgctgctgctgcgtcggcgcgtgagatggatgattgcggcggcggcggcggcaagaggccgttccagctggcgcggtcgctgacgtaccaccagccacccggggcaccggccggcggctgcgtccaggtggcggcggcagcaccagcagcatcagctcgcggacgagccgcgcgcgccccggcgcaggcggtggtgctgtacacgacgtcgctgcgcggggtgcggcgcacgttcgcggactgcgccgcggtgcgcgccatcctgcgcggcttccgcgtggccgttgacgagcgggacgtgtccatggacgcggcgctccggcgggaggtccaggcgctgctggccgccgcgcggccgcgnnttcgcgctcccgcagctgctcatcgtgcgnccgcctcgtcggcggcgcggacgaggtgcggcagctgaacgagaccggccagctccggcgcctcctnnacggcgcggccgggcaggacccggccttcgtntgcgacgcctgtggcggcgtccggttcgtcccgtgcgccggatgcggcggcggccgcaaggtgttcgtcgaggaggagggccgcgtcgttcgctgcgtcgagtgcaacgagaacgggctggtacgctgccttaactgctgctcttgatcgccgacggcggcggcggtcgnnngccgttccattcgtgctgctaatccaancggtagaggttgtggtagatatcaacaaaaggaagaagaanaagagggggctttcggtttcccggcgtggggttcgtgtgtgtccgatccgatcattttgaggatcggatttgctgctagtcggtggacaagaacagattgttcttggctccttgctgcaaaattgccatatggtgatggcgattggagaataagaactgggcttgtttgtatatgcatctgatgtatcaaagattgatactgctgctagttcaactaatgtaaatacttcagtttggtgtc

SEQ ID NO: 38580 - protein, 134 aa, Zea mays subsp. mays
  peptide (1)..(134): Ceres Seq. ID no. 12400969
  misc_feature (6)..(108): NCBI GI NO: 34899098 NR Description: hypothetical protein~similar to Arabidopsisthaliana chromosome 5
  misc_feature (39)..(103): NCBI GI NO: 15240723 NR Description: putative protein; protein id: At5g13810
  misc_feature (56)..(109): NCBI GI NO: 15451042 NR Description: putative protein [Arabidopsis thaliana]
  misc_feature (56)..(111): NCBI GI NO: 15227326 NR Description: unknown protein; protein id: At2g41330
  misc_feature (31)..(112): NCBI GI NO: 34899868 NR Description: OJ1714_H10.16
  misc_feature (56)..(109): NCBI GI NO: 30694571 NR Description: expressed protein [Arabidopsis thaliana]
  misc_feature (54)..(105): NCBI GI NO: 15237686 NR Description: putative protein; protein id: At5g58530.1
  misc_feature (37)..(131): NCBI GI NO: 38346321 NR Description: OJ000126_13.3
  misc_feature (41)..(106): NCBI GI NO: 32490043 NR Description: OSJNBa0063C18.3
  misc_feature (54)..(106): NCBI GI NO: 15217659 NR Description: peptide transporter, putative
  misc_feature (112)..(112): Xaa is any aa, unknown or other
  misc_feature (113)..(113): Xaa is any aa, unknown or other
  misc_feature (123)..(123): Xaa is any aa, unknown or other
MDDCGGGGGKRPFQLARSLTYHQPPGAPAGGCVQVAAAAPAASARGRAARAPAQAVVLYTTSLRGVRRTFADCAAVRAILRGFRVAVDERDVSMDAALRREVQALLAAARPXXRAPAAAHRAXASSAARTRCGS

SEQ ID NO: 38581 - DNA, 1286 bp, Zea mays subsp. mays
  misc_feature (1)..(1286): Ceres Seq. ID no. 13494497
gcacgagaccattacctagaacatcctaatcaaaaaaccaaacaaactgaaccactgtccgctgcgtgctttccttcctctcaacgccagccttgccgagagcccgagaccaatcgccgccatctcccggaatgacggggtgacgaaaccgcgccgcaccagacaagacagaggagccgccgccgcgacccacaggccaccgggtcgccgaggaggggatccagcgagccatgtcgaccgacgtgcccatgagccccgagctcgagcaggtggacggcgagatccaggacatcttccgcgcgctccagaatgggttccagaagatggacaagatcaaggactccagcaggcagtccaagcagctggaggatctcacggccaagatgagagagtgcaagcgcttgatcaaagagtttgaccgtatactcaaggatgaggagaaaaagaacacccctgatgtcaacaagcagctcaatgacaagaagcagttcatgatcaaagaactcaactcctatgtgaccttaaggaaaacgtaccagagcagccttggtaataagaggatcgaactattcgatacgggtaatgaccaggtggctgagggaactccagttcaaatggcatcagaaatgtcaaatcaagaactcattagcaccggaaggaaacaaatggaccaaactgatcaagctattgagcgctcaaaaatggttgtagcacaaactgttgaagttggagctcagactgctgcaactctgacacagcaaacggaacaaatgaagaggataggcaatgagctagattctgtccacttttcactgaagaaggctagtcaaatggtgaaagagattggccgtcaggttgctactgacaaatgcattatggcgttcctgtttctgattgtctgtggtgtcattgcaataattgttgttaagattgtcaacccgcataacaagaacatcagagacattccgggcctagcacctcccgccatgaacaggaagctgctgtccatcgacgctgcaggactctgagcgttgtgaatggctgcctcccgcagcacagcgcaacgcagcgcgtcagagttctcttatgagccacgatacatggcttcgcgattcttttgtgcttgtagtttacgtccgcccattctttccctattgcattggtgagtagtagcctcaggtttgtagcgggactcttgttgtttattgcttgcgagcccatagctttctggttgtttgtgtatatgcggtagtgatgtgaatgtgagagtcgagtggagattcttc

SEQ ID NO: 38582 - protein, 265 aa, Zea mays subsp. mays
  peptide (1)..(265): Ceres Seq. ID no. 13494498
  misc_feature (77)..(212): Pfam Name: Pfam Description:  Vesicle transport v-SNARE protein
  misc_feature (1)..(264): NCBI GI NO: 23237830 NR Description: contains ESTs C19491
  misc_feature (1)..(261): NCBI GI NO: 34896946 NR Description: putative vesicle soluble NSF attachment proteinreceptor
  misc_feature (1)..(258): NCBI GI NO: 18401508 NR Description: expressed protein [Arabidopsis thaliana]
  misc_feature (1)..(258): NCBI GI NO: 22330102 NR Description: expressed protein [Arabidopsis thaliana]
  misc_feature (1)..(258): NCBI GI NO: 21536876 NR Description: unknown [Arabidopsis thaliana]
  misc_feature (7)..(258): NCBI GI NO: 18403771 NR Description: expressed protein [Arabidopsis thaliana]
  misc_feature (7)..(258): NCBI GI NO: 27805643 NR Description: Novel plant SNARE 11 (AtNPSN11)
  misc_feature (7)..(248): NCBI GI NO: 25370780 NR Description: hypothetical protein At2g35190
  misc_feature (12)..(258): NCBI GI NO: 25370781 NR Description: F11A17.20 [imported] - Arabidopsis thaliana
  misc_feature (1)..(182): NCBI GI NO: 25370781 NR Description: F11A17.20 [imported] - Arabidopsis thaliana
MSTDVPMSPELEQVDGEIQDIFRALQNGFQKMDKIKDSSRQSKQLEDLTAKMRECKRLIKEFDRILKDEEKKNTPDVNKQLNDKKQFMIKELNSYVTLRKTYQSSLGNKRIELFDTGNDQVAEGTPVQMASEMSNQELISTGRKQMDQTDQAIERSKMVVAQTVEVGAQTAATLTQQTEQMKRIGNELDSVHFSLKKASQMVKEIGRQVATDKCIMAFLFLIVCGVIAIIVVKIVNPHNKNIRDIPGLAPPAMNRKLLSIDAAGL

SEQ ID NO: 38583 - protein, 259 aa, Zea mays subsp. mays
  peptide (1)..(259): Ceres Seq. ID no. 13494499
  misc_feature (71)..(206): Pfam Name: Pfam Description:  Vesicle transport v-SNARE protein
  misc_feature (1)..(258): NCBI GI NO: 23237830 NR Description: contains ESTs C19491
  misc_feature (1)..(255): NCBI GI NO: 34896946 NR Description: putative vesicle soluble NSF attachment proteinreceptor
  misc_feature (1)..(252): NCBI GI NO: 18401508 NR Description: expressed protein [Arabidopsis thaliana]
  misc_feature (1)..(252): NCBI GI NO: 22330102 NR Description: expressed protein [Arabidopsis thaliana]
  misc_feature (1)..(252): NCBI GI NO: 21536876 NR Description: unknown [Arabidopsis thaliana]
  misc_feature (1)..(252): NCBI GI NO: 18403771 NR Description: expressed protein [Arabidopsis thaliana]
  misc_feature (1)..(252): NCBI GI NO: 27805643 NR Description: Novel plant SNARE 11 (AtNPSN11)
  misc_feature (1)..(242): NCBI GI NO: 25370780 NR Description: hypothetical protein At2g35190
  misc_feature (6)..(252): NCBI GI NO: 25370781 NR Description: F11A17.20 [imported] - Arabidopsis thaliana
  misc_feature (1)..(176): NCBI GI NO: 25370781 NR Description: F11A17.20 [imported] - Arabidopsis thaliana
MSPELEQVDGEIQDIFRALQNGFQKMDKIKDSSRQSKQLEDLTAKMRECKRLIKEFDRILKDEEKKNTPDVNKQLNDKKQFMIKELNSYVTLRKTYQSSLGNKRIELFDTGNDQVAEGTPVQMASEMSNQELISTGRKQMDQTDQAIERSKMVVAQTVEVGAQTAATLTQQTEQMKRIGNELDSVHFSLKKASQMVKEIGRQVATDKCIMAFLFLIVCGVIAIIVVKIVNPHNKNIRDIPGLAPPAMNRKLLSIDAAGL

SEQ ID NO: 38584 - protein, 234 aa, Zea mays subsp. mays
  peptide (1)..(234): Ceres Seq. ID no. 13494500
  misc_feature (46)..(181): Pfam Name: Pfam Description:  Vesicle transport v-SNARE protein
  misc_feature (1)..(233): NCBI GI NO: 23237830 NR Description: contains ESTs C19491
  misc_feature (1)..(230): NCBI GI NO: 34896946 NR Description: putative vesicle soluble NSF attachment proteinreceptor
  misc_feature (1)..(227): NCBI GI NO: 18401508 NR Description: expressed protein [Arabidopsis thaliana]
  misc_feature (1)..(227): NCBI GI NO: 22330102 NR Description: expressed protein [Arabidopsis thaliana]
  misc_feature (1)..(227): NCBI GI NO: 21536876 NR Description: unknown [Arabidopsis thaliana]
  misc_feature (1)..(227): NCBI GI NO: 18403771 NR Description: expressed protein [Arabidopsis thaliana]
  misc_feature (1)..(227): NCBI GI NO: 27805643 NR Description: Novel plant SNARE 11 (AtNPSN11)
  misc_feature (1)..(217): NCBI GI NO: 25370780 NR Description: hypothetical protein At2g35190
  misc_feature (1)..(227): NCBI GI NO: 25370781 NR Description: F11A17.20 [imported] - Arabidopsis thaliana
  misc_feature (1)..(151): NCBI GI NO: 25370781 NR Description: F11A17.20 [imported] - Arabidopsis thaliana
MDKIKDSSRQSKQLEDLTAKMRECKRLIKEFDRILKDEEKKNTPDVNKQLNDKKQFMIKELNSYVTLRKTYQSSLGNKRIELFDTGNDQVAEGTPVQMASEMSNQELISTGRKQMDQTDQAIERSKMVVAQTVEVGAQTAATLTQQTEQMKRIGNELDSVHFSLKKASQMVKEIGRQVATDKCIMAFLFLIVCGVIAIIVVKIVNPHNKNIRDIPGLAPPAMNRKLLSIDAAGL

SEQ ID NO: 38585 - DNA, 912 bp, Zea mays subsp. mays
  misc_feature (1)..(912): Ceres Seq. ID no. 12363928
ctctccattccgaactccaaacgaaccaattcgtgtccatcgaaggttccatgggatcaggcctctcaagcagccaccggaggagcagcgcgtcgcttcaccagccggcggcggccccggccccggccccggcgctggtcatcgcggccgacggctcgttgagggagttcgcgccggcgccactccccgcctccgtctccgacgcgctcgccggcgccaatgcggcggccgacggccggttcttcgtgtgcagctccgacgcgctctgcttcgactccgacgtcccggcgctcggcgccgacgagctgctccggccggggcagatatacttcgtcctccccgcggccatgctcggcaggccgctctcgagcgccggcatggccgcgctcgccgcgcgcgcgagcgaggcgctggcggcgggagcgggctggcgtgggcgccctcgcggccgccgcgggttcacgaaggcgcgcgtcgtgccggcgcaccaccgccacgcggacggcgaccgagaggtcaacgagaagctgaaccagaggactcttggcggcatcgagacggcttcacgtggtccggcgaccaacgccaggaagtccgctgtggcggcgcgaccggctccgcctctgaggagggcgctcagcaccattgaagaggatgccgagcgatcaaattggctttgaagcgcgcgtgttggacgcgaccgagtgatcacagagctgcgcgagggcatgtgccgtattgatgataactttggattgatttttttttgtgtgtgtataggatgttagagattttgtgctattcaaatagcttgaaaggatatggaaatttgttatttggttggtcgacgtttgtgtatttaaacaaatcacaaagattaaatgaaaattttagttgctgacttggttcttt

SEQ ID NO: 38586 - protein, 225 aa, Zea mays subsp. mays
  peptide (1)..(225): Ceres Seq. ID no. 12363929
  misc_feature (21)..(220): NCBI GI NO: 5441883 NR Description: Similar to Arabidopsis thaliana BAC genomicsequence
  misc_feature (21)..(219): NCBI GI NO: 5441882 NR Description: Similar to Arabidopsis thaliana DNA contigfragment
  misc_feature (38)..(219): NCBI GI NO: 5441884 NR Description: Similar to Arabidopsis thaliana DNA contigfragment
  misc_feature (17)..(137): NCBI GI NO: 31126784 NR Description: hypothetical protein
  misc_feature (44)..(186): NCBI GI NO: 18411155 NR Description: expressed protein; protein id: At1g76600
  misc_feature (44)..(186): NCBI GI NO: 14596201 NR Description: Unknown protein [Arabidopsis thaliana]
  misc_feature (26)..(141): NCBI GI NO: 34904464 NR Description: OSJNBa0086P08.11
  misc_feature (28)..(217): NCBI GI NO: 13699079 NR Description: TMV response-related gene product
  misc_feature (44)..(143): NCBI GI NO: 21592697 NR Description: unknown [Arabidopsis thaliana]
  misc_feature (37)..(141): NCBI GI NO: 34394505 NR Description: hypothetical protein
LHSELQTNQFVSIEGSMGSGLSSSHRRSSASLHQPAAAPAPAPALVIAADGSLREFAPAPLPASVSDALAGANAAADGRFFVCSSDALCFDSDVPALGADELLRPGQIYFVLPAAMLGRPLSSAGMAALAARASEALAAGAGWRGRPRGRRGFTKARVVPAHHRHADGDREVNEKLNQRTLGGIETASRGPATNARKSAVAARPAPPLRRALSTIEEDAERSNWL

SEQ ID NO: 38587 - protein, 215 aa, Zea mays subsp. mays
  peptide (1)..(215): Ceres Seq. ID no. 12363930
SPFRTPNEPIRVHRRFHGIRPLKQPPEEQRVASPAGGGPGPGPGAGHRGRRLVEGVRAGATPRLRLRRARRRQCGGRRPVLRVQLRRALLRLRRPGARRRRAAPAGADILRPPRGHARQAALERRHGRARRARERGAGGGSGLAWAPSRPPRVHEGARRAGAPPPRGRRPRGQREAEPEDSWRHRDGFTWSGDQRQEVRCGGATGSASEEGAQHH

SEQ ID NO: 38588 - protein, 209 aa, Zea mays subsp. mays
  peptide (1)..(209): Ceres Seq. ID no. 12363931
  misc_feature (5)..(204): NCBI GI NO: 5441883 NR Description: Similar to Arabidopsis thaliana BAC genomicsequence
  misc_feature (5)..(203): NCBI GI NO: 5441882 NR Description: Similar to Arabidopsis thaliana DNA contigfragment
  misc_feature (22)..(203): NCBI GI NO: 5441884 NR Description: Similar to Arabidopsis thaliana DNA contigfragment
  misc_feature (1)..(121): NCBI GI NO: 31126784 NR Description: hypothetical protein
  misc_feature (28)..(170): NCBI GI NO: 18411155 NR Description: expressed protein; protein id: At1g76600
  misc_feature (28)..(170): NCBI GI NO: 14596201 NR Description: Unknown protein [Arabidopsis thaliana]
  misc_feature (10)..(125): NCBI GI NO: 34904464 NR Description: OSJNBa0086P08.11
  misc_feature (12)..(201): NCBI GI NO: 13699079 NR Description: TMV response-related gene product
  misc_feature (28)..(127): NCBI GI NO: 21592697 NR Description: unknown [Arabidopsis thaliana]
  misc_feature (21)..(125): NCBI GI NO: 34394505 NR Description: hypothetical protein
MGSGLSSSHRRSSASLHQPAAAPAPAPALVIAADGSLREFAPAPLPASVSDALAGANAAADGRFFVCSSDALCFDSDVPALGADELLRPGQIYFVLPAAMLGRPLSSAGMAALAARASEALAAGAGWRGRPRGRRGFTKARVVPAHHRHADGDREVNEKLNQRTLGGIETASRGPATNARKSAVAARPAPPLRRALSTIEEDAERSNWL

SEQ ID NO: 38589 - DNA, 686 bp, Zea mays subsp. mays
  misc_feature (1)..(686): Ceres Seq. ID no. 12549504
  misc_feature (380)..(380): n is a, c, t, g, unknown, or other
atcgagacgctgggcacgttcgcgctctccgtcggggcggcggtcgggatggagttctgggcgcggtgggcgcaccgggcgctgtggcacgcctccctgtggcacatgcacgagtcgcaccaccggccgcgcgagggccccttcgagctcaacgacgtgttcgccatcgtcaacgccgcgccggccatctccctcctcgcctacggcttcttccaccgcggcatcgtgcccggcctctgcttcggcgcgggcctggggattacgctgttcggcatggcctacatgttcgtccacgacggcctggtccaccgccgctttccggtcggccccatcgccgacgtgccctacttccgccgagtggctgcttcgcacaagatacnccacatggacaagttcggcggcgtcccgtatgggctcttcctgggaccaaaggagctggaggaggttggtggcctggacgagcttgttagcagtccggtgagtgaagctactgatactgaagacgcaggagaagaaaagacgcgtccagttgtatgcgttgtccgaacaagcgtgttcatgggccagagtgtgccaaatgagttctagctttaggcgagtgggccaaatgagtgtgggctgcgtcccagggtagtataagtactatgagtctgtaataatcaggacaagaagaatttaggtaaagt

SEQ ID NO: 38590 - protein, 195 aa, Zea mays subsp. mays
  peptide (1)..(195): Ceres Seq. ID no. 12549505
  misc_feature (5)..(155): Pfam Name: Pfam Description:  Carotene hydroxylase
  misc_feature (2)..(155): NCBI GI NO: 9988836 NR Description: beta-carotene hydroxylase [Citrus unshiu]
  misc_feature (2)..(155): NCBI GI NO: 11245486 NR Description: beta-carotene hydroxylase [Citrus unshiu]
  misc_feature (2)..(155): NCBI GI NO: 9968545 NR Description: beta-carotene hydroxylase
  misc_feature (2)..(174): NCBI GI NO: 33145986 NR Description: beta-carotene hydroxylase [Crocus sativus]
  misc_feature (2)..(155): NCBI GI NO: 37536402 NR Description: putative beta-carotene hydroxylase
  misc_feature (2)..(155): NCBI GI NO: 5870600 NR Description: beta-carotene hydroxylase
  misc_feature (1)..(169): NCBI GI NO: 21734857 NR Description: beta-carotene hydroxylase [Vitis vinifera]
  misc_feature (2)..(155): NCBI GI NO: 2956717 NR Description: beta-carotene hydroxylase 2 [Capsicum annuum]
  misc_feature (1)..(155): NCBI GI NO: 1575296 NR Description: beta-carotene hydroxylase [Arabidopsis thaliana]
  misc_feature (1)..(155): NCBI GI NO: 15235959 NR Description: beta-carotene hydroxylase; protein id: At4g25700
  misc_feature (127)..(127): Xaa is any aa, unknown or other
IETLGTFALSVGAAVGMEFWARWAHRALWHASLWHMHESHHRPREGPFELNDVFAIVNAAPAISLLAYGFFHRGIVPGLCFGAGLGITLFGMAYMFVHDGLVHRRFPVGPIADVPYFRRVAASHKIXHMDKFGGVPYGLFLGPKELEEVGGLDELVSSPVSEATDTEDAGEEKTRPVVCVVRTSVFMGQSVPNEF

SEQ ID NO: 38591 - protein, 179 aa, Zea mays subsp. mays
  peptide (1)..(179): Ceres Seq. ID no. 12549506
  misc_feature (1)..(139): Pfam Name: Pfam Description:  Carotene hydroxylase
  misc_feature (1)..(139): NCBI GI NO: 9988836 NR Description: beta-carotene hydroxylase [Citrus unshiu]
  misc_feature (1)..(139): NCBI GI NO: 11245486 NR Description: beta-carotene hydroxylase [Citrus unshiu]
  misc_feature (1)..(139): NCBI GI NO: 9968545 NR Description: beta-carotene hydroxylase
  misc_feature (1)..(158): NCBI GI NO: 33145986 NR Description: beta-carotene hydroxylase [Crocus sativus]
  misc_feature (1)..(139): NCBI GI NO: 37536402 NR Description: putative beta-carotene hydroxylase
  misc_feature (1)..(139): NCBI GI NO: 5870600 NR Description: beta-carotene hydroxylase
  misc_feature (1)..(153): NCBI GI NO: 21734857 NR Description: beta-carotene hydroxylase [Vitis vinifera]
  misc_feature (1)..(139): NCBI GI NO: 2956717 NR Description: beta-carotene hydroxylase 2 [Capsicum annuum]
  misc_feature (1)..(139): NCBI GI NO: 1575296 NR Description: beta-carotene hydroxylase [Arabidopsis thaliana]
  misc_feature (1)..(139): NCBI GI NO: 9971820 NR Description: beta hydroxylase [Tagetes erecta]
  misc_feature (111)..(111): Xaa is any aa, unknown or other
MEFWARWAHRALWHASLWHMHESHHRPREGPFELNDVFAIVNAAPAISLLAYGFFHRGIVPGLCFGAGLGITLFGMAYMFVHDGLVHRRFPVGPIADVPYFRRVAASHKIXHMDKFGGVPYGLFLGPKELEEVGGLDELVSSPVSEATDTEDAGEEKTRPVVCVVRTSVFMGQSVPNEF

SEQ ID NO: 38592 - protein, 160 aa, Zea mays subsp. mays
  peptide (1)..(160): Ceres Seq. ID no. 12549507
  misc_feature (1)..(120): Pfam Name: Pfam Description:  Carotene hydroxylase
  misc_feature (1)..(120): NCBI GI NO: 9988836 NR Description: beta-carotene hydroxylase [Citrus unshiu]
  misc_feature (1)..(120): NCBI GI NO: 11245486 NR Description: beta-carotene hydroxylase [Citrus unshiu]
  misc_feature (1)..(120): NCBI GI NO: 9968545 NR Description: beta-carotene hydroxylase
  misc_feature (1)..(139): NCBI GI NO: 33145986 NR Description: beta-carotene hydroxylase [Crocus sativus]
  misc_feature (1)..(120): NCBI GI NO: 37536402 NR Description: putative beta-carotene hydroxylase
  misc_feature (1)..(120): NCBI GI NO: 5870600 NR Description: beta-carotene hydroxylase
  misc_feature (1)..(134): NCBI GI NO: 21734857 NR Description: beta-carotene hydroxylase [Vitis vinifera]
  misc_feature (1)..(120): NCBI GI NO: 2956717 NR Description: beta-carotene hydroxylase 2 [Capsicum annuum]
  misc_feature (1)..(120): NCBI GI NO: 1575296 NR Description: beta-carotene hydroxylase [Arabidopsis thaliana]
  misc_feature (1)..(120): NCBI GI NO: 9971820 NR Description: beta hydroxylase [Tagetes erecta]
  misc_feature (92)..(92): Xaa is any aa, unknown or other
MHESHHRPREGPFELNDVFAIVNAAPAISLLAYGFFHRGIVPGLCFGAGLGITLFGMAYMFVHDGLVHRRFPVGPIADVPYFRRVAASHKIXHMDKFGGVPYGLFLGPKELEEVGGLDELVSSPVSEATDTEDAGEEKTRPVVCVVRTSVFMGQSVPNEF

SEQ ID NO: 38593 - DNA, 1763 bp, Zea mays subsp. mays
  misc_feature (1)..(1763): Ceres Seq. ID no. 12362600
gcacgagaccattacctagaacatcctaatcgaaaagagatagacagctagcttcatcagtaggatgggcagcgacgaggaagcggcgctgctggtgccggcggtggaggagggttgccccgggtgcgtgatggagcagcggaaggcgagcagcaacggcaggatcccctacagggagctgttcttcgtcgccgccacctccctcgcctcagctttaccgatcacgtgcctcttccccttcttgtatttcatggtaagggacttccgcgtcgctgaaacagaggaagacatcggattctatgctggttttcttgctgcgtcgtacatggtgggcagaggcttctcttccatcttctggggcgtcatcgcagaccgcgttggacggaagcctgtcatcacgttttcgatactgtccgtggtcgtattcagcgcgctgtttggtctgagcacgacgtactggatggcgatcgccacgaggctcgtgctgggcgctctcaacggcctgctcgccccgataaaggcgtactgcgttgaagtttgccagacccagcaccaggcgcttggactctcgcttgtgaacacggcatgggctctgggtctcattgttggtccagctcttggaggctacctttcgcagccagctgagaaatatcctcacgtgttttccaaagactctgtatttggcagatttccataccttttgccctgtctaagtgtatcagcgtttgctacacttgtcctgataagctgtgagtggcttccggagactatacacaagcataaggttcccgaaatggacaccaaagcattcaaagccctgtcgtcaaaagagggctattgcgatccacctcgcaagaagaagagcttgctccagaacaggccttggatatcaaccctgctaccttactgctttttcagtcttcatgacacagcatatagtgagatactttccttatgggctgtgagcgaccggaagtatggcggccttagcttctcgactgaagatactggtcaggttcttgctatggcaggcgctagtcttctagtgtaccagcttgtcatttatcgctgggtccataggattcttgggacagtcaactcagcacgtattgcatctgctgtgtccatacttgttcttgcaacttatccctttatgacatacctgtcgggagtgaaactttccttggctctttgttctgcagccatgatgagaagtgctcttgcgatcactgtcaccacaggaatttcacttctacagaataatgctgtgtgccaagaacaaagaggcaccgcaaatggtatatcgacaactgcaatgtcattcttcaagtcaattgctccagtaggtgcaggggctctattctcatgggcacaaaaacgtcaagatgttgctttcctgccaggtgatcaagtggtgttcatggtgctgaatttggtgcagcttctcgggctgatatccacctttgagccctttctagtgttacctgcactaccagagtagtagtagtgttaaggctacaggacattatgaaaataaatgtaccttggcacatagttacagttgatcgagtgcaagacagaaggaacatgattgtagccacttgttacactactaatgatgtctgattagcccaagattaaaaaagaagaatgttttattaattagcaaacttgatctattgtaatatcactgtgacacaaaacccatatttctaatcatatggtcgtggatgctcaaaatgtgcaataaagttgtgatattc

SEQ ID NO: 38594 - protein, 478 aa, Zea mays subsp. mays
  peptide (1)..(478): Ceres Seq. ID no. 12362601
  misc_feature (16)..(474): NCBI GI NO: 23452823 NR Description: major facilitator superfamily antiporter
  misc_feature (88)..(474): NCBI GI NO: 23452819 NR Description: major facilitator superfamily antiporter
  misc_feature (1)..(474): NCBI GI NO: 23452821 NR Description: major facilitator superfamily antiporter
  misc_feature (1)..(471): NCBI GI NO: 30684565 NR Description: transporter-related protein [Arabidopsis thaliana]
  misc_feature (5)..(471): NCBI GI NO: 22326785 NR Description: transporter-like protein; protein id: At5g13740
  misc_feature (1)..(471): NCBI GI NO: 15229781 NR Description: transporter-like protein; protein id: At3g43790.1
  misc_feature (35)..(471): NCBI GI NO: 20260160 NR Description: transporter-like protein [Arabidopsis thaliana]
  misc_feature (35)..(448): NCBI GI NO: 10177340 NR Description: transporter-like protein [Arabidopsis thaliana]
  misc_feature (88)..(471): NCBI GI NO: 30684567 NR Description: transporter-related protein [Arabidopsis thaliana]
  misc_feature (88)..(471): NCBI GI NO: 21555230 NR Description: transporter-like protein [Arabidopsis thaliana]
MGSDEEAALLVPAVEEGCPGCVMEQRKASSNGRIPYRELFFVAATSLASALPITCLFPFLYFMVRDFRVAETEEDIGFYAGFLAASYMVGRGFSSIFWGVIADRVGRKPVITFSILSVVVFSALFGLSTTYWMAIATRLVLGALNGLLAPIKAYCVEVCQTQHQALGLSLVNTAWALGLIVGPALGGYLSQPAEKYPHVFSKDSVFGRFPYLLPCLSVSAFATLVLISCEWLPETIHKHKVPEMDTKAFKALSSKEGYCDPPRKKKSLLQNRPWISTLLPYCFFSLHDTAYSEILSLWAVSDRKYGGLSFSTEDTGQVLAMAGASLLVYQLVIYRWVHRILGTVNSARIASAVSILVLATYPFMTYLSGVKLSLALCSAAMMRSALAITVTTGISLLQNNAVCQEQRGTANGISTTAMSFFKSIAPVGAGALFSWAQKRQDVAFLPGDQVVFMVLNLVQLLGLISTFEPFLVLPALPE

SEQ ID NO: 38595 - protein, 456 aa, Zea mays subsp. mays
  peptide (1)..(456): Ceres Seq. ID no. 12362602
  misc_feature (1)..(452): NCBI GI NO: 23452823 NR Description: major facilitator superfamily antiporter
  misc_feature (66)..(452): NCBI GI NO: 23452819 NR Description: major facilitator superfamily antiporter
  misc_feature (1)..(452): NCBI GI NO: 23452821 NR Description: major facilitator superfamily antiporter
  misc_feature (1)..(449): NCBI GI NO: 30684565 NR Description: transporter-related protein [Arabidopsis thaliana]
  misc_feature (1)..(449): NCBI GI NO: 22326785 NR Description: transporter-like protein; protein id: At5g13740
  misc_feature (1)..(449): NCBI GI NO: 15229781 NR Description: transporter-like protein; protein id: At3g43790.1
  misc_feature (13)..(449): NCBI GI NO: 20260160 NR Description: transporter-like protein [Arabidopsis thaliana]
  misc_feature (13)..(426): NCBI GI NO: 10177340 NR Description: transporter-like protein [Arabidopsis thaliana]
  misc_feature (66)..(449): NCBI GI NO: 30684567 NR Description: transporter-related protein [Arabidopsis thaliana]
  misc_feature (66)..(449): NCBI GI NO: 21555230 NR Description: transporter-like protein [Arabidopsis thaliana]
MEQRKASSNGRIPYRELFFVAATSLASALPITCLFPFLYFMVRDFRVAETEEDIGFYAGFLAASYMVGRGFSSIFWGVIADRVGRKPVITFSILSVVVFSALFGLSTTYWMAIATRLVLGALNGLLAPIKAYCVEVCQTQHQALGLSLVNTAWALGLIVGPALGGYLSQPAEKYPHVFSKDSVFGRFPYLLPCLSVSAFATLVLISCEWLPETIHKHKVPEMDTKAFKALSSKEGYCDPPRKKKSLLQNRPWISTLLPYCFFSLHDTAYSEILSLWAVSDRKYGGLSFSTEDTGQVLAMAGASLLVYQLVIYRWVHRILGTVNSARIASAVSILVLATYPFMTYLSGVKLSLALCSAAMMRSALAITVTTGISLLQNNAVCQEQRGTANGISTTAMSFFKSIAPVGAGALFSWAQKRQDVAFLPGDQVVFMVLNLVQLLGLISTFEPFLVLPALPE

SEQ ID NO: 38596 - protein, 416 aa, Zea mays subsp. mays; identical to SEQ ID NO: 22559
  peptide (1)..(416): Ceres Seq. ID no. 12362603
  misc_feature (1)..(412): NCBI GI NO: 23452823 NR Description: major facilitator superfamily antiporter
  misc_feature (26)..(412): NCBI GI NO: 23452819 NR Description: major facilitator superfamily antiporter
  misc_feature (1)..(412): NCBI GI NO: 23452821 NR Description: major facilitator superfamily antiporter
  misc_feature (1)..(409): NCBI GI NO: 30684565 NR Description: transporter-related protein [Arabidopsis thaliana]
  misc_feature (1)..(409): NCBI GI NO: 22326785 NR Description: transporter-like protein; protein id: At5g13740
  misc_feature (1)..(409): NCBI GI NO: 15229781 NR Description: transporter-like protein; protein id: At3g43790.1
  misc_feature (1)..(409): NCBI GI NO: 20260160 NR Description: transporter-like protein [Arabidopsis thaliana]
  misc_feature (1)..(386): NCBI GI NO: 10177340 NR Description: transporter-like protein [Arabidopsis thaliana]
  misc_feature (26)..(409): NCBI GI NO: 30684567 NR Description: transporter-related protein [Arabidopsis thaliana]
  misc_feature (26)..(409): NCBI GI NO: 21555230 NR Description: transporter-like protein [Arabidopsis thaliana]

SEQ ID NO: 38597 - DNA, 1388 bp, Zea mays subsp. mays
  misc_feature (1)..(1388): Ceres Seq. ID no. 12382787
gcacgagaccattacctagaacatcctaatcgaaaaaaacaaaaaaagggccttcacttgactccacagccacagctagctgctgtggtgaagagtagcaggttcggcggccgggagggggcagccaacacgacgatggagcggttcggcctggacggcggcggtggcggtggcgagctgccgccggggttccggttccacccgacggacgaggagctcatcacctactacctcctccgcaaggccgtggacggcagcttctgcggccgcgccatcgcggagatcgacctgaacaagtgcgagccatgggagctcccggacaaggcgaagatgggggagaaggagtggtacttctacagcctccgcgaccgcaagtacccgacgggcctgcgcaccaaccgcgccacggtggccggctactggaaggccaccggcaaggaccgcgagatccgcagcggccgcaccggcgcgctggtgggcatgaagaagacgctcgtcttctaccgcggccgcgcccccaagggacagaagacgcactgggtcatgcacgagtaccgcctcgagggcgcctacgcctaccatttcctccccagctccacaagggacgagtgggtgatcgcgagggtgttccagaagcccggcgaggtcccacctgcagcccgcaagcaccgcctcggcgcccttagcagcactaccggcaccgccgcgggcgattcctgcttctcggactctacctcggcctccatcggcggcgcgtcgtcgtcatccacgcctggcccgctgttcgcgtcggcggccgccgccgtggccaatgccggcgccgccgacggcgacaccagctcctactgcggcggcgctgccaaccatggcaacctggtcaccggccgtgagctcgtgccctgcttctccactgccaccattaacggccccctagttgccgccgcgctcggcatcgggcagccgtacaacgcagccccgctgccgttcgagcagcagccgccgcctccggccttcctgccgagcctgcgttcccttcaggacaacctccagcttccaccgttcctctcagcaggcggtctgggcggcggcggggctctccactggctccccgccggcggcatggaggtcaaggtcgagggccgctcggcgccaccgcagatggctgtcggccccggccagctcgatggcgctttcggctggagcttctagttcttcgctgcactacatggttgtgcccatctatctagctagtagtggtttcttcatgcgttgtacgttaagcttggttaatcaactgctagtaagtgactgggtcgtcgttctaagtaatgtagtaactgtgttgtagtctctcatctaactgcagtagcagctttatttgttcgtgg

SEQ ID NO: 38598 - protein, 402 aa, Zea mays subsp. mays
  peptide (1)..(402): Ceres Seq. ID no. 12382788
  misc_feature (60)..(188): Pfam Name: NAM Pfam Description: No apical meristem
  misc_feature (52)..(373): NCBI GI NO: 15238882 NR Description: CUC2 (dbj|BAA19529.1); protein id: At5g53950.1
  misc_feature (60)..(212): NCBI GI NO: 1279640 NR Description: NAM [Petunia x hybrida]
  misc_feature (60)..(338): NCBI GI NO: 11994506 NR Description: contains similarity to NAM
  misc_feature (60)..(338): NCBI GI NO: 15232511 NR Description: NAM-like protein; protein id: At3g15170
  misc_feature (59)..(230): NCBI GI NO: 15240252 NR Description: NAM, no apical meristem, - like protein
  misc_feature (59)..(230): NCBI GI NO: 21537315 NR Description: NAM, no apical meristem,-like protein
  misc_feature (59)..(245): NCBI GI NO: 30682048 NR Description: NAM (no apical meristem)-related protein
  misc_feature (59)..(245): NCBI GI NO: 30682054 NR Description: NAM (no apical meristem)-related protein
  misc_feature (59)..(216): NCBI GI NO: 22597158 NR Description: no apical meristem-like protein [Glycine max]
  misc_feature (53)..(212): NCBI GI NO: 30686737 NR Description: NAM (no apical meristem)-related protein
ARDHYLEHPNRKKQKKGLHLTPQPQLAAVVKSSRFGGREGAANTTMERFGLDGGGGGGELPPGFRFHPTDEELITYYLLRKAVDGSFCGRAIAEIDLNKCEPWELPDKAKMGEKEWYFYSLRDRKYPTGLRTNRATVAGYWKATGKDREIRSGRTGALVGMKKTLVFYRGRAPKGQKTHWVMHEYRLEGAYAYHFLPSSTRDEWVIARVFQKPGEVPPAARKHRLGALSSTTGTAAGDSCFSDSTSASIGGASSSSTPGPLFASAAAAVANAGAADGDTSSYCGGAANHGNLVTGRELVPCFSTATINGPLVAAALGIGQPYNAAPLPFEQQPPPPAFLPSLRSLQDNLQLPPFLSAGGLGGGGALHWLPAGGMEVKVEGRSAPPQMAVGPGQLDGAFGWSF

SEQ ID NO: 38599 - protein, 357 aa, Zea mays subsp. mays
  peptide (1)..(357): Ceres Seq. ID no. 12382789
  misc_feature (15)..(143): Pfam Name: NAM Pfam Description: No apical meristem
  misc_feature (7)..(328): NCBI GI NO: 15238882 NR Description: CUC2 (dbj|BAA19529.1); protein id: At5g53950.1
  misc_feature (15)..(167): NCBI GI NO: 1279640 NR Description: NAM [Petunia x hybrida]
  misc_feature (15)..(293): NCBI GI NO: 11994506 NR Description: contains similarity to NAM
  misc_feature (15)..(293): NCBI GI NO: 15232511 NR Description: NAM-like protein; protein id: At3g15170
  misc_feature (14)..(185): NCBI GI NO: 15240252 NR Description: NAM, no apical meristem, - like protein
  misc_feature (14)..(185): NCBI GI NO: 21537315 NR Description: NAM, no apical meristem,-like protein
  misc_feature (14)..(200): NCBI GI NO: 30682048 NR Description: NAM (no apical meristem)-related protein
  misc_feature (14)..(200): NCBI GI NO: 30682054 NR Description: NAM (no apical meristem)-related protein
  misc_feature (14)..(171): NCBI GI NO: 22597158 NR Description: no apical meristem-like protein [Glycine max]
  misc_feature (8)..(167): NCBI GI NO: 30686737 NR Description: NAM (no apical meristem)-related protein
MERFGLDGGGGGGELPPGFRFHPTDEELITYYLLRKAVDGSFCGRAIAEIDLNKCEPWELPDKAKMGEKEWYFYSLRDRKYPTGLRTNRATVAGYWKATGKDREIRSGRTGALVGMKKTLVFYRGRAPKGQKTHWVMHEYRLEGAYAYHFLPSSTRDEWVIARVFQKPGEVPPAARKHRLGALSSTTGTAAGDSCFSDSTSASIGGASSSSTPGPLFASAAAAVANAGAADGDTSSYCGGAANHGNLVTGRELVPCFSTATINGPLVAAALGIGQPYNAAPLPFEQQPPPPAFLPSLRSLQDNLQLPPFLSAGGLGGGGALHWLPAGGMEVKVEGRSAPPQMAVGPGQLDGAFGWSF

SEQ ID NO: 38600 - protein, 292 aa, Zea mays subsp. mays
  peptide (1)..(292): Ceres Seq. ID no. 12382790
  misc_feature (1)..(78): Pfam Name: NAM Pfam Description: No apical meristem
  misc_feature (1)..(263): NCBI GI NO: 15238882 NR Description: CUC2 (dbj|BAA19529.1); protein id: At5g53950.1
  misc_feature (1)..(102): NCBI GI NO: 1279640 NR Description: NAM [Petunia x hybrida]
  misc_feature (1)..(228): NCBI GI NO: 11994506 NR Description: contains similarity to NAM
  misc_feature (1)..(228): NCBI GI NO: 15232511 NR Description: NAM-like protein; protein id: At3g15170
  misc_feature (1)..(120): NCBI GI NO: 15240252 NR Description: NAM, no apical meristem, - like protein
  misc_feature (1)..(120): NCBI GI NO: 21537315 NR Description: NAM, no apical meristem,-like protein
  misc_feature (1)..(135): NCBI GI NO: 30682048 NR Description: NAM (no apical meristem)-related protein
  misc_feature (1)..(135): NCBI GI NO: 30682054 NR Description: NAM (no apical meristem)-related protein
  misc_feature (1)..(106): NCBI GI NO: 22597158 NR Description: no apical meristem-like protein [Glycine max]
  misc_feature (1)..(102): NCBI GI NO: 30686737 NR Description: NAM (no apical meristem)-related protein
MGEKEWYFYSLRDRKYPTGLRTNRATVAGYWKATGKDREIRSGRTGALVGMKKTLVFYRGRAPKGQKTHWVMHEYRLEGAYAYHFLPSSTRDEWVIARVFQKPGEVPPAARKHRLGALSSTTGTAAGDSCFSDSTSASIGGASSSSTPGPLFASAAAAVANAGAADGDTSSYCGGAANHGNLVTGRELVPCFSTATINGPLVAAALGIGQPYNAAPLPFEQQPPPPAFLPSLRSLQDNLQLPPFLSAGGLGGGGALHWLPAGGMEVKVEGRSAPPQMAVGPGQLDGAFGWSF

SEQ ID NO: 38601 - DNA, 1143 bp, Zea mays subsp. mays
  misc_feature (1)..(1143): Ceres Seq. ID no. 12350692
actcccaccttcttggagacaccgccaggcgccatcttccggccgctgcccgcctgccccccccgggaggtcgaactgccttctagagccctctcctgttttcaggcgaatgtgcaggtagcttgacgtctgatgaacgctcagccatgctgctgatgctacacgaaactcttcctttcgtgaggccgacgagttcttgccgggacccaaaactctccgagaagagtgcctctgctctccacggtaaattgggatgcagtgcggtctgcagttcagcggaaggccatcgtgtacagaagccacacattgttcacagctacaaagttagcttcactaggaccagccatcatctgtgtaaaagcttaaacgagagaactacaaggcactgcctgcatcggttccatgttaatgcttcgcccgatgacgacgacttccgctcgtcgcgtaacatagcgatcagtttgttcaagcggtacaagaatgtcattgaccgaggaggtggagaaaacctaaatgagtttgtcagtgctggagtgaccgcttacgcactagggtgtacagatgaggggcttagaaaggaacttatggatattgaagattctggtctggagattgaaggcttagggtccttggggggcaccagcctcaagttcaaagtccactcctttgagatccgtgagtgcatcctgtggctcagtatagtgttcgtcacaatactgtgcacaccacaactaacagttatcaggtggtctccgaacccaccggtgtcagccgacgtcttgcatcagtggaaaggattctgtgctctaatcgcgaacgcttactatgtcaaaggaatggcatggttgccagtgaaaaccttgcagctggaacagatggctgtcacaggaagttcagagaaaccatcagtagttgctagccgcatgcagttagttttcagcacattagaggtagtcagcccacagtggccaagagtgtgattagatgaaagcaataccatcaaacaaaggtctgcagttttattctgaccaaaagatatgcatgtccaagttagcaagttcaaacctctgtcatggtgcaaacagatgatactatatccatttgaactctaatgtcaaataaaaatgctaatgtacttgttgg

SEQ ID NO: 38602 - protein, 277 aa, Zea mays subsp. mays
  peptide (1)..(277): Ceres Seq. ID no. 12350693
  misc_feature (2)..(277): NCBI GI NO: 30017575 NR Description: unknown protein
  misc_feature (88)..(277): NCBI GI NO: 15220740 NR Description: unknown protein; protein id: At1g62250
MLLMLHETLPFVRPTSSCRDPKLSEKSASALHGKLGCSAVCSSAEGHRVQKPHIVHSYKVSFTRTSHHLCKSLNERTTRHCLHRFHVNASPDDDDFRSSRNIAISLFKRYKNVIDRGGGENLNEFVSAGVTAYALGCTDEGLRKELMDIEDSGLEIEGLGSLGGTSLKFKVHSFEIRECILWLSIVFVTILCTPQLTVIRWSPNPPVSADVLHQWKGFCALIANAYYVKGMAWLPVKTLQLEQMAVTGSSEKPSVVASRMQLVFSTLEVVSPQWPRV

SEQ ID NO: 38603 - protein, 274 aa, Zea mays subsp. mays
  peptide (1)..(274): Ceres Seq. ID no. 12350694
  misc_feature (1)..(274): NCBI GI NO: 30017575 NR Description: unknown protein
  misc_feature (85)..(274): NCBI GI NO: 15220740 NR Description: unknown protein; protein id: At1g62250
MLHETLPFVRPTSSCRDPKLSEKSASALHGKLGCSAVCSSAEGHRVQKPHIVHSYKVSFTRTSHHLCKSLNERTTRHCLHRFHVNASPDDDDFRSSRNIAISLFKRYKNVIDRGGGENLNEFVSAGVTAYALGCTDEGLRKELMDIEDSGLEIEGLGSLGGTSLKFKVHSFEIRECILWLSIVFVTILCTPQLTVIRWSPNPPVSADVLHQWKGFCALIANAYYVKGMAWLPVKTLQLEQMAVTGSSEKPSVVASRMQLVFSTLEVVSPQWPRV

SEQ ID NO: 38604 - DNA, 1569 bp, Zea mays subsp. mays
  misc_feature (1)..(1569): Ceres Seq. ID no. 12383339
ctacgccaagcgcgcaattaaccctcactaaagggaacaaaagctggagctccaccgcggtggcggccgctctagaactagtggatcccccgggctgcaggaattcgcacgagaccattacctagaacatcctaatcgaaaaaagttcaggaaaggggagcctcaaaaggagagggagagtgagagggaggggaagtgcgctgcagtgctgcgcagctgcgctggggagaagagaagaaggtgccaaccacttcccaaggagaccgccagctctgctgctgcacgaccgaccagcccgtccactcgcctcgccttcctccgaaccccggcgaggaagaggaacccgccgccgccgccggacgcacttccgatggcgacgccacggaagccgatcaagctcacgctgccgtcccacgagaccaccatcggcaagttcctgacgcacagcgggacgttcacggacggggatctgcgcgtgaacaaggacggcctccgcatcgtctcgcggagggagggaggcgaggctcctcctatagagccactggatagtcaactgagcttagatgatctagacgttataaaagtgatcgggaaaggtagcagtggaaatgtgcaattggtccgccacaaatttactggccagttttttgctctgaaggttattcaactaaatattgatgagagtatacgcaaacagattgccaaggagttgaagataaacttatcaacacagtgccaatatgttgttgtgttctatcagtgtttctatttcaatggcgccatttctattgttttggaatacatggatggtggctcccttgcagatttcctgaagactgttaaaaccattccagaggcctacctcgctgctatctgtacgcagatgctaaaaggactgatctacttgcataacgagaagcgcgttatacaccgagatctgaaaccatcaaatatattgataaatcataggggtgaagtaaaaatatcagattttggtgtgagtgccattatctctagttcctcttcgcaacgagatacatttattggcacacgcaactacatggcgccagaaagaatcgataaagaaacatggttctatgagtgatatctggagtttgggactagtgatactggaatgtgcaaccggcatctttccatttcctccttgtgaaagcttctacgaacttctcgtagctgttgttgatcaaccgccaccttctgcaccaccggatcagttttcaccagaattctgtgcgttcatttctgcatgtctccagaaggatgctaatgacaggtcatcagcacaagccttattggaccatccattcctgagcatgtatgatgacctgcatgtagatcttgcttcgtacttcacgacagcaggatctcccctcgccaccttcaagtcggtgattggctccatcactttacttatatgacatacatgtacagccttttaggataaaaatgagcactgaagttttgcctatctgtatatcggcagcaacgtttggtcatgtttgtttcaccttgtaatgtattgactcagatatgggattggtcattgtc

SEQ ID NO: 38605 - protein, 244 aa, Zea mays subsp. mays
  peptide (1)..(244): Ceres Seq. ID no. 12383340
  misc_feature (67)..(243): Pfam Name: Pfam Description:  Protein kinase domain
  misc_feature (6)..(243): NCBI GI NO: 22797196 NR Description: putative mitogen-activated protein kinase kinase
  misc_feature (4)..(236): NCBI GI NO: 37625027 NR Description: putative mitogen-activated protein kinase kinase
  misc_feature (8)..(237): NCBI GI NO: 15528441 NR Description: MAP kinase kinase [Medicago sativa subsp. x varia]
  misc_feature (8)..(236): NCBI GI NO: 7682432 NR Description: MAP kinase kinase [Nicotiana tabacum]
  misc_feature (8)..(236): NCBI GI NO: 15233715 NR Description: MAP kinase kinase 2; protein id: At4g29810
  misc_feature (8)..(236): NCBI GI NO: 11259772 NR Description: mitogen-activated protein kinase kinase (EC 2
  misc_feature (8)..(244): NCBI GI NO: 9843771 NR Description: MAP kinase kinase [Lycopersicon esculentum]
  misc_feature (8)..(244): NCBI GI NO: 7434316 NR Description: protein kinase MEK1 - tomato
  misc_feature (7)..(236): NCBI GI NO: 15236108 NR Description: mitogen activated protein kinase kinase
  misc_feature (4)..(244): NCBI GI NO: 12718822 NR Description: NQK1 MAPKK [Nicotiana tabacum]
MATPRKPIKLTLPSHETTIGKFLTHSGTFTDGDLRVNKDGLRIVSRREGGEAPPIEPLDSQLSLDDLDVIKVIGKGSSGNVQLVRHKFTGQFFALKVIQLNIDESIRKQIAKELKINLSTQCQYVVVFYQCFYFNGAISIVLEYMDGGSLADFLKTVKTIPEAYLAAICTQMLKGLIYLHNEKRVIHRDLKPSNILINHRGEVKISDFGVSAIISSSSSQRDTFIGTRNYMAPERIDKETWFYE

SEQ ID NO: 38606 - DNA, 1722 bp, Zea mays subsp. mays
  misc_feature (1)..(1722): Ceres Seq. ID no. 12361452
gcacgagaccattacctagaacatcctaatcgaaaaaaaaataaaaaaattgggtgtttacaacgaattttaggtcttggccccttgggctcttggtccaagcgattttttttctgtgggccgttgggtccgtggaacatatccgttgcagaagactacagattgcagaagcgctcgctcgctgttgttgctgctgccaactgaagggatgcgagccacggccaccgcaggaggccgtgcggtgttccacctccaacacctctgcccgcgcccgccatggcgagctcttcctcctgctgccaccacgcacctctcccgctccgcgccagcgaggcgagccgaccaccgttgcctccccaaaggtttcttatcaactctagaaccggggatttcaggagtctccttgtgtcggcgtgctcatgcaacatgtagctattctttggatgacaagttacagggagagctagatgatatacagggagaacagagaaagctagaaacagttggtgcgtttcagaaaataccaatggtgatgcctgcaactgatatactaatgtcagcacaaaggaaatctagaaatgtgccaccaacaaagggtatagcaaatattgctaagcgtgaaaggaacaaaggtgcgaaacagcttgatgccttaatgaaagaactttctgtaccgctgagaacatacacagaaaacttcccaaagaggagagatttgcatccttatgagaggtctctcattgagttgacttttggggagggttattatgagcaggttctaggacgtgtagatactctcaggaaaaggattacttctgttggaaagcaacatgcttcagtctgtgctaagtcaacaacaaaacgtgaagcagaggaacgcctcactgagggcagaaagaaactcgaagaggctttccagcatgggaagcacgccattgatgatttagtaaatgtagcaaaggctttgcgttctatgcctgttgttgatctacatattccaacactatgtctagttggatcacccaatgtggggaagtcatctttagtccggatattatcatctggaaaacctgaggtctgcagctacccattcacaacaagagggattctaatgggtcacattgtatctaatcaggaacgttttcaggttacggacactccaggactcctgacaaggcatgatgatgacagaaataacatagagcgattgacactcgctgtcctttcttatctacctattgctgtcctgtatgtgcatgatctatccgaagactgtgggacctcagtggccgatcagtacatcacgtacaagcatattaaggacagattcggtgaccgcctatggcttgatgttatatccaaatgcgatcttttgggaaagaaagagcccataagttttcacgatgctgatgacgatgtagcacggtacagaagattggggccagaaggcgccctccaagtatctgtgcagagcgaaatcggcgtcaaacagcttaaggaaagagtgcatgagctgctgacctctcagatggctcggatcaaatctaccaaggcggagcctgaaacacaggaagtagggactagtgttgtttactgaagtttgacaataataaggattcgaatatcatgctgggtgtccgcgtaaacattcaatgtcgatgatggtaacacattccatctgttgtccttttgtccatttggaaagggtggtcagaattgccc

SEQ ID NO: 38607 - protein, 462 aa, Zea mays subsp. mays
  peptide (1)..(462): Ceres Seq. ID no. 12361453
  misc_feature (259)..(388): Pfam Name: Pfam Description:  GTP1/OBG family
  misc_feature (94)..(454): NCBI GI NO: 34905188 NR Description: putative GTP-binding protein
  misc_feature (97)..(458): NCBI GI NO: 15220827 NR Description: GTP-binding protein, putative
  misc_feature (97)..(458): NCBI GI NO: 25406691 NR Description: hypothetical protein F23A5.12
  misc_feature (102)..(452): NCBI GI NO: 14591132 NR Description: hypothetical protein [Pyrococcus horikoshii]
  misc_feature (102)..(452): NCBI GI NO: 14521033 NR Description: GTP-BINDING PROTEIN, GTP1/OBG FAMILY
  misc_feature (102)..(441): NCBI GI NO: 12847799 NR Description: unnamed protein product [Mus musculus]
  misc_feature (102)..(452): NCBI GI NO: 18977867 NR Description: GTP-binding protein, gtp1/obg family
  misc_feature (102)..(448): NCBI GI NO: 34933235 NR Description: similar to GTP-binding protein NGB
  misc_feature (102)..(448): NCBI GI NO: 28374270 NR Description: similar to G protein-binding protein CRFG
  misc_feature (102)..(448): NCBI GI NO: 6912532 NR Description: G protein-binding protein CRFG
MRATATAGGRAVFHLQHLCPRPPWRALPPAATTHLSRSAPARRADHRCLPKGFLSTLEPGISGVSLCRRAHATCSYSLDDKLQGELDDIQGEQRKLETVGAFQKIPMVMPATDILMSAQRKSRNVPPTKGIANIAKRERNKGAKQLDALMKELSVPLRTYTENFPKRRDLHPYERSLIELTFGEGYYEQVLGRVDTLRKRITSVGKQHASVCAKSTTKREAEERLTEGRKKLEEAFQHGKHAIDDLVNVAKALRSMPVVDLHIPTLCLVGSPNVGKSSLVRILSSGKPEVCSYPFTTRGILMGHIVSNQERFQVTDTPGLLTRHDDDRNNIERLTLAVLSYLPIAVLYVHDLSEDCGTSVADQYITYKHIKDRFGDRLWLDVISKCDLLGKKEPISFHDADDDVARYRRLGPEGALQVSVQSEIGVKQLKERVHELLTSQMARIKSTKAEPETQEVGTSVVY

SEQ ID NO: 38608 - protein, 356 aa, Zea mays subsp. mays
  peptide (1)..(356): Ceres Seq. ID no. 12361454
  misc_feature (153)..(282): Pfam Name: Pfam Description:  GTP1/OBG family
  misc_feature (1)..(348): NCBI GI NO: 34905188 NR Description: putative GTP-binding protein
  misc_feature (1)..(352): NCBI GI NO: 15220827 NR Description: GTP-binding protein, putative
  misc_feature (1)..(352): NCBI GI NO: 25406691 NR Description: hypothetical protein F23A5.12
  misc_feature (1)..(346): NCBI GI NO: 14591132 NR Description: hypothetical protein [Pyrococcus horikoshii]
  misc_feature (1)..(346): NCBI GI NO: 14521033 NR Description: GTP-BINDING PROTEIN, GTP1/OBG FAMILY
  misc_feature (1)..(335): NCBI GI NO: 12847799 NR Description: unnamed protein product [Mus musculus]
  misc_feature (1)..(346): NCBI GI NO: 18977867 NR Description: GTP-binding protein, gtp1/obg family
  misc_feature (1)..(342): NCBI GI NO: 34933235 NR Description: similar to GTP-binding protein NGB
  misc_feature (1)..(342): NCBI GI NO: 28374270 NR Description: similar to G protein-binding protein CRFG
  misc_feature (1)..(342): NCBI GI NO: 6912532 NR Description: G protein-binding protein CRFG
MVMPATDILMSAQRKSRNVPPTKGIANIAKRERNKGAKQLDALMKELSVPLRTYTENFPKRRDLHPYERSLIELTFGEGYYEQVLGRVDTLRKRITSVGKQHASVCAKSTTKREAEERLTEGRKKLEEAFQHGKHAIDDLVNVAKALRSMPVVDLHIPTLCLVGSPNVGKSSLVRILSSGKPEVCSYPFTTRGILMGHIVSNQERFQVTDTPGLLTRHDDDRNNIERLTLAVLSYLPIAVLYVHDLSEDCGTSVADQYITYKHIKDRFGDRLWLDVISKCDLLGKKEPISFHDADDDVARYRRLGPEGALQVSVQSEIGVKQLKERVHELLTSQMARIKSTKAEPETQEVGTSVVY

SEQ ID NO: 38609 - protein, 354 aa, Zea mays subsp. mays
  peptide (1)..(354): Ceres Seq. ID no. 12361455
  misc_feature (151)..(280): Pfam Name: Pfam Description:  GTP1/OBG family
  misc_feature (1)..(346): NCBI GI NO: 34905188 NR Description: putative GTP-binding protein
  misc_feature (1)..(350): NCBI GI NO: 15220827 NR Description: GTP-binding protein, putative
  misc_feature (1)..(350): NCBI GI NO: 25406691 NR Description: hypothetical protein F23A5.12
  misc_feature (1)..(344): NCBI GI NO: 14591132 NR Description: hypothetical protein [Pyrococcus horikoshii]
  misc_feature (1)..(344): NCBI GI NO: 14521033 NR Description: GTP-BINDING PROTEIN, GTP1/OBG FAMILY
  misc_feature (1)..(333): NCBI GI NO: 12847799 NR Description: unnamed protein product [Mus musculus]
  misc_feature (1)..(344): NCBI GI NO: 18977867 NR Description: GTP-binding protein, gtp1/obg family
  misc_feature (1)..(340): NCBI GI NO: 34933235 NR Description: similar to GTP-binding protein NGB
  misc_feature (1)..(340): NCBI GI NO: 28374270 NR Description: similar to G protein-binding protein CRFG
  misc_feature (1)..(340): NCBI GI NO: 6912532 NR Description: G protein-binding protein CRFG
MPATDILMSAQRKSRNVPPTKGIANIAKRERNKGAKQLDALMKELSVPLRTYTENFPKRRDLHPYERSLIELTFGEGYYEQVLGRVDTLRKRITSVGKQHASVCAKSTTKREAEERLTEGRKKLEEAFQHGKHAIDDLVNVAKALRSMPVVDLHIPTLCLVGSPNVGKSSLVRILSSGKPEVCSYPFTTRGILMGHIVSNQERFQVTDTPGLLTRHDDDRNNIERLTLAVLSYLPIAVLYVHDLSEDCGTSVADQYITYKHIKDRFGDRLWLDVISKCDLLGKKEPISFHDADDDVARYRRLGPEGALQVSVQSEIGVKQLKERVHELLTSQMARIKSTKAEPETQEVGTSVVY

SEQ ID NO: 38610 - DNA, 1296 bp, Zea mays subsp. mays
  misc_feature (1)..(1296): Ceres Seq. ID no. 12415205
tacgccaagcgcgcaattaaccctcactaaagggaacaaaagctggagctccaccgcggtggcggccgctctagaactagtggatcccccgggctgcaggaattcgcacgagaccattacctagaacatcctaatcaaaaactagtgtgcagaaacatggcgcgaagcagcagcccagctaggatggccatgttgctgctcttgctctcggccctcgcagtgctcttcccacccgccgtggccgacgacctgctctccgtggacttccacgccgcgtcgtgcccgcagctggaccgcatcgtgcgcaccgccgtgcaggccgccctccggagggagatcgcgctcgccgcgggcctcctccgcatcttcttccacgactgcttcccgcagggctgcgacgcgtccgtgctcctcaagggcaacgccacggagcagaccatggggcccaacaccacgctgcagccgcgggcgctgcagctcatcgacgacatccgcgccaaggtgcacgccgcctgcgggcccaccgtgtcctgcgccgacgtcacggcgctcgccacccgcgccgccgtcgtcgcgtcggggggaccctcctaccccgtgcccctgggccagcgcgacagcctcgccccggcgcccgaggacgacgtcaacgcgctcccgtcgcccaccaccgccagcgtcccggagctcctggcggcgttccggggcaggggcatccgcgacgtggccgacctggtcgcgctctccggtgctcacaccgtcgggagggccatctgccccttcttccaggaccgcgccgacagccaggaggatgacttcgccaggcagctcaaggccgactgcgccagggaccccaaccggctgcagcagctggacgtcgtcacgcccgatgccttcgacaacgtctactacaagaacctcaacgccagccggggcgtcttcacgtccgacatggcgctcatcagggaccctacaacggcgccgatcgtcaggtgcttcgcggggagcaaggacgccttcttcgcccagttcgccacctccatggtcaagctcagcaaggtgcccaggaagccccccgggaacgtcggcgagatccgccgccgcagctgcttcaggaccaataacgccaagatgagcatccttgacgtcgacgatgccgtgggcagcttggcggcggcgtctgcccgttgaccaacaccaactattatattacctgctggctgtggctgctgtacgcctgtactgtactaggcgtcgtcggcgccttacgtgtatgtcctgtacgactgttatctt

SEQ ID NO: 38611 - protein, 344 aa, Zea mays subsp. mays
  peptide (1)..(344): Ceres Seq. ID no. 12415206
  misc_feature (49)..(282): Pfam Name: Pfam Description:  Peroxidase
  misc_feature (8)..(341): NCBI GI NO: 38345508 NR Description: OSJNBa0039K24.10
  misc_feature (9)..(341): NCBI GI NO: 38345511 NR Description: OSJNBa0039K24.14
  misc_feature (33)..(341): NCBI GI NO: 5777624 NR Description: CAA303712.1 protein [Oryza sativa]
  misc_feature (1)..(339): NCBI GI NO: 5777627 NR Description: CAA303715.1 protein [Oryza sativa]
  misc_feature (1)..(339): NCBI GI NO: 38345507 NR Description: OSJNBa0039K24.8
  misc_feature (6)..(341): NCBI GI NO: 5777628 NR Description: CAA303716.1 protein [Oryza sativa]
  misc_feature (27)..(341): NCBI GI NO: 5777625 NR Description: CAA303713.1 protein [Oryza sativa]
  misc_feature (1)..(324): NCBI GI NO: 7433075 NR Description: probable peroxidase (EC 1
  misc_feature (8)..(341): NCBI GI NO: 38345506 NR Description: OSJNBa0039K24.4
  misc_feature (8)..(329): NCBI GI NO: 7433070 NR Description: probable peroxidase (EC 1.11.1.7), cationic - rice
MARSSSPARMAMLLLLLSALAVLFPPAVADDLLSVDFHAASCPQLDRIVRTAVQAALRREIALAAGLLRIFFHDCFPQGCDASVLLKGNATEQTMGPNTTLQPRALQLIDDIRAKVHAACGPTVSCADVTALATRAAVVASGGPSYPVPLGQRDSLAPAPEDDVNALPSPTTASVPELLAAFRGRGIRDVADLVALSGAHTVGRAICPFFQDRADSQEDDFARQLKADCARDPNRLQQLDVVTPDAFDNVYYKNLNASRGVFTSDMALIRDPTTAPIVRCFAGSKDAFFAQFATSMVKLSKVPRKPPGNVGEIRRRSCFRTNNAKMSILDVDDAVGSLAAASAR

SEQ ID NO: 38612 - protein, 335 aa, Zea mays subsp. mays
  peptide (1)..(335): Ceres Seq. ID no. 12415207
  misc_feature (40)..(273): Pfam Name: Pfam Description:  Peroxidase
  misc_feature (1)..(332): NCBI GI NO: 38345508 NR Description: OSJNBa0039K24.10
  misc_feature (1)..(332): NCBI GI NO: 38345511 NR Description: OSJNBa0039K24.14
  misc_feature (24)..(332): NCBI GI NO: 5777624 NR Description: CAA303712.1 protein [Oryza sativa]
  misc_feature (1)..(330): NCBI GI NO: 5777627 NR Description: CAA303715.1 protein [Oryza sativa]
  misc_feature (1)..(330): NCBI GI NO: 38345507 NR Description: OSJNBa0039K24.8
  misc_feature (1)..(332): NCBI GI NO: 5777628 NR Description: CAA303716.1 protein [Oryza sativa]
  misc_feature (18)..(332): NCBI GI NO: 5777625 NR Description: CAA303713.1 protein [Oryza sativa]
  misc_feature (1)..(315): NCBI GI NO: 7433075 NR Description: probable peroxidase (EC 1
  misc_feature (1)..(332): NCBI GI NO: 38345506 NR Description: OSJNBa0039K24.4
  misc_feature (1)..(320): NCBI GI NO: 7433070 NR Description: probable peroxidase (EC 1.11.1.7), cationic - rice
MAMLLLLLSALAVLFPPAVADDLLSVDFHAASCPQLDRIVRTAVQAALRREIALAAGLLRIFFHDCFPQGCDASVLLKGNATEQTMGPNTTLQPRALQLIDDIRAKVHAACGPTVSCADVTALATRAAVVASGGPSYPVPLGQRDSLAPAPEDDVNALPSPTTASVPELLAAFRGRGIRDVADLVALSGAHTVGRAICPFFQDRADSQEDDFARQLKADCARDPNRLQQLDVVTPDAFDNVYYKNLNASRGVFTSDMALIRDPTTAPIVRCFAGSKDAFFAQFATSMVKLSKVPRKPPGNVGEIRRRSCFRTNNAKMSILDVDDAVGSLAAASAR

SEQ ID NO: 38613 - protein, 333 aa, Zea mays subsp. mays
  peptide (1)..(333): Ceres Seq. ID no. 12415208
  misc_feature (38)..(271): Pfam Name: Pfam Description:  Peroxidase
  misc_feature (1)..(330): NCBI GI NO: 38345508 NR Description: OSJNBa0039K24.10
  misc_feature (1)..(330): NCBI GI NO: 38345511 NR Description: OSJNBa0039K24.14
  misc_feature (22)..(330): NCBI GI NO: 5777624 NR Description: CAA303712.1 protein [Oryza sativa]
  misc_feature (1)..(328): NCBI GI NO: 5777627 NR Description: CAA303715.1 protein [Oryza sativa]
  misc_feature (1)..(328): NCBI GI NO: 38345507 NR Description: OSJNBa0039K24.8
  misc_feature (1)..(330): NCBI GI NO: 5777628 NR Description: CAA303716.1 protein [Oryza sativa]
  misc_feature (16)..(330): NCBI GI NO: 5777625 NR Description: CAA303713.1 protein [Oryza sativa]
  misc_feature (1)..(313): NCBI GI NO: 7433075 NR Description: probable peroxidase (EC 1
  misc_feature (1)..(330): NCBI GI NO: 38345506 NR Description: OSJNBa0039K24.4
  misc_feature (1)..(318): NCBI GI NO: 7433070 NR Description: probable peroxidase (EC 1.11.1.7), cationic - rice
MLLLLLSALAVLFPPAVADDLLSVDFHAASCPQLDRIVRTAVQAALRREIALAAGLLRIFFHDCFPQGCDASVLLKGNATEQTMGPNTTLQPRALQLIDDIRAKVHAACGPTVSCADVTALATRAAVVASGGPSYPVPLGQRDSLAPAPEDDVNALPSPTTASVPELLAAFRGRGIRDVADLVALSGAHTVGRAICPFFQDRADSQEDDFARQLKADCARDPNRLQQLDVVTPDAFDNVYYKNLNASRGVFTSDMALIRDPTTAPIVRCFAGSKDAFFAQFATSMVKLSKVPRKPPGNVGEIRRRSCFRTNNAKMSILDVDDAVGSLAAASAR

SEQ ID NO: 38614 - DNA, 931 bp, Zea mays subsp. mays
  misc_feature (1)..(931): Ceres Seq. ID no. 13622442
aggatatgtcacgactcacgacgacggaaacagtagtgctgccagtagagagctctcagaactcgggaaaaaaatgtcagaggccgccgtgcgtgtgatcggcctatggccgagcccgttcgtgatccgcgtcctgatcgccctgaagctgaagggcgtcgagttcgagttcgtggaggaggtggtgggcaggaagagcgagctgctgctgaggtcgaacccggtgcacaagaagatccccgtcctgctccaccacggcaagcccatctccgagtctctgatcgtcgtccagtacatcgacgaggtctggtcctccggcgcgccggccttcctccccgtcgacgctcacgcccgcgccgtccagcggttctgggcgcagtacgtcgacgacaagctgccttgggcgatccgcatactgaagggaacggacgacgggggcatggagcaggcggcggggcagctgtccgcggccctgcagctcctagaggaggctttcgcgcagctcagccaggggaagcgctacttcggcggggacagcgtcgggtacctggacatcgctctggtgtcgcatgtcggctgggtgaaggcggtggagaagatcgccggggtcaccctgctggacaaggccaaggtcccgaacctggtggcgtgggctgatcgtctgtgtgcccacccggccgtggtcgacgccatccctgacgcggacaagttcgttgagttcagcgtcacctatggctccttttcgaagcctatcaatgctcccgccaagtgagcaaaaagggtccgtgcatgctttcgtcattttcactttcactgcgcgtgtgccggtgcgtgtcaaaattgcatagcaaggggattcttctcccacatagatcttcttgtgatcatagtcaccaaatcagctctgaaaatgaagattttctgcccttcc

SEQ ID NO: 38615 - protein, 256 aa, Zea mays subsp. mays
  peptide (1)..(256): Ceres Seq. ID no. 13622443
  misc_feature (25)..(256): NCBI GI NO: 11385513 NR Description: glutathione S-transferase GST 31 [Zea mays]
  misc_feature (25)..(248): NCBI GI NO: 11385519 NR Description: glutathione S-transferase GST 34 [Zea mays]
  misc_feature (29)..(256): NCBI GI NO: 37536246 NR Description: putative glutathione S-transferase
  misc_feature (19)..(254): NCBI GI NO: 37536248 NR Description: putative glutathione S-transferase
  misc_feature (42)..(241): NCBI GI NO: 37535432 NR Description: putative glutathione S-transferase
  misc_feature (26)..(240): NCBI GI NO: 9957262 NR Description: unknown [Petroselinum crispum]
  misc_feature (32)..(241): NCBI GI NO: 11385495 NR Description: glutathione S-transferase GST 22 [Zea mays]
  misc_feature (27)..(241): NCBI GI NO: 22022398 NR Description: glutathione-S-transferase Cla47
  misc_feature (30)..(252): NCBI GI NO: 6652870 NR Description: glutathione S-transferase 1 [Papaver somniferum]
  misc_feature (30)..(241): NCBI GI NO: 37536352 NR Description: putative glutathione S-transferase
GYVTTHDDGNSSAASRELSELGKKMSEAAVRVIGLWPSPFVIRVLIALKLKGVEFEFVEEVVGRKSELLLRSNPVHKKIPVLLHHGKPISESLIVVQYIDEVWSSGAPAFLPVDAHARAVQRFWAQYVDDKLPWAIRILKGTDDGGMEQAAGQLSAALQLLEEAFAQLSQGKRYFGGDSVGYLDIALVSHVGWVKAVEKIAGVTLLDKAKVPNLVAWADRLCAHPAVVDAIPDADKFVEFSVTYGSFSKPINAPAK

SEQ ID NO: 38616 - protein, 232 aa, Zea mays subsp. mays
  peptide (1)..(232): Ceres Seq. ID no. 13622444
  misc_feature (1)..(232): NCBI GI NO: 11385513 NR Description: glutathione S-transferase GST 31 [Zea mays]
  misc_feature (1)..(224): NCBI GI NO: 11385519 NR Description: glutathione S-transferase GST 34 [Zea mays]
  misc_feature (5)..(232): NCBI GI NO: 37536246 NR Description: putative glutathione S-transferase
  misc_feature (1)..(230): NCBI GI NO: 37536248 NR Description: putative glutathione S-transferase
  misc_feature (18)..(217): NCBI GI NO: 37535432 NR Description: putative glutathione S-transferase
  misc_feature (2)..(216): NCBI GI NO: 9957262 NR Description: unknown [Petroselinum crispum]
  misc_feature (8)..(217): NCBI GI NO: 11385495 NR Description: glutathione S-transferase GST 22 [Zea mays]
  misc_feature (3)..(217): NCBI GI NO: 22022398 NR Description: glutathione-S-transferase Cla47
  misc_feature (6)..(228): NCBI GI NO: 6652870 NR Description: glutathione S-transferase 1 [Papaver somniferum]
  misc_feature (6)..(217): NCBI GI NO: 37536352 NR Description: putative glutathione S-transferase
MSEAAVRVIGLWPSPFVIRVLIALKLKGVEFEFVEEVVGRKSELLLRSNPVHKKIPVLLHHGKPISESLIVVQYIDEVWSSGAPAFLPVDAHARAVQRFWAQYVDDKLPWAIRILKGTDDGGMEQAAGQLSAALQLLEEAFAQLSQGKRYFGGDSVGYLDIALVSHVGWVKAVEKIAGVTLLDKAKVPNLVAWADRLCAHPAVVDAIPDADKFVEFSVTYGSFSKPINAPAK

SEQ ID NO: 38617 - protein, 183 aa, Zea mays subsp. mays
  peptide (1)..(183): Ceres Seq. ID no. 13622445
MAEPVRDPRPDRPEAEGRRVRVRGGGGGQEERAAAEVEPGAQEDPRPAPPRQAHLRVSDRRPVHRRGLVLRRAGLPPRRRSRPRRPAVLGAVRRRQAALGDPHTEGNGRRGHGAGGGAAVRGPAAPRGGFRAAQPGEALLRRGQRRVPGHRSGVACRLGEGGGEDRRGHPAGQGQGPEPGGVG

SEQ ID NO: 38618 - DNA, 1956 bp, Zea mays subsp. mays
  misc_feature (1)..(1956): Ceres Seq. ID no. 12358907
agctgtaattttttagagtccctctcaaactttgcttgcttgcgctctccatatatcctgtggaccggagaggatgctctgatctacctgtctgttcttcgatcgagtctgagagatttgggaggaggagggaaacaaagcgaaagagcccatcttttttgtctttttggttcggtttcgtggttgcttcttttggaccccgcggaggagcccaccgtttctacaaaaacccaatctttgctgccttctcagcggtcgagatcgataggtttccagatctgaggctccgtgttctggctgtgagatcggaggcgcagcaatccgagcacgcagctagtagggaaagtatccgagaaaagttgcagattttgctgggggcaacggagcgagaacaagttactgcagaaggaaagggcaaaggtgggggaggcgccggagatgagggatgctatcagctctgatggattatttgaaatcttgctggggtccggcatcaccggctgggcgtccccgcaaaggatcggatgccaccggccgccaggacgggctcctgtggtacaaggacggcgggcaggtcgtcgatggtgagttctccatggccgtggtccaggccaataacctattggaggaccatagccaggttgaatccgggccgcttagcacatcggagcctggactgcaaggcaccttcgtcggggtctacgatgggcacggtggcccggagacagcgcgttacatcaatgaccatctcttcaaccacttgaggagattcgcatctgagcacaagtgcatgtcagcggatgtgattcggaaggtattccgagcgactgaggagggtttcatttctgtggttagtaaccaatggtcattgagacctcaattagcagctgtaggctcttgctgtctagttggtgtggtttgcagcggaactctatatgttgcaaaccttggggactcccgtgctgttctggggagacttgtcaagggaactggggaggttttggcaatgcagctctcagcagaacacaatgcatcctatgtggaggttagacgagagctgcaggcatcacatcctgatgatccccatattgtggtcctaaaacacaatgtttggcgtgtaaagggtattatccagataacaaggtcaattggagatgtgtatctgaagaaaccagaatttaatagagaacctttgcacagcaagtttcgtcttcaggaaacttttaggagaccacttcttagttctgatccagcaattactgtccaccaaatacagccaactgataagttcatcatttttgcatctgatggactctgggaacatcttagtaatcaggaagtggttgacatggtccaaagtagcccgcgtaatggaatcgcacgaaagttagtaaagtctgcagtgcaggaagcagcgaagaagagggagatgcggtattcagacctcaagaaagttgatcggggggtgaggcggcacttccacgacgatataactgtcattgtggtatttttcgattcaaacgccatgacaactgctgcctggagcagaccctcggtctctctccgagggggtgggtttccaatccattcaaacacccttgctccattctcagttcctacagagctaaacaactactgaaaccacgcggtatgtgaaggagccaggcaagaggataaaaaaaaagtaaaggaaaaaggagaaggaaaaacagctgttgtgatcagttgtagtgtatttcaccgttcatgttcatgcaaaacattttttagattctcaagtctcaacctggtgaccagtgcactgatagcaaggtataagattagattattcttagcttttttatcctctttttctctctctcttccttaccctttagattcactcatgggatatcaggtgcttgtacattctttggttcaacttgtgataatagtccatcgcccccctctttcgtc

SEQ ID NO: 38619 - protein, 397 aa, Zea mays subsp. mays
  peptide (1)..(397): Ceres Seq. ID no. 12358908
  misc_feature (47)..(328): Pfam Name: Pfam Description:  Protein phosphatase 2C
  misc_feature (1)..(392): NCBI GI NO: 37536574 NR Description: putative protein phosphatase 2C
  misc_feature (6)..(392): NCBI GI NO: 13357263 NR Description: putative protein phosphatase 2C
  misc_feature (1)..(396): NCBI GI NO: 11282004 NR Description: protein phosphatase 2C homolog
  misc_feature (1)..(389): NCBI GI NO: 18855039 NR Description: putative protein phosphatase [Oryza sativa]
  misc_feature (1)..(396): NCBI GI NO: 7768153 NR Description: protein phosphatase 2C (PP2C) [Fagus sylvatica]
  misc_feature (1)..(393): NCBI GI NO: 22329238 NR Description: putative protein phosphatase-2c
  misc_feature (1)..(393): NCBI GI NO: 17064756 NR Description: putative protein phosphatase-2c
  misc_feature (1)..(379): NCBI GI NO: 20340237 NR Description: protein phosphatase 2c-like protein
  misc_feature (1)..(379): NCBI GI NO: 11282001 NR Description: protein phosphatase 2C-like protein
  misc_feature (6)..(393): NCBI GI NO: 7485891 NR Description: hypothetical protein F20M13
MLSALMDYLKSCWGPASPAGRPRKGSDATGRQDGLLWYKDGGQVVDGEFSMAVVQANNLLEDHSQVESGPLSTSEPGLQGTFVGVYDGHGGPETARYINDHLFNHLRRFASEHKCMSADVIRKVFRATEEGFISVVSNQWSLRPQLAAVGSCCLVGVVCSGTLYVANLGDSRAVLGRLVKGTGEVLAMQLSAEHNASYVEVRRELQASHPDDPHIVVLKHNVWRVKGIIQITRSIGDVYLKKPEFNREPLHSKFRLQETFRRPLLSSDPAITVHQIQPTDKFIIFASDGLWEHLSNQEVVDMVQSSPRNGIARKLVKSAVQEAAKKREMRYSDLKKVDRGVRRHFHDDITVIVVFFDSNAMTTAAWSRPSVSLRGGGFPIHSNTLAPFSVPTELNNY

SEQ ID NO: 38620 - protein, 392 aa, Zea mays subsp. mays
  peptide (1)..(392): Ceres Seq. ID no. 12358909
  misc_feature (42)..(323): Pfam Name: Pfam Description:  Protein phosphatase 2C
  misc_feature (1)..(387): NCBI GI NO: 37536574 NR Description: putative protein phosphatase 2C
  misc_feature (1)..(387): NCBI GI NO: 13357263 NR Description: putative protein phosphatase 2C
  misc_feature (1)..(391): NCBI GI NO: 11282004 NR Description: protein phosphatase 2C homolog
  misc_feature (1)..(384): NCBI GI NO: 18855039 NR Description: putative protein phosphatase [Oryza sativa]
  misc_feature (1)..(391): NCBI GI NO: 7768153 NR Description: protein phosphatase 2C (PP2C) [Fagus sylvatica]
  misc_feature (1)..(388): NCBI GI NO: 22329238 NR Description: putative protein phosphatase-2c
  misc_feature (1)..(388): NCBI GI NO: 17064756 NR Description: putative protein phosphatase-2c
  misc_feature (1)..(374): NCBI GI NO: 20340237 NR Description: protein phosphatase 2c-like protein
  misc_feature (1)..(374): NCBI GI NO: 11282001 NR Description: protein phosphatase 2C-like protein
  misc_feature (1)..(388): NCBI GI NO: 7485891 NR Description: hypothetical protein F20M13
MDYLKSCWGPASPAGRPRKGSDATGRQDGLLWYKDGGQVVDGEFSMAVVQANNLLEDHSQVESGPLSTSEPGLQGTFVGVYDGHGGPETARYINDHLFNHLRRFASEHKCMSADVIRKVFRATEEGFISVVSNQWSLRPQLAAVGSCCLVGVVCSGTLYVANLGDSRAVLGRLVKGTGEVLAMQLSAEHNASYVEVRRELQASHPDDPHIVVLKHNVWRVKGIIQITRSIGDVYLKKPEFNREPLHSKFRLQETFRRPLLSSDPAITVHQIQPTDKFIIFASDGLWEHLSNQEVVDMVQSSPRNGIARKLVKSAVQEAAKKREMRYSDLKKVDRGVRRHFHDDITVIVVFFDSNAMTTAAWSRPSVSLRGGGFPIHSNTLAPFSVPTELNNY

SEQ ID NO: 38621 - protein, 347 aa, Zea mays subsp. mays
  peptide (1)..(347): Ceres Seq. ID no. 12358910
  misc_feature (1)..(278): Pfam Name: Pfam Description:  Protein phosphatase 2C
  misc_feature (1)..(342): NCBI GI NO: 37536574 NR Description: putative protein phosphatase 2C
  misc_feature (1)..(342): NCBI GI NO: 13357263 NR Description: putative protein phosphatase 2C
  misc_feature (1)..(346): NCBI GI NO: 11282004 NR Description: protein phosphatase 2C homolog
  misc_feature (1)..(339): NCBI GI NO: 18855039 NR Description: putative protein phosphatase [Oryza sativa]
  misc_feature (1)..(346): NCBI GI NO: 7768153 NR Description: protein phosphatase 2C (PP2C) [Fagus sylvatica]
  misc_feature (1)..(343): NCBI GI NO: 22329238 NR Description: putative protein phosphatase-2c
  misc_feature (1)..(343): NCBI GI NO: 17064756 NR Description: putative protein phosphatase-2c
  misc_feature (1)..(329): NCBI GI NO: 20340237 NR Description: protein phosphatase 2c-like protein
  misc_feature (1)..(329): NCBI GI NO: 11282001 NR Description: protein phosphatase 2C-like protein
  misc_feature (1)..(343): NCBI GI NO: 7485891 NR Description: hypothetical protein F20M13
MAVVQANNLLEDHSQVESGPLSTSEPGLQGTFVGVYDGHGGPETARYINDHLFNHLRRFASEHKCMSADVIRKVFRATEEGFISVVSNQWSLRPQLAAVGSCCLVGVVCSGTLYVANLGDSRAVLGRLVKGTGEVLAMQLSAEHNASYVEVRRELQASHPDDPHIVVLKHNVWRVKGIIQITRSIGDVYLKKPEFNREPLHSKFRLQETFRRPLLSSDPAITVHQIQPTDKFIIFASDGLWEHLSNQEVVDMVQSSPRNGIARKLVKSAVQEAAKKREMRYSDLKKVDRGVRRHFHDDITVIVVFFDSNAMTTAAWSRPSVSLRGGGFPIHSNTLAPFSVPTELNNY

SEQ ID NO: 38622 - DNA, 1581 bp, Zea mays subsp. mays
  misc_feature (1)..(1581): Ceres Seq. ID no. 12376644
gcacgagaccattacctagaacatcctaatcgaaaagaaatgaaactcgcgacagacagttcgtcctctgctccgtggaccctattcctgcgattatctggttgctcacatggacggtgatccgtgatccccggtgaccaagggtgttgaatcctcatgcaggcagaggcagaaacactgcccgaggctgatgcctgatggtgcgatcccgttccctgtcgccatcgagttcgttttttcgttgcttgacagccttaaagcggcgcacgaatgccacgagccactgaggcggcttcccagttcactccaggcccagggcgcccggtcgccatgaactcccgctcctcctccggcggcgtgcggtccgagagctcgctgtcgttgggggagcgcctctgcgcggtcttcttccccgtcatcgccatcgccgaggccgttttcttcgccttcaccgactgcctcgcggacctctgcaccgactccggctcctcgcactcgcgccgcttcggcgcgggcgcgtcctcctccgccgccaggaacagtcggagcaaccattgccagccccaccacagacctttcctacgccgcgccgctcgggtggatggacctcccccaacctccgccagctcgcacgcctcgccgacgagtcccgatgcttctcggtgaacgaggtggaggcgctctttgagctctacaagaagatcagctgctccatcatcgacgacggcctcatccacaaggaagaacttcagctggcactgttcaaaactccaagcggcgagaatctttttcttgatagagtttttttatttgtttgatgagaagaaaaatggtgtgatcgagtttgatgagtttattcattccctaagtgtcttccaccccttggcaccaattgaagacaagatcgattttgcatttaggttgtatgacttgagacaaactgggtttattgagcgtgaagaggttaagcaaatggtaattgctattttgatggaatctgatttaaaattatcagatgacttactcgaggccatcatagataagacatttgaagatgctgatgcggataaggatggaaaaataaataaagaggagtggaaggaatttgcgttacgccaccctaacctgttaaagaatatgacactgccttatctgagggacatcacaaccgtcttccctagtttcgtcttcaacacggcggtggaagattagtcgctccaattgaaggcaataaagcagtactggggattgcttgaggtgcacaaggttcctgaaacctgacggctgttggtcgccttcaaccactgagaatccgatgtgttctgagcatcaaggcagccgccacctgaccatcactcctgctataaattgtaatattataatataaggctcatccggggtggcagatcggcagcgggaacttacctgatataatttcttgctgccgtttttgcgcagcaatggattgagagtcggtagctgtagatacatctagcttccattctgtacgtagggatccaggaactgtaaatacgttctatggaattgtatcggaaagttcctagtacgccagccagatct

SEQ ID NO: 38623 - protein, 131 aa, Zea mays subsp. mays
  peptide (1)..(131): Ceres Seq. ID no. 12376645
  misc_feature (24)..(97): NCBI GI NO: 34913062 NR Description: putative calcium sensor protein
MPRATEAASQFTPGPGRPVAMNSRSSSGGVRSESSLSLGERLCAVFFPVIAIAEAVFFAFTDCLADLCTDSGSSHSRRFGAGASSSAARNSRSNHCQPHHRPFLRRAARVDGPPPTSASSHASPTSPDASR

SEQ ID NO: 38624 - protein, 111 aa, Zea mays subsp. mays
  peptide (1)..(111): Ceres Seq. ID no. 12376646
  misc_feature (4)..(77): NCBI GI NO: 34913062 NR Description: putative calcium sensor protein
MNSRSSSGGVRSESSLSLGERLCAVFFPVIAIAEAVFFAFTDCLADLCTDSGSSHSRRFGAGASSSAARNSRSNHCQPHHRPFLRRAARVDGPPPTSASSHASPTSPDASR

SEQ ID NO: 38625 - protein, 79 aa, Zea mays subsp. mays
  peptide (1)..(79): Ceres Seq. ID no. 12376647
  misc_feature (21)..(49): Pfam Name: Pfam Description:  EF hand
  misc_feature (1)..(62): NCBI GI NO: 34913062 NR Description: putative calcium sensor protein
  misc_feature (1)..(79): NCBI GI NO: 15234011 NR Description: putative protein (fragment); protein id:At4g33000
  misc_feature (1)..(79): NCBI GI NO: 30689575 NR Description: calcineurin B-like protein (fragment)
  misc_feature (1)..(77): NCBI GI NO: 7486208 NR Description: hypothetical protein F26P21
  misc_feature (1)..(79): NCBI GI NO: 30687272 NR Description: calcineurin B-like protein 3 (CBL3)
  misc_feature (1)..(79): NCBI GI NO: 15238015 NR Description: calcineurin B 1; protein id: At5g47100
  misc_feature (1)..(79): NCBI GI NO: 15237928 NR Description: calcium sensor homolog (gb|AAC26110
  misc_feature (1)..(79): NCBI GI NO: 15217657 NR Description: calcineurin B-like protein; protein id:At1g64480
  misc_feature (1)..(79): NCBI GI NO: 25295757 NR Description: protein F1N19.5 [imported] - Arabidopsis thaliana
  misc_feature (1)..(79): NCBI GI NO: 15236778 NR Description: calcineurin B-like protein 3; protein id:At4g26570
MVIAILMESDLKLSDDLLEAIIDKTFEDADADKDGKINKEEWKEFALRHPNLLKNMTLPYLRDITTVFPSFVFNTAVED

SEQ ID NO: 38626 - DNA, 1024 bp, Zea mays subsp. mays; identical to SEQ ID NO: 28941
  misc_feature (1)..(1024): Ceres Seq. ID no. 12462326

SEQ ID NO: 38627 - protein, 293 aa, Zea mays subsp. mays; identical to SEQ ID NO: 28942
  peptide (1)..(293): Ceres Seq. ID no. 12462327
  misc_feature (46)..(276): Pfam Name: Pfam Description:  HlyD family secretion protein

SEQ ID NO: 38628 - protein, 218 aa, Zea mays subsp. mays; identical to SEQ ID NO: 28943
  peptide (1)..(218): Ceres Seq. ID no. 12462328
  misc_feature (28)..(211): Pfam Name: Pfam Description:  SOUL heme-binding protein
  misc_feature (1)..(218): NCBI GI NO: 34903864 NR Description: unnamed protein product
  misc_feature (23)..(213): NCBI GI NO: 15220033 NR Description: SOUL-like protein; protein id: At1g17100
  misc_feature (21)..(218): NCBI GI NO: 18411970 NR Description: expressed protein; protein id: At1g78450
  misc_feature (21)..(218): NCBI GI NO: 21593898 NR Description: SOUL-like protein [Arabidopsis thaliana]
  misc_feature (1)..(213): NCBI GI NO: 34904402 NR Description: unnamed protein product
  misc_feature (23)..(211): NCBI GI NO: 15218357 NR Description: hypothetical protein; protein id: At1g78460.1
  misc_feature (29)..(213): NCBI GI NO: 28278449 NR Description: Similar to heme binding protein 2 [Danio rerio]
  misc_feature (20)..(209): NCBI GI NO: 7657603 NR Description: heme binding protein 2
  misc_feature (27)..(209): NCBI GI NO: 27731687 NR Description: similar to heme binding protein 2
  misc_feature (43)..(209): NCBI GI NO: 15778345 NR Description: C6ORF34B [Homo sapiens]

SEQ ID NO: 38629 - protein, 167 aa, Zea mays subsp. mays; identical to SEQ ID NO: 28944
  peptide (1)..(167): Ceres Seq. ID no. 12462329
  misc_feature (1)..(160): Pfam Name: Pfam Description:  SOUL heme-binding protein
  misc_feature (1)..(167): NCBI GI NO: 34903864 NR Description: unnamed protein product
  misc_feature (1)..(162): NCBI GI NO: 15220033 NR Description: SOUL-like protein; protein id: At1g17100
  misc_feature (1)..(167): NCBI GI NO: 18411970 NR Description: expressed protein; protein id: At1g78450
  misc_feature (1)..(167): NCBI GI NO: 21593898 NR Description: SOUL-like protein [Arabidopsis thaliana]
  misc_feature (1)..(162): NCBI GI NO: 34904402 NR Description: unnamed protein product
  misc_feature (1)..(160): NCBI GI NO: 15218357 NR Description: hypothetical protein; protein id: At1g78460.1
  misc_feature (1)..(162): NCBI GI NO: 28278449 NR Description: Similar to heme binding protein 2 [Danio rerio]
  misc_feature (1)..(158): NCBI GI NO: 7657603 NR Description: heme binding protein 2
  misc_feature (1)..(158): NCBI GI NO: 27731687 NR Description: similar to heme binding protein 2
  misc_feature (1)..(158): NCBI GI NO: 15778345 NR Description: C6ORF34B [Homo sapiens]

SEQ ID NO: 38630 - DNA, 2120 bp, Zea mays subsp. mays
  misc_feature (1)..(2120): Ceres Seq. ID no. 12376866
gcacgagaccattacctagaacatcctaatcgaaaaaatgtcggagcagcagcagccattgccgcagcctcggagcagcatgcgggaggctctggagaaggaggacaaggagaaggcggcggctgctgcggcggccaaggagaaggcggccgtccccaagaacggcaacggcaacggcggcaagaatggcggcggcgccggcagcggcaacggcggagcgcccccgcagtccggggaggagacggcccgcgagatccaggtggtcagggaggcgtaccgccgcgagacggccgcgccggcctacgtcatacccgaggagccgccggccgtggtcgagctcgtcggctggtacatctacggcttctgctcctacttcatcacccacctgctgctgccggtcctcttcccggccatcatcacgcaggtcgccttccccaactccgacttcacgcccgaccccaagtacaccctcaagggcgtcacctgctccgtccacgagatgtccatgtaccagaggcttaccaagcactccattgtgatcgatggatcccggatgtcaccattgggctggagtggactgtcgtgggcaatcggcatcctcatcgtggcgccgctcctcacccagaccgctcaccatctcgaccgtggccagtaccagtcgctgatcctcattgccgccacgtccttcgggtccttcttctgcctgctaacaggcttcttcaagacggtctgggtgttcctgttctacatcctcttcatcgctggctcgatcatcgtcgctgaggcggtgcacacccgcaaccttgggctgatgatccgtggcctggctgcgcatgactcgggcaagcaccttgtccttcgccgccgcgctgctgccagccagctcagcctgtactgcactgccataggaggcattggagctgccctcatggcagctttcatgtaccacatgctgcggcgcactgaccagctcactggcctctgggtcgtgtccatcttctgtggccttatctggttcatcggcatctgccatggcctcttcacaaacaggcccagcagctcgtcacccaccaccgcattcgagcccaacttcttcaccaagctcagctacagcatgaccctcctccgttacccgcaggccattggcagcctggttgcggtgttcctgtcctctttcgccacaatgtgcatcttcaccagcggcacgctctatgctatcggtggtgtctgcatcaagccggtgctcgtgcttgcgctatggatcctctactttctgttccccttgatctcgctcccgctcctccacccgatccagatcataatccgcgcggacgccgtgcgcatgcagctgctcgggttcataatctgcctgttcgtgtccggtgccgggttctacttcaagagccacaggtggagggctgcccacatcatcgtcatcgccctggtccagagcaccgccaatggcatactgtacgcgttcggccgcatcctgctcctcgatgcctcgccgccggggaaggagggtgcgttctcggtctggtacgcgtttgttcgtgtcaccggtgccatgatcggcttcgctgcctcctccgctggccctgggcgcgcgggagggtcctttgctgctgcgttcctcgggagcttcctgggcatcatcgtgctgatcttcggcaacgtcagcaacatcggggcgctgaaggcggccgggcacctcaaggggatggacgacgagaagaggatgggcggtctcgggatggagaagggcgagggcatgggtagcgccgtcgctgattctggcgagagcagggggagggtatgatgatgactattcgtgacagtgaattcctgggaggtgggggagaaaaggattgcgtcctgtggaggttgtgcttgtgagaaggatttgttctctcttttttttcttgtttctttggccgtgtttcagtgacactgttgatggatcccagtgcttcgcccgtttgatgcatcatggtggtggtggtgatgatggatgacatagtggtaggggagtgtgtgctagttgttaatgtgttatttattcttttgcttgcaagacaattgtaactgatgatcgttagatcatatggttcttccttcgt

SEQ ID NO: 38631 - protein, 593 aa, Zea mays subsp. mays
  peptide (1)..(593): Ceres Seq. ID no. 12376867
  misc_feature (1)..(593): NCBI GI NO: 34897922 NR Description: ESTs AU082452
  misc_feature (93)..(566): NCBI GI NO: 32470647 NR Description: hypothetical protein [Solanum bulbocastanum]
MSEQQQPLPQPRSSMREALEKEDKEKAAAAAAAKEKAAVPKNGNGNGGKNGGGAGSGNGGAPPQSGEETAREIQVVREAYRRETAAPAYVIPEEPPAVVELVGWYIYGFCSYFITHLLLPVLFPAIITQVAFPNSDFTPDPKYTLKGVTCSVHEMSMYQRLTKHSIVIDGSRMSPLGWSGLSWAIGILIVAPLLTQTAHHLDRGQYQSLILIAATSFGSFFCLLTGFFKTVWVFLFYILFIAGSIIVAEAVHTRNLGLMIRGLAAHDSGKHLVLRRRAAASQLSLYCTAIGGIGAALMAAFMYHMLRRTDQLTGLWVVSIFCGLIWFIGICHGLFTNRPSSSSPTTAFEPNFFTKLSYSMTLLRYPQAIGSLVAVFLSSFATMCIFTSGTLYAIGGVCIKPVLVLALWILYFLFPLISLPLLHPIQIIIRADAVRMQLLGFIICLFVSGAGFYFKSHRWRAAHIIVIALVQSTANGILYAFGRILLLDASPPGKEGAFSVWYAFVRVTGAMIGFAASSAGPGRAGGSFAAAFLGSFLGIIVLIFGNVSNIGALKAAGHLKGMDDEKRMGGLGMEKGEGMGSAVADSGESRGRV

SEQ ID NO: 38632 - protein, 579 aa, Zea mays subsp. mays
  peptide (1)..(579): Ceres Seq. ID no. 12376868
  misc_feature (1)..(579): NCBI GI NO: 34897922 NR Description: ESTs AU082452
  misc_feature (79)..(552): NCBI GI NO: 32470647 NR Description: hypothetical protein [Solanum bulbocastanum]
MREALEKEDKEKAAAAAAAKEKAAVPKNGNGNGGKNGGGAGSGNGGAPPQSGEETAREIQVVREAYRRETAAPAYVIPEEPPAVVELVGWYIYGFCSYFITHLLLPVLFPAIITQVAFPNSDFTPDPKYTLKGVTCSVHEMSMYQRLTKHSIVIDGSRMSPLGWSGLSWAIGILIVAPLLTQTAHHLDRGQYQSLILIAATSFGSFFCLLTGFFKTVWVFLFYILFIAGSIIVAEAVHTRNLGLMIRGLAAHDSGKHLVLRRRAAASQLSLYCTAIGGIGAALMAAFMYHMLRRTDQLTGLWVVSIFCGLIWFIGICHGLFTNRPSSSSPTTAFEPNFFTKLSYSMTLLRYPQAIGSLVAVFLSSFATMCIFTSGTLYAIGGVCIKPVLVLALWILYFLFPLISLPLLHPIQIIIRADAVRMQLLGFIICLFVSGAGFYFKSHRWRAAHIIVIALVQSTANGILYAFGRILLLDASPPGKEGAFSVWYAFVRVTGAMIGFAASSAGPGRAGGSFAAAFLGSFLGIIVLIFGNVSNIGALKAAGHLKGMDDEKRMGGLGMEKGEGMGSAVADSGESRGRV

SEQ ID NO: 38633 - protein, 439 aa, Zea mays subsp. mays
  peptide (1)..(439): Ceres Seq. ID no. 12376869
  misc_feature (1)..(439): NCBI GI NO: 34897922 NR Description: ESTs AU082452
  misc_feature (1)..(412): NCBI GI NO: 32470647 NR Description: hypothetical protein [Solanum bulbocastanum]
MSMYQRLTKHSIVIDGSRMSPLGWSGLSWAIGILIVAPLLTQTAHHLDRGQYQSLILIAATSFGSFFCLLTGFFKTVWVFLFYILFIAGSIIVAEAVHTRNLGLMIRGLAAHDSGKHLVLRRRAAASQLSLYCTAIGGIGAALMAAFMYHMLRRTDQLTGLWVVSIFCGLIWFIGICHGLFTNRPSSSSPTTAFEPNFFTKLSYSMTLLRYPQAIGSLVAVFLSSFATMCIFTSGTLYAIGGVCIKPVLVLALWILYFLFPLISLPLLHPIQIIIRADAVRMQLLGFIICLFVSGAGFYFKSHRWRAAHIIVIALVQSTANGILYAFGRILLLDASPPGKEGAFSVWYAFVRVTGAMIGFAASSAGPGRAGGSFAAAFLGSFLGIIVLIFGNVSNIGALKAAGHLKGMDDEKRMGGLGMEKGEGMGSAVADSGESRGRV

SEQ ID NO: 38634 - DNA, 1650 bp, Zea mays subsp. mays
  misc_feature (1)..(1650): Ceres Seq. ID no. 12415075
  misc_feature (1112)..(1112): n is a, c, t, g, unknown, or other
  misc_feature (1237)..(1237): n is a, c, t, g, unknown, or other
  misc_feature (972)..(972): n is a, c, t, g, unknown, or other
  misc_feature (1054)..(1054): n is a, c, t, g, unknown, or other
  misc_feature (1027)..(1027): n is a, c, t, g, unknown, or other
  misc_feature (945)..(945): n is a, c, t, g, unknown, or other
catcctaatcgaaaagttttaggtagtagctagacgtacgtacgtactcacacgacgatgacgaaggcgtggaggccgatgctggcgtcggccaccaagtgctgcgcggcggaggacgcggcggtggcccccgacggcctggcgcggtgccggccgcagcagtcggagctctcgcggcggctggcgtccttcaggcgcctgtcgtcgctggccaacagcccggcgtcggcggcgggcacggacaaggacggcggcagcgtcaagcaggccggggagatggcgggcccgctgcagctgcactccttcggcctaggcgagctccgcggcgtcacgcacgacttcgccagcagcttcctgctcggggagggcggcttcggcgccgtgtacaagggcttcgtggacgccggcatgcgcccgggcctcgccgcccagcccgtcgccgtcaagcagctcaacgccgcgggcttccagggccaccgggagtggctcgccgaggtcatcttcctgggccagttccgccactcgcacctcgtccgcctgctggggtactgctgcgaggacgaggagcgcctgctcgtctacgagttcatgccgcgcgggagcctcgagaaccacctcttcaggaggatctcggcgacgctaccgtggggcacccggctcaaggtggccatcggcgccgccaagggtctggccttcctccacgccgcgagcacgcccgtcatctacagggacttcaaggcctccaacatcctactcgactcggacttcaccgccaagctgtcggacttcgggctggccaagatggggcccgagggcgaggacacgcacgtgacgacgcgcgtgatgggcacccacggctacgcggcgccggagtacgtgcagacgggccacctgaacgtgaagagcgacgtgtacagcttcggcgtcgtgctcctggagctcctnacggggcggcgcgccatggagcacgtncgcgggcgcagcgcgcacgccgaccagcagctgaaggctcgtggactggacccgnccctacctcagcggcggcagccgccgnctgcgctgcatcatggaccagaggctggcgggccactactccgtcaagggcgcgcgcnccgtggcgcagctggccgtgcagtgcaccgcgcagcagccgcgggacaggccgcgcatggtggctgtcgtcgacgcgctcgacaagctgcaggggctcaaggacatggccgtcaccgtcggcctntggcccgccaccgcgcccgtcgccgggcggaacgccatctccgccaagatccgcgcggaggtcaagggcgccgccggcgcagggtcgcgccggaggagcgcgtcctccaagctgccttagtaatcttgacggctggaccacctgcgtgccacgtcgtacatgtctcctagctagctcgtgtgtaccccgggtgtaggaatcctcttgtgtgttttgtgccacgtcgtcggtgtgtgtatatagtacatactactgtaccgtctagtttaggcgcgttgagattggtgaggcagagagatgttcctccatgcactcactagtacgtacgatccatacctattgctcctggattcatgagatcgttaatagaggtgatgtaaaactttgcaaagtacacatgaatttgaattttg

SEQ ID NO: 38635 - protein, 449 aa, Zea mays subsp. mays
  peptide (1)..(449): Ceres Seq. ID no. 12415076
  misc_feature (1)..(309): NCBI GI NO: 15220535 NR Description: serine/threonine protein kinase, putative
  misc_feature (4)..(306): NCBI GI NO: 15225019 NR Description: putative protein kinase; protein id: At2g05940
  misc_feature (32)..(331): NCBI GI NO: 30013675 NR Description: Avr9/Cf-9 rapidly elicited protein 264
  misc_feature (144)..(306): NCBI GI NO: 27436752 NR Description: Putative serine/threonine protein kinase
  misc_feature (74)..(144): NCBI GI NO: 27436752 NR Description: Putative serine/threonine protein kinase
  misc_feature (80)..(306): NCBI GI NO: 14484938 NR Description: auxin-regulated dual specificity cytosolic kinase
  misc_feature (47)..(306): NCBI GI NO: 37534008 NR Description: putative serine/threonine protein kinase
  misc_feature (44)..(306): NCBI GI NO: 10176804 NR Description: serine/threonine protein kinase-like
  misc_feature (44)..(306): NCBI GI NO: 15238553 NR Description: serine/threonine protein kinase-like
  misc_feature (79)..(306): NCBI GI NO: 30679085 NR Description: protein kinase family [Arabidopsis thaliana]
  misc_feature (296)..(296): Xaa is any aa, unknown or other
  misc_feature (305)..(305): Xaa is any aa, unknown or other
  misc_feature (324)..(324): Xaa is any aa, unknown or other
  misc_feature (333)..(333): Xaa is any aa, unknown or other
  misc_feature (352)..(352): Xaa is any aa, unknown or other
  misc_feature (394)..(394): Xaa is any aa, unknown or other
MTKAWRPMLASATKCCAAEDAAVAPDGLARCRPQQSELSRRLASFRRLSSLANSPASAAGTDKDGGSVKQAGEMAGPLQLHSFGLGELRGVTHDFASSFLLGEGGFGAVYKGFVDAGMRPGLAAQPVAVKQLNAAGFQGHREWLAEVIFLGQFRHSHLVRLLGYCCEDEERLLVYEFMPRGSLENHLFRRISATLPWGTRLKVAIGAAKGLAFLHAASTPVIYRDFKASNILLDSDFTAKLSDFGLAKMGPEGEDTHVTTRVMGTHGYAAPEYVQTGHLNVKSDVYSFGVVLLELXTGRRAMEHXRGRSAHADQQLKARGLDPXLPQRRQPPXALHHGPEAGGPLLRQGRAXRGAAGRAVHRAAAAGQAAHGGCRRRARQAAGAQGHGRHRRPXARHRARRRAERHLRQDPRGGQGRRRRRVAPEERVLQAALVILTAGPPACHVVHVS

SEQ ID NO: 38636 - protein, 442 aa, Zea mays subsp. mays
  peptide (1)..(442): Ceres Seq. ID no. 12415077
  misc_feature (1)..(302): NCBI GI NO: 15220535 NR Description: serine/threonine protein kinase, putative
  misc_feature (1)..(299): NCBI GI NO: 15225019 NR Description: putative protein kinase; protein id: At2g05940
  misc_feature (25)..(324): NCBI GI NO: 30013675 NR Description: Avr9/Cf-9 rapidly elicited protein 264
  misc_feature (137)..(299): NCBI GI NO: 27436752 NR Description: Putative serine/threonine protein kinase
  misc_feature (67)..(137): NCBI GI NO: 27436752 NR Description: Putative serine/threonine protein kinase
  misc_feature (73)..(299): NCBI GI NO: 14484938 NR Description: auxin-regulated dual specificity cytosolic kinase
  misc_feature (40)..(299): NCBI GI NO: 37534008 NR Description: putative serine/threonine protein kinase
  misc_feature (37)..(299): NCBI GI NO: 10176804 NR Description: serine/threonine protein kinase-like
  misc_feature (37)..(299): NCBI GI NO: 15238553 NR Description: serine/threonine protein kinase-like
  misc_feature (72)..(299): NCBI GI NO: 30679085 NR Description: protein kinase family [Arabidopsis thaliana]
  misc_feature (289)..(289): Xaa is any aa, unknown or other
  misc_feature (298)..(298): Xaa is any aa, unknown or other
  misc_feature (317)..(317): Xaa is any aa, unknown or other
  misc_feature (326)..(326): Xaa is any aa, unknown or other
  misc_feature (345)..(345): Xaa is any aa, unknown or other
  misc_feature (387)..(387): Xaa is any aa, unknown or other
MLASATKCCAAEDAAVAPDGLARCRPQQSELSRRLASFRRLSSLANSPASAAGTDKDGGSVKQAGEMAGPLQLHSFGLGELRGVTHDFASSFLLGEGGFGAVYKGFVDAGMRPGLAAQPVAVKQLNAAGFQGHREWLAEVIFLGQFRHSHLVRLLGYCCEDEERLLVYEFMPRGSLENHLFRRISATLPWGTRLKVAIGAAKGLAFLHAASTPVIYRDFKASNILLDSDFTAKLSDFGLAKMGPEGEDTHVTTRVMGTHGYAAPEYVQTGHLNVKSDVYSFGVVLLELXTGRRAMEHXRGRSAHADQQLKARGLDPXLPQRRQPPXALHHGPEAGGPLLRQGRAXRGAAGRAVHRAAAAGQAAHGGCRRRARQAAGAQGHGRHRRPXARHRARRRAERHLRQDPRGGQGRRRRRVAPEERVLQAALVILTAGPPACHVVHVS

SEQ ID NO: 38637 - protein, 376 aa, Zea mays subsp. mays
  peptide (1)..(376): Ceres Seq. ID no. 12415078
  misc_feature (1)..(236): NCBI GI NO: 15220535 NR Description: serine/threonine protein kinase, putative
  misc_feature (1)..(233): NCBI GI NO: 15225019 NR Description: putative protein kinase; protein id: At2g05940
  misc_feature (1)..(258): NCBI GI NO: 30013675 NR Description: Avr9/Cf-9 rapidly elicited protein 264
  misc_feature (71)..(233): NCBI GI NO: 27436752 NR Description: Putative serine/threonine protein kinase
  misc_feature (1)..(71): NCBI GI NO: 27436752 NR Description: Putative serine/threonine protein kinase
  misc_feature (7)..(233): NCBI GI NO: 14484938 NR Description: auxin-regulated dual specificity cytosolic kinase
  misc_feature (1)..(233): NCBI GI NO: 37534008 NR Description: putative serine/threonine protein kinase
  misc_feature (1)..(233): NCBI GI NO: 10176804 NR Description: serine/threonine protein kinase-like
  misc_feature (1)..(233): NCBI GI NO: 15238553 NR Description: serine/threonine protein kinase-like
  misc_feature (6)..(233): NCBI GI NO: 30679085 NR Description: protein kinase family [Arabidopsis thaliana]
  misc_feature (223)..(223): Xaa is any aa, unknown or other
  misc_feature (232)..(232): Xaa is any aa, unknown or other
  misc_feature (251)..(251): Xaa is any aa, unknown or other
  misc_feature (260)..(260): Xaa is any aa, unknown or other
  misc_feature (279)..(279): Xaa is any aa, unknown or other
  misc_feature (321)..(321): Xaa is any aa, unknown or other
MAGPLQLHSFGLGELRGVTHDFASSFLLGEGGFGAVYKGFVDAGMRPGLAAQPVAVKQLNAAGFQGHREWLAEVIFLGQFRHSHLVRLLGYCCEDEERLLVYEFMPRGSLENHLFRRISATLPWGTRLKVAIGAAKGLAFLHAASTPVIYRDFKASNILLDSDFTAKLSDFGLAKMGPEGEDTHVTTRVMGTHGYAAPEYVQTGHLNVKSDVYSFGVVLLELXTGRRAMEHXRGRSAHADQQLKARGLDPXLPQRRQPPXALHHGPEAGGPLLRQGRAXRGAAGRAVHRAAAAGQAAHGGCRRRARQAAGAQGHGRHRRPXARHRARRRAERHLRQDPRGGQGRRRRRVAPEERVLQAALVILTAGPPACHVVHVS

SEQ ID NO: 38638 - DNA, 456 bp, Zea mays subsp. mays
  misc_feature (1)..(456): Ceres Seq. ID no. 1667754
aagagcctcctacccatggtaatctattctaggatcttttactgaaaccaaacatacatgcagaacaaggcatatttctgtaaggtgaacccagacgaccttgtgtttggaggctgggacatcagcagcatgaacctggcagatgccatgaccagggccaaggtgctggacattgacctgcagaagcagctcaggccctacatggagtccatggtgccacttcccggtgtctatgatccggacttcatcgccgctaaccagggctctcgtgccaacaatgtcatcaagggcaccaagaaagaacaggtggagcagatcatcaaagatatcagggagtttaaggagaagaacaaagtggacaaggtagttgtgctgtggactgcaaacactgaaaggtacagcaatgtatgtgctggtctcaacgacacaatggagaatctgctggcatctgtggac

SEQ ID NO: 38639 - protein, 133 aa, Zea mays subsp. mays
  peptide (1)..(133): Ceres Seq. ID no. 1667755
  misc_feature (1)..(132): Pfam Name: Pfam Description:  Myo-inositol-1-phosphate synthase
  misc_feature (1)..(132): NCBI GI NO: 11762100 NR Description: myo-inositol 1-phosphate synthase [Zea mays]
  misc_feature (1)..(132): NCBI GI NO: 14548094 NR Description: Inositol-3-phosphate synthase
  misc_feature (1)..(132): NCBI GI NO: 32492882 NR Description: myo-inositol-1-phosphate synthase INO1
  misc_feature (1)..(132): NCBI GI NO: 14548088 NR Description: Inositol-3-phosphate synthase
  misc_feature (1)..(132): NCBI GI NO: 14548089 NR Description: Inositol-3-phosphate synthase
  misc_feature (1)..(132): NCBI GI NO: 18181983 NR Description: myo-inositol-1-phosphate synthase [Avena sativa]
  misc_feature (1)..(132): NCBI GI NO: 14548096 NR Description: Inositol-3-phosphate synthase
  misc_feature (1)..(132): NCBI GI NO: 14548099 NR Description: Inositol-3-phosphate synthase
  misc_feature (1)..(132): NCBI GI NO: 14548091 NR Description: Inositol-3-phosphate synthase
  misc_feature (1)..(132): NCBI GI NO: 7488491 NR Description: inositol-3-phosphate synthase (EC 5.5.1.4)
MQNKAYFCKVNPDDLVFGGWDISSMNLADAMTRAKVLDIDLQKQLRPYMESMVPLPGVYDPDFIAANQGSRANNVIKGTKKEQVEQIIKDIREFKEKNKVDKVVVLWTANTERYSNVCAGLNDTMENLLASVD

SEQ ID NO: 38640 - protein, 109 aa, Zea mays subsp. mays
  peptide (1)..(109): Ceres Seq. ID no. 1667756
  misc_feature (1)..(108): Pfam Name: Pfam Description:  Myo-inositol-1-phosphate synthase
  misc_feature (1)..(108): NCBI GI NO: 11762100 NR Description: myo-inositol 1-phosphate synthase [Zea mays]
  misc_feature (1)..(108): NCBI GI NO: 14548094 NR Description: Inositol-3-phosphate synthase
  misc_feature (1)..(108): NCBI GI NO: 32492882 NR Description: myo-inositol-1-phosphate synthase INO1
  misc_feature (1)..(108): NCBI GI NO: 14548088 NR Description: Inositol-3-phosphate synthase
  misc_feature (1)..(108): NCBI GI NO: 14548089 NR Description: Inositol-3-phosphate synthase
  misc_feature (1)..(108): NCBI GI NO: 18181983 NR Description: myo-inositol-1-phosphate synthase [Avena sativa]
  misc_feature (1)..(108): NCBI GI NO: 14548096 NR Description: Inositol-3-phosphate synthase
  misc_feature (1)..(108): NCBI GI NO: 14548099 NR Description: Inositol-3-phosphate synthase
  misc_feature (1)..(108): NCBI GI NO: 14548091 NR Description: Inositol-3-phosphate synthase
  misc_feature (1)..(108): NCBI GI NO: 7488491 NR Description: inositol-3-phosphate synthase (EC 5.5.1.4)
MNLADAMTRAKVLDIDLQKQLRPYMESMVPLPGVYDPDFIAANQGSRANNVIKGTKKEQVEQIIKDIREFKEKNKVDKVVVLWTANTERYSNVCAGLNDTMENLLASVD

SEQ ID NO: 38641 - protein, 103 aa, Zea mays subsp. mays
  peptide (1)..(103): Ceres Seq. ID no. 1667757
  misc_feature (1)..(102): Pfam Name: Pfam Description:  Myo-inositol-1-phosphate synthase
  misc_feature (1)..(102): NCBI GI NO: 11762100 NR Description: myo-inositol 1-phosphate synthase [Zea mays]
  misc_feature (1)..(102): NCBI GI NO: 14548094 NR Description: Inositol-3-phosphate synthase
  misc_feature (1)..(102): NCBI GI NO: 32492882 NR Description: myo-inositol-1-phosphate synthase INO1
  misc_feature (1)..(102): NCBI GI NO: 14548088 NR Description: Inositol-3-phosphate synthase
  misc_feature (1)..(102): NCBI GI NO: 14548089 NR Description: Inositol-3-phosphate synthase
  misc_feature (1)..(102): NCBI GI NO: 18181983 NR Description: myo-inositol-1-phosphate synthase [Avena sativa]
  misc_feature (1)..(102): NCBI GI NO: 14548096 NR Description: Inositol-3-phosphate synthase
  misc_feature (1)..(102): NCBI GI NO: 14548099 NR Description: Inositol-3-phosphate synthase
  misc_feature (1)..(102): NCBI GI NO: 14548091 NR Description: Inositol-3-phosphate synthase
  misc_feature (1)..(102): NCBI GI NO: 7488491 NR Description: inositol-3-phosphate synthase (EC 5.5.1.4)
MTRAKVLDIDLQKQLRPYMESMVPLPGVYDPDFIAANQGSRANNVIKGTKKEQVEQIIKDIREFKEKNKVDKVVVLWTANTERYSNVCAGLNDTMENLLASVD

SEQ ID NO: 38642 - DNA, 1016 bp, Zea mays subsp. mays
  misc_feature (1)..(1016): Ceres Seq. ID no. 12355029
ctggtgttcttctataccacgcgtccacgccactgctaagctgctccccgttcgccaggtcggcgaccaggcgaaacgtgctgctgcaagaagaagaataggtacacagacagcatgtccggagttcaggcgatgccggcggccgtgggcgtggcggggctgagagggtcagggttggttagcagcagcagtaccggcttgttcgccggcgactgcaagaggaaggctcgtcgcccggcgtgctcggcctgggccctcaggcagagccggatcggcagcaggagcaggagcaagaggggcctcggcatcgtctgcaacctcgcgggacagtacgaggattccttcgacgacgtccagcggcaactgatgaactacttcacctacaaggccgtgaggaccgtgctgacccagctctacgagctgaacccgcccgagctaccgctggttctacaacttcgtcgctgtcaacaagcctaccgacggcaagcatttcctccgtgctctcgggcaaggagaggcaggagctcgcagagcgagtgatggtcaccaggcttcacctgtacgggaaatggataaagaaatgcgaccatgccaagacgtacgagaagatctccgacgagaacctggcgctgatgcgggagcggctgatggagacggtcatctggccgaccgacgacagcagcacggagaagatcggctgatgcctgatgcctgccgagtcctttcgggttgctgatcaagcttagctccttctattagcatgtagagcagcactctgggtttctctatcagtcagtcagtcagccagccagtcagtgggttgtatataatcggagttgtagtagacagtatacatttctctgggcaggcaatcactgtttgaggtgttaacagtgccgttttgccctcccaattaagcctctacagtcggtctaagtgaagcaaaaatgcttaccttgtagtagctaaatttacatgtgcggggatatacgttgtaatagaatatttctgcgccc

SEQ ID NO: 38643 - protein, 141 aa, Zea mays subsp. mays
  peptide (1)..(141): Ceres Seq. ID no. 12355030
  misc_feature (1)..(106): NCBI GI NO: 30103018 NR Description: unknown protein
  misc_feature (49)..(107): NCBI GI NO: 18420050 NR Description: Expressed protein; protein id: At5g19855
  misc_feature (49)..(106): NCBI GI NO: 33146778 NR Description: unknown protein
MSGVQAMPAAVGVAGLRGSGLVSSSSTGLFAGDCKRKARRPACSAWALRQSRIGSRSRSKRGLGIVCNLAGQYEDSFDDVQRQLMNYFTYKAVRTVLTQLYELNPPELPLVLQLRRCQQAYRRQAFPPCSRARRGRSSQSE

SEQ ID NO: 38644 - protein, 135 aa, Zea mays subsp. mays
  peptide (1)..(135): Ceres Seq. ID no. 12355031
  misc_feature (1)..(100): NCBI GI NO: 30103018 NR Description: unknown protein
  misc_feature (43)..(101): NCBI GI NO: 18420050 NR Description: Expressed protein; protein id: At5g19855
  misc_feature (43)..(100): NCBI GI NO: 33146778 NR Description: unknown protein
MPAAVGVAGLRGSGLVSSSSTGLFAGDCKRKARRPACSAWALRQSRIGSRSRSKRGLGIVCNLAGQYEDSFDDVQRQLMNYFTYKAVRTVLTQLYELNPPELPLVLQLRRCQQAYRRQAFPPCSRARRGRSSQSE

SEQ ID NO: 38645 - DNA, 1830 bp, Zea mays subsp. mays
  misc_feature (1)..(1830): Ceres Seq. ID no. 12390089
gcacgagaccattacctagaacatcctaatcgaaaaactgtctcgtcggctcgtcgctccgtagaccccgcgcctccgcctccccgccactcgccggaggctgccgccatcgttatgccatggccgtcatcctctcctccgcggcgccaacgatactgactcgtcccacgcgccctcggaggcagccgaggagcggcctccgcgggggcctcgcgcgcctctcagctgcgctcggcctcgcgcacgcgggcgccggcgccggcgccgcactcgccgcgccgctctcctacgaggagatgctgcgcctctcgtccgactccggcggtgatgttggcgggttcgcgctcccggagctcggcctcgacgggctcgttgacttcgtcaacgataaccctctcgtcgtcgcggcaggcgtcgcggccatcgcagtgccgcttctccttgcgcagcttctcggcggaggcggcagctccaagcccctactccgtcctgtccgccaaggcggcctaccagcggctgctcgaggagcccgacgcgcagctcgtcgacatcaggccgctcaaggatgcacgagaggccggcacgcctgatctcaaggaggctaagaagaaggctgctgccgtaccttacaacggggaggacaaaaacggattcttgaaaaagttgacactaaagttcaaggacccggagaacaccacgctgatcatccttgacaaatttgatgggaactccgaactagttgctgagcttgtgacagccaatggttacaaagctgcttttgcagtgaaggatggtgcagaaggaagccgaggatggaagagcagtaaccttccctggaaggctccgccaaaaggattcagctttgacttgggcgaattatttggggatggttcagatggtttgcctgtgacaattggtctcgctgcagctactggtttgggagtacttgcctacacagagattgaaactttgctacagtttttggggtcagctgctgttgttcagctagtggtaaccaaactcttgtatgccgaggatcgacaaaagacacttaaacagatcgatgagttctttaacaagaaggttgctccgaaggagcttattgacgaaataaaggaaatcgggcaggctctactacctttacctggcgatgctaaaagccaaccagcactagcaacagcgactcaagttgctgccacacaaacagctgcaccagcagaggacgctaccgcagaagccaccacggaatcagatcctgcaacgccaacacctctttcaccttatacaaattacccagatctcaagccgccatcaacccctacgccaccgtcagtggagtctgaagtcgagacgaaggctagcagcaccgtgactgaaggaccagcagtggtcaattctgcacctatagcagacgctgccacgggatcatctcctgccactactaggcccagacctcagtcaccataccctaattatccagatttcaagccaccatcctcgccttcaccgtcagcaccttaatttggcaagagtacaagaaaccgggtctagaggatattaaagaagttgagttgttcatatggagccggcatctcactagaggtgtatgttgtactatgagcgtgacagtgtggctaagtcactgtggcgagttttctgcagcagtaaatatatgatgtaatgttcattagttatcaatgtgctatgattttctttttgttgtcttattttcgatacatgtaaatgtcgaataactagccgtgagaattgagagttcaagcctatagagcttgatatgtttgatcaaagtaaatgtatcttcttaaaaac

SEQ ID NO: 38646 - protein, 397 aa, Zea mays subsp. mays
  peptide (1)..(397): Ceres Seq. ID no. 12390090
  misc_feature (263)..(397): Pfam Name: Pfam Description:  Glycoprotein GG/GX
  misc_feature (49)..(397): NCBI GI NO: 18411523 NR Description: expressed protein; protein id: At4g01050
  misc_feature (49)..(347): NCBI GI NO: 7485232 NR Description: hypothetical protein A_IG002N01
  misc_feature (49)..(333): NCBI GI NO: 25407077 NR Description: hypothetical protein AT4g01050
  misc_feature (237)..(397): NCBI GI NO: 25407077 NR Description: hypothetical protein AT4g01050
  misc_feature (52)..(164): NCBI GI NO: 34907512 NR Description: B1099D03.26
  misc_feature (9)..(174): NCBI GI NO: 21593550 NR Description: unknown [Arabidopsis thaliana]
  misc_feature (52)..(174): NCBI GI NO: 18404538 NR Description: rhodanese-like domain protein
  misc_feature (224)..(396): NCBI GI NO: 9294698 NR Description: gb|AAC26697
  misc_feature (224)..(396): NCBI GI NO: 30685117 NR Description: expressed protein [Arabidopsis thaliana]
  misc_feature (210)..(397): NCBI GI NO: 21616072 NR Description: Tic62 protein [Pisum sativum]
MLAGSRSRSSASTGSLTSSTITLSSSRQASRPSQCRFSLRSFSAEAAAPSPYSVLSAKAAYQRLLEEPDAQLVDIRPLKDAREAGTPDLKEAKKKAAAVPYNGEDKNGFLKKLTLKFKDPENTTLIILDKFDGNSELVAELVTANGYKAAFAVKDGAEGSRGWKSSNLPWKAPPKGFSFDLGELFGDGSDGLPVTIGLAAATGLGVLAYTEIETLLQFLGSAAVVQLVVTKLLYAEDRQKTLKQIDEFFNKKVAPKELIDEIKEIGQALLPLPGDAKSQPALATATQVAATQTAAPAEDATAEATTESDPATPTPLSPYTNYPDLKPPSTPTPPSVESEVETKASSTVTEGPAVVNSAPIADAATGSSPATTRPRPQSPYPNYPDFKPPSSPSPSAP

SEQ ID NO: 38647 - DNA, 876 bp, Zea mays subsp. mays
  misc_feature (1)..(876): Ceres Seq. ID no. 12375045
aatacgctattcttgctaatcttcaagcaggagagaaaaaagcataagctgagcatccatcaatggcggatgctggcaacgaggccgagggtctgacgctgttgggcctgcacgtgagccccttcgcgttgcgcgtgcgcatggcgctgagcctcaagggcctgagctacgagtacatcgagcaggacctgttccacaagggcgagctcctcctcagctcaaaccccgtgcacaagaaggtgcccgtgctcatccaccacggcaagcccatctgcgagtccctcgccgtcgtggagtacgtcgatgaggtctggcccggcgccgccgccaccatcctccccgccgacccccacggtcgcgccaccgctcgcttctgggccgcctacatcgacggcaagctgtttccggcgtggacagggatcatgaaggcggcgacggaggaagcgagggcggataagctgagggagacgcacgccgcggtcctcaacctggagaaggccttcgccgagatcagctctagctccagcaacgacggcgcggccttcttcggcggcgactccgtcgggtacctggacctcgcgctcgggtgctccctgccgtggttcggggcgctgcgcgccatgctcggcgtcgagatcatcgacgccgcccaggctccgctcctggtggcgtgggccgagcgatttggggagaccccggtggccaaggaggtgctgccgcagccggacgaggctgtggcctacgccaagaagattcaggcctactgggcttctgctaagaactgatgagcaccgaatcctgtcatgatgaaattgaagcagcaatacttgtataacactccaatcatggtgaataaaggcctctaaactgttggtt

SEQ ID NO: 38648 - protein, 240 aa, Zea mays subsp. mays
  peptide (1)..(240): Ceres Seq. ID no. 12375046
  misc_feature (92)..(212): Pfam Name: Pfam Description:  Glutathione S-transferase, C-terminal domain
  misc_feature (1)..(240): NCBI GI NO: 11385503 NR Description: glutathione S-transferase GST 26 [Zea mays]
  misc_feature (9)..(237): NCBI GI NO: 22022398 NR Description: glutathione-S-transferase Cla47
  misc_feature (4)..(238): NCBI GI NO: 37536354 NR Description: putative glutathione S-transferase
  misc_feature (4)..(238): NCBI GI NO: 37536352 NR Description: putative glutathione S-transferase
  misc_feature (4)..(233): NCBI GI NO: 11385517 NR Description: glutathione S-transferase GST 33 [Zea mays]
  misc_feature (1)..(238): NCBI GI NO: 37536308 NR Description: putative glutathione S-transferase
  misc_feature (1)..(238): NCBI GI NO: 37536280 NR Description: putative glutathione S-transferase
  misc_feature (1)..(238): NCBI GI NO: 33304612 NR Description: tau class GST protein 3
  misc_feature (1)..(238): NCBI GI NO: 33304610 NR Description: tau class GST protein 4
  misc_feature (13)..(240): NCBI GI NO: 11385509 NR Description: glutathione S-transferase GST 29 [Zea mays]
MADAGNEAEGLTLLGLHVSPFALRVRMALSLKGLSYEYIEQDLFHKGELLLSSNPVHKKVPVLIHHGKPICESLAVVEYVDEVWPGAAATILPADPHGRATARFWAAYIDGKLFPAWTGIMKAATEEARADKLRETHAAVLNLEKAFAEISSSSSNDGAAFFGGDSVGYLDLALGCSLPWFGALRAMLGVEIIDAAQAPLLVAWAERFGETPVAKEVLPQPDEAVAYAKKIQAYWASAKN

SEQ ID NO: 38649 - protein, 214 aa, Zea mays subsp. mays
  peptide (1)..(214): Ceres Seq. ID no. 12375047
  misc_feature (66)..(186): Pfam Name: Pfam Description:  Glutathione S-transferase, C-terminal domain
  misc_feature (1)..(214): NCBI GI NO: 11385503 NR Description: glutathione S-transferase GST 26 [Zea mays]
  misc_feature (1)..(211): NCBI GI NO: 22022398 NR Description: glutathione-S-transferase Cla47
  misc_feature (1)..(212): NCBI GI NO: 37536354 NR Description: putative glutathione S-transferase
  misc_feature (1)..(212): NCBI GI NO: 37536352 NR Description: putative glutathione S-transferase
  misc_feature (1)..(207): NCBI GI NO: 11385517 NR Description: glutathione S-transferase GST 33 [Zea mays]
  misc_feature (1)..(212): NCBI GI NO: 37536308 NR Description: putative glutathione S-transferase
  misc_feature (1)..(212): NCBI GI NO: 37536280 NR Description: putative glutathione S-transferase
  misc_feature (1)..(212): NCBI GI NO: 33304612 NR Description: tau class GST protein 3
  misc_feature (1)..(212): NCBI GI NO: 33304610 NR Description: tau class GST protein 4
  misc_feature (1)..(214): NCBI GI NO: 11385509 NR Description: glutathione S-transferase GST 29 [Zea mays]
MALSLKGLSYEYIEQDLFHKGELLLSSNPVHKKVPVLIHHGKPICESLAVVEYVDEVWPGAAATILPADPHGRATARFWAAYIDGKLFPAWTGIMKAATEEARADKLRETHAAVLNLEKAFAEISSSSSNDGAAFFGGDSVGYLDLALGCSLPWFGALRAMLGVEIIDAAQAPLLVAWAERFGETPVAKEVLPQPDEAVAYAKKIQAYWASAKN

SEQ ID NO: 38650 - protein, 120 aa, Zea mays subsp. mays
  peptide (1)..(120): Ceres Seq. ID no. 12375048
  misc_feature (1)..(92): Pfam Name: Pfam Description:  Glutathione S-transferase, C-terminal domain
  misc_feature (1)..(120): NCBI GI NO: 11385503 NR Description: glutathione S-transferase GST 26 [Zea mays]
  misc_feature (1)..(117): NCBI GI NO: 22022398 NR Description: glutathione-S-transferase Cla47
  misc_feature (1)..(118): NCBI GI NO: 37536354 NR Description: putative glutathione S-transferase
  misc_feature (1)..(118): NCBI GI NO: 37536352 NR Description: putative glutathione S-transferase
  misc_feature (1)..(113): NCBI GI NO: 11385517 NR Description: glutathione S-transferase GST 33 [Zea mays]
  misc_feature (1)..(118): NCBI GI NO: 37536308 NR Description: putative glutathione S-transferase
  misc_feature (1)..(118): NCBI GI NO: 37536280 NR Description: putative glutathione S-transferase
  misc_feature (1)..(118): NCBI GI NO: 33304612 NR Description: tau class GST protein 3
  misc_feature (1)..(118): NCBI GI NO: 33304610 NR Description: tau class GST protein 4
  misc_feature (1)..(120): NCBI GI NO: 11385509 NR Description: glutathione S-transferase GST 29 [Zea mays]
MKAATEEARADKLRETHAAVLNLEKAFAEISSSSSNDGAAFFGGDSVGYLDLALGCSLPWFGALRAMLGVEIIDAAQAPLLVAWAERFGETPVAKEVLPQPDEAVAYAKKIQAYWASAKN

SEQ ID NO: 38651 - DNA, 1562 bp, Zea mays subsp. mays
  misc_feature (1)..(1562): Ceres Seq. ID no. 12364256
gcacgagaccattacctagaacatcctaatcaaaaaccccactcgaaacaaatcccctcgtcatcgtccccaccgaaaccgcagtaccaccatacccgcgccgacgtgagtacgatggcctcctacttcgccggtccggccatcgtgccgtcgcagcacgccaccgcggcgcccgacaattccgcggtcgccaccccttctccggttaagtcgcgtgacccccgcttctccggatccgcctccaccaccgttcgtcacatcgcccgctccttcgccgccgccgaagccaccggtgatggcgaccttgtcatccctatcgacggcgtcgacgccaccaacgtttggattctggggagggtggtgagcgtggtgaacatggaggccagcgtgtcgttcacgctcgacgacggcaccgggaagatcgcgctcacgcggtggatcgctgaagatattgatgctaaggaagtggctttcgtccagaatggtatatacctcaaggttcaagttactctcgtagggtttcaaactaagcagtatggttttgctcgcgctattcggcctgttaccaatttcaatgaagtggcgctgcacttcattgattgtatttatttgcatttggaaaatgtacggcaaaagatgcaaggtcaattccctcgctccattcaagcaaatgtgtctacttatgagatgcaagctcaagttgctcacagtgttcaaacaaaatcacctgctcatatccccttttctggtggagctagagatcatcaagttgattttgctcctgaagtaaaccatgggcgattcccttcatcagttcaaacaaacacacctactcatgtacccttttctggtggagctagggaacagcaagttcactttactcctcaaccaaatcaattttcagcttacccaggtacaggtggtcatcagcacgatctgcagagtatggttttggaggttatgcaacgaccagatatacttgcacttgaaaatggagtacatgttgatgaagtggcaaggagacttggaatgccaagcgcacaaattatggtcaccgcccggcgtcttgtcaatttggcatgcctctgttccactattgatgattatcatttcaagtctattaaatgattgaccaatgttatcatcttcaagacttggcattttagattattggcagtttttaggtactgaatagcattcgcgtatatgctttaagtatgcacatctagtacatgcatttttctttgtacagagcactgaacacctgtttttagttgccaagctagttactcagattgtcagacatgcagatcggttagaaacttagaatgtcaaaccattggcatgctgcagttgctggatggatctgcttagtactgtttacttgtttactagaatgtcaaaccattgccaagcaagttactcatccatttcttttcatgcttccttccggttgtcatgcttgatcatcttttctaggcccctttttatttttttctcgaaaggcgtaggaaaactgcacccccatatattaagaagaatgaaagaaggttatgcttatg

SEQ ID NO: 38652 - protein, 375 aa, Zea mays subsp. mays
  peptide (1)..(375): Ceres Seq. ID no. 12364257
  misc_feature (130)..(188): Pfam Name: Pfam Description:  OB-fold nucleic acid binding domain
  misc_feature (41)..(221): NCBI GI NO: 18400560 NR Description: putative replication protein A1
  misc_feature (282)..(375): NCBI GI NO: 18400560 NR Description: putative replication protein A1
  misc_feature (41)..(208): NCBI GI NO: 25347925 NR Description: probable replication protein A1
  misc_feature (291)..(375): NCBI GI NO: 25347925 NR Description: probable replication protein A1
  misc_feature (39)..(280): NCBI GI NO: 9801268 NR Description: replication protein A2 [Oryza sativa]
  misc_feature (39)..(280): NCBI GI NO: 13516746 NR Description: replication protein A 30kDa
  misc_feature (43)..(285): NCBI GI NO: 6728969 NR Description: putative replication factor A
  misc_feature (43)..(285): NCBI GI NO: 18396383 NR Description: putative replication factor A
  misc_feature (81)..(206): NCBI GI NO: 21627816 NR Description: possible replication factor-a protein
  misc_feature (106)..(211): NCBI GI NO: 19074286 NR Description: REPLICATION FACTOR A PROTEIN 2 (32KDA SUBUNIT)
ARDHYLEHPNQKPHSKQIPSSSSPPKPQYHHTRADVSTMASYFAGPAIVPSQHATAAPDNSAVATPSPVKSRDPRFSGSASTTVRHIARSFAAAEATGDGDLVIPIDGVDATNVWILGRVVSVVNMEASVSFTLDDGTGKIALTRWIAEDIDAKEVAFVQNGIYLKVQVTLVGFQTKQYGFARAIRPVTNFNEVALHFIDCIYLHLENVRQKMQGQFPRSIQANVSTYEMQAQVAHSVQTKSPAHIPFSGGARDHQVDFAPEVNHGRFPSSVQTNTPTHVPFSGGAREQQVHFTPQPNQFSAYPGTGGHQHDLQSMVLEVMQRPDILALENGVHVDEVARRLGMPSAQIMVTARRLVNLACLCSTIDDYHFKSIK

SEQ ID NO: 38653 - protein, 337 aa, Zea mays subsp. mays
  peptide (1)..(337): Ceres Seq. ID no. 12364258
  misc_feature (92)..(150): Pfam Name: Pfam Description:  OB-fold nucleic acid binding domain
  misc_feature (3)..(183): NCBI GI NO: 18400560 NR Description: putative replication protein A1
  misc_feature (244)..(337): NCBI GI NO: 18400560 NR Description: putative replication protein A1
  misc_feature (3)..(170): NCBI GI NO: 25347925 NR Description: probable replication protein A1
  misc_feature (253)..(337): NCBI GI NO: 25347925 NR Description: probable replication protein A1
  misc_feature (1)..(242): NCBI GI NO: 9801268 NR Description: replication protein A2 [Oryza sativa]
  misc_feature (1)..(242): NCBI GI NO: 13516746 NR Description: replication protein A 30kDa
  misc_feature (5)..(247): NCBI GI NO: 6728969 NR Description: putative replication factor A
  misc_feature (5)..(247): NCBI GI NO: 18396383 NR Description: putative replication factor A
  misc_feature (43)..(168): NCBI GI NO: 21627816 NR Description: possible replication factor-a protein
  misc_feature (68)..(173): NCBI GI NO: 19074286 NR Description: REPLICATION FACTOR A PROTEIN 2 (32KDA SUBUNIT)
MASYFAGPAIVPSQHATAAPDNSAVATPSPVKSRDPRFSGSASTTVRHIARSFAAAEATGDGDLVIPIDGVDATNVWILGRVVSVVNMEASVSFTLDDGTGKIALTRWIAEDIDAKEVAFVQNGIYLKVQVTLVGFQTKQYGFARAIRPVTNFNEVALHFIDCIYLHLENVRQKMQGQFPRSIQANVSTYEMQAQVAHSVQTKSPAHIPFSGGARDHQVDFAPEVNHGRFPSSVQTNTPTHVPFSGGAREQQVHFTPQPNQFSAYPGTGGHQHDLQSMVLEVMQRPDILALENGVHVDEVARRLGMPSAQIMVTARRLVNLACLCSTIDDYHFKSIK

SEQ ID NO: 38654 - protein, 250 aa, Zea mays subsp. mays
  peptide (1)..(250): Ceres Seq. ID no. 12364259
  misc_feature (5)..(63): Pfam Name: Pfam Description:  OB-fold nucleic acid binding domain
  misc_feature (1)..(96): NCBI GI NO: 18400560 NR Description: putative replication protein A1
  misc_feature (157)..(250): NCBI GI NO: 18400560 NR Description: putative replication protein A1
  misc_feature (1)..(83): NCBI GI NO: 25347925 NR Description: probable replication protein A1
  misc_feature (166)..(250): NCBI GI NO: 25347925 NR Description: probable replication protein A1
  misc_feature (1)..(155): NCBI GI NO: 9801268 NR Description: replication protein A2 [Oryza sativa]
  misc_feature (1)..(155): NCBI GI NO: 13516746 NR Description: replication protein A 30kDa
  misc_feature (1)..(160): NCBI GI NO: 6728969 NR Description: putative replication factor A
  misc_feature (1)..(160): NCBI GI NO: 18396383 NR Description: putative replication factor A
  misc_feature (1)..(81): NCBI GI NO: 21627816 NR Description: possible replication factor-a protein
  misc_feature (1)..(86): NCBI GI NO: 19074286 NR Description: REPLICATION FACTOR A PROTEIN 2 (32KDA SUBUNIT)
MEASVSFTLDDGTGKIALTRWIAEDIDAKEVAFVQNGIYLKVQVTLVGFQTKQYGFARAIRPVTNFNEVALHFIDCIYLHLENVRQKMQGQFPRSIQANVSTYEMQAQVAHSVQTKSPAHIPFSGGARDHQVDFAPEVNHGRFPSSVQTNTPTHVPFSGGAREQQVHFTPQPNQFSAYPGTGGHQHDLQSMVLEVMQRPDILALENGVHVDEVARRLGMPSAQIMVTARRLVNLACLCSTIDDYHFKSIK

SEQ ID NO: 38655 - DNA, 848 bp, Zea mays subsp. mays
  misc_feature (1)..(848): Ceres Seq. ID no. 12374850
gcccgtgccccacttcatccgcgcgcgcgtcagagactcagagcccaagcatagacgtgcgccttcagcagcgcgcagcgacgtcacctgagcgcgcgacacgccccagcgtccacagttcactgcgcgcgcgtcgtgcaggacaccacaccatggcacctgccgcccctgctgccacgggcgcggcgagccccgccgtcaccaagggcggcggcaaggttgcagcacgctccgtcaggctggggctgcccgcgctgccgccgctgcccggcctcagcctcgccgcgcagggccagacccgggccgcgtcgtccttgtacaagcggctggcgagggacgtggtggccatggccgcgggggagccgcggcgcctcaggctgccaacgaggagctgaccgagttcgtcgacgcgttgaaaaaggagtgggacaggatcgaggacaagtacgcggtgaccacgctcgccgtcgccgccacgcttggcatgtggagcgccggtggagtagtgtcggcaatcgataggctccccgtggttcctggtctgatgcaggccgttggaattggatacagcgggtggttcgcgtaccgaaacctgctattcaagcctgacagggatgctttctttgcgaaggtcagggagatctacgaggatattatcagcgcttaacagatgggagcaccaatgcaaagctcatccaaattaatgaagttcactttaagacatccttctagtttgctgctgttcagttgtttttgctgtgatgtatttcagtgtagcttctaatttggtccttactcagtgcacgtatggataagtaatttggacgttaaatttagttttctggccc

SEQ ID NO: 38656 - protein, 130 aa, Zea mays subsp. mays
  peptide (1)..(130): Ceres Seq. ID no. 12374851
  misc_feature (50)..(120): NCBI GI NO: 37536446 NR Description: hypothetical protein
PCPTSSARASETQSPSIDVRLQQRAATSPERATRPSVHSSLRARRAGHHTMAPAAPAATGAASPAVTKGGGKVAARSVRLGLPALPPLPGLSLAAQGQTRAASSLYKRLARDVVAMAAGEPRRLRLPTRS

SEQ ID NO: 38657 - protein, 80 aa, Zea mays subsp. mays
  peptide (1)..(80): Ceres Seq. ID no. 12374852
  misc_feature (1)..(70): NCBI GI NO: 37536446 NR Description: hypothetical protein
MAPAAPAATGAASPAVTKGGGKVAARSVRLGLPALPPLPGLSLAAQGQTRAASSLYKRLARDVVAMAAGEPRRLRLPTRS

SEQ ID NO: 38658 - DNA, 1213 bp, Zea mays subsp. mays
  misc_feature (1)..(1213): Ceres Seq. ID no. 15175531
aaccaaccaaaatcgtggctgcggctgtggacaatcggcagcttgcgagtagctccggtacggaggggatcatggaggaggggcggcaactggaagcggcggcgttcggttttccggcgccggtgcagccgggggccacgcgcgtggggtggatcggcatcggcgtcatgggcggcgccatggccaagcgcctcctcgcggcagggtacgcggtcaccgcgtacgctcgcacgccgtccagggcggagagcctcgtcgcggcgggcgcgagcctcgcggactcgccggccgccgtggccgccgcgtccgacgtggtgttcaccatggtcgggaaccccggcgacgtccgcgcggtggtcctggacccggccgccggggccctcgcgggcctccgccgcggcggcgtgctggtggactgcacgagctcctccccgtccctcgcgcgcgaggtcgccgcggccgcggccgcgggcgggctgccacgccgtcgacgcgccggtctccggaggcgacgtgggcgcgcgggacggcacgctggccgtcttcgccggcggcgacgaggccgtcgtcgcctggctcgcgccgctcttcgccagcctcggcagggcgacccgcatgggcgcgccgggcagcggccagagcagcaagatcgccaaccaggtcgcggtggccggcgcggtggtgggcctcggcgaggccgtgtccttcgcccgcgcggcggggctcgacgcgccgctgttcctcggcgcggtgtccaggggcgcggcctggtcgcgcgtcatggacgtcttcggcggccgcttgctccgccgcgagttcgcgtccgggggcagcgtacggtacatcgtcaaggacctcggcatggcgctggaggtcggagacggcggggaggaggaggtcaacgtgctgcctggagcggcgctgtaccggcagatgttctcggccatggtggccaatggcgacgcggacctgagcttgcagggactgatcaccgttatcgagcgcctgaacggcattgcaaagtagcgaaggctgcagcaggcaaggtgctgcttttttgttgatggagactgcaggaaaggtgttcgccggaatgcaacactggacccgaagacgcctgagcttgtgacatggacttgttttttgtattcaaaacactgtttcgagcttgatttgcgtttgtaatttcgcccctaaataaaactttgcttcc

SEQ ID NO: 38659 - protein, 353 aa, Zea mays subsp. mays
  peptide (1)..(353): Ceres Seq. ID no. 15175532
  misc_feature (46)..(156): Pfam Name: Pfam Description:  NAD binding domain of 6-phosphogluconate dehydrogenase
  misc_feature (40)..(156): NCBI GI NO: 34909392 NR Description: putative dehydrogenase
  misc_feature (37)..(154): NCBI GI NO: 18409781 NR Description: dehydrogenase -related [Arabidopsis thaliana]
  misc_feature (37)..(154): NCBI GI NO: 25283629 NR Description: probable dehydrogenase F23N20.17
  misc_feature (41)..(155): NCBI GI NO: 15233455 NR Description: expressed protein [Arabidopsis thaliana]
  misc_feature (37)..(154): NCBI GI NO: 30698779 NR Description: dehydrogenase -related [Arabidopsis thaliana]
  misc_feature (47)..(155): NCBI GI NO: 32472744 NR Description: 3-hydroxyisobutyrate dehydrogenase [Pirellula sp.]
  misc_feature (47)..(154): NCBI GI NO: 28379084 NR Description: 3-hydroxyisobutyrate dehydrogenase
  misc_feature (47)..(159): NCBI GI NO: 23113025 NR Description: hypothetical protein
  misc_feature (47)..(156): NCBI GI NO: 22982959 NR Description: hypothetical protein [Burkholderia fungorum]
  misc_feature (32)..(159): NCBI GI NO: 15600778 NR Description: 3-hydroxyisobutyrate dehydrogenase, putative
PTKIVAAAVDNRQLASSSGTEGIMEEGRQLEAAAFGFPAPVQPGATRVGWIGIGVMGGAMAKRLLAAGYAVTAYARTPSRAESLVAAGASLADSPAAVAAASDVVFTMVGNPGDVRAVVLDPAAGALAGLRRGGVLVDCTSSSPSLAREVAAAAAAGGLPRRRRAGLRRRRGRAGRHAGRLRRRRRGRRRLARAALRQPRQGDPHGRAGQRPEQQDRQPGRGGRRGGGPRRGRVLRPRGGARRAAVPRRGVQGRGLVARHGRLRRPLAPPRVRVRGQRTVHRQGPRHGAGGRRRRGGGGQRAAWSGAVPADVLGHGGQWRRGPELAGTDHRYRAPERHCKVAKAAAGKVLLFC

SEQ ID NO: 38660 - protein, 341 aa, Zea mays subsp. mays
  peptide (1)..(341): Ceres Seq. ID no. 15175533
  misc_feature (160)..(337): NCBI GI NO: 34909392 NR Description: putative dehydrogenase
  misc_feature (145)..(340): NCBI GI NO: 18409781 NR Description: dehydrogenase -related [Arabidopsis thaliana]
  misc_feature (145)..(340): NCBI GI NO: 25283629 NR Description: probable dehydrogenase F23N20.17
  misc_feature (160)..(340): NCBI GI NO: 15233455 NR Description: expressed protein [Arabidopsis thaliana]
  misc_feature (157)..(340): NCBI GI NO: 30698779 NR Description: dehydrogenase -related [Arabidopsis thaliana]
  misc_feature (162)..(339): NCBI GI NO: 32472744 NR Description: 3-hydroxyisobutyrate dehydrogenase [Pirellula sp.]
  misc_feature (161)..(332): NCBI GI NO: 28379084 NR Description: 3-hydroxyisobutyrate dehydrogenase
  misc_feature (159)..(329): NCBI GI NO: 23113025 NR Description: hypothetical protein
  misc_feature (163)..(330): NCBI GI NO: 22982959 NR Description: hypothetical protein [Burkholderia fungorum]
  misc_feature (157)..(291): NCBI GI NO: 15600778 NR Description: 3-hydroxyisobutyrate dehydrogenase, putative
NQPKSWLRLWTIGSLRVAPVRRGSWRRGGNWKRRRSVFRRRCSRGPRAWGGSASASWAAPWPSASSRQGTRSPRTLARRPGRRASSRRARASRTRRPPWPPRPTWCSPWSGTPATSARWSWTRPPGPSRASAAAACWWTARAPPRPSRARSPRPRPRAGCHAVDAPVSGGDVGARDGTLAVFAGGDEAVVAWLAPLFASLGRATRMGAPGSGQSSKIANQVAVAGAVVGLGEAVSFARAAGLDAPLFLGAVSRGAAWSRVMDVFGGRLLRREFASGGSVRYIVKDLGMALEVGDGGEEEVNVLPGAALYRQMFSAMVANGDADLSLQGLITVIERLNGIAK

SEQ ID NO: 38661 - protein, 330 aa, Zea mays subsp. mays
  peptide (1)..(330): Ceres Seq. ID no. 15175534
  misc_feature (23)..(133): Pfam Name: Pfam Description:  NAD binding domain of 6-phosphogluconate dehydrogenase
  misc_feature (17)..(133): NCBI GI NO: 34909392 NR Description: putative dehydrogenase
  misc_feature (14)..(131): NCBI GI NO: 18409781 NR Description: dehydrogenase -related [Arabidopsis thaliana]
  misc_feature (14)..(131): NCBI GI NO: 25283629 NR Description: probable dehydrogenase F23N20.17
  misc_feature (18)..(132): NCBI GI NO: 15233455 NR Description: expressed protein [Arabidopsis thaliana]
  misc_feature (14)..(131): NCBI GI NO: 30698779 NR Description: dehydrogenase -related [Arabidopsis thaliana]
  misc_feature (24)..(132): NCBI GI NO: 32472744 NR Description: 3-hydroxyisobutyrate dehydrogenase [Pirellula sp.]
  misc_feature (24)..(131): NCBI GI NO: 28379084 NR Description: 3-hydroxyisobutyrate dehydrogenase
  misc_feature (24)..(136): NCBI GI NO: 23113025 NR Description: hypothetical protein
  misc_feature (24)..(133): NCBI GI NO: 22982959 NR Description: hypothetical protein [Burkholderia fungorum]
  misc_feature (9)..(136): NCBI GI NO: 15600778 NR Description: 3-hydroxyisobutyrate dehydrogenase, putative
MEEGRQLEAAAFGFPAPVQPGATRVGWIGIGVMGGAMAKRLLAAGYAVTAYARTPSRAESLVAAGASLADSPAAVAAASDVVFTMVGNPGDVRAVVLDPAAGALAGLRRGGVLVDCTSSSPSLAREVAAAAAAGGLPRRRRAGLRRRRGRAGRHAGRLRRRRRGRRRLARAALRQPRQGDPHGRAGQRPEQQDRQPGRGGRRGGGPRRGRVLRPRGGARRAAVPRRGVQGRGLVARHGRLRRPLAPPRVRVRGQRTVHRQGPRHGAGGRRRRGGGGQRAAWSGAVPADVLGHGGQWRRGPELAGTDHRYRAPERHCKVAKAAAGKVLLFC

SEQ ID NO: 38662 - DNA, 743 bp, Zea mays subsp. mays
  misc_feature (1)..(743): Ceres Seq. ID no. 14301971
aaggtttaatgtcattagacgactttgacgatgctgaaggcggctccaagctggaacgattctcacgggagacgctggatccatcattgtcatggaaggacgtggagtggctcaagtccatcaccagcctgccgattctgctcaagggcatcgtcaccgcggaagacgcgaggaaggccgtggaggcgtgggcggccggcttgatcgtgtccaaccacggcgcccggcagctggactatgcgccggccaccatctcggcgctcgaagaggtggttaaggcggtggcgggggctgtgccggtgctggtggacggcggcgtccggcgcggcaccgacgtgttgaaggcgctggcgctcggcgccaaggcagtcatggtgggcaggccggtgttctttgggctggcggcgcgcggggaagccggcgcgaggcacgtgatcgagatgttgaacaaggagctggagttggccatggcgctctgcggctgccgtagcgtcgcggaggtcaccagggcgcacgtccagaccgagggcgaccggatcagggccctgctgtgacttataaataagcgaccatatccgaggccgaccaccgtgctgtctgggttgcgatatgatttatatgatacgtgagggcatgtgatcgattgttgcctccacacagataagcttactattgccagagcctgggctggactatgctttcagtgattatctaaatcaaatagactgaatgctaaagggaac

SEQ ID NO: 38663 - protein, 183 aa, Zea mays subsp. mays
  peptide (1)..(183): Ceres Seq. ID no. 14301972
  misc_feature (33)..(174): Pfam Name: Pfam Description:  FMN-dependent dehydrogenase
  misc_feature (1)..(183): NCBI GI NO: 33146942 NR Description: putative (S)-2-hydroxy-acid oxidase
  misc_feature (33)..(183): NCBI GI NO: 34906684 NR Description: putative (S)-2-hydroxy-acid oxidase
  misc_feature (14)..(183): NCBI GI NO: 15231789 NR Description: glycolate oxidase -related [Arabidopsis thaliana]
  misc_feature (14)..(183): NCBI GI NO: 21537253 NR Description: glycolate oxidase, putative [Arabidopsis thaliana]
  misc_feature (14)..(183): NCBI GI NO: 9294640 NR Description: glycolate oxidase [Arabidopsis thaliana]
  misc_feature (14)..(183): NCBI GI NO: 15231792 NR Description: glycolate oxidase -related [Arabidopsis thaliana]
  misc_feature (14)..(183): NCBI GI NO: 21618144 NR Description: glycolate oxidase, putative [Arabidopsis thaliana]
  misc_feature (3)..(182): NCBI GI NO: 15229497 NR Description: glycolate oxidase [Arabidopsis thaliana]
  misc_feature (10)..(177): NCBI GI NO: 27549566 NR Description: glycolate oxidase [Zantedeschia aethiopica]
  misc_feature (3)..(179): NCBI GI NO: 34395056 NR Description: putative glycolate oxidase
GLMSLDDFDDAEGGSKLERFSRETLDPSLSWKDVEWLKSITSLPILLKGIVTAEDARKAVEAWAAGLIVSNHGARQLDYAPATISALEEVVKAVAGAVPVLVDGGVRRGTDVLKALALGAKAVMVGRPVFFGLAARGEAGARHVIEMLNKELELAMALCGCRSVAEVTRAHVQTEGDRIRALL

SEQ ID NO: 38664 - protein, 181 aa, Zea mays subsp. mays
  peptide (1)..(181): Ceres Seq. ID no. 14301973
  misc_feature (31)..(172): Pfam Name: Pfam Description:  FMN-dependent dehydrogenase
  misc_feature (1)..(181): NCBI GI NO: 33146942 NR Description: putative (S)-2-hydroxy-acid oxidase
  misc_feature (31)..(181): NCBI GI NO: 34906684 NR Description: putative (S)-2-hydroxy-acid oxidase
  misc_feature (12)..(181): NCBI GI NO: 15231789 NR Description: glycolate oxidase -related [Arabidopsis thaliana]
  misc_feature (12)..(181): NCBI GI NO: 21537253 NR Description: glycolate oxidase, putative [Arabidopsis thaliana]
  misc_feature (12)..(181): NCBI GI NO: 9294640 NR Description: glycolate oxidase [Arabidopsis thaliana]
  misc_feature (12)..(181): NCBI GI NO: 15231792 NR Description: glycolate oxidase -related [Arabidopsis thaliana]
  misc_feature (12)..(181): NCBI GI NO: 21618144 NR Description: glycolate oxidase, putative [Arabidopsis thaliana]
  misc_feature (1)..(180): NCBI GI NO: 15229497 NR Description: glycolate oxidase [Arabidopsis thaliana]
  misc_feature (8)..(175): NCBI GI NO: 27549566 NR Description: glycolate oxidase [Zantedeschia aethiopica]
  misc_feature (1)..(177): NCBI GI NO: 34395056 NR Description: putative glycolate oxidase
MSLDDFDDAEGGSKLERFSRETLDPSLSWKDVEWLKSITSLPILLKGIVTAEDARKAVEAWAAGLIVSNHGARQLDYAPATISALEEVVKAVAGAVPVLVDGGVRRGTDVLKALALGAKAVMVGRPVFFGLAARGEAGARHVIEMLNKELELAMALCGCRSVAEVTRAHVQTEGDRIRALL

SEQ ID NO: 38665 - DNA, 1005 bp, Zea mays subsp. mays
  misc_feature (1)..(1005): Ceres Seq. ID no. 12354677
ataggtagctcactgtactgtaccctagctagctagtcgcttccagtccagagcgtcccgagaccaatggcctgccacaccgtcatcccgcttcttctcttcctcccttccctcttggcagcggctgcggacgacgtcgcccctgctcctgctcctgccccggcggcaccacccgagcccaccaacaacaacctgaccagcatcctggaaaatggcgggcagtacaccactctgctccgcctcctgaacgccacccggataacggaacagatcagcagccaactcaagaactcgtacgacggcctgaccttcttcgcgcccaacgacaacgccttcgccaagctcaaggccgccggcacgctcaacgccctcgcagaccaagaccagatccagctgctgctctaccacgtcctgccccgctactacagcctcgccacgttccagacggccagcaacccgctgcacaccgaggcgtcgggcccctccggcatgtacagtgtcaacgtcaccgccagcaccacgaaccccctggtgaacctttccactggcgtcgtcgacgtgcccatcagcagcacgctgttcgctcgcttcccgttcgccgtctactccgtcgacagcgtgctgctgcccccgcagctattccacacggcttcttctgcgccggcaccaggacagtctgcagaggcgccggtgcctggaaaggcggcaccagggcacaaggggggcgtcccaaagagcggcgacgatgtggcagcgcagccgtccgctgcggtggatggggcacaagacaccagtgtcgccgcggatggtagagggagcgcggcgtggatgacgccggtggttgttttgggtggcatggccctactgctttgcgcgtgagcagtgtgtgcttcgttctgttttgttttccttggcatctctctgatttctctctcgtggccggtttgtatgtactgcccttaaaaatgtaattctgcatttatgataacgatgatacgatggtcc

SEQ ID NO: 38666 - protein, 270 aa, Zea mays subsp. mays
  peptide (1)..(270): Ceres Seq. ID no. 12354678
  misc_feature (45)..(188): Pfam Name: Pfam Description:  Fasciclin domain
  misc_feature (16)..(235): NCBI GI NO: 34910950 NR Description: putative arabinogalactan-like protein
  misc_feature (19)..(246): NCBI GI NO: 2129473 NR Description: arabinogalactan-like protein - loblolly pine
  misc_feature (5)..(225): NCBI GI NO: 18379157 NR Description: fasciclin-like arabinogalactan-protein
  misc_feature (5)..(225): NCBI GI NO: 24417458 NR Description: unknown [Arabidopsis thaliana]
  misc_feature (29)..(207): NCBI GI NO: 18399381 NR Description: fasciclin-like arabinogalactan-protein
  misc_feature (29)..(207): NCBI GI NO: 25350183 NR Description: probable surface protein
  misc_feature (11)..(255): NCBI GI NO: 21553523 NR Description: arabinogalactan protein-like
  misc_feature (4)..(236): NCBI GI NO: 15239344 NR Description: fasciclin-like arabinogalactan-protein
  misc_feature (4)..(236): NCBI GI NO: 21553590 NR Description: arabinogalactan protein-like
  misc_feature (11)..(255): NCBI GI NO: 15242651 NR Description: fasciclin-like arabinogalactan-protein
MACHTVIPLLLFLPSLLAAAADDVAPAPAPAPAAPPEPTNNNLTSILENGGQYTTLLRLLNATRITEQISSQLKNSYDGLTFFAPNDNAFAKLKAAGTLNALADQDQIQLLLYHVLPRYYSLATFQTASNPLHTEASGPSGMYSVNVTASTTNPLVNLSTGVVDVPISSTLFARFPFAVYSVDSVLLPPQLFHTASSAPAPGQSAEAPVPGKAAPGHKGGVPKSGDDVAAQPSAAVDGAQDTSVAADGRGSAAWMTPVVVLGGMALLLCA

SEQ ID NO: 38667 - DNA, 1591 bp, Zea mays subsp. mays
  misc_feature (1)..(1591): Ceres Seq. ID no. 12374664
aaacgctcaacttgaaagtcacaggacagcacacaccccacccacaactaccaaccttctccggaaggccaaatccccccgggccaagggaaacgagggagagagaccctccgcccctctcctctccctctccttccggtgaggcggtgagctatggagtcggcagcggccgcgaagacggtggagcggctggcgcagcgcctggtgccgccggcggagcccacccccactgccccccaccgcctgtcgtggctggaccggtacccgacgcagatggcgctcatcgagtcgctgcacgtcttcaagcccgacccggcgcgtgacgggctcagccccgcggagaccatagagcgggccctcgcacgggcgctggtcgactactacccgctcgccggccgcctcgccgtgtccgagagcgccgggggcctgcacgtcgactgcagcgctgagggcgtctggttcatcgaggccgccgtacggtgccgccttgaggacgtcgactacctcgagtacccgctccagatccccaaggacgagctgctcccgcacccgctgccgaggcccagccacgaggaggagagcaagctcatcctgctcgtccaggtgacggcgttcgcgtgcggcggcttcgtggtgggcttccgcttcagccacgcggtggcggacgggctcggcgcggccaagttcatgggcgcggtgggggagctggcgcgcggggcggaccaggtgtccgtggcgcccacctgggcccgcgacgccatcccagacccgtcgggcgcgctggtcggcagcctccccgagcccacgggcgccaagcgcctcgagtacctggccatcgacatctccgccgactacatcgaccacttcaagtcccagttcgccgcggccacgggcgggggccgctgctcggccttcgaggtcctcatcgccaaggcgtggcagagccgcacccgcgccgcggggttcgaggaccccgacacccccgtgcagctctgcttcgccatgaacgcgcgcccgctcctcggcgcccgcctcccgcggggcggcgccggcttctacggcaactgctactacatcatgcgcgtggcgtccacggccgacaaggtgtcctcgtcgtccgtcaccgacgtggtgaagatcatcagggaggggaagaagcggctgccattggagtttgcgcggtgggcggcgggggaggagggcgccgacggcgtggacccctaccagatcacctccgactaccggacgctgctggtgtcggattggacgcgcctcggcttcgcggaggtggactacgggtggggcccgccagcccacgtggtaccgctgacgaacctggactacatcgccacgtgcatcctcgtcaagccatgggcccacaagccaggggcgaggctcatcacgcagtgcgtgacgcccgaccgcgtctcgcgcttccacgacgccatggtggacatgaactagcgccccgcctcgtcctgcgttcaccacggcctcccgtttgttcatgggtttcttgttttttttcctcctctcagttactgtggtaattattagttggtattataattactaatcacattgctgcctc

SEQ ID NO: 38668 - protein, 436 aa, Zea mays subsp. mays
  peptide (1)..(436): Ceres Seq. ID no. 12374665
  misc_feature (8)..(435): Pfam Name: Pfam Description:  Transferase family
  misc_feature (5)..(436): NCBI GI NO: 34906150 NR Description: putative 0-deacetylbaccatin III-10-O-acetyltransferase
  misc_feature (10)..(428): NCBI GI NO: 34906304 NR Description: unnamed protein product
  misc_feature (1)..(432): NCBI GI NO: 34912652 NR Description: putative acetyl transferase
  misc_feature (7)..(434): NCBI GI NO: 15228696 NR Description: putative protein; protein id: At3g62160.1
  misc_feature (6)..(420): NCBI GI NO: 34912654 NR Description: putative acetyl transferase
  misc_feature (10)..(428): NCBI GI NO: 38346537 NR Description: OSJNBa0040D17.12
  misc_feature (158)..(432): NCBI GI NO: 18558566 NR Description: putative 0-deacetylbaccatin III-10-O-acetyltransferase-like protein
  misc_feature (1)..(391): NCBI GI NO: 37535814 NR Description: putative hypersensitivity-related (hsr)protein
  misc_feature (4)..(384): NCBI GI NO: 18034655 NR Description: 10-deacetylbaccatin III-10-O-acetyl transferase
  misc_feature (2)..(391): NCBI GI NO: 22854880 NR Description: benzoyl coenzyme A: benzyl alcohol benzoyltransferase
MESAAAAKTVERLAQRLVPPAEPTPTAPHRLSWLDRYPTQMALIESLHVFKPDPARDGLSPAETIERALARALVDYYPLAGRLAVSESAGGLHVDCSAEGVWFIEAAVRCRLEDVDYLEYPLQIPKDELLPHPLPRPSHEEESKLILLVQVTAFACGGFVVGFRFSHAVADGLGAAKFMGAVGELARGADQVSVAPTWARDAIPDPSGALVGSLPEPTGAKRLEYLAIDISADYIDHFKSQFAAATGGGRCSAFEVLIAKAWQSRTRAAGFEDPDTPVQLCFAMNARPLLGARLPRGGAGFYGNCYYIMRVASTADKVSSSSVTDVVKIIREGKKRLPLEFARWAAGEEGADGVDPYQITSDYRTLLVSDWTRLGFAEVDYGWGPPAHVVPLTNLDYIATCILVKPWAHKPGARLITQCVTPDRVSRFHDAMVDMN

SEQ ID NO: 38669 - protein, 396 aa, Zea mays subsp. mays
  peptide (1)..(396): Ceres Seq. ID no. 12374666
  misc_feature (1)..(395): Pfam Name: Pfam Description:  Transferase family
  misc_feature (1)..(396): NCBI GI NO: 34906150 NR Description: putative 0-deacetylbaccatin III-10-O-acetyltransferase
  misc_feature (1)..(388): NCBI GI NO: 34906304 NR Description: unnamed protein product
  misc_feature (1)..(392): NCBI GI NO: 34912652 NR Description: putative acetyl transferase
  misc_feature (1)..(394): NCBI GI NO: 15228696 NR Description: putative protein; protein id: At3g62160.1
  misc_feature (1)..(380): NCBI GI NO: 34912654 NR Description: putative acetyl transferase
  misc_feature (1)..(388): NCBI GI NO: 38346537 NR Description: OSJNBa0040D17.12
  misc_feature (118)..(392): NCBI GI NO: 18558566 NR Description: putative 0-deacetylbaccatin III-10-O-acetyltransferase-like protein
  misc_feature (1)..(351): NCBI GI NO: 37535814 NR Description: putative hypersensitivity-related (hsr)protein
  misc_feature (1)..(344): NCBI GI NO: 18034655 NR Description: 10-deacetylbaccatin III-10-O-acetyl transferase
  misc_feature (1)..(351): NCBI GI NO: 22854880 NR Description: benzoyl coenzyme A: benzyl alcohol benzoyltransferase
MALIESLHVFKPDPARDGLSPAETIERALARALVDYYPLAGRLAVSESAGGLHVDCSAEGVWFIEAAVRCRLEDVDYLEYPLQIPKDELLPHPLPRPSHEEESKLILLVQVTAFACGGFVVGFRFSHAVADGLGAAKFMGAVGELARGADQVSVAPTWARDAIPDPSGALVGSLPEPTGAKRLEYLAIDISADYIDHFKSQFAAATGGGRCSAFEVLIAKAWQSRTRAAGFEDPDTPVQLCFAMNARPLLGARLPRGGAGFYGNCYYIMRVASTADKVSSSSVTDVVKIIREGKKRLPLEFARWAAGEEGADGVDPYQITSDYRTLLVSDWTRLGFAEVDYGWGPPAHVVPLTNLDYIATCILVKPWAHKPGARLITQCVTPDRVSRFHDAMVDMN

SEQ ID NO: 38670 - protein, 258 aa, Zea mays subsp. mays
  peptide (1)..(258): Ceres Seq. ID no. 12374667
  misc_feature (1)..(257): Pfam Name: Pfam Description:  Transferase family
  misc_feature (1)..(258): NCBI GI NO: 34906150 NR Description: putative 0-deacetylbaccatin III-10-O-acetyltransferase
  misc_feature (1)..(250): NCBI GI NO: 34906304 NR Description: unnamed protein product
  misc_feature (1)..(254): NCBI GI NO: 34912652 NR Description: putative acetyl transferase
  misc_feature (1)..(256): NCBI GI NO: 15228696 NR Description: putative protein; protein id: At3g62160.1
  misc_feature (1)..(242): NCBI GI NO: 34912654 NR Description: putative acetyl transferase
  misc_feature (1)..(250): NCBI GI NO: 38346537 NR Description: OSJNBa0040D17.12
  misc_feature (1)..(254): NCBI GI NO: 18558566 NR Description: putative 0-deacetylbaccatin III-10-O-acetyltransferase-like protein
  misc_feature (1)..(213): NCBI GI NO: 37535814 NR Description: putative hypersensitivity-related (hsr)protein
  misc_feature (1)..(206): NCBI GI NO: 18034655 NR Description: 10-deacetylbaccatin III-10-O-acetyl transferase
  misc_feature (1)..(213): NCBI GI NO: 22854880 NR Description: benzoyl coenzyme A: benzyl alcohol benzoyltransferase
MGAVGELARGADQVSVAPTWARDAIPDPSGALVGSLPEPTGAKRLEYLAIDISADYIDHFKSQFAAATGGGRCSAFEVLIAKAWQSRTRAAGFEDPDTPVQLCFAMNARPLLGARLPRGGAGFYGNCYYIMRVASTADKVSSSSVTDVVKIIREGKKRLPLEFARWAAGEEGADGVDPYQITSDYRTLLVSDWTRLGFAEVDYGWGPPAHVVPLTNLDYIATCILVKPWAHKPGARLITQCVTPDRVSRFHDAMVDMN

SEQ ID NO: 38671 - DNA, 1486 bp, Zea mays subsp. mays
  misc_feature (1)..(1486): Ceres Seq. ID no. 12435191
aagggcgaggaaaactgaaagcctacgaaaatggtggagctcacctccttatccccagggccaccacgtccttctccgtttactcctcggcgccggccgccgccgacaccacatgtccgtacctcctcgcgtcgtcgcgggaggatcctcggcgccgcgaccgccacgcctggcgccgacgactaccactccaccatccgctccctcaactcccgcggccgccacgtcccccgaaaatccctcgggcagaactacacgctcaactccaaggtgaacgaggagctggtggcggcggcgggggtggaggacggtgacgtcgtgctcgagatcggcccaggcaccggctcgctcacttccgcgctgctccaggccggcgctaccgtatttgccgtcgagaaggacaagcatatggctactcttgttaaagataggtttggatctacagaacagttgaaggtcattgaagaagacatcacaaaatttcacatccgttcccattttcttcctttcatgaaggagaaatacggtgccaccaaaaaacttgcaaaggttgcatcaaacttaccattcaatgtcagcaccgaagttgtcaaactactactcccaatgggggatgttttctctgtcgtggtgctcatgcttcaggatgaaacagcagtacgctttgcagatgcttcaatacaaagtccagagtaccgatctatcaatgtgtttgtggatttttactcggaacctgaatacaagttcagagtagacagagagaattttttccctcggcctaaggttgatggtgctgttatcagcttcaaactaaagaatgcggaggagtatccgccagttagttccccaaaaagcttcttttcaatggtgaattccgctttcatggggaagcgcaagatgcttaggaaatctcttcagcacatatgctcttcttctgacattgaggctgctcttgacaacattggccttccagttacagctagaccttctgatctgattttggatgatttcgtgagattgcacaatcatttagcgaaagtatgactaagaagtgcctttcaaaatgcctaaggaattgcttgttggcatggtgttcaacagttggagtaacttacgcctgaccgcctgagagttgctatgcagctacaggtgccttcagctcagctccggggcgaagccaggaattacatgtagggaagccggccgaaagagccatcttgtaaaaaatgatcgcggttcaactggtttggttactcgcacttatcgtctgtctgagttaatacttgacaaaaaaaaaaacacagctcaactggttaggtttctcgtagtggtggtggtcgttcggggtttattatagatagtgagggtttattgtattttgatcgtagacgctaatcataaactgtaatgaatggacgccttcgttctctctgagtacaaaggccccattgaaatatgtatgagaaacaaagcaaatttagagggc

SEQ ID NO: 38672 - protein, 337 aa, Zea mays subsp. mays
  peptide (1)..(337): Ceres Seq. ID no. 12435192
  misc_feature (33)..(336): NCBI GI NO: 15220982 NR Description: dimethyladenosine transferase, putative
  misc_feature (33)..(233): NCBI GI NO: 25518538 NR Description: hypothetical protein F22M8
  misc_feature (67)..(334): NCBI GI NO: 33242431 NR Description: dimethyladenosine transferase
  misc_feature (67)..(334): NCBI GI NO: 15618967 NR Description: Dimethyladenosine Transferase
  misc_feature (67)..(334): NCBI GI NO: 23039948 NR Description: hypothetical protein
  misc_feature (62)..(334): NCBI GI NO: 29840068 NR Description: dimethyladenosine transferase
  misc_feature (54)..(330): NCBI GI NO: 15835248 NR Description: dimethyladenosine transferase
  misc_feature (54)..(336): NCBI GI NO: 15605077 NR Description: Dimethyladenosine Transferase
  misc_feature (64)..(337): NCBI GI NO: 15595789 NR Description: rRNA (adenine-N6,N6)-dimethyltransferase
  misc_feature (67)..(332): NCBI GI NO: 22999516 NR Description: hypothetical protein [Magnetococcus sp. MC-1]
MVELTSLSPGPPRPSPFTPRRRPPPTPHVRTSSRRRGRILGAATATPGADDYHSTIRSLNSRGRHVPRKSLGQNYTLNSKVNEELVAAAGVEDGDVVLEIGPGTGSLTSALLQAGATVFAVEKDKHMATLVKDRFGSTEQLKVIEEDITKFHIRSHFLPFMKEKYGATKKLAKVASNLPFNVSTEVVKLLLPMGDVFSVVVLMLQDETAVRFADASIQSPEYRSINVFVDFYSEPEYKFRVDRENFFPRPKVDGAVISFKLKNAEEYPPVSSPKSFFSMVNSAFMGKRKMLRKSLQHICSSSDIEAALDNIGLPVTARPSDLILDDFVRLHNHLAKV

SEQ ID NO: 38673 - protein, 211 aa, Zea mays subsp. mays
  peptide (1)..(211): Ceres Seq. ID no. 12435193
  misc_feature (1)..(210): NCBI GI NO: 15220982 NR Description: dimethyladenosine transferase, putative
  misc_feature (1)..(107): NCBI GI NO: 25518538 NR Description: hypothetical protein F22M8
  misc_feature (1)..(208): NCBI GI NO: 33242431 NR Description: dimethyladenosine transferase
  misc_feature (1)..(208): NCBI GI NO: 15618967 NR Description: Dimethyladenosine Transferase
  misc_feature (1)..(208): NCBI GI NO: 23039948 NR Description: hypothetical protein
  misc_feature (1)..(208): NCBI GI NO: 29840068 NR Description: dimethyladenosine transferase
  misc_feature (1)..(204): NCBI GI NO: 15835248 NR Description: dimethyladenosine transferase
  misc_feature (1)..(210): NCBI GI NO: 15605077 NR Description: Dimethyladenosine Transferase
  misc_feature (1)..(211): NCBI GI NO: 15595789 NR Description: rRNA (adenine-N6,N6)-dimethyltransferase
  misc_feature (1)..(206): NCBI GI NO: 22999516 NR Description: hypothetical protein [Magnetococcus sp. MC-1]
MATLVKDRFGSTEQLKVIEEDITKFHIRSHFLPFMKEKYGATKKLAKVASNLPFNVSTEVVKLLLPMGDVFSVVVLMLQDETAVRFADASIQSPEYRSINVFVDFYSEPEYKFRVDRENFFPRPKVDGAVISFKLKNAEEYPPVSSPKSFFSMVNSAFMGKRKMLRKSLQHICSSSDIEAALDNIGLPVTARPSDLILDDFVRLHNHLAKV

SEQ ID NO: 38674 - protein, 177 aa, Zea mays subsp. mays
  peptide (1)..(177): Ceres Seq. ID no. 12435194
  misc_feature (1)..(176): NCBI GI NO: 15220982 NR Description: dimethyladenosine transferase, putative
  misc_feature (1)..(73): NCBI GI NO: 25518538 NR Description: hypothetical protein F22M8
  misc_feature (1)..(174): NCBI GI NO: 33242431 NR Description: dimethyladenosine transferase
  misc_feature (1)..(174): NCBI GI NO: 15618967 NR Description: Dimethyladenosine Transferase
  misc_feature (1)..(174): NCBI GI NO: 23039948 NR Description: hypothetical protein
  misc_feature (1)..(174): NCBI GI NO: 29840068 NR Description: dimethyladenosine transferase
  misc_feature (1)..(170): NCBI GI NO: 15835248 NR Description: dimethyladenosine transferase
  misc_feature (1)..(176): NCBI GI NO: 15605077 NR Description: Dimethyladenosine Transferase
  misc_feature (1)..(177): NCBI GI NO: 15595789 NR Description: rRNA (adenine-N6,N6)-dimethyltransferase
  misc_feature (1)..(172): NCBI GI NO: 22999516 NR Description: hypothetical protein [Magnetococcus sp. MC-1]
MKEKYGATKKLAKVASNLPFNVSTEVVKLLLPMGDVFSVVVLMLQDETAVRFADASIQSPEYRSINVFVDFYSEPEYKFRVDRENFFPRPKVDGAVISFKLKNAEEYPPVSSPKSFFSMVNSAFMGKRKMLRKSLQHICSSSDIEAALDNIGLPVTARPSDLILDDFVRLHNHLAKV

SEQ ID NO: 38675 - DNA, 1471 bp, Zea mays subsp. mays
  misc_feature (1)..(1471): Ceres Seq. ID no. 12435165
atgttccagctcgccggcctgctccacgcgcgcggcttcgccgtcaccgtcttccacacccacttcaacgcgccggacgcgtcccagcacccggcctacgacttcgtccccgtccagttcgacgggacgccggcggacagcgcggacacggtgcgggtgaccgtggagcacgtcctcgccgtgaaccgcgcgtgcgaggccccgttccgggagcgcctggccgcgctgctggaggaggaggaggaggaggtcgcgtgcctcgtcgccgacgcgcacctgctcacgctcatggacgtggcacgcgggctcggcgtgccgactctcgcgctccgcaccggcagcgccgcgtgcttccgctggttcatggcgtttcccatgctctgcgacaagggctacctgtcctctcaagagtcgcaggagccggacatgctggtgacggagctgccgccgtaccgcgtccgtgacatgccgtccgccagcggggccaccctcgggctaatgcgggacctgatttcgcgagcggtgacggccgtgaacgcctcgtcgggtctcatcatcaacacgttcgacgcgctggagacggacgagctggcgtcgctccggcgcggcctcgccgtcccggtgttcgacatcgggccgctgcacgtgcactcgccggcggcctcgagcagcctgctgcggcaggaccgagggtgcctggactggctggacgcgcggggccccgcgtccgtgctctacgtcagcttcggcagcctggccagcatgtccgcggcggacctggtggagacggcatggggcatcgccaacagcggccgccctttcctgtgggtgctccggccgggcctcgtccgcggcgcgccgccgagtcagccgccgccgctgcccgacggcttccacgccgagacgcgcggtcgcggcacggtggtgagctgggcgccgcaggaggaggtcctggcgcaccctgccgtgggcgcgttctggacgcactgcggctggaactccacgctggagggcgtgtgcgccggcgtgccgatgctgtgccgcccctgcttcggcgaccagatggggaacgccaggtacgtggaccacgtgtggcggaccggcctcgcgctccacggcgagctggagaggggcaaggtggaggcggccatctcgacgatgatgggggcaggcgagcccgccacggcgctgcgtgggagggcacgggagctctgtagaagagcggcggagtgcgtggccaaggccggctcgtccgacctcaacgtcgacaagctggtgaaccacatcatgtccctcacggcgcggcggtgccaatagagacttaattatttgagtaacacatactcatctgcataattaagcctgacaaatctgtttgatacaaatccacttgcactggctgtttcaaagtttcaagtttgatggagacatggagcatgaattagttactgttgtacacttgtgcatcttc

SEQ ID NO: 38676 - protein, 438 aa, Zea mays subsp. mays
  peptide (1)..(438): Ceres Seq. ID no. 12435166
  misc_feature (1)..(427): Pfam Name: Pfam Description:  UDP-glucoronosyl and UDP-glucosyl transferase
  misc_feature (1)..(432): NCBI GI NO: 34900662 NR Description: glucuronosyl transferase-like protein
  misc_feature (1)..(432): NCBI GI NO: 34897378 NR Description: putative UDP-glucosyltransferase
  misc_feature (1)..(427): NCBI GI NO: 18033228 NR Description: UDP-glucosyltransferase BX8 [Zea mays]
  misc_feature (1)..(431): NCBI GI NO: 34395172 NR Description: putative UDP-glucosyltransferase
  misc_feature (1)..(432): NCBI GI NO: 34900682 NR Description: glucuronosyl transferase-like protein
  misc_feature (1)..(432): NCBI GI NO: 33146633 NR Description: putative UDP-glucosyltransferase
  misc_feature (1)..(433): NCBI GI NO: 18033230 NR Description: UDP-glucosyltransferase BX9 [Zea mays]
  misc_feature (1)..(423): NCBI GI NO: 34900678 NR Description: glucuronosyl transferase-like protein
  misc_feature (1)..(432): NCBI GI NO: 33146634 NR Description: putative UDP-glucosyltransferase
  misc_feature (1)..(431): NCBI GI NO: 15229731 NR Description: glucosyl transferase, putative
MFQLAGLLHARGFAVTVFHTHFNAPDASQHPAYDFVPVQFDGTPADSADTVRVTVEHVLAVNRACEAPFRERLAALLEEEEEEVACLVADAHLLTLMDVARGLGVPTLALRTGSAACFRWFMAFPMLCDKGYLSSQESQEPDMLVTELPPYRVRDMPSASGATLGLMRDLISRAVTAVNASSGLIINTFDALETDELASLRRGLAVPVFDIGPLHVHSPAASSSLLRQDRGCLDWLDARGPASVLYVSFGSLASMSAADLVETAWGIANSGRPFLWVLRPGLVRGAPPSQPPPLPDGFHAETRGRGTVVSWAPQEEVLAHPAVGAFWTHCGWNSTLEGVCAGVPMLCRPCFGDQMGNARYVDHVWRTGLALHGELERGKVEAAISTMMGAGEPATALRGRARELCRRAAECVAKAGSSDLNVDKLVNHIMSLTARRCQ

SEQ ID NO: 38677 - protein, 342 aa, Zea mays subsp. mays
  peptide (1)..(342): Ceres Seq. ID no. 12435167
  misc_feature (1)..(331): Pfam Name: Pfam Description:  UDP-glucoronosyl and UDP-glucosyl transferase
  misc_feature (1)..(336): NCBI GI NO: 34900662 NR Description: glucuronosyl transferase-like protein
  misc_feature (1)..(336): NCBI GI NO: 34897378 NR Description: putative UDP-glucosyltransferase
  misc_feature (1)..(331): NCBI GI NO: 18033228 NR Description: UDP-glucosyltransferase BX8 [Zea mays]
  misc_feature (1)..(335): NCBI GI NO: 34395172 NR Description: putative UDP-glucosyltransferase
  misc_feature (1)..(336): NCBI GI NO: 34900682 NR Description: glucuronosyl transferase-like protein
  misc_feature (1)..(336): NCBI GI NO: 33146633 NR Description: putative UDP-glucosyltransferase
  misc_feature (1)..(337): NCBI GI NO: 18033230 NR Description: UDP-glucosyltransferase BX9 [Zea mays]
  misc_feature (1)..(327): NCBI GI NO: 34900678 NR Description: glucuronosyl transferase-like protein
  misc_feature (1)..(336): NCBI GI NO: 33146634 NR Description: putative UDP-glucosyltransferase
  misc_feature (1)..(335): NCBI GI NO: 15229731 NR Description: glucosyl transferase, putative
MDVARGLGVPTLALRTGSAACFRWFMAFPMLCDKGYLSSQESQEPDMLVTELPPYRVRDMPSASGATLGLMRDLISRAVTAVNASSGLIINTFDALETDELASLRRGLAVPVFDIGPLHVHSPAASSSLLRQDRGCLDWLDARGPASVLYVSFGSLASMSAADLVETAWGIANSGRPFLWVLRPGLVRGAPPSQPPPLPDGFHAETRGRGTVVSWAPQEEVLAHPAVGAFWTHCGWNSTLEGVCAGVPMLCRPCFGDQMGNARYVDHVWRTGLALHGELERGKVEAAISTMMGAGEPATALRGRARELCRRAAECVAKAGSSDLNVDKLVNHIMSLTARRCQ

SEQ ID NO: 38678 - protein, 317 aa, Zea mays subsp. mays
  peptide (1)..(317): Ceres Seq. ID no. 12435168
  misc_feature (1)..(306): Pfam Name: Pfam Description:  UDP-glucoronosyl and UDP-glucosyl transferase
  misc_feature (1)..(311): NCBI GI NO: 34900662 NR Description: glucuronosyl transferase-like protein
  misc_feature (1)..(311): NCBI GI NO: 34897378 NR Description: putative UDP-glucosyltransferase
  misc_feature (1)..(306): NCBI GI NO: 18033228 NR Description: UDP-glucosyltransferase BX8 [Zea mays]
  misc_feature (1)..(310): NCBI GI NO: 34395172 NR Description: putative UDP-glucosyltransferase
  misc_feature (1)..(311): NCBI GI NO: 34900682 NR Description: glucuronosyl transferase-like protein
  misc_feature (1)..(311): NCBI GI NO: 33146633 NR Description: putative UDP-glucosyltransferase
  misc_feature (1)..(312): NCBI GI NO: 18033230 NR Description: UDP-glucosyltransferase BX9 [Zea mays]
  misc_feature (1)..(302): NCBI GI NO: 34900678 NR Description: glucuronosyl transferase-like protein
  misc_feature (1)..(311): NCBI GI NO: 33146634 NR Description: putative UDP-glucosyltransferase
  misc_feature (1)..(310): NCBI GI NO: 15229731 NR Description: glucosyl transferase, putative
MAFPMLCDKGYLSSQESQEPDMLVTELPPYRVRDMPSASGATLGLMRDLISRAVTAVNASSGLIINTFDALETDELASLRRGLAVPVFDIGPLHVHSPAASSSLLRQDRGCLDWLDARGPASVLYVSFGSLASMSAADLVETAWGIANSGRPFLWVLRPGLVRGAPPSQPPPLPDGFHAETRGRGTVVSWAPQEEVLAHPAVGAFWTHCGWNSTLEGVCAGVPMLCRPCFGDQMGNARYVDHVWRTGLALHGELERGKVEAAISTMMGAGEPATALRGRARELCRRAAECVAKAGSSDLNVDKLVNHIMSLTARRCQ

SEQ ID NO: 38679 - DNA, 1684 bp, Zea mays subsp. mays
  misc_feature (1)..(1684): Ceres Seq. ID no. 12358911
aaggatcccaatgctatatgctactcgactacatactgctgagtacatcagtactcagatagcccgagtcggaccacactgcttgcacagtagaagatgataggcgatgaactggattccgatgtggttgtacgctacttcagaggcaagagcatcctgatcactggatcaacaggtttcctggggaaagtgctcgtggagaagatactgagggttcagccggacgtgaagaagctcttcctcctcgttcgagccgccgatgacgagtctgccaagcagagggtcgagaccgaggtgacaggaaaggagatctttcaggttctgaaagaaaagcacggtaacgggttcgaaggtttcgtccaagaaaaaatctgccctctgccaggagacgtcatgcacgagaacttgggcctaggccctgccaaactgagacaagtgtgcaaggaaatagacatcgttgtaaacggagctgcaactacgaatttctacgaaagatacgatgtggctttcgacacaaatgtcatgggagccaagcacatatgcgagttcgccaagaggtgcagcaaactcaagatgctgctacatgtttcaacagcttatgtagctggtgaacaggaaggggtggtgctggagaagccattccgtttgggcgaaaccctgagggaaggcacgcacctggacatcgagtccgaactaaacctgataaaagagacgaggagagaactgaaggccagccgttgttcagaaaaggctgagaggagaagcatgaaggagcttggcctcaagagggcaagggagttcgggtggcccaacacctatgtgttcaccaaggcaatgggggagatgctgctgggcgcccacctccggggagacgtgccggtcgtcatcgtccggcctagtatcataaccagcatcctcaaggagccattgcctggatggatggaagggatcaggacgattgactcgttcatcatcggctacgccaagcaggctctgtccatcttcttagttgacctcgacctgatcatggacgtgattcccggggacatggtggtgaacgccatgatggtggccatggcggcgcactcggaggagcgggggcagcagactagcatctaccacctgacgtcgtcggtgcggcacccggcgccctacgccgtcctcgcggagtgcggccgccgctacttcctccacaacccactcaggtccgggggcaagaacagcgagcccgtgcggcctagcaggatgcgcttcttccgcaccctccccgggttccgcgcctacatggccatcaagttcaggcttccccttgagatccttcgcctgctcaacattgtcctgtgcggtgctctctcccggcgccacgacgagctcagccgcaagtacagatacgtcatgcatatcgcagagctgtacgcgccttactccttgttcaaaggatgcttcgatgactccaacacggagaggctgagggcggcgatggcgaacaggagcagcggatatgacttgggtttcgatcccatgtgcgtagactgggacgactatttctacagggttcacatccccggtgttgtcaagtacctgtgtggttactaggttaatacatatttaagatccggagagagccaaatgtatcttcgcatgttttaatacacaaatatgtcgctgtagtttgcagattatt

SEQ ID NO: 38680 - protein, 499 aa, Zea mays subsp. mays
  peptide (1)..(499): Ceres Seq. ID no. 12358912
  misc_feature (292)..(496): Pfam Name: Pfam Description:  Male sterility protein
  misc_feature (6)..(497): NCBI GI NO: 35215152 NR Description: putative fatty acyl coA reductase
  misc_feature (1)..(391): NCBI GI NO: 22003086 NR Description: fatty acyl coA reductase [Triticum aestivum]
  misc_feature (339)..(496): NCBI GI NO: 22003086 NR Description: fatty acyl coA reductase [Triticum aestivum]
  misc_feature (4)..(496): NCBI GI NO: 22003082 NR Description: fatty acyl coA reductase [Triticum aestivum]
  misc_feature (4)..(496): NCBI GI NO: 22003090 NR Description: fatty acyl coA reductase [Triticum aestivum]
  misc_feature (6)..(465): NCBI GI NO: 34394121 NR Description: putative fatty acyl coA reductase
  misc_feature (6)..(495): NCBI GI NO: 38346871 NR Description: OSJNBb0002N06.11
  misc_feature (6)..(495): NCBI GI NO: 38346864 NR Description: OSJNBb0002N06.4
  misc_feature (12)..(496): NCBI GI NO: 15242260 NR Description: male sterility 2-like protein (emb|CAA68191
  misc_feature (4)..(496): NCBI GI NO: 5020215 NR Description: acyl CoA reductase [Simmondsia chinensis]
MIGDELDSDVVVRYFRGKSILITGSTGFLGKVLVEKILRVQPDVKKLFLLVRAADDESAKQRVETEVTGKEIFQVLKEKHGNGFEGFVQEKICPLPGDVMHENLGLGPAKLRQVCKEIDIVVNGAATTNFYERYDVAFDTNVMGAKHICEFAKRCSKLKMLLHVSTAYVAGEQEGVVLEKPFRLGETLREGTHLDIESELNLIKETRRELKASRCSEKAERRSMKELGLKRAREFGWPNTYVFTKAMGEMLLGAHLRGDVPVVIVRPSIITSILKEPLPGWMEGIRTIDSFIIGYAKQALSIFLVDLDLIMDVIPGDMVVNAMMVAMAAHSEERGQQTSIYHLTSSVRHPAPYAVLAECGRRYFLHNPLRSGGKNSEPVRPSRMRFFRTLPGFRAYMAIKFRLPLEILRLLNIVLCGALSRRHDELSRKYRYVMHIAELYAPYSLFKGCFDDSNTERLRAAMANRSSGYDLGFDPMCVDWDDYFYRVHIPGVVKYLCGY

SEQ ID NO: 38681 - protein, 400 aa, Zea mays subsp. mays
  peptide (1)..(400): Ceres Seq. ID no. 12358913
  misc_feature (193)..(397): Pfam Name: Pfam Description:  Male sterility protein
  misc_feature (1)..(398): NCBI GI NO: 35215152 NR Description: putative fatty acyl coA reductase
  misc_feature (1)..(292): NCBI GI NO: 22003086 NR Description: fatty acyl coA reductase [Triticum aestivum]
  misc_feature (240)..(397): NCBI GI NO: 22003086 NR Description: fatty acyl coA reductase [Triticum aestivum]
  misc_feature (1)..(397): NCBI GI NO: 22003082 NR Description: fatty acyl coA reductase [Triticum aestivum]
  misc_feature (1)..(397): NCBI GI NO: 22003090 NR Description: fatty acyl coA reductase [Triticum aestivum]
  misc_feature (1)..(366): NCBI GI NO: 34394121 NR Description: putative fatty acyl coA reductase
  misc_feature (1)..(396): NCBI GI NO: 38346871 NR Description: OSJNBb0002N06.11
  misc_feature (1)..(396): NCBI GI NO: 38346864 NR Description: OSJNBb0002N06.4
  misc_feature (1)..(397): NCBI GI NO: 15242260 NR Description: male sterility 2-like protein (emb|CAA68191
  misc_feature (1)..(397): NCBI GI NO: 5020215 NR Description: acyl CoA reductase [Simmondsia chinensis]
MHENLGLGPAKLRQVCKEIDIVVNGAATTNFYERYDVAFDTNVMGAKHICEFAKRCSKLKMLLHVSTAYVAGEQEGVVLEKPFRLGETLREGTHLDIESELNLIKETRRELKASRCSEKAERRSMKELGLKRAREFGWPNTYVFTKAMGEMLLGAHLRGDVPVVIVRPSIITSILKEPLPGWMEGIRTIDSFIIGYAKQALSIFLVDLDLIMDVIPGDMVVNAMMVAMAAHSEERGQQTSIYHLTSSVRHPAPYAVLAECGRRYFLHNPLRSGGKNSEPVRPSRMRFFRTLPGFRAYMAIKFRLPLEILRLLNIVLCGALSRRHDELSRKYRYVMHIAELYAPYSLFKGCFDDSNTERLRAAMANRSSGYDLGFDPMCVDWDDYFYRVHIPGVVKYLCGY

SEQ ID NO: 38682 - protein, 357 aa, Zea mays subsp. mays
  peptide (1)..(357): Ceres Seq. ID no. 12358914
  misc_feature (150)..(354): Pfam Name: Pfam Description:  Male sterility protein
  misc_feature (1)..(355): NCBI GI NO: 35215152 NR Description: putative fatty acyl coA reductase
  misc_feature (1)..(249): NCBI GI NO: 22003086 NR Description: fatty acyl coA reductase [Triticum aestivum]
  misc_feature (197)..(354): NCBI GI NO: 22003086 NR Description: fatty acyl coA reductase [Triticum aestivum]
  misc_feature (1)..(354): NCBI GI NO: 22003082 NR Description: fatty acyl coA reductase [Triticum aestivum]
  misc_feature (1)..(354): NCBI GI NO: 22003090 NR Description: fatty acyl coA reductase [Triticum aestivum]
  misc_feature (1)..(323): NCBI GI NO: 34394121 NR Description: putative fatty acyl coA reductase
  misc_feature (1)..(353): NCBI GI NO: 38346871 NR Description: OSJNBb0002N06.11
  misc_feature (1)..(353): NCBI GI NO: 38346864 NR Description: OSJNBb0002N06.4
  misc_feature (1)..(354): NCBI GI NO: 15242260 NR Description: male sterility 2-like protein (emb|CAA68191
  misc_feature (1)..(354): NCBI GI NO: 5020215 NR Description: acyl CoA reductase [Simmondsia chinensis]
MGAKHICEFAKRCSKLKMLLHVSTAYVAGEQEGVVLEKPFRLGETLREGTHLDIESELNLIKETRRELKASRCSEKAERRSMKELGLKRAREFGWPNTYVFTKAMGEMLLGAHLRGDVPVVIVRPSIITSILKEPLPGWMEGIRTIDSFIIGYAKQALSIFLVDLDLIMDVIPGDMVVNAMMVAMAAHSEERGQQTSIYHLTSSVRHPAPYAVLAECGRRYFLHNPLRSGGKNSEPVRPSRMRFFRTLPGFRAYMAIKFRLPLEILRLLNIVLCGALSRRHDELSRKYRYVMHIAELYAPYSLFKGCFDDSNTERLRAAMANRSSGYDLGFDPMCVDWDDYFYRVHIPGVVKYLCGY

SEQ ID NO: 38683 - DNA, 1584 bp, Zea mays subsp. mays
  misc_feature (1)..(1584): Ceres Seq. ID no. 12383435
ctacgccaagcccgcaattaaccctcactaaagggaacaaaagctggagctccaccgcggtggcggccgctctagaactagtggatcccccgggctgcaggaattcgcacgagaccattacctagaacatcctaatcgaaaaacccacacctacacctacacattacagccagtactgctgtcacctcacttagcaaagctaatacgtatgtcatagcagcttgccaccatggcgagcatcaccgtgacaaggaaatcccaatccttcgtcgtgccatcgtccacgccaactccgacgaccgagacgctcgagttgtcggccatcgaccgcgttccaggcctgcgccacacggtgcgatccctgcacgtgttccgccgcaaggacgccgccgcctccgccgcccactacgatgctgctgccgccggcaggccggccgaggtgatccgcgcggcgctgtcccgcgcgctggtggactaccgcccgttcgccggccgtttcgtcggctcactgtacgccggggaggcgagcgttgagtgcaccgacgacggtgcgtggttcgtggacgctgtcacagattgcagcctcgaggacgtgaacggcctcgactacccgcttatggtctccgaggaagagctgctgccggctccagaggaaggtgttgacccaaccagtattccgattatgatgcaggtcacggaatttgcttgtggaggatttgtggtggggctagtcgcagtgcacacccttgctgacgggctcggtgcagctcaattcatcaatgcaatttctgagtttgcccgtggagtagttaaacctacaatagcacctatatgggcacgggagttaataccaaacccacctaaaatgcctcctgggccaccaccatccttcgagtgcttcgggttcaaacattttgttatggatgtggcagttaacaatattgcacatgtcaagagtgaatactttcaaaccaatggacactattgctctacatttgatgttgccattgccaaggtttggcaagctaggacaagggcaatcaagtacgaaccaaatttcaaggtgcatgtttgcttctttgccaacactcgccacctcctcacacatgtgctacccaaggttggtggcttctatggaaattgcttctatccagtgactgtcacagcaactgctgaggtagttgctagttcaagattgcttgatgtgattaggatgataagggatgggaaggctaggcttcctttagagttttccagatggtccacgggcaatgtgaaagtagacccatatcaactaacattcaagcacaatgttctatttgtgtccgattggacacggcttggattctttgaagttgactatgggtggggtgtaccaaaccatatcctccctttcacttatgcagactacatggctgtagcagttcttggggctccaccgtctatgaagaaggggactcgaataatgacacaatgtgtcgaggaggagcatctcgtggacttcaaggccgagatgaaagccttcttttaggtcctcggattttacttgaaagttcaaacattatgcatttatgtgttcaattc

SEQ ID NO: 38684 - protein, 433 aa, Zea mays subsp. mays
  peptide (1)..(433): Ceres Seq. ID no. 12383436
  misc_feature (5)..(425): Pfam Name: Pfam Description:  Transferase family
  misc_feature (2)..(425): NCBI GI NO: 34906150 NR Description: putative 0-deacetylbaccatin III-10-O-acetyltransferase
  misc_feature (25)..(430): NCBI GI NO: 34906304 NR Description: unnamed protein product
  misc_feature (162)..(432): NCBI GI NO: 18558566 NR Description: putative 0-deacetylbaccatin III-10-O-acetyltransferase-like protein
  misc_feature (1)..(430): NCBI GI NO: 34912654 NR Description: putative acetyl transferase
  misc_feature (1)..(432): NCBI GI NO: 34912652 NR Description: putative acetyl transferase
  misc_feature (3)..(421): NCBI GI NO: 15228696 NR Description: putative protein; protein id: At3g62160.1
  misc_feature (8)..(431): NCBI GI NO: 28558088 NR Description: 3'-N-debenzoyl-2'-deoxytaxol N-benzoyltransferase
  misc_feature (10)..(431): NCBI GI NO: 28380187 NR Description: Taxadien-5-alpha-ol O-acetyltransferase
  misc_feature (3)..(432): NCBI GI NO: 38346537 NR Description: OSJNBa0040D17.12
  misc_feature (11)..(431): NCBI GI NO: 28380211 NR Description: Taxadien-5-alpha-ol O-acetyltransferase
MASITVTRKSQSFVVPSSTPTPTTETLELSAIDRVPGLRHTVRSLHVFRRKDAAASAAHYDAAAAGRPAEVIRAALSRALVDYRPFAGRFVGSLYAGEASVECTDDGAWFVDAVTDCSLEDVNGLDYPLMVSEEELLPAPEEGVDPTSIPIMMQVTEFACGGFVVGLVAVHTLADGLGAAQFINAISEFARGVVKPTIAPIWARELIPNPPKMPPGPPPSFECFGFKHFVMDVAVNNIAHVKSEYFQTNGHYCSTFDVAIAKVWQARTRAIKYEPNFKVHVCFFANTRHLLTHVLPKVGGFYGNCFYPVTVTATAEVVASSRLLDVIRMIRDGKARLPLEFSRWSTGNVKVDPYQLTFKHNVLFVSDWTRLGFFEVDYGWGVPNHILPFTYADYMAVAVLGAPPSMKKGTRIMTQCVEEEHLVDFKAEMKAFF

SEQ ID NO: 38685 - protein, 304 aa, Zea mays subsp. mays
  peptide (1)..(304): Ceres Seq. ID no. 12383437
  misc_feature (1)..(296): Pfam Name: Pfam Description:  Transferase family
  misc_feature (1)..(296): NCBI GI NO: 34906150 NR Description: putative 0-deacetylbaccatin III-10-O-acetyltransferase
  misc_feature (1)..(301): NCBI GI NO: 34906304 NR Description: unnamed protein product
  misc_feature (33)..(303): NCBI GI NO: 18558566 NR Description: putative 0-deacetylbaccatin III-10-O-acetyltransferase-like protein
  misc_feature (1)..(301): NCBI GI NO: 34912654 NR Description: putative acetyl transferase
  misc_feature (1)..(303): NCBI GI NO: 34912652 NR Description: putative acetyl transferase
  misc_feature (1)..(292): NCBI GI NO: 15228696 NR Description: putative protein; protein id: At3g62160.1
  misc_feature (1)..(302): NCBI GI NO: 28558088 NR Description: 3'-N-debenzoyl-2'-deoxytaxol N-benzoyltransferase
  misc_feature (1)..(302): NCBI GI NO: 28380187 NR Description: Taxadien-5-alpha-ol O-acetyltransferase
  misc_feature (1)..(303): NCBI GI NO: 38346537 NR Description: OSJNBa0040D17.12
  misc_feature (1)..(302): NCBI GI NO: 28380211 NR Description: Taxadien-5-alpha-ol O-acetyltransferase
MVSEEELLPAPEEGVDPTSIPIMMQVTEFACGGFVVGLVAVHTLADGLGAAQFINAISEFARGVVKPTIAPIWARELIPNPPKMPPGPPPSFECFGFKHFVMDVAVNNIAHVKSEYFQTNGHYCSTFDVAIAKVWQARTRAIKYEPNFKVHVCFFANTRHLLTHVLPKVGGFYGNCFYPVTVTATAEVVASSRLLDVIRMIRDGKARLPLEFSRWSTGNVKVDPYQLTFKHNVLFVSDWTRLGFFEVDYGWGVPNHILPFTYADYMAVAVLGAPPSMKKGTRIMTQCVEEEHLVDFKAEMKAFF

SEQ ID NO: 38686 - protein, 282 aa, Zea mays subsp. mays
  peptide (1)..(282): Ceres Seq. ID no. 12383438
  misc_feature (1)..(274): Pfam Name: Pfam Description:  Transferase family
  misc_feature (1)..(274): NCBI GI NO: 34906150 NR Description: putative 0-deacetylbaccatin III-10-O-acetyltransferase
  misc_feature (1)..(279): NCBI GI NO: 34906304 NR Description: unnamed protein product
  misc_feature (11)..(281): NCBI GI NO: 18558566 NR Description: putative 0-deacetylbaccatin III-10-O-acetyltransferase-like protein
  misc_feature (1)..(279): NCBI GI NO: 34912654 NR Description: putative acetyl transferase
  misc_feature (1)..(281): NCBI GI NO: 34912652 NR Description: putative acetyl transferase
  misc_feature (1)..(270): NCBI GI NO: 15228696 NR Description: putative protein; protein id: At3g62160.1
  misc_feature (1)..(280): NCBI GI NO: 28558088 NR Description: 3'-N-debenzoyl-2'-deoxytaxol N-benzoyltransferase
  misc_feature (1)..(280): NCBI GI NO: 28380187 NR Description: Taxadien-5-alpha-ol O-acetyltransferase
  misc_feature (1)..(281): NCBI GI NO: 38346537 NR Description: OSJNBa0040D17.12
  misc_feature (1)..(280): NCBI GI NO: 28380211 NR Description: Taxadien-5-alpha-ol O-acetyltransferase
MMQVTEFACGGFVVGLVAVHTLADGLGAAQFINAISEFARGVVKPTIAPIWARELIPNPPKMPPGPPPSFECFGFKHFVMDVAVNNIAHVKSEYFQTNGHYCSTFDVAIAKVWQARTRAIKYEPNFKVHVCFFANTRHLLTHVLPKVGGFYGNCFYPVTVTATAEVVASSRLLDVIRMIRDGKARLPLEFSRWSTGNVKVDPYQLTFKHNVLFVSDWTRLGFFEVDYGWGVPNHILPFTYADYMAVAVLGAPPSMKKGTRIMTQCVEEEHLVDFKAEMKAFF

SEQ ID NO: 38687 - DNA, 1252 bp, Zea mays subsp. mays
  misc_feature (1)..(1252): Ceres Seq. ID no. 12360776
gcacgagaccattacctagaacatcctaatcgaaaaaggtacaccaatcgcttcgtccccgcgtctcgccgcgtagcggcgtaggcgccacagaaactcgcacgccgctccccgccgtccggcccgagtcgccgtcgctgccgaatccaatccatggctccgcccgccgcacccaccgcgctgcaccaccgcacgcccctcctcctcccccgccgcaccgtcgccttgggtgccaccgccaccgcgcgcgccgccagggccgcttctctcgccgtcagggcccagccggacaccaccgccgcagccgtctccacctccgcgcctgagccggcgcccgagttcaagcctccgccggggttcaaggcgcccgagcccaagaggtacgaggtcaagtccggccaggtgggcagcgtcctcggcgcctcgctcgccatcccccttcgcctcggcaccggcgtcttcgtcctcgggtactcgccatctcttgtttctccatcagagataccatcagaccagtatgcactggaatttggagcttggaaggtgaaagaggaatcaaaaataggacagtgcaaacgaccagaaaagcctatcgagatatatgaatttgaaggttgtccattttgtcggaaggtcagagagatggtaacagtcttggacctagatgtattattttacccctgtcctcaaaaaggcccaacattccgacctaaagtcctcgaaatgggtggaaagaaacaattcccttacatggtagatccaaacacaggggtcgccatgtatgaatccgatgacatcataaaatatctagctgatacatatggcgatggaactgttccaattatgctatcacttggtctgttgacagcaattacagcagggcttgctactcttggtcgtattggaaagggaaattcctacattgcttcaaaagtcccaccgcagcccatagagatatgggcatgtgagggatctcccttctgtaaattagtacgagagacacttgtcgagttggaattgccacatctgctacacagctgcgcacgaggcagccccaaacgacaagaatttttcaagaaaaaggggcttttccaggcgccgtacatcgaagatcctaacacgggagtccagatgtttgaaagcgctgaaatcatagactacctgaaggcaacatatgccctgtacccaagctcgtagtgatgtatcagaaatggtcattgtaatgttgcgtgtagattcagttcttcccggt

SEQ ID NO: 38688 - protein, 347 aa, Zea mays subsp. mays
  peptide (1)..(347): Ceres Seq. ID no. 12360777
  misc_feature (21)..(342): NCBI GI NO: 18414386 NR Description: auxin-regulated protein; protein id: At5g03880
  misc_feature (21)..(342): NCBI GI NO: 21593275 NR Description: unknown [Arabidopsis thaliana]
  misc_feature (17)..(342): NCBI GI NO: 11282317 NR Description: hypothetical protein F8F6
  misc_feature (143)..(342): NCBI GI NO: 18413285 NR Description: putative protein; protein id: At4g10000
  misc_feature (143)..(342): NCBI GI NO: 21593568 NR Description: unknown [Arabidopsis thaliana]
  misc_feature (143)..(342): NCBI GI NO: 7487730 NR Description: hypothetical protein T5L19
  misc_feature (233)..(341): NCBI GI NO: 18413285 NR Description: putative protein; protein id: At4g10000
  misc_feature (233)..(341): NCBI GI NO: 21593568 NR Description: unknown [Arabidopsis thaliana]
MAPPAAPTALHHRTPLLLPRRTVALGATATARAARAASLAVRAQPDTTAAAVSTSAPEPAPEFKPPPGFKAPEPKRYEVKSGQVGSVLGASLAIPLRLGTGVFVLGYSPSLVSPSEIPSDQYALEFGAWKVKEESKIGQCKRPEKPIEIYEFEGCPFCRKVREMVTVLDLDVLFYPCPQKGPTFRPKVLEMGGKKQFPYMVDPNTGVAMYESDDIIKYLADTYGDGTVPIMLSLGLLTAITAGLATLGRIGKGNSYIASKVPPQPIEIWACEGSPFCKLVRETLVELELPHLLHSCARGSPKRQEFFKKKGLFQAPYIEDPNTGVQMFESAEIIDYLKATYALYPSS

SEQ ID NO: 38689 - protein, 184 aa, Zea mays subsp. mays
  peptide (1)..(184): Ceres Seq. ID no. 12360778
  misc_feature (1)..(179): NCBI GI NO: 18414386 NR Description: auxin-regulated protein; protein id: At5g03880
  misc_feature (1)..(179): NCBI GI NO: 21593275 NR Description: unknown [Arabidopsis thaliana]
  misc_feature (1)..(179): NCBI GI NO: 11282317 NR Description: hypothetical protein F8F6
  misc_feature (1)..(179): NCBI GI NO: 18413285 NR Description: putative protein; protein id: At4g10000
  misc_feature (1)..(179): NCBI GI NO: 21593568 NR Description: unknown [Arabidopsis thaliana]
  misc_feature (1)..(179): NCBI GI NO: 7487730 NR Description: hypothetical protein T5L19
  misc_feature (70)..(178): NCBI GI NO: 18413285 NR Description: putative protein; protein id: At4g10000
  misc_feature (70)..(178): NCBI GI NO: 21593568 NR Description: unknown [Arabidopsis thaliana]
MVTVLDLDVLFYPCPQKGPTFRPKVLEMGGKKQFPYMVDPNTGVAMYESDDIIKYLADTYGDGTVPIMLSLGLLTAITAGLATLGRIGKGNSYIASKVPPQPIEIWACEGSPFCKLVRETLVELELPHLLHSCARGSPKRQEFFKKKGLFQAPYIEDPNTGVQMFESAEIIDYLKATYALYPSS

SEQ ID NO: 38690 - DNA, 1856 bp, Zea mays subsp. mays
  misc_feature (1)..(1856): Ceres Seq. ID no. 12415997
gcacgagaccattacctagaacatcctaatcgaaaaacaccagctccactgcatcaaaacccctcatcaccctgcagcctgcactcatcagacatggtgctcaccatggccagcgcccaagaggactcgctcctcctgctcctcctcccgaccacctccccactgccgcccctcgtggccgtgttcatcctagccgccgtcctcctgtggctctcccccggcggtcctgcgtgggcgctctcccgctgccgccgcccgccgcccgggccaacgggcgtggtcaccgcgctctccagccccgtggcgcaccgcaccctggcggcgctgtcccacgccgtagacggcggcaaggcactgatggccttctcggtcgggctgacccgcctcgtcgtgtcgagccagcccgatacggcgcgcgagatcctcgccagccccggcgttcggcgaccgccccgtcaaggacgcggcgcgccacctgctcttccaccgcgccatgggcttcgcgccctcgggagacgcgcactggcgcgggctcccgccgcctcgccgccaaccacctgttcggcccgcgccgccgtggcgggtgccgcgcaccaccgcgcctccatcggcgaggccatggtcgccgacgtcgccgctgccatggcgcgccacggcgaggtccctctcaagcgcgtgctgcatgtcgcgtctctcaaccacatcatggccaccgtgtttggcaagcgctacgacatgggcagccgagagggcgcccttctggacgagatggtggccgagggctacgacctcctgggcacgttcaactgggctgaccacctgccattgctcaagcatctcgacccccagggcgtgcgccgccggtgcaacaggctggtccaaaaggtcgaatcgttcgttggtaagatcatcatggagcacaggacgaggcgcgcaaatggaggattcgtgagcgatgagtgcattggtgacttcgtcgacgtccttcttggcctcgagggtgaggagaagctgtcagatgcggacatgatcgctgttctttgggagatgatcttcagaggcgccgacaccgtggcgatcttgatggagtgggtcatggcgaggatggcgctgcacccggacatccaggcgaaggcccaggcggagctggacggcgtcgtgggcatcgggcgcggcgtggcggacgccgacgtcgccagcctaccctacatccagtgcatcgtgaaggagacgctgcgcatgcacccgccaggcccgctcctgtcgtgggcgcgcctcgccgtccacgacgcgcacgtcggcggccacctggtccccgccggcaccacagccatggtgaacatgtggtccatcgcgcacgaccccgccatctgggccgagccggagaagttccgccccggagcggttccaggaggaggacgtgagcgtcctcgggagcgacctccgcctggcccccttcggcgccgggcgccgcgcctgccccggcaagatactggccctcgccaccacccacctctgtgtcgcccagcttctgcacaagttcgagtgggccgccggcgggggcgtcgacctgtcggagcgcctgagcatgtcgctggagatggccacgccgctggtgtgcaaggccgtacccagggttcagggccaagcggcctcctagcctagcctccatgcatgcctgatgcctggatgccgtagcgagagtgggagactgatgagtgtatgccgttatgtttgtgtgtccatgcatgcatgcatgcctcggctactgtagcttcctggcttgcttgttgtgcatgtcctgcgtcgagaccttgcgtagtatgatgcagtataattttaataataatattatt

SEQ ID NO: 38691 - protein, 554 aa, Zea mays subsp. mays
  peptide (1)..(554): Ceres Seq. ID no. 12415998
  misc_feature (35)..(466): NCBI GI NO: 34394563 NR Description: putative cytochrome P-450
  misc_feature (37)..(466): NCBI GI NO: 31126705 NR Description: putative cytochrome P-450
  misc_feature (120)..(466): NCBI GI NO: 1173624 NR Description: cytochrome P-450
  misc_feature (63)..(466): NCBI GI NO: 15222937 NR Description: cytochrome p450 family; protein id: At1g13710.1
  misc_feature (88)..(491): NCBI GI NO: 15221132 NR Description: cytochrome p450 family; protein id: At1g74110.1
  misc_feature (56)..(475): NCBI GI NO: 5921925 NR Description: Cytochrome P450 78A4
  misc_feature (58)..(473): NCBI GI NO: 37534160 NR Description: putative cytochrome 450
  misc_feature (58)..(473): NCBI GI NO: 30962524 NR Description: cytochrome P450 78A11
  misc_feature (36)..(466): NCBI GI NO: 15226422 NR Description: putative cytochrome P450; protein id: At2g46660.1
  misc_feature (63)..(466): NCBI GI NO: 1352187 NR Description: Cytochrome P450 78A1 (CYPLXXVIII)
ARDHYLEHPNRKTPAPLHQNPSSPCSLHSSDMVLTMASAQEDSLLLLLLPTTSPLPPLVAVFILAAVLLWLSPGGPAWALSRCRRPPPGPTGVVTALSSPVAHRTLAALSHAVDGGKALMAFSVGLTRLVVSSQPDTAREILASPGVRRPPRQGRGAPPALPPRHGLRALGRRALARAPAASPPTTCSARAAVAGAAHHRASIGEAMVADVAAAMARHGEVPLKRVLHVASLNHIMATVFGKRYDMGSREGALLDEMVAEGYDLLGTFNWADHLPLLKHLDPQGVRRRCNRLVQKVESFVGKIIMEHRTRRANGGFVSDECIGDFVDVLLGLEGEEKLSDADMIAVLWEMIFRGADTVAILMEWVMARMALHPDIQAKAQAELDGVVGIGRGVADADVASLPYIQCIVKETLRMHPPGPLLSWARLAVHDAHVGGHLVPAGTTAMVNMWSIAHDPAIWAEPEKFRPGAVPGGGRERPRERPPPGPLRRRAPRLPRQDTGPRHHPPLCRPASAQVRVGRRRGRRPVGAPEHVAGDGHAAGVQGRTQGSGPSGLLA

SEQ ID NO: 38692 - protein, 523 aa, Zea mays subsp. mays
  peptide (1)..(523): Ceres Seq. ID no. 12415999
  misc_feature (4)..(435): NCBI GI NO: 34394563 NR Description: putative cytochrome P-450
  misc_feature (6)..(435): NCBI GI NO: 31126705 NR Description: putative cytochrome P-450
  misc_feature (89)..(435): NCBI GI NO: 1173624 NR Description: cytochrome P-450
  misc_feature (32)..(435): NCBI GI NO: 15222937 NR Description: cytochrome p450 family; protein id: At1g13710.1
  misc_feature (57)..(460): NCBI GI NO: 15221132 NR Description: cytochrome p450 family; protein id: At1g74110.1
  misc_feature (25)..(444): NCBI GI NO: 5921925 NR Description: Cytochrome P450 78A4
  misc_feature (27)..(442): NCBI GI NO: 37534160 NR Description: putative cytochrome 450
  misc_feature (27)..(442): NCBI GI NO: 30962524 NR Description: cytochrome P450 78A11
  misc_feature (5)..(435): NCBI GI NO: 15226422 NR Description: putative cytochrome P450; protein id: At2g46660.1
  misc_feature (32)..(435): NCBI GI NO: 1352187 NR Description: Cytochrome P450 78A1 (CYPLXXVIII)
MVLTMASAQEDSLLLLLLPTTSPLPPLVAVFILAAVLLWLSPGGPAWALSRCRRPPPGPTGVVTALSSPVAHRTLAALSHAVDGGKALMAFSVGLTRLVVSSQPDTAREILASPGVRRPPRQGRGAPPALPPRHGLRALGRRALARAPAASPPTTCSARAAVAGAAHHRASIGEAMVADVAAAMARHGEVPLKRVLHVASLNHIMATVFGKRYDMGSREGALLDEMVAEGYDLLGTFNWADHLPLLKHLDPQGVRRRCNRLVQKVESFVGKIIMEHRTRRANGGFVSDECIGDFVDVLLGLEGEEKLSDADMIAVLWEMIFRGADTVAILMEWVMARMALHPDIQAKAQAELDGVVGIGRGVADADVASLPYIQCIVKETLRMHPPGPLLSWARLAVHDAHVGGHLVPAGTTAMVNMWSIAHDPAIWAEPEKFRPGAVPGGGRERPRERPPPGPLRRRAPRLPRQDTGPRHHPPLCRPASAQVRVGRRRGRRPVGAPEHVAGDGHAAGVQGRTQGSGPSGLLA

SEQ ID NO: 38693 - protein, 519 aa, Zea mays subsp. mays
  peptide (1)..(519): Ceres Seq. ID no. 12416000
  misc_feature (1)..(431): NCBI GI NO: 34394563 NR Description: putative cytochrome P-450
  misc_feature (2)..(431): NCBI GI NO: 31126705 NR Description: putative cytochrome P-450
  misc_feature (85)..(431): NCBI GI NO: 1173624 NR Description: cytochrome P-450
  misc_feature (28)..(431): NCBI GI NO: 15222937 NR Description: cytochrome p450 family; protein id: At1g13710.1
  misc_feature (53)..(456): NCBI GI NO: 15221132 NR Description: cytochrome p450 family; protein id: At1g74110.1
  misc_feature (21)..(440): NCBI GI NO: 5921925 NR Description: Cytochrome P450 78A4
  misc_feature (23)..(438): NCBI GI NO: 37534160 NR Description: putative cytochrome 450
  misc_feature (23)..(438): NCBI GI NO: 30962524 NR Description: cytochrome P450 78A11
  misc_feature (1)..(431): NCBI GI NO: 15226422 NR Description: putative cytochrome P450; protein id: At2g46660.1
  misc_feature (28)..(431): NCBI GI NO: 1352187 NR Description: Cytochrome P450 78A1 (CYPLXXVIII)
MASAQEDSLLLLLLPTTSPLPPLVAVFILAAVLLWLSPGGPAWALSRCRRPPPGPTGVVTALSSPVAHRTLAALSHAVDGGKALMAFSVGLTRLVVSSQPDTAREILASPGVRRPPRQGRGAPPALPPRHGLRALGRRALARAPAASPPTTCSARAAVAGAAHHRASIGEAMVADVAAAMARHGEVPLKRVLHVASLNHIMATVFGKRYDMGSREGALLDEMVAEGYDLLGTFNWADHLPLLKHLDPQGVRRRCNRLVQKVESFVGKIIMEHRTRRANGGFVSDECIGDFVDVLLGLEGEEKLSDADMIAVLWEMIFRGADTVAILMEWVMARMALHPDIQAKAQAELDGVVGIGRGVADADVASLPYIQCIVKETLRMHPPGPLLSWARLAVHDAHVGGHLVPAGTTAMVNMWSIAHDPAIWAEPEKFRPGAVPGGGRERPRERPPPGPLRRRAPRLPRQDTGPRHHPPLCRPASAQVRVGRRRGRRPVGAPEHVAGDGHAAGVQGRTQGSGPSGLLA

SEQ ID NO: 38694 - DNA, 1721 bp, Zea mays subsp. mays
  misc_feature (1)..(1721): Ceres Seq. ID no. 12383403
cgccaagcccgcaattaaccctcactaaagggaacaaaagctggagctccaccgcggtggcggccgctctagaactagtggatcccccgggctgcaggaattcgcacgagaccattacctagaacatcctaatcgaaaaattattaccatgggagaagagaagcaacgtcgggatggccatggcggaaagaacaagtacgccgtggcgtgctccattattggctccatcatctccattctcatgggctatgacacgggcgtcatgaccggcgcgatgctgttcatcaaggaggacctcaagaccaacgacacgcaggtccaggtcctcgccggcatcctcaacgtctgcgcccttgtcggctccctcacggccggccgcgtctccgactgggtcggcccccgccgcaccatctccctcgcggcctgcatcttcctcgcggggtcagtcctcatgggcctctcgcccaacttcggtacgctcctggcaggacgctgcgtggccggcgtcggcgtcggatacgcgctcatgatcgcgcccgtctacgcggccgagatttcgtccgcccacatccgcggctccgtcacctcgctgcccgagatctgcatcagcttcggcatcctgattgggtacgtggccaactacctgctagctaagctcccgctggtctacggctggcgcgccatgctggggctcggcgcgctgccgagcgccgtgctcgcagtcgccgtgctcgcgatgccggagtcgccccggtggctcgtcatgcagggccgcgtcgagcaggcccacgccgtgctcaggcgcgtgtccgacactgcaggcgaggccgatgtgcgcctcgcggaaatcaagaccgcggcggggctggcagacgacgatgacggctcaccgagaggtgtcggcaagggcgtgtggaaggagatgttcctgcacccgacgccccccgtccggcgtatcctcgtcgctgccttcggagtccacttcttccagcatctcacgggaatcgaagccgtggtcctctacagcccacgcatctttaaggcagccggcatcgccacccgcagcgagatccttgcagcgaccatcggcgtgggcgtcaccaagacggtgttcatcatgacagccatcctgctggtggaccgcatcggccggaggccgctctacctctcgagcctggcgggcatcatcgcctcgcttgcctgcctcggtcttggcctcaccgtcgtggagcgctcggtgccgcgccactcgccgacgtgggctatggcattgtccatcgcaacggtcttcaccttcatagcgtccttctccatcggtgtggggcccatcacgtgggcgtacagcaccgaggtgtacccgctccggctgcgcgcgcagggcgccagcgtcggcgtggccatcaaccgtgtcatgaacgccggggtctctatgacgttcgtgtcgctgtacaatgcggtgaccatcggcggtgcctttttcctgttcgcagggctggccgtgttggcggccatgttcttctacttcctctgcccggagacgcaaggacggccactggaggagatcgaagaggtgttcggccgtgggtggcgcgcgcgcctcctgtcatgggacgaagctgttgtggagcttccaatgtccaacaccaccgacggcaacaccaaggcgcgcccgtgatgcaaatgcgattgcaaaaattatggatagacattcatatatggtc

SEQ ID NO: 38695 - protein, 508 aa, Zea mays subsp. mays
  peptide (1)..(508): Ceres Seq. ID no. 12383404
  misc_feature (21)..(476): Pfam Name: and other Pfam Description: Sugar
  misc_feature (1)..(502): NCBI GI NO: 13129489 NR Description: Putative sugar transporter [Oryza sativa]
  misc_feature (13)..(478): NCBI GI NO: 15234491 NR Description: sugar transporter like protein
  misc_feature (15)..(479): NCBI GI NO: 15224183 NR Description: putative sugar transporter; protein id: At2g18480
  misc_feature (14)..(483): NCBI GI NO: 28316433 NR Description: sorbitol transporter [Prunus cerasus]
  misc_feature (14)..(481): NCBI GI NO: 15230212 NR Description: sugar transport, putative; protein id: At3g18830.1
  misc_feature (13)..(477): NCBI GI NO: 16118827 NR Description: putative sugar transporter [Oryza sativa]
  misc_feature (12)..(477): NCBI GI NO: 15226696 NR Description: putative sugar transporter; protein id: At2g16130
  misc_feature (12)..(477): NCBI GI NO: 15226682 NR Description: putative sugar transporter; protein id: At2g16120
  misc_feature (14)..(484): NCBI GI NO: 12004316 NR Description: mannitol transporter [Apium graveolens var. dulce]
  misc_feature (35)..(479): NCBI GI NO: 15225426 NR Description: putative sugar transporter; protein id: At2g20780
MGEEKQRRDGHGGKNKYAVACSIIGSIISILMGYDTGVMTGAMLFIKEDLKTNDTQVQVLAGILNVCALVGSLTAGRVSDWVGPRRTISLAACIFLAGSVLMGLSPNFGTLLAGRCVAGVGVGYALMIAPVYAAEISSAHIRGSVTSLPEICISFGILIGYVANYLLAKLPLVYGWRAMLGLGALPSAVLAVAVLAMPESPRWLVMQGRVEQAHAVLRRVSDTAGEADVRLAEIKTAAGLADDDDGSPRGVGKGVWKEMFLHPTPPVRRILVAAFGVHFFQHLTGIEAVVLYSPRIFKAAGIATRSEILAATIGVGVTKTVFIMTAILLVDRIGRRPLYLSSLAGIIASLACLGLGLTVVERSVPRHSPTWAMALSIATVFTFIASFSIGVGPITWAYSTEVYPLRLRAQGASVGVAINRVMNAGVSMTFVSLYNAVTIGGAFFLFAGLAVLAAMFFYFLCPETQGRPLEEIEEVFGRGWRARLLSWDEAVVELPMSNTTDGNTKARP

SEQ ID NO: 38696 - protein, 477 aa, Zea mays subsp. mays
  peptide (1)..(477): Ceres Seq. ID no. 12383405
  misc_feature (1)..(445): Pfam Name: and other Pfam Description: Sugar
  misc_feature (1)..(471): NCBI GI NO: 13129489 NR Description: Putative sugar transporter [Oryza sativa]
  misc_feature (1)..(447): NCBI GI NO: 15234491 NR Description: sugar transporter like protein
  misc_feature (1)..(448): NCBI GI NO: 15224183 NR Description: putative sugar transporter; protein id: At2g18480
  misc_feature (1)..(452): NCBI GI NO: 28316433 NR Description: sorbitol transporter [Prunus cerasus]
  misc_feature (1)..(450): NCBI GI NO: 15230212 NR Description: sugar transport, putative; protein id: At3g18830.1
  misc_feature (1)..(446): NCBI GI NO: 16118827 NR Description: putative sugar transporter [Oryza sativa]
  misc_feature (1)..(446): NCBI GI NO: 15226696 NR Description: putative sugar transporter; protein id: At2g16130
  misc_feature (1)..(446): NCBI GI NO: 15226682 NR Description: putative sugar transporter; protein id: At2g16120
  misc_feature (1)..(453): NCBI GI NO: 12004316 NR Description: mannitol transporter [Apium graveolens var. dulce]
  misc_feature (4)..(448): NCBI GI NO: 15225426 NR Description: putative sugar transporter; protein id: At2g20780
MGYDTGVMTGAMLFIKEDLKTNDTQVQVLAGILNVCALVGSLTAGRVSDWVGPRRTISLAACIFLAGSVLMGLSPNFGTLLAGRCVAGVGVGYALMIAPVYAAEISSAHIRGSVTSLPEICISFGILIGYVANYLLAKLPLVYGWRAMLGLGALPSAVLAVAVLAMPESPRWLVMQGRVEQAHAVLRRVSDTAGEADVRLAEIKTAAGLADDDDGSPRGVGKGVWKEMFLHPTPPVRRILVAAFGVHFFQHLTGIEAVVLYSPRIFKAAGIATRSEILAATIGVGVTKTVFIMTAILLVDRIGRRPLYLSSLAGIIASLACLGLGLTVVERSVPRHSPTWAMALSIATVFTFIASFSIGVGPITWAYSTEVYPLRLRAQGASVGVAINRVMNAGVSMTFVSLYNAVTIGGAFFLFAGLAVLAAMFFYFLCPETQGRPLEEIEEVFGRGWRARLLSWDEAVVELPMSNTTDGNTKARP

SEQ ID NO: 38697 - protein, 470 aa, Zea mays subsp. mays
  peptide (1)..(470): Ceres Seq. ID no. 12383406
  misc_feature (1)..(438): Pfam Name: and other Pfam Description: Sugar
  misc_feature (1)..(464): NCBI GI NO: 13129489 NR Description: Putative sugar transporter [Oryza sativa]
  misc_feature (1)..(440): NCBI GI NO: 15234491 NR Description: sugar transporter like protein
  misc_feature (1)..(441): NCBI GI NO: 15224183 NR Description: putative sugar transporter; protein id: At2g18480
  misc_feature (1)..(445): NCBI GI NO: 28316433 NR Description: sorbitol transporter [Prunus cerasus]
  misc_feature (1)..(443): NCBI GI NO: 15230212 NR Description: sugar transport, putative; protein id: At3g18830.1
  misc_feature (1)..(439): NCBI GI NO: 16118827 NR Description: putative sugar transporter [Oryza sativa]
  misc_feature (1)..(439): NCBI GI NO: 15226696 NR Description: putative sugar transporter; protein id: At2g16130
  misc_feature (1)..(439): NCBI GI NO: 15226682 NR Description: putative sugar transporter; protein id: At2g16120
  misc_feature (1)..(446): NCBI GI NO: 12004316 NR Description: mannitol transporter [Apium graveolens var. dulce]
  misc_feature (1)..(441): NCBI GI NO: 15225426 NR Description: putative sugar transporter; protein id: At2g20780
MTGAMLFIKEDLKTNDTQVQVLAGILNVCALVGSLTAGRVSDWVGPRRTISLAACIFLAGSVLMGLSPNFGTLLAGRCVAGVGVGYALMIAPVYAAEISSAHIRGSVTSLPEICISFGILIGYVANYLLAKLPLVYGWRAMLGLGALPSAVLAVAVLAMPESPRWLVMQGRVEQAHAVLRRVSDTAGEADVRLAEIKTAAGLADDDDGSPRGVGKGVWKEMFLHPTPPVRRILVAAFGVHFFQHLTGIEAVVLYSPRIFKAAGIATRSEILAATIGVGVTKTVFIMTAILLVDRIGRRPLYLSSLAGIIASLACLGLGLTVVERSVPRHSPTWAMALSIATVFTFIASFSIGVGPITWAYSTEVYPLRLRAQGASVGVAINRVMNAGVSMTFVSLYNAVTIGGAFFLFAGLAVLAAMFFYFLCPETQGRPLEEIEEVFGRGWRARLLSWDEAVVELPMSNTTDGNTKARP

SEQ ID NO: 38698 - DNA, 1264 bp, Zea mays subsp. mays
  misc_feature (1)..(1264): Ceres Seq. ID no. 12358919
acgtgcaagagacgagcgtagtaactgtgagcagctagcacatgcatggcgtcgtcgcagctggtcgtcgtgtgcctgtttgtagcgtcggcggtgactgtgacgatgaacggtggcgcgcaggcgcagccgattgtgccggcgatcatctcattcggcgactccaccgtcgacgtcggcaacaataactacctgccgggcgcggtgttcaaggccgactacgcgccgtacgggcagggcttcgcgcggcacaaggccaccggccgattctccgacggcaagatcgtcaccgacatcaccgccgaaacgctcggcttcgagagctacgcgccgccgtacctcagcccgcaggcgtcggggaagaacctgttcaccggcgccaacttcgcctccgcggcgtccagctactacgacgacacggcggccatgtatgacgcgatcacgctgacccagcagctcaagtactacaaggagtaccagtcgaagctggcggcggtggccgggcgcgctagggctcgcgccatccttggcgacgcgctctacgttgtcagcacgggcaccggcgacttcctccagaactactaccacaacgcctccctgtcccgccgctacgacgtcgaccagtacaccgacctcctcgtcggcatcttctccggcttcgccaacgagctgtacaggttgggggcgcggcggatcggcgtcacttccatgccgccgctgggctgcctgccggcgtccatcaggctgtacggcgacggcaagggagcgtgcgtgccgaggctcaaccgcgacgccgagaccttcaacgccaagctgaacccaccgtcagggcgctcaagcggcggcacgccgacctcaagctcgccatcctcgacatctacacgcccctccgcaaactcgcacaagaccccgcggcttacggcttcgccgacgctagagggacgtgctgccggacggggacggccaagacgagggtgtacctctgcaacccgacgacggccgggacgtgccggaacgccagcagctacgtgttcttcgacgccgtccacccgtctgaggctgccaacgtcttcatcgcggagtccacggtcgacgcgggcatcgagctggtcacctagctagtaggaataaaggagacgacacacatctgcagatctgctcacatgtttccggctccatcgaaacagaactacgtacagtgtctggaatattaatatatagccagtgaaattaaaaattgcaccgtcggccctgcccttttcgc

SEQ ID NO: 38699 - protein, 358 aa, Zea mays subsp. mays
  peptide (1)..(358): Ceres Seq. ID no. 12358920
  misc_feature (34)..(263): Pfam Name: Pfam Description:  GDSL-like Lipase/Acylhydrolase
  misc_feature (11)..(263): NCBI GI NO: 15228189 NR Description: putative APG protein; protein id: At3g16370
  misc_feature (35)..(263): NCBI GI NO: 2062167 NR Description: Proline-rich protein APG isolog
  misc_feature (5)..(269): NCBI GI NO: 15237531 NR Description: putative protein; protein id: At5g03820.1
  misc_feature (9)..(258): NCBI GI NO: 10638955 NR Description: putative proline-rich protein APG isolog
  misc_feature (1)..(261): NCBI GI NO: 13174242 NR Description: putative proline-rich protein [Oryza sativa]
  misc_feature (9)..(269): NCBI GI NO: 9758010 NR Description: proline-rich protein APG-like
  misc_feature (38)..(269): NCBI GI NO: 15237528 NR Description: putative protein; protein id: At5g03810.1
  misc_feature (30)..(257): NCBI GI NO: 30693763 NR Description: GDSL-motif lipase/hydrolase protein
  misc_feature (26)..(261): NCBI GI NO: 15237137 NR Description: GDSL-motif lipase/hydrolase-like protein
  misc_feature (1)..(257): NCBI GI NO: 25336283 NR Description: hypothetical protein RXF26
MASSQLVVVCLFVASAVTVTMNGGAQAQPIVPAIISFGDSTVDVGNNNYLPGAVFKADYAPYGQGFARHKATGRFSDGKIVTDITAETLGFESYAPPYLSPQASGKNLFTGANFASAASSYYDDTAAMYDAITLTQQLKYYKEYQSKLAAVAGRARARAILGDALYVVSTGTGDFLQNYYHNASLSRRYDVDQYTDLLVGIFSGFANELYRLGARRIGVTSMPPLGCLPASIRLYGDGKGACVPRLNRDAETFNAKLNPPSGRSSGGTPTSSSPSSTSTRPSANSHKTPRLTASPTLEGRAAGRGRPRRGCTSATRRRPGRAGTPAATCSSTPSTRLRLPTSSSRSPRSTRASSWSPS

SEQ ID NO: 38700 - protein, 338 aa, Zea mays subsp. mays
  peptide (1)..(338): Ceres Seq. ID no. 12358921
  misc_feature (14)..(243): Pfam Name: Pfam Description:  GDSL-like Lipase/Acylhydrolase
  misc_feature (1)..(243): NCBI GI NO: 15228189 NR Description: putative APG protein; protein id: At3g16370
  misc_feature (15)..(243): NCBI GI NO: 2062167 NR Description: Proline-rich protein APG isolog
  misc_feature (1)..(249): NCBI GI NO: 15237531 NR Description: putative protein; protein id: At5g03820.1
  misc_feature (1)..(238): NCBI GI NO: 10638955 NR Description: putative proline-rich protein APG isolog
  misc_feature (1)..(241): NCBI GI NO: 13174242 NR Description: putative proline-rich protein [Oryza sativa]
  misc_feature (1)..(249): NCBI GI NO: 9758010 NR Description: proline-rich protein APG-like
  misc_feature (18)..(249): NCBI GI NO: 15237528 NR Description: putative protein; protein id: At5g03810.1
  misc_feature (10)..(237): NCBI GI NO: 30693763 NR Description: GDSL-motif lipase/hydrolase protein
  misc_feature (6)..(241): NCBI GI NO: 15237137 NR Description: GDSL-motif lipase/hydrolase-like protein
  misc_feature (1)..(237): NCBI GI NO: 25336283 NR Description: hypothetical protein RXF26
MNGGAQAQPIVPAIISFGDSTVDVGNNNYLPGAVFKADYAPYGQGFARHKATGRFSDGKIVTDITAETLGFESYAPPYLSPQASGKNLFTGANFASAASSYYDDTAAMYDAITLTQQLKYYKEYQSKLAAVAGRARARAILGDALYVVSTGTGDFLQNYYHNASLSRRYDVDQYTDLLVGIFSGFANELYRLGARRIGVTSMPPLGCLPASIRLYGDGKGACVPRLNRDAETFNAKLNPPSGRSSGGTPTSSSPSSTSTRPSANSHKTPRLTASPTLEGRAAGRGRPRRGCTSATRRRPGRAGTPAATCSSTPSTRLRLPTSSSRSPRSTRASSWSPS

SEQ ID NO: 38701 - protein, 231 aa, Zea mays subsp. mays
  peptide (1)..(231): Ceres Seq. ID no. 12358922
  misc_feature (1)..(136): Pfam Name: Pfam Description:  GDSL-like Lipase/Acylhydrolase
  misc_feature (1)..(136): NCBI GI NO: 15228189 NR Description: putative APG protein; protein id: At3g16370
  misc_feature (1)..(136): NCBI GI NO: 2062167 NR Description: Proline-rich protein APG isolog
  misc_feature (1)..(142): NCBI GI NO: 15237531 NR Description: putative protein; protein id: At5g03820.1
  misc_feature (1)..(131): NCBI GI NO: 10638955 NR Description: putative proline-rich protein APG isolog
  misc_feature (1)..(134): NCBI GI NO: 13174242 NR Description: putative proline-rich protein [Oryza sativa]
  misc_feature (1)..(142): NCBI GI NO: 9758010 NR Description: proline-rich protein APG-like
  misc_feature (1)..(142): NCBI GI NO: 15237528 NR Description: putative protein; protein id: At5g03810.1
  misc_feature (1)..(130): NCBI GI NO: 30693763 NR Description: GDSL-motif lipase/hydrolase protein
  misc_feature (1)..(134): NCBI GI NO: 15237137 NR Description: GDSL-motif lipase/hydrolase-like protein
  misc_feature (1)..(130): NCBI GI NO: 25336283 NR Description: hypothetical protein RXF26
MYDAITLTQQLKYYKEYQSKLAAVAGRARARAILGDALYVVSTGTGDFLQNYYHNASLSRRYDVDQYTDLLVGIFSGFANELYRLGARRIGVTSMPPLGCLPASIRLYGDGKGACVPRLNRDAETFNAKLNPPSGRSSGGTPTSSSPSSTSTRPSANSHKTPRLTASPTLEGRAAGRGRPRRGCTSATRRRPGRAGTPAATCSSTPSTRLRLPTSSSRSPRSTRASSWSPS

SEQ ID NO: 38702 - DNA, 496 bp, Zea mays subsp. mays
  misc_feature (1)..(496): Ceres Seq. ID no. 1668035
aagagaccggccggacgatggcagcagagcgcgaccgcgagcgatggatcctgcccgacgcgacggcgctggtcaccggcgggagcaaggggatcgggcacgcgatcgtggaggagctggcggcgctgggcgcgcgcgtgcacacgtgctcccgcaacgccgcggagctggaggagtgccgccggaggtgggcagagaagggcggcggccgcctgctgcagcaggtgaccgtctccgtctgcgacgtcgccgtgcgcgccgacagggaggcgctcatggccaccgtcagggacgtcttcggcgtcaagctggacatcctcgtgaataacgcggcgcaggtggtcttcaagccggcggtggagtgcaccggggaggagtacgcgcggatcatggcgaccaacctggagtcctgcttccacctcagccagctcgcgcacccgctgctccgcaacgcctccctcgccggcggcgggagcgttgtgcacatctcctccac

SEQ ID NO: 38703 - protein, 108 aa, Zea mays subsp. mays
  peptide (1)..(108): Ceres Seq. ID no. 1668036
RDRPDDGSRARPRAMDPARRDGAGHRREQGDRARDRGGAGGAGRARAHVLPQRRGAGGVPPEVGREGRRPPAAAGDRLRLRRRRARRQGGAHGHRQGRLRRQAGHPRE

SEQ ID NO: 38704 - protein, 164 aa, Zea mays subsp. mays
  peptide (1)..(164): Ceres Seq. ID no. 1668037
  misc_feature (6)..(163): NCBI GI NO: 34907124 NR Description: putative short chain alcohol dehydrogenase
  misc_feature (5)..(163): NCBI GI NO: 34907122 NR Description: putative short chain alcohol dehydrogenase
  misc_feature (10)..(163): NCBI GI NO: 15227040 NR Description: putative tropinone reductase; protein id:At2g29150
  misc_feature (10)..(163): NCBI GI NO: 15227043 NR Description: putative tropinone reductase; protein id:At2g29170
  misc_feature (1)..(163): NCBI GI NO: 15227076 NR Description: putative tropinone reductase; protein id:At2g29360
  misc_feature (1)..(163): NCBI GI NO: 21554716 NR Description: putative tropinone reductase
  misc_feature (7)..(163): NCBI GI NO: 38344716 NR Description: OSJNBb0115I09.20
  misc_feature (2)..(163): NCBI GI NO: 25406975 NR Description: protein F22G5.20 [imported] - Arabidopsis thaliana
  misc_feature (10)..(163): NCBI GI NO: 25283134 NR Description: probable tropinone reductase
  misc_feature (11)..(163): NCBI GI NO: 15227075 NR Description: putative tropinone reductase; protein id:At2g29350
ETGRTMAAERDRERWILPDATALVTGGSKGIGHAIVEELAALGARVHTCSRNAAELEECRRRWAEKGGGRLLQQVTVSVCDVAVRADREALMATVRDVFGVKLDILVNNAAQVVFKPAVECTGEEYARIMATNLESCFHLSQLAHPLLRNASLAGGGSVVHISS

SEQ ID NO: 38705 - protein, 159 aa, Zea mays subsp. mays
  peptide (1)..(159): Ceres Seq. ID no. 1668038
  misc_feature (1)..(158): NCBI GI NO: 34907124 NR Description: putative short chain alcohol dehydrogenase
  misc_feature (1)..(158): NCBI GI NO: 34907122 NR Description: putative short chain alcohol dehydrogenase
  misc_feature (5)..(158): NCBI GI NO: 15227040 NR Description: putative tropinone reductase; protein id:At2g29150
  misc_feature (5)..(158): NCBI GI NO: 15227043 NR Description: putative tropinone reductase; protein id:At2g29170
  misc_feature (1)..(158): NCBI GI NO: 15227076 NR Description: putative tropinone reductase; protein id:At2g29360
  misc_feature (1)..(158): NCBI GI NO: 21554716 NR Description: putative tropinone reductase
  misc_feature (2)..(158): NCBI GI NO: 38344716 NR Description: OSJNBb0115I09.20
  misc_feature (1)..(158): NCBI GI NO: 25406975 NR Description: protein F22G5.20 [imported] - Arabidopsis thaliana
  misc_feature (5)..(158): NCBI GI NO: 25283134 NR Description: probable tropinone reductase
  misc_feature (6)..(158): NCBI GI NO: 15227075 NR Description: putative tropinone reductase; protein id:At2g29350
MAAERDRERWILPDATALVTGGSKGIGHAIVEELAALGARVHTCSRNAAELEECRRRWAEKGGGRLLQQVTVSVCDVAVRADREALMATVRDVFGVKLDILVNNAAQVVFKPAVECTGEEYARIMATNLESCFHLSQLAHPLLRNASLAGGGSVVHISS

SEQ ID NO: 38706 - DNA, 501 bp, Zea mays subsp. mays
  misc_feature (1)..(501): Ceres Seq. ID no. 12637773
accctctagaagcctccgggtcgctcggtgtgggttgctaactactcgcagcagccagaggccagatccagccgccaaccccccaaacaaaaccctaggccaccattctgaccaccaggcacaagcagagcagaagcagacatggccaccattccgaccaccgattctggcctcgtcctcagttcctccgctctcctccggaggactaggagggccgcctcatccgtcaccgccaggctgccagccgtcgcccgccgtcgcccgcagctcctcgtgcgtgcctccgccaaggagatcgcctttgaccagggctccagagccgcccttcaggccggcgtcgagaagctcgccgccgcggtcggcgtcaccctcggacccagaggaaggaatgttgtcttggatgagtttggaacccccaaagtggtcaatgatggagttaccattgcccgcgctattgagcttgctgatcccatggagaatgctggtgcttcttgattcgtg

SEQ ID NO: 38707 - protein, 166 aa, Zea mays subsp. mays
  peptide (1)..(166): Ceres Seq. ID no. 13624342
  misc_feature (49)..(126): Pfam Name: Pfam Description:  Extensin-like region
PSRSLRVARCGLLTTRSSQRPDPAANPPNKTLGHHSDHQAQAEQKQTWPPFRPPILASSSVPPLSSGGLGGPPHPSPPGCQPSPAVARSSSCVPPPRRSPLTRAPEPPFRPASRSSPPRSASPSDPEEGMLSWMSLEPPKWSMMELPLPALLSLLIPWRMLVLLDS

SEQ ID NO: 38708 - protein, 117 aa, Zea mays subsp. mays
  peptide (1)..(117): Ceres Seq. ID no. 13624343
  misc_feature (1)..(117): NCBI GI NO: 29367489 NR Description: putative chaperonin 60 alpha subunit
  misc_feature (13)..(117): NCBI GI NO: 1710807 NR Description: RuBisCO subunit binding-protein alpha subunit
  misc_feature (13)..(117): NCBI GI NO: 3790441 NR Description: chaperonin 60 alpha subunit [Canavalia lineata]
  misc_feature (47)..(117): NCBI GI NO: 134102 NR Description: RuBisCO subunit binding-protein alpha subunit
  misc_feature (1)..(117): NCBI GI NO: 464727 NR Description: RuBisCO subunit binding-protein alpha subunit
  misc_feature (45)..(117): NCBI GI NO: 99801 NR Description: chaperonine 60K alpha chain - rape (fragment)
  misc_feature (45)..(117): NCBI GI NO: 1351030 NR Description: RuBisCO subunit binding-protein alpha subunit
  misc_feature (40)..(117): NCBI GI NO: 10697184 NR Description: chaperonin-60 alpha subunit [Avicennia marina]
  misc_feature (45)..(117): NCBI GI NO: 15226314 NR Description: putative rubisco subunit binding-protein alphasubunit
  misc_feature (45)..(117): NCBI GI NO: 21554572 NR Description: putative rubisco subunit binding-protein alphasubunit
MATIPTTDSGLVLSSSALLRRTRRAASSVTARLPAVARRRPQLLVRASAKEIAFDQGSRAALQAGVEKLAAAVGVTLGPRGRNVVLDEFGTPKVVNDGVTIARAIELADPMENAGAS

SEQ ID NO: 38709 - DNA, 1467 bp, Zea mays subsp. mays
  misc_feature (1)..(1467): Ceres Seq. ID no. 12383439
gcagctccgcacaggtccctggcacagggcgaggcactgtcacgcacggaatcgagcaatcgatcacacagagacacaggtcaggagcaggagctcgaggtgtcgccgcgcggcagcagcttgggactcgggacagccatggggaagggccgggcaccgtgctgcgccaaggtggggctcaacaagggctcctggacgccggaggaggacatgcgcctcgtcgcctacattcagaagtacggccacgccaactggcgcgccctgcccaagcaagcaggtttgctgcggtgcgggaagagctgccgtctgcggtggatcaactacctgcgcccggacctcaagcgcggcaacttcaccgccgaggaggaggaggccatcatcaagctccacggcttgctcgggaacaagtggtccaagatcgcgtcgtgcctgccgggccggacggacaacgagatcaagaacgtctggaacacgcacctgaagaagcgggtatcgccgtccggcggggaggaggagcacggcgccgccgggtccaacaagaacaagaagaagaagaagaaagccgctggcggcgccgaggagccgctcccgtcaccgactccgtctccgtcgccgtcctcgtccaccaccacgacggccaactgctccagcggcgactccggcgagcagcagagcaacaccagcaaggaggcggacgacgagcagctggacctggagaacctcgagatgatgcccatgctggacgacgacccaataaccttcggcttcgacatgctggtggaccccgtgccagcgccgtacggcccggccgtgtccgcgtccgcgtccagacccacgtcgccctgcgcctcgtccacgtccccacctccgcccgcgggctgcggcccgctcggcgtggacgacctgctggtgctgccagagatcgacatcgaccaggagctgtggagcatcatcgacggcgacggcggcggcgacggaggaggctccgcttgcgccgtgtctgccgagacatcggcgccgtgctgccagagcaatgcgccggagccgacgacgaacggcgcctgcgcgaccagccaccacggagcggcggaggaggagggaaaggagtggtggttggaggacctggagagggagttgggcctgtggggccccgtggacgtggaggactaccagtaccagtacccaacgggcccacatggtctggtggctgaccacacggacccgcttcctgccatggtggacgacccggtgtcctgctacttccaagcgggccccgcctccgcagtgctccaggaacccgggtactcggtgactagtggtagcaacctgatggggttgtgagatttatcgtcgtcgtcgtcgtcgtttttttttgtgatttttttttagatagcagaacagaaatcctgaacaaacggatcgtactatgcctggcaaaccatcggcgccagcatactacttgcttgc
